United States Patent Application Publication US 2018/0126003 A1 - sequence listing, part 122

SEQ ID NO: 213874 - DNA, 4125 bp, Artificial Sequence
  derived and/or modified sequence
atggacttctccttctccttcatgcagggcatcatgggcaacaccatccagcagcccccccagctgattgattctgccaacatccggcaggaggatgcctttgacaacaacagcgacattgctgaagatggcggccagaccccctatgaggccaccctgcagcagggcttccagtacccagccaccacagaggacctgccccccctgcccccacctcctccttctgtgccccagaccgtcatccccaagaagacaggcagccctgagatcaagctgaagatcaccaagaccatccagaatggccgggagctgtttgagagcagcctgtgtggggacctgctgaatgaggtgcaggccagcgagcacaccaagagcaagcatgagagcaggaaggagaagaggaagaagagcaacaagcatgacagcagccgctctgaggagaggaagagccacaagatccccaagctggagcctgaggagcagaaccggcccaatgaaagagtggacacagtgtctgagaagccccgggaggagcctgtgctgaaggaggaggcccctgtgcagcccatcctgagctctgtgcccaccacagaggtgtccactggagtgaagttccaggtgggggacctggtgtggagcaaggtgggcacctacccctggtggccctgcatggtgtccagtgacccccagctggaggtgcacaccaagatcaacaccaggggggcccgggagtaccacgtgcagttcttcagcaaccagcctgagcgggcctgggtgcatgagaagagggtgcgggagtacaagggccacaagcagtatgaggagctgctggccgaggccaccaagcaggccagcaaccacagcgagaagcagaagatcaggaagccccggccccagcgggagcgggcccagtgggacattggaattgcccacgccgagaaggccctgaagatgacccgggaggagcgcatcgagcagtacaccttcatctacatcgacaagcagcctgaggaggccctgagccaggccaagaagtctgtggccagcaagacagaggtgaagaagacccggcggcccaggtctgtgctgaacacccagcctgagcagaccaatgctggggaggtggccagcagcctgagcagcacagagatcagaagacacagccagaggaggcacaccagcgctgaggaggaggagcccccacctgtgaagatcgcctggaagacagctgctgccaggaagagcctgcctgccagcatcaccatgcacaagggcagcctggacctgcagaagtgcaacatgagccctgtggtgaagattgagcaggtgtttgccctgcagaatgccactggagatggcaagttcatcgaccagtttgtgtacagcaccaagggcatcggcaacaagacagagatctctgtgcggggccaggacaggctcatcatcagcacccccaaccagagaaatgagaagcccacccagagcgtgagcagccctgaggccaccagcggcagcacaggctctgtggagaagaagcagcagaggaggagcatccgcaccaggtctgagagcgagaagagcacagaggtggtgcccaagaagaagatcaagaaggagcaggtggagaccgtgccccaggccaccgtgaagacaggcctgcagaagggggccagcgagatcagtgacagctgcaagcccctgaagaagaggagccgggccagcacagatgtggagatgaccagcagcgcctacagagacaccagtgacagcgacagccggggcctgagtgacctgcaggtgggctttgggaagcaggtggacagccccagcgccacagcagatgctgatgtgtctgatgtgcagagcatggacagcagcctgagcagaagaggcaccggcatgagcaagaaggacacagtgtgccagatctgtgagagcagcggggacagcctcatcccctgtgaaggagagtgctgcaagcacttccacctggagtgcctgggcctggccagcctgcctgacagcaagttcatctgcatggagtgcaagacaggccagcacccctgcttcagctgcaaggtgtctgggaaggatgtgaagcgctgcagcgtgggcgcctgtgggaagttctaccacgaggcctgtgtgaggaagttccccacagccatctttgagagcaagggcttccgctgcccccagcactgctgcagcgcctgcagcatggagaaggacatccacaaggccagcaagggccgcatgatgcgctgcctgcgctgccctgtggcctaccacagcggagatgcctgcatcgccgccggctccatgctggtgtcctcctacatcctgatctgcagcaaccacagcaagaggagcagcaacagcagcgctgtgaatgtgggcttctgctttgtgtgtgcccggggcctcatcgtgcaggaccacagcgaccccatgttcagcagctatgcctacaagagccactacctgctgaatgaaagcaacagagctgagctgatgaagctgcccatgatccccagcagcagcgccagcaagaagaagtgtgagaagggcggccgcctgctgtgctgtgagagctgcccagccagcttccacccagaatgtctgagcattgagatgcctgagggctgctggaactgcaatgactgcaaggccggcaagaagctgcactacaagcagatcgtgtgggtgaagctgggcaactaccgctggtggccagctgagatctgcaaccccaggtctgtgcccctgaacatccagggcctgaagcatgacctgggggacttccctgtgttcttcttcggcagccatgactactactgggtgcaccagggccgggtcttcccctacgtggagggggacaagagctttgctgagggccagaccagcatcaacaagaccttcaagaaggccctggaggaggccgccaagcgcttccaggagctgaaggcccagcgggagagcaaggaggccctggagattgagaagaacagcaggaagcccccaccctacaagcacatcaaggccaacaaggtgattggcaaggtgcagatccaggtggccgacctgtctgagatcccccgctgcaactgcaagccagcagatgagaacccctgtggcctggagagcgagtgcctgaacaggatgctgcagtatgagtgccacccccaggtgtgcccagctggggaccgctgccagaaccagtgcttcaccaagaggctgtacccagatgctgagatcatcaagacagaaagaagaggctggggcctgcggaccaagaggagcatcaagaagggggagtttgtgaatgaatatgtgggggagctgattgatgaggaggagtgccgcctgcgcatcaagagggcccacgagaacagcgtgaccaacttctacatgctgactgtgaccaaggaccgcatcattgatgctggccccaagggcaactacagccgcttcatgaaccacagctgcaaccccaactgtgagacccagaagtggacagtgaatggagatgtgcgggtgggcctgtttgccctgtgtgacatcccagctggcatggagctgaccttcaactacaacctggactgcctgggcaatggaagaacagagtgccactgtggggctgacaactgcagcggcttcctgggcgtgcggcccaagagcgcctgtgccagcaccaatgaggagaaggccaagaatgccaagctgaagcagaagaggaggaagatcaagacagagcccaagcagatgcatgaggactactgcttccagtgtggagatggaggagagctggtgatgtgtgacaagaaggactgccccaaggcctaccacctgctgtgcctgaacctgacccagcccccctacggcaagtgggagtgcccctggcaccagtgtgatgagtgcagcagcgctgctgtgtccttctgtgagttctgcccccacagcttctgcaaggaccacgagaagggggccctggtgcccagcgccctggagggccgcctgtgctgcagcgagcatgaccccatggcccctgtgtccccagagtactggagcaagatcaagtgcaagtgggagagccaggaccacggggaggaggtgaaggagtag

SEQ ID NO: 213875 - DNA, 4314 bp, Artificial Sequence
  derived and/or modified sequence
atggacttcagcttcagcttcatgcagggcatcatgggcaacaccattcagcagcctcctcagctcattgactccgccaatattaggcaggaggacgcctttgacaataactcagatatagcagaagatgggggtcagacaccctatgaagcaacattgcaacagggatttcagtatccagctaccaccgaagacctccctccattgactaacgggtatccctcctccattagtgtgtacgaaactcagactaagtaccagtcttacaaccagtatcctaatggaagcgctaatggtttcggggccgtccggaatttttctcccactgactactaccacagtgaaatacccaatacacggccccacgagattctcgaaaagccttcccccccccagccccccccccctcccagcgtcccccagacagtcatcccaaaaaagacagggtcgcccgagattaagttgaaaatcacaaaaacgatccagaacggccgcgagttgtttgagtcaagtttgtgtggagatctgcttaatgaggtgcaggcctcagagcacacaaaaagtaagcacgagagccgcaaggaaaaacggaagaaaagcaacaagcacgacagttcccggtccgaggaaaggaagtcccataaaatcccgaaactcgagcctgaggagcagaaccggcccaacgagagggtcgatactgtgtccgagaaaccacgagaggaacccgtcctcaaggaagaggctcctgtacagcccattttgtcttccgtcccaactacagaggtgagcaccggcgtcaaattccaggtgggggatttggtgtggtccaaggttggaacctacccttggtggccatgtatggtatccagtgacccacagctcgaggtccatacaaagatcaatacacggggagcacgggaataccacgttcaatttttttctaatcaacctgagagagcttgggttcatgagaaacgcgtgagggagtataaaggacataagcagtacgaagagttgctggctgaagctacgaaacaagccagcaaccacagcgaaaagcaaaaaattaggaagccacggcctcagcgggagagggctcaatgggatatcggaattgcccatgcagagaaggctttaaaaatgacccgggaggagcggattgaacaatacaccttcatctacatcgacaaacagcctgaagaggctctgtcccaagccaagaagagcgtggcctccaaaaccgaagtcaaaaaaacccggaggccccggtccgttcttaatactcaacctgagcagacaaacgcaggagaagtagcgtcgagtctctcctccaccgagattcggcgacattcacaaagacggcacacaagtgccgaagaagaggaaccacctccggtaaagatcgcctggaagaccgccgctgctcggaaatccctaccagccagtattacgatgcacaagggttctctcgacctgcagaagtgtaacatgtctcctgtggtcaaaattgagcaggtctttgcactgcagaatgccacaggggacggcaaatttatcgatcagtttgtgtatagcactaaaggcattggcaacaaaacagaaattagcgtgcggggccaggacaggctgatcattagcacaccaaaccagcggaatgaaaagccgactcagtcggtgagctcacccgaagccacaagcggcagcacaggcagcgttgagaaaaaacagcagcggcgatccatcagaacaagatctgaaagtgaaaagagcacagaggtggtgccgaaaaagaaaattaagaaagagcaggtcgagacggttcctcaggccaccgtgaagaccggcctgcagaagggggcttctgaaattagcgatagctgcaaaccactgaagaagaggtcccgggcctcaaccgacgtggaaatgacgagttcggcatatcgcgataccagcgatagcgactcacgaggcctgtccgatttgcaggttggctttggaaaacaggtggatagtccctctgccacagctgatgctgatgtgtccgacgtgcagtctatggacagcagtttgtctagacggggtaccggaatgtctaagaaggataccgtatgtcagatttgtgagtcaagcggagatagcctcataccgtgtgagggcgagtgttgcaagcatttccacctggagtgcttagggctcgcctccttgccagattcgaagttcatctgtatggaatgtaagaccgggcagcacccatgtttcagttgtaaggtgtcgggaaaagatgttaagagatgtagtgtgggggcttgcggaaagttttaccacgaggcatgcgtgcgtaaatttcctaccgcaatattcgagtctaaaggattccgctgcccacaacactgttgttctgcgtgcagcatggagaaggatatccataaagcttccaaagggagaatgatgagatgtttaagatgtcccgttgcctatcacagcggggacgcgtgtatcgctgccggatccatgctggtgtcgagctacatcttgatctgttctaaccactccaagcgttcctccaatagctctgcggttaacgtcggattctgcttcgtgtgtgctcggggccttattgttcaggatcattctgatccaatgttctcttcatacgcctataaaagccactacctactcaatgagtccaatcgagctgaacttatgaaacttcctatgattcctagctcgtccgcttccaaaaagaagtgtgagaagggagggcgtctactttgctgtgaatcctgccctgcgagcttccacccggagtgcctgagcatcgaaatgccagaaggctgttggaattgcaacgattgcaaagcaggtaaaaagctccactacaaacaaattgtctgggtcaagctgggaaactatcgatggtggcccgccgagatttgcaaccctagatccgtgccactgaatatccaggggctgaagcatgatttgggagacttcccagtctttttcttcggaagtcatgactactattgggttcatcaggggagagtatttccctacgtggagggtgacaagtcttttgccgaggggcaaacaagcataaacaaaactttcaagaaggcactcgaggaagccgctaaacgctttcaggagttgaaggcacagcgtgagagcaaggaggcactcgagattgagaagaatagccgcaaacctcctccttacaagcatatcaaggccaataaagtcataggaaaagtacagattcaggtggctgatctctcagaaatcccaaggtgcaactgtaaaccagccgacgaaaatccttgcggcctcgaatcagaatgcctgaatcgtatgttgcaatacgaatgccaccctcaggtttgtccagctggtgacagatgtcagaaccagtgttttaccaagcggttatacccagatgcggaaattattaaaacagagcggaggggttgggggctgcggacgaaaagaagcataaaaaagggggaattcgtgaacgagtatgtgggagagctaatcgatgaggaagaatgtcgcttaagaattaaacgggcccacgaaaacagtgtgacaaatttctacatgttaaccgttacaaaagatcgcattatcgacgccggtccaaagggcaactactccagattcatgaaccactcctgcaatcccaactgtgagacgcaaaagtggaccgtcaatggcgatgtacgtgtgggcctgttcgccctctgcgacatacccgcaggcatggagctgacgttcaattacaaccttgattgcctgggtaatggacgcacggagtgtcattgcggagccgacaattgctccggtttcctgggagttcggcccaaaagcgcttgcgcatccaccaacgaagagaaggcaaaaaacgctaagctgaaacaaaagcggcgcaaaataaagacggaacctaaacagatgcatgaggactattgtttccagtgcggtgatgggggagagttggtcatgtgtgataaaaaagattgtccaaaagcgtatcaccttctttgcctaaatttgacacaacccccttacggcaaatgggagtgtccatggcatcagtgcgatgagtgctcaagtgctgccgtgtctttctgcgagttttgcccacatagcttctgcaaggatcacgagaaaggtgcgctggtacccagtgccctagagggtaggctgtgctgtagcgaacacgaccccatggctcccgtgagccctgagtactggtccaagatcaagtgcaaatgggagagccaggaccatggagaagaggtgaaggagtag

SEQ ID NO: 213876 - DNA, 4125 bp, Artificial Sequence
  derived and/or modified sequence
atggacttcagcttcagcttcatgcagggcatcatgggcaacaccatacaacagccaccacagctcatcgactccgccaatattaggcaggaggacgcgttcgacaacaacagtgatatcgccgaagatggaggtcagaccccgtatgaagctactctgcagcagggctttcagtaccccgcaacaaccgaggatttgccacctcttccccctcccccgccatccgtcccgcagaccgttatccctaagaagacgggcagccccgagatcaaattgaaaatcacaaagaccattcagaatggaagggaacttttcgaaagctcactgtgcggagatctgctgaatgaggttcaagcctccgaacacactaagagcaagcatgagagcagaaaggagaaacggaaaaagagcaataagcatgactcgagcagatctgaggagcggaagagtcataaaattccaaaactggagccagaagagcagaacagaccaaatgagagggttgatactgtgtcggagaagcctcgggaagaacctgtcctgaaggaagaagctccggtccaaccaatcctgtctagcgtgccgactactgaagtaagcaccggtgtgaagtttcaagtgggagatctcgtgtggtccaaggtcgggacgtacccatggtggccgtgcatggtgtcttccgacccccagcttgaggtccacacaaagattaacaccagaggggcccgagaatatcatgtgcagttcttttccaatcagcccgagagagcttgggtgcacgaaaaacgcgtgcgggagtataaggggcacaagcagtacgaagagctgctcgccgaagccactaaacaggcctccaaccactcagaaaagcagaaaatcaggaaaccgaggcctcagcgcgagagagcccagtgggatattgggattgcacatgctgagaaggccttgaagatgacgcgcgaggagagaattgaacagtatactttcatttatatcgacaagcagcccgaagaagctctcagtcaggcgaagaaatcagtggcttctaagacagaagtaaaaaagacccgccgacctcggagtgtcctgaacacccagcccgagcagacgaacgcgggggaagttgcgagctctttgtcttcaaccgagattaggcgccatagccagagaaggcacaccagcgcagaggaagaagaacctcctcccgtgaaaatagcctggaagacagctgcagctagaaagagcctacctgcttcgataacgatgcataaagggtcactggatctgcagaagtgtaatatgagtccagtggtcaagattgaacaggtctttgccttgcaaaacgccactggagatgggaaatttattgaccagttcgtttatagtacgaagggcatcgggaataaaacagaaatctccgtgcgcggacaggatagacttattatttccactccgaaccagagaaacgagaagccaacacagtcagtaagcagcccggaagcaacctcaggcagcacaggctcggtcgaaaagaagcagcaaagacggagcattcggacccgctctgaaagtgaaaaatccaccgaggtggttccaaaaaagaagattaagaaagagcaggtggaaacagtcccccaggctacagttaagaccggcttgcagaaaggggcatccgaaatttctgattcctgcaaaccactaaaaaaaaggtcgcgagcctcgacagacgtagagatgaccagctccgcttatagggatacctccgacagcgattccagggggctgtccgatttacaagtagggttcggtaaacaagtggattctcctagtgccaccgccgacgctgatgtctcggacgttcaaagcatggattccagcctgtcgaggcgcgggactggtatgtccaagaaagacacagtgtgtcagatatgcgagagttctggagatagcctgataccatgtgaaggagagtgttgcaaacactttcacctggagtgcctgggcctggcaagtcttcccgacagcaagttcatatgcatggaatgcaaaacaggacagcacccatgttttagttgtaaggtgagcgggaaagacgttaagcgctgcagtgtgggggcctgtggcaagttctaccatgaagcctgtgtccgaaagttccccacagcgattttcgaatccaaagggttcaggtgtccccagcattgctgctctgcctgctccatggaaaaggatattcataaggcttccaagggccgcatgatgcggtgtcttcggtgcccggtcgcataccactcaggagatgcttgtatcgctgccggtagcatgctcgtgtcatcctacatacttatttgtagcaatcatagtaagagaagtagtaattcatctgccgtcaacgttggattctgcttcgtgtgcgcgcgagggctgattgtccaggaccactctgatccgatgtttagctcgtatgcttataaatcacattacttactcaacgagagcaatcgggctgaacttatgaagttgcccatgatccctagctcttcggccagtaagaagaagtgtgagaaaggcggcaggctgctctgctgcgagtcatgccccgcctccttccaccctgagtgtctgtccatcgagatgcccgaaggatgttggaactgtaatgattgtaaagctggcaaaaaactccactataagcagatcgtgtgggttaagcttggcaactaccgttggtggccagcagagatctgtaacccaaggagcgtgcccttgaatattcagggcctcaagcatgacttaggcgacttccctgtgttctttttcggcagccacgactactattgggtccaccaaggtcgggtgttcccctacgtagaaggcgataaatcctttgctgaggggcagaccagtataaataagaccttcaaaaaagcccttgaggaagcagccaagcgctttcaggagctcaaggctcagcgcgaatctaaagaggccctggagattgaaaagaattcccgaaaacctccgccttataagcacatcaaagctaataaagtgatcggtaaggttcagattcaggtggccgatctgagcgagatacctaggtgtaattgtaaaccagccgacgagaacccgtgcggcttggagagtgaatgtttgaaccgtatgttgcaatacgagtgccatcctcaggtgtgtcccgcaggcgatcgttgtcagaatcaatgctttacgaagcggctgtatcccgatgcggagattatcaagaccgagcggcgggggtggggcctgcgcacaaagcgatctatcaagaaaggtgaattcgtcaatgaatatgtcggcgagcttattgacgaggaagaatgccggctgagaatcaagcgggctcacgagaatagcgtgacgaatttctacatgctcactgtgacaaaagacagaatcatcgatgctggtcctaaaggtaattacagccggtttatgaaccactcatgcaatccaaactgtgagacacaaaagtggacagtgaacggagatgtcagagtcggcctgtttgccctttgcgatatcccagcaggtatggagctgactttcaactataacctggactgtttaggcaatggtcgcacagaatgtcactgcggcgctgataactgtagtggctttctgggggtgagacccaagtcagcctgcgccagcacaaatgaggaaaaagctaagaatgctaaactgaagcaaaaacgccgaaaaattaagacagaaccgaagcaaatgcatgaggattattgctttcagtgcggtgatggcggggagctggtcatgtgtgataagaaggattgtccaaaggcctaccatctgctgtgcttaaacctgactcaaccaccctatggaaagtgggagtgcccctggcaccaatgtgatgagtgttcctcagcagcggtgtccttctgtgaattttgccctcattccttctgtaaggaccatgaaaaaggggcccttgtgccgtcagcactcgaggggaggctttgctgctctgagcatgatcccatggcccctgtgtcaccagagtattggtctaagattaaatgtaagtgggagtcccaggaccatggggaggaagtgaaggagtag

SEQ ID NO: 213877 - DNA, 4314 bp, Artificial Sequence
  derived and/or modified sequence
atggacttctcgttcagtttcatgcagggaataatgggcaataccatccagcagccccctcagctaatcgattccgctaacatcagacaagaggacgcatttgacaataatagtgatatcgctgaagacggcggacaaacgccatacgaagctacactgcaacagggcttccaatatccagccaccaccgaggacctgcctccactaactaacgggtaccccagcagcatttctgtgtacgaaacccagacaaaatatcagagctacaaccaataccctaatggctccgcaaatgggtttggcgctgtcaggaatttcagtccaacagattattaccactctgagattccaaatacccgccctcacgaaatcttggagaagccctctccgcctcagccccctccaccccctagcgtgcctcagactgtgattccaaagaaaacaggctccccagagataaagctcaagatcaccaaaaccattcaaaatgggagggaactgtttgagagcagtctgtgtggagacctgctgaacgaggtgcaggcttccgagcacaccaagtccaaacatgaaagtagaaaagaaaaaagaaaaaagtctaataaacatgattcgtcccgtagcgaagaaaggaaatcccacaagatcccaaagcttgaaccagaggagcagaatcgcccaaacgagcgagtggacacagtgagcgagaaacccagggaagagcctgtactgaaagaagaagcccctgtgcagcctatactgtcgagtgtgccgacaactgaagtgtcaacaggagtcaaattccaggtcggtgacctggtttggtcaaaggtgggcacttacccgtggtggccatgtatggtttcctccgacccacagctggaggttcacactaagatcaacaccaggggcgctagagaataccatgtgcaattcttctcaaatcagccagaaagagcttgggtacatgagaagcgcgtaagagaatataaaggacataaacagtacgaagagcttctggcagaggccacaaagcaggcctccaatcactcagagaaacaaaaaatacgaaagccacggcctcagagagagagagcccagtgggatattggaatcgcccacgctgagaaggccctgaagatgacccgcgaagaacgcattgagcagtatacatttatctatattgataaacagcccgaggaagccctgtcgcaggctaagaaatctgtggcctccaaaaccgaagtgaaaaagacacgaaggccgagatcagtgcttaacactcaacccgagcagacaaacgcaggcgaagtggcatcgagcctgtctagcacagaaatccggagacactcccagcggagacatacttctgcagaggaggaggagcccccacctgtcaaaatagcctggaaaaccgccgcagcacggaagagtctgccagcctcaatcaccatgcacaaaggtagtcttgacctgcagaaatgtaacatgagccccgttgtgaaaatcgaacaagtattcgccctgcagaacgcgactggtgatggaaagttcatcgaccaattcgtgtacagtaccaaaggaatcggtaacaagaccgagatctctgtccgcggtcaagatagattgattatctccaccccgaatcagcgtaatgagaaacctacacagtcggtgtcgagccctgaagccacttctggatccacaggctccgttgagaagaaacagcagagacgtagtatccgaacccgaagcgaatccgaaaaaagtacggaggtagtccccaagaaaaagatcaaaaaggagcaagtagaaactgtgcctcaggccacagtcaaaaccggactgcagaagggcgcttccgagattagcgattcctgcaagcctttgaagaagagatctcgggcttccaccgatgttgagatgacatcgtcagcctatagagacacgtccgattccgacagtcgcggtctgagtgatcttcaggtaggttttggcaagcaagtagattcccccagcgcaactgccgacgcagatgtctcagacgtccagtcaatggatagctctctgagccgacggggaacaggaatgtctaaaaaagacaccgtttgccagatctgtgagtcatctggcgactccctcatcccctgcgagggtgagtgctgcaagcatttccatctcgaatgtttgggcttggcctctctgcccgactccaagtttatatgcatggagtgtaagacagggcagcacccttgcttttcctgtaaagtcagtgggaaagatgttaagagatgcagcgtcggagcttgtgggaaattttaccacgaggcatgcgttagaaagttcccaacagcaattttcgaatccaaaggctttcggtgtccccaacattgctgcagcgcatgtagtatggagaaggacatccacaaagcgagcaaaggacgcatgatgagatgtttgcgatgccctgtggcatatcattcgggagacgcctgtatcgcagcgggatctatgctggtttccagctatattcttatctgttctaatcatagtaagcgctcgagtaactcttctgccgtgaacgtcggattctgttttgtgtgtgcaagagggctgatcgtccaggatcactccgatcccatgttcagctcctacgcctacaagtctcactacctgctcaacgagtccaatagggcagaactcatgaagcttcctatgattccttcctcgtcggcgtcaaaaaagaagtgcgagaaagggggtcggttgctgtgttgcgagtcctgtcctgcctcattccacccagaatgcctgtccatcgaaatgcctgagggctgttggaactgtaatgactgcaaagcaggaaagaaactccactataagcagatagtctgggttaaacttggtaactatagatggtggccagcagagatctgtaatccccgtagcgtgcctctgaacattcaagggctgaagcacgatctgggcgatttccccgtgtttttttttggctctcacgattactattgggtccaccaagggagagtgttcccctacgtggagggcgataaatccttcgcagaggggcagaccagcatcaataaaacctttaaaaaggcccttgaggaggcggctaaaagatttcaggaactaaaagcccagagagaatccaaggaggccctggagattgaaaaaaactctcggaagcctcccccatacaagcatatcaaagcaaacaaagtgattggtaaagtgcagattcaagttgccgacctgtctgaaatcccgcgttgtaattgtaagcccgcagacgaaaatccctgtggactggaaagcgaatgtttgaacagaatgctgcaatatgagtgccacccccaggtttgccctgccggagaccgctgtcagaaccaatgctttacaaagcggttgtatcccgacgcagagattatcaagaccgagaggagaggatggggtttgcgaaccaagcggagtattaagaaaggggaattcgtgaacgagtacgtgggcgaactgatagatgaagaagagtgccgcctgagaatcaaacgcgctcacgagaacagtgtcactaacttctatatgctcaccgtgactaaggaccgtataatcgatgccggaccaaagggaaattattctagattcatgaaccacagctgtaatcctaactgcgaaactcagaagtggaccgtcaacggagatgtgcgcgtgggccttttcgcattgtgcgatattcccgctggaatggaactcacttttaactataacctagattgcctgggtaacgggagaacagaatgtcactgtggtgccgataattgctcaggcttcctaggggttcggccaaagtcagcctgtgcctcaacaaatgaagagaaggccaaaaacgctaagctgaaacagaagcgcagaaaaataaaaactgaacccaagcagatgcacgaagactattgtttccagtgtggggacggcggagaactcgttatgtgtgataaaaaagactgtcctaaggcttaccaccttttgtgtctgaacctgactcagcccccttatggaaaatgggagtgtccgtggcatcaatgcgatgaatgcagcagtgccgctgtgtcgttttgtgaattctgtcctcattccttctgcaaggaccatgaaaagggggcactcgtcccgtctgccctggaagggagactctgctgcagtgagcatgaccccatggcaccagtgtctcctgaatattggagcaaaataaagtgtaagtgggaatcacaggatcacggcgaagaagtaaaagagtag

SEQ ID NO: 213878 - DNA, 4125 bp, Artificial Sequence
  derived and/or modified sequence
atggatttcagctttagctttatgcaaggaattatgggcaataccattcagcagcccccacagcttattgattctgccaatatccggcaggaggatgccttcgataacaactctgatatcgctgaggatgggggacaaactccctatgaggccacactgcagcagggtttccagtatcccgctactactgaagatttaccacccctacctccaccacctccctccgtccctcaaaccgtgatacccaagaaaaccgggtcacccgagataaagcttaagatcactaaaactattcagaacggaagggagctatttgaaagcagcttgtgcggcgatctgctaaatgaggtgcaggcaagcgagcacactaagtccaagcacgaaagcagaaaagaaaaacgcaaaaaatctaataaacatgacagttcaagatctgaggagagaaagtctcataagattcccaagctggaacctgaagaacagaaccgtccgaacgagagggtggatacagttagcgaaaagccaagggaagaacccgtcttgaaagaggaggctcccgttcaacctatcctcagctcagtgcctacgactgaggtgtctacaggtgtgaaattccaggtaggagatctggtttggagtaaggtcgggacctacccctggtggccctgtatggtcagctccgatccacagctggaagtgcatactaagatcaatacaagaggtgcccgtgagtatcatgttcagttcttctccaatcagccagaaagagcctgggtgcacgagaaacgagttagagagtataagggccacaagcagtacgaggagttactagccgaggccacaaaacaagcaagcaaccacagcgagaaacagaaaattcggaagcccaggccccagagagagcgagctcaatgggatattgggatcgcacacgcggaaaaggccctcaagatgacaagagaggagcggatagagcaatacactttcatctacatcgacaagcagccagaagaagctctatctcaggcgaagaagagtgttgcaagcaaaaccgaggtgaaaaagacccgcagaccccgttctgtcttgaacacacagcccgagcagactaacgccggagaggtcgcaagctccttgtctagcacagagatccggcgacactctcagaggcggcacacgtctgccgaagaagaagaaccaccgccagttaagatcgcctggaagaccgcagcagcccgaaagtcccttccggcttctatcacaatgcacaaagggagtctggaccttcaaaaatgtaacatgagccctgtcgtgaagatcgagcaggtgtttgcgttgcagaatgccacgggggatggtaagtttatagatcagtttgtgtactctaccaaggggatagggaataagactgaaatcagtgtacggggacaggaccgcctcattatctctaccccgaaccagcgcaacgagaaacccacccaaagcgtgtcttcgcctgaagccacgagtggatccaccgggagtgtggagaagaaacagcagcgtcgctcaatccgaacacgttcagaatctgaaaaatctactgaggtcgtgccaaaaaagaagatcaaaaaggaacaggtcgagaccgttccgcaggcaactgtaaaaacagggctccagaagggcgcttctgaaattagtgacagctgtaagccgctcaagaaacgtagccgcgcatcaactgacgtcgaaatgacgagtagcgcttacagagacacctctgacagcgactcacgaggattgtccgatcttcaggtgggcttcggaaaacaggtcgatagtcccagtgccacagcagatgctgacgtgagcgatgtccagtccatggacagctctttaagtagaaggggcactggtatgtccaaaaaggacaccgtgtgtcagatttgcgagagctctggggattccctgatcccttgcgagggcgaatgttgcaaacattttcatctggagtgcctcggactcgctagtcttccagattctaaatttatctgcatggaatgcaagacggggcagcatccctgcttttcctgcaaggtctccgggaaggacgtaaaaaggtgctctgtgggcgcatgcgggaaattttatcatgaggcctgtgtgcggaaattcccaacagccattttcgaaagcaaagggttcaggtgtccacagcactgctgctctgcctgctctatggaaaaggacattcataaagcttcgaagggccgaatgatgagatgcttacgttgtcctgtggcttaccactcgggagacgcctgcattgccgctggcagcatgcttgtgtcttcttatattctcatctgttcgaaccactccaagcgctcctctaactcctctgccgtgaatgtaggcttctgcttcgtgtgcgctagaggactgatcgttcaggatcattcggacccaatgttcagttcttatgcatacaagtcccactatctgttaaacgagtcgaaccgcgctgaactgatgaagcttcctatgataccgtcttccagcgcatctaaaaaaaaatgtgagaaaggcggaagactactgtgctgtgaatcatgtccagcgagttttcatcctgagtgcctcagcattgagatgcctgagggctgttggaattgcaatgactgtaaggctgggaagaagctccactacaaacagattgtatgggtgaagcttggcaattaccgctggtggcccgctgagatctgcaaccccagatctgtgcccttgaatattcaaggcctcaaacatgatctgggggactttcccgtgttcttttttggctctcatgactattactgggtccaccaaggacgggtatttccatacgtggagggcgataagagtttcgctgaaggccagacgtccataaacaagacctttaaaaaagcactggaggaagccgctaagcggtttcaggaactcaaagcacagcgcgaatcaaaagaagctcttgagattgaaaaaaatagccggaaaccgcctccatataagcatatcaaagccaataaggttattggaaaggttcagatacaggttgcagatctatctgagatcccacggtgcaattgcaaacccgcagacgagaacccctgcggcctggagagcgagtgcctgaacaggatgctgcaatacgagtgtcacccgcaggtgtgtcccgcaggagatcgctgtcagaatcagtgttttactaagagactgtatcccgatgctgaaatcattaagacggaacgcaggggatggggcctccgtaccaagcgatctataaaaaagggtgaatttgtcaatgaatacgtgggcgagctcatcgatgaggaggagtgtcgcttgcgcataaaaagagcgcacgaaaactctgttacaaacttctatatgctcacagtgacaaaggaccgcatcatcgacgccggacctaaaggcaactattcacgatttatgaaccactcttgtaatcctaactgcgaaacccagaagtggacagttaacggagacgtaagggttggtctgttcgccttgtgcgacatccccgcagggatggagttaacctttaattacaacctggattgtctgggtaacggcaggacggagtgccactgtggggcagacaattgctcagggtttcttggtgtgcgcccaaagagcgcctgtgcctccaccaatgaggagaaggccaaaaatgccaagttgaaacagaaaagaaggaagattaaaacagagcctaagcagatgcatgaagactattgcttccagtgtggcgatggaggcgaactcgtcatgtgcgataagaaagactgtcctaaagcctatcatctcctgtgtctgaatcttacccaacctccatatggaaagtgggaatgcccctggcaccagtgcgatgagtgcagttccgcagccgtgtctttttgcgagttctgtccccacagtttctgcaaagatcacgaaaaaggcgctcttgtaccatctgcactcgagggcaggctgtgttgtagtgaacatgatccaatggcaccggtgtctcccgaatactggtccaaaattaaatgcaagtgggaatctcaggaccacggagaagaggtaaaggagtag

SEQ ID NO: 213879 - DNA, 5431 bp, Artificial Sequence
  derived and/or modified sequence
gggggctttgtgcgcggcggcggcgggagaggcggcggcggcggccagcacggaggcggaggccgagggggctgtgcacaggtcgccgcggagaggcgtgcgaattccgagccgagcgccgaggaccgtgctacccaggccgggctgccagccgcaggctcctctctggcagcagcggcggcgcggcgacccccgtccctcggcctccccttcccatcccacctcccgagccttcctcttcccgcagcacgcccggcccggcccggccgtggccctcctcagtgccggccgccatggcagaggcgtccggcgcggggaaaatctagcccggggatttcatgcggcctagctcggttccgcctcctcctcgcgcggccccagcggctgcccgcaccccagccccactccgggcctccgtgtctctcctgtgatcgcactgacacggccggggggttagaatggaacaaactgaaggcccgatgagagaaagggaaagttaaggatgctggagcagaacaatggatttctctttctctttcatgcaagggatcatgggaaacacaattcagcaaccacctcaactcattgactccgccaacatccgtcaggaggatgcctttgataacaacagtgacattgctgaagatggtggccagacaccatatgaagctactttgcagcaaggctttcagtacccagctacaacagaagatcttcctccactcacaaatgggtatccatcatcaatcagtgtgtatgaaactcaaaccaaataccagtcatataatcagtatcctaatgggtcagccaatggctttggtgcagttagaaactttagccccactgactattatcattcagaaattccaaacacaagaccacatgaaattctggaaaaaccttcccctccacagccaccacctcctccttcggtaccacaaactgtgattccaaagaagactggctcacctgaaattaaactaaaaataaccaaaactatccagaatggcagggaattgtttgagtcttccctttgtggagaccttttaaatgaagtacaggcaagtgagcacacgaaatcaaagcatgaaagcagaaaagaaaagaggaaaaaaagcaacaagcatgactcatcaagatctgaagagcgcaagtcacacaaaatccccaaattagaaccagaggaacaaaatagaccaaatgagagggttgacactgtatcagaaaaaccaagggaagaaccagtactaaaagaggaagccccagttcagccaatactatcttctgttccaacaacggaagtgtccactggtgttaagtttcaggttggcgatcttgtgtggtccaaggtgggaacctatccttggtggccttgtatggtttcaagtgatccccagcttgaggttcatactaaaattaacacaagaggtgcccgagaatatcatgtccagttttttagcaaccagccagagagggcgtgggttcatgaaaaacgggtacgagagtataaaggtcataaacagtatgaagaattactggctgaggcaaccaaacaagccagcaatcactctgagaaacaaaagattcggaaaccccgacctcagagagaacgtgctcagtgggatattggcattgcccatgcagagaaagcattgaaaatgactcgagaagaaagaatagaacagtatacttttatttacattgataaacagcctgaagaggctttatcccaagcaaaaaagagtgttgcctccaaaaccgaagttaaaaaaacccgacgaccaagatctgtgctgaatactcagccagaacagaccaatgcaggggaggtggcctcctcactctcaagtactgaaattcggagacatagccagaggcggcacacaagtgcggaagaggaagagccaccgcctgttaaaatagcctggaaaactgcggcagcaaggaaatccttaccagcttccattacgatgcacaaagggagcctggatttgcagaagtgtaacatgtctccagttgtgaaaattgaacaagtgtttgctcttcagaatgctacaggggatgggaaatttatcgatcaatttgtttattcaacaaagggaattggtaacaaaacagaaataagtgtcagggggcaagacaggcttataatttctacaccaaaccagagaaatgaaaagccaacgcagagtgtatcatctcctgaagcaacatctggttctacaggctcagtagaaaagaagcaacagagaagatcaattagaactcgttctgaatcagagaaatccactgaggttgtgccaaagaagaagatcaaaaaggagcaggttgaaacagttcctcaggctacagtgaagactggattacagaaaggtgccagcgagatttcagattcctgtaaacctctaaagaaaaggagtcgcgcctcaactgatgtagaaatgactagttcagcatacagagacacatctgactccgattctagaggactgagtgacctgcaggtaggctttggaaagcaagtagatagcccttcagctactgcagatgcagacgtttctgatgtgcagtccatggattcaagtttgtcgagaagaggcactggaatgagtaagaaggacactgtatgtcagatttgtgaaagctctggtgactctctgattccttgtgagggagagtgctgcaaacactttcacctggagtgcctgggattggcatcacttcctgatagcaagttcatctgcatggaatgtaaaactgggcagcacccatgtttttcgtgtaaagtgtctggtaaagatgtgaagcgttgttctgttggtgcttgtgggaaattttatcatgaagcctgtgtccgcaaattccccactgccatctttgaatcaaaaggattccgctgtcctcagcactgctgctctgcctgctctatggagaaagatatccacaaagcaagtaaaggccgcatgatgagatgtttaagatgtccagttgcctatcactctggagatgcttgcattgcggccggaagcatgttagtatcctcctacattctcatctgtagtaatcattccaaacggagcagtaattcttctgctgtaaatgtaggcttttgtttcgtttgtgccagagggctgatagttcaggaccattcagaccccatgttcagttcatatgcctataagtcccactacctactgaatgaatcaaatcgtgctgagttgatgaaattacctatgattccttcttcgtcagcttccaaaaagaaatgtgagaaaggtggaagattgctctgctgtgaatcgtgcccagcttccttccacccggaatgcctaagcatagaaatgccagaaggctgctggaattgtaatgactgtaaagctggcaagaaactacattacaagcagattgtttgggtcaaattgggaaattacagatggtggccagcagagatctgcaaccccaggtctgtgccactgaacatccagggccttaaacatgacttgggggacttccctgtattcttctttggttctcatgactactactgggtacaccagggcagagtgttcccttatgttgaaggagacaaaagctttgctgaagggcagactagtattaacaagaccttcaaaaaggcactggaagaagctgcaaaacgtttccaggaattgaaagcacaaagagaaagtaaagaagccctagagattgaaaaaaactcaagaaaaccccctccctacaaacacatcaaagctaacaaagtaataggaaaggtgcagatccaggttgctgacctgtcagagattccccgctgtaactgcaagccagctgatgaaaacccttgtggcttggaatcggagtgcctgaacagaatgttgcagtatgaatgccacccgcaggtgtgcccagctggagatcgttgtcagaaccagtgctttacaaagagactataccctgatgcagagatcatcaaaacggagcggagaggctggggcctcaggaccaaaaggagcattaagaagggtgaatttgtaaatgaatacgtcggtgaattaattgatgaagaagaatgcagattgcgaatcaagcgagcccacgagaacagtgtaactaatttttatatgttaactgttaccaaggaccgtataattgatgccggcccaaaaggaaattattctcgcttcatgaaccacagttgtaatcccaactgtgaaacacaaaagtggacagtgaatggagatgttcgagtgggactatttgctctctgtgatattcctgcagggatggagttaacatttaattataacctagattgtctgggcaacggcagaacggagtgccactgtggagcagataactgcagtggttttctaggagtgcggccaaagtcggcatgtgcgtcaacaaatgaagagaaggcaaaaaatgctaagttaaaacagaagagacgaaagatcaaaacagaaccaaagcagatgcatgaagattactgttttcaatgtggagatggtggagagctggtcatgtgtgacaaaaaagactgtcccaaagcataccacctcctatgccttaacctgactcagccaccatatggaaagtgggagtgtccgtggcatcagtgcgatgagtgcagcagtgcagctgtttccttctgtgaattctgtccacattcattttgtaaagatcatgaaaagggggccctggttccctctgcactggaaggccgcctctgctgctcggaacatgaccccatggctcctgtgtcaccagaatactggagcaagataaaatgtaaatgggaatcacaagatcatggagaagaagtaaaagaataaatgtgtggtgtcccctcctttctatttaagtgaaaaaagcaaatagatcatgcatttaaaaagaagagactgctacagtgcatacagcctttgccatcggaactgccttattaaagcaaaaatgggaaaccagttcatgcaggcagaagcagttggtggtgtctggtttttgtttgatttggttggtttgggattcttttgtggagggttaaattcccttggtcttttcttgccttttattgtgcttcagtgccattgcagcttgaaaaagaaatgtttttgctgttaaaataagaacaaagagaaaagtaagttttgttaatgagataaatttaaagtctaagatgtgttccttggttgtataaagcaaaagtagccatcattcctttatttattttcatttttaggaatttcaagaagtgtagttcaatagtctaatcaagtgtgtgtgtgttttaagtaggaatctgagaaagccctctaggaaagggtatgataagctttatatacctctttactgagcagtaggtaggctcacttctctttcccttcaaaatgcttttcataggcttagagaagggctctatggaagtattaaa

SEQ ID NO: 213880 - DNA, 4724 bp, Artificial Sequence
  derived and/or modified sequence
atggatttctctttctctttcatgcaagggatcatgggaaacacaattcagcaaccacctcaactcattgactccgccaacatccgtcaggaggatgcctttgataacaacagtgacattgctgaagatggtggccagacaccatatgaagctactttgcagcaaggctttcagtacccagctacaacagaagatcttcctccactcccaccacctcctccttcggtaccacaaactgtgattccaaagaagactggctcacctgaaattaaactaaaaataaccaaaactatccagaatggcagggaattgtttgagtcttccctttgtggagaccttttaaatgaagtacaggcaagtgagcacacgaaatcaaagcatgaaagcagaaaagaaaagaggaaaaaaagcaacaagcatgactcatcaagatctgaagagcgcaagtcacacaaaatccccaaattagaaccagaggaacaaaatagaccaaatgagagggttgacactgtatcagaaaaaccaagggaagaaccagtactaaaagaggaagccccagttcagccaatactatcttctgttccaacaacggaagtgtccactggtgttaagtttcaggttggcgatcttgtgtggtccaaggtgggaacctatccttggtggccttgtatggtttcaagtgatccccagcttgaggttcatactaaaattaacacaagaggtgcccgagaatatcatgtccagttttttagcaaccagccagagagggcgtgggttcatgaaaaacgggtacgagagtataaaggtcataaacagtatgaagaattactggctgaggcaaccaaacaagccagcaatcactctgagaaacaaaagattcggaaaccccgacctcagagagaacgtgctcagtgggatattggcattgcccatgcagagaaagcattgaaaatgactcgagaagaaagaatagaacagtatacttttatttacattgataaacagcctgaagaggctttatcccaagcaaaaaagagtgttgcctccaaaaccgaagttaaaaaaacccgacgaccaagatctgtgctgaatactcagccagaacagaccaatgcaggggaggtggcctcctcactctcaagtactgaaattcggagacatagccagaggcggcacacaagtgcggaagaggaagagccaccgcctgttaaaatagcctggaaaactgcggcagcaaggaaatccttaccagcttccattacgatgcacaaagggagcctggatttgcagaagtgtaacatgtctccagttgtgaaaattgaacaagtgtttgctcttcagaatgctacaggggatgggaaatttatcgatcaatttgtttattcaacaaagggaattggtaacaaaacagaaataagtgtcagggggcaagacaggcttataatttctacaccaaaccagagaaatgaaaagccaacgcagagtgtatcatctcctgaagcaacatctggttctacaggctcagtagaaaagaagcaacagagaagatcaattagaactcgttctgaatcagagaaatccactgaggttgtgccaaagaagaagatcaaaaaggagcaggttgaaacagttcctcaggctacagtgaagactggattacagaaaggtgccagcgagatttcagattcctgtaaacctctaaagaaaaggagtcgcgcctcaactgatgtagaaatgactagttcagcatacagagacacatctgactccgattctagaggactgagtgacctgcaggtaggctttggaaagcaagtagatagcccttcagctactgcagatgcagacgtttctgatgtgcagtccatggattcaagtttgtcgagaagaggcactggaatgagtaagaaggacactgtatgtcagatttgtgaaagctctggtgactctctgattccttgtgagggagagtgctgcaaacactttcacctggagtgcctgggattggcatcacttcctgatagcaagttcatctgcatggaatgtaaaactgggcagcacccatgtttttcgtgtaaagtgtctggtaaagatgtgaagcgttgttctgttggtgcttgtgggaaattttatcatgaagcctgtgtccgcaaattccccactgccatctttgaatcaaaaggattccgctgtcctcagcactgctgctctgcctgctctatggagaaagatatccacaaagcaagtaaaggccgcatgatgagatgtttaagatgtccagttgcctatcactctggagatgcttgcattgcggccggaagcatgttagtatcctcctacattctcatctgtagtaatcattccaaacggagcagtaattcttctgctgtaaatgtaggcttttgtttcgtttgtgccagagggctgatagttcaggaccattcagaccccatgttcagttcatatgcctataagtcccactacctactgaatgaatcaaatcgtgctgagttgatgaaattacctatgattccttcttcgtcagcttccaaaaagaaatgtgagaaaggtggaagattgctctgctgtgaatcgtgcccagcttccttccacccggaatgcctaagcatagaaatgccagaaggctgctggaattgtaatgactgtaaagctggcaagaaactacattacaagcagattgtttgggtcaaattgggaaattacagatggtggccagcagagatctgcaaccccaggtctgtgccactgaacatccagggccttaaacatgacttgggggacttccctgtattcttctttggttctcatgactactactgggtacaccagggcagagtgttcccttatgttgaaggagacaaaagctttgctgaagggcagactagtattaacaagaccttcaaaaaggcactggaagaagctgcaaaacgtttccaggaattgaaagcacaaagagaaagtaaagaagccctagagattgaaaaaaactcaagaaaaccccctccctacaaacacatcaaagctaacaaagtaataggaaaggtgcagatccaggttgctgacctgtcagagattccccgctgtaactgcaagccagctgatgaaaacccttgtggcttggaatcggagtgcctgaacagaatgttgcagtatgaatgccacccgcaggtgtgcccagctggagatcgttgtcagaaccagtgctttacaaagagactataccctgatgcagagatcatcaaaacggagcggagaggctggggcctcaggaccaaaaggagcattaagaagggtgaatttgtaaatgaatacgtcggtgaattaattgatgaagaagaatgcagattgcgaatcaagcgagcccacgagaacagtgtaactaatttttatatgttaactgttaccaaggaccgtataattgatgccggcccaaaaggaaattattctcgcttcatgaaccacagttgtaatcccaactgtgaaacacaaaagtggacagtgaatggagatgttcgagtgggactatttgctctctgtgatattcctgcagggatggagttaacatttaattataacctagattgtctgggcaacggcagaacggagtgccactgtggagcagataactgcagtggttttctaggagtgcggccaaagtcggcatgtgcgtcaacaaatgaagagaaggcaaaaaatgctaagttaaaacagaagagacgaaagatcaaaacagaaccaaagcagatgcatgaagattactgttttcaatgtggagatggtggagagctggtcatgtgtgacaaaaaagactgtcccaaagcataccacctcctatgccttaacctgactcagccaccatatggaaagtgggagtgtccgtggcatcagtgcgatgagtgcagcagtgcagctgtttccttctgtgaattctgtccacattcattttgtaaagatcatgaaaagggggccctggttccctctgcactggaaggccgcctctgctgctcggaacatgaccccatggctcctgtgtcaccagaatactggagcaagataaaatgtaaatgggaatcacaagatcatggagaagaagtaaaagaataaatgtgtggtgtcccctcctttctatttaagtgaaaaaagcaaatagatcatgcatttaaaaagaagagactgctacagtgcatacagcctttgccatcggaactgccttattaaagcaaaaatgggaaaccagttcatgcaggcagaagcagttggtggtgtctggtttttgtttgatttggttggtttgggattcttttgtggagggttaaattcccttggtcttttcttgccttttattgtgcttcagtgccattgcagcttgaaaaagaaatgtttttgctgttaaaataagaacaaagagaaaagtaagttttgttaatgagataaatttaaagtctaagatgtgttccttggttgtataaagcaaaagtagccatcattcctttatttattttcatttttaggaatttcaagaagtgtagttcaatagtctaatcaagtgtgtgtgtgttttaagtaggaatctgagaaagccctctaggaaagggtatgataagctttatatacctctttactgagcagtaggtaggctcacttctctttcccttcaaaatgcttttcataggcttagagaagggctctatggaagtattaaa

SEQ ID NO: 213881 - protein, 2512 aa, Artificial Sequence
  derived and/or modified sequence
MARFGDEMPARYGGGGSGAAAGVVVGSGGGRGAGGSRQGGQPGAQRMYKQSMAQRARTMALYNPIPVRQNCLTVNRSLFLFSEDNVVRKYAKKITEWPPFEYMILATIIANCIVLALEQHLPDDDKTPMSERLDDTEPYFIGIFCFEAGIKIIALGFAFHKGSYLRNGWNVMDFVVVLTGILATVGTEFDLRTLRAVRVLRPLKLVSGIPSLQVVLKSIMKAMIPLLQIGLLLFFAILIFAIIGLEFYMGKFHTTCFEEGTDDIQGESPAPCGTEEPARTCPNGTKCQPYWEGPNNGITQFDNILFAVLTVFQCITMEGWTDLLYNSNDASGNTWNWLYFIPLIIIGSFFMLNLVLGVLSGEFAKERERVENRRAFLKLRRQQQIERELNGYMEWISKAEEVILAEDETDGEQRHPFDGALRRTTIKKSKTDLLNPEEAEDQLADIASVGSPFARASIKSAKLENSTFFHKKERRMRFYIRRMVKTQAFYWTVLSLVALNTLCVAIVHYNQPEWLSDFLYYAEFIFLGLFMSEMFIKMYGLGTRPYFHSSFNCFDCGVIIGSIFEVIWAVIKPGTSFGISVLRALRLLRIFKVTKYWASLRNLVVSLLNSMKSIISLLFLLFLFIVVFALLGMQLFGGQFNFDEGTPPTNFDTFPAAIMTVFQILTGEDWNEVMYDGIKSQGGVQGGMVFSIYFIVLTLFGNYTLLNVFLAIAVDNLANAQELTKVEADEQEEEEAANQKLALQKAKEVAEVSPLSAANMSIAVKEQQKNQKPAKSVWEQRTSEMRKQNLLASREALYNEMDPDERWKAAYTRHLRPDMKTHLDRPLVVDPQENRNNNTNKSRAAEPTVDQRLGQQRAEDFLRKQARYHDRARDPSGSAGLDARRPWAGSQEAELSREGPYGRESDHHAREGSLEQPGFWEGEAERGKAGDPHRRHVHRQGGSRESRSGSPRTGADGEHRRHRAHRRPGEEGPEDKAERRARHREGSRPARGGEGEGEGPDGGERRRRHRHGAPATYEGDARREDKERRHRRRKENQGSGVPVSGPNLSTTRPIQQDLGRQDPPLAEDIDNMKNNKLATAESAAPHGSLGHAGLPQSPAKMGNSTDPGPMLAIPAMATNPQNAASRRTPNNPGNPSNPGPPKTPENSLIVTNPSGTQTNSAKTARKPDHTTVDIPPACPPPLNHTVVQVNKNANPDPLPKKEEEKKEEEEDDRGEDGPKPMPPYSSMFILSTTNPLRRLCHYILNLRYFEMCILMVIAMSSIALAAEDPVQPNAPRNNVLRYFDYVFTGVFTFEMVIKMIDLGLVLHQGAYFRDLWNILDFIVVSGALVAFAFTGNSKGKDINTIKSLRVLRVLRPLKTIKRLPKLKAVFDCVVNSLKNVFNILIVYMLFMFIFAVVAVQLFKGKFFHCTDESKEFEKDCRGKYLLYEKNEVKARDREWKKYEFHYDNVLWALLTLFTVSTGEGWPQVLKHSVDATFENQGPSPGYRMEMSIFYVVYFVVFPFFFVNIFVALIIITFQEQGDKMMEEYSLEKNERACIDFAISAKPLTRHMPQNKQSFQYRMWQFVVSPPFEYTIMAMIALNTIVLMMKFYGASVAYENALRVFNIVFTSLFSLECVLKVMAFGILNYFRDAWNIFDFVTVLGSITDILVTEFGNPNNFINLSFLRLFRAARLIKLLRQGYTIRILLWTFVQSFKALPYVCLLIAMLFFIYAIIGMQVFGNIGIDVEDEDSDEDEFQITEHNNFRTFFQALMLLFRSATGEAWHNIMLSCLSGKPCDKNSGILTRECGNEFAYFYFVSFIFLCSFLMLNLFVAVIMDNFEYLTRDSSILGPHHLDEYVRVWAEYDPAAWGRMPYLDMYQMLRHMSPPLGLGKKCPARVAYKRLLRMDLPVADDNTVHFNSTLMALIRTALDIKIAKGGADKQQMDAELRKEMMAIWPNLSQKTLDLLVTPHKSTDLTVGKIYAAMMIMEYYRQSKAKKLQAMREEQDRTPLMFQRMEPPSPTQEGGPGQNALPSTQLDPGGALMAHESGLKESPSWVTQRAQEMFQKTGTWSPEQGPPTDMPNSQPNSQSVEMREMGRDGYSDSEHYLPMEGQGRAASMPRLPAENQRRRGRPRGNNLSTISDTSPMKRSASVLGPKARRLDDYSLERVPPEENQRHHQRRRDRSHRASERSLGRYTDVDTGLGTDLSMTTQSGDLPSKERDQERGRPKDRKHRQHHHHHHHHHHPPPPDKDRYAQERPDHGRARARDQRWSRSPSEGREHMAHRQGSSSVSGSPAPSTSGTSTPRRGRRQLPQTPSTPRPHVSYSPVIRKAGGSGPPQQQQQQQQQQQQQAVARPGRAATSGPRRYPGPTAEPLAGDRPPTGGHSSGRSPRMERRVPGPARSESPRACRHGGARWPASGPHVSEGPPGPRHHGYYRGSDYDEADGPGSGGGEEAMAGAYDAPPPVRHASSGATGRSPRTPRASGPACASPSRHGRRLPNGYYPAHGLARPRGPGSRKGLHEPYSESDDDWC

SEQ ID NO: 213882 - DNA, 7539 bp, Artificial Sequence
  derived and/or modified sequence
atggctagattcggagacgagatgcccgcacgttatggaggtggaggttccggggccgcagctggcgtggtagtggggtctggcggcggacgcggggccggcggttccagacaaggagggcagcccggggcccagcgcatgtataagcagtcaatggcccagcgcgccaggactatggctctctacaatcctatacctgtgcgacaaaactgcctgactgtcaaccgctcactgttcctgttctccgaggacaacgtggtacgcaagtatgccaagaagatcactgagtggcccccgttcgaatatatgatcctggcgaccatcatagctaattgcattgtgctggccctggagcagcacctccctgacgatgacaaaactccgatgagcgaacggctggatgacaccgaaccgtactttatcggcattttctgcttcgaagctggtataaaaatcattgctcttggatttgcttttcataaggggtcctatcttaggaacggatggaacgtgatggatttcgttgtggttctgacgggcatattagccacagtgggcactgagttcgacttgcgcacactgcgagccgtcagagtccttcgaccattgaagctcgtgtctggcataccgtcgcttcaggtagtcctcaagtcgattatgaaggcaatgatcccactgctgcagatcggcttgttgctcttttttgctatactcatcttcgcaatcattggtcttgagttctatatgggaaagttccacacgacgtgcttcgaggagggtaccgatgacattcaaggggaatctcccgccccatgcggaacagaagagccagctagaacttgcccgaacgggaccaagtgccagccttactgggaagggcccaacaacggcataactcagtttgataatatcctgtttgccgttctgacagtcttccaatgcataacgatggagggctggactgacctcctgtataatagcaacgacgcctccggaaacacctggaattggttgtatttcatcccacttatcataatagggtccttttttatgctgaatctagtgctaggcgttctatccggcgagtttgcaaaagagcgggagagagtcgagaaccggcgggcgtttctcaaactccgccggcagcagcaaatagagcgagagctgaatggatatatggaatggatcagtaaggccgaggaggtgattctggctgaagatgagaccgacggcgaacagaggcatccattcgacggtgctcttaggcgcaccacaatcaaaaagtccaagaccgacctccttaaccctgaggaggcggaagatcagttagccgatatagcctccgtcggcagcccatttgcgcgcgccagcatcaaaagcgccaaactcgagaactctaccttcttccacaaaaaggagcggcgcatgcgcttctacattcgacgcatggtgaagacacaggctttttactggacggtcctctctctggtcgctctgaatacactctgcgtcgccatcgtgcactacaatcaacccgagtggctgagcgatttcctatactacgctgaatttatctttttgggcttattcatgagcgagatgttcatcaaaatgtacgggctgggcactcgaccttacttccactccagcttcaactgtttcgattgtggcgtgatcatcggtagtattttcgaggtgatttgggccgtgatcaagccaggcacctctttcggcatttccgtgttgcgcgctctgcgactgctgcgcatatttaaggtcaccaaatactgggccagcctgcgtaatcttgtggttagtctgttgaactctatgaagagcataatctccctccttttcctgctgttcctgtttatagtcgtgttcgctctattgggtatgcagttgtttggcggtcagttcaatttcgatgagggcaccccccctactaacttcgacacatttccagccgcaattatgactgtctttcagatactgaccggagaggactggaacgaagtcatgtacgacggcattaagtctcagggaggagttcagggcggaatggtcttcagtatctactttattgttctgaccttattcggtaactacacacttctcaacgtttttctggcaattgccgtggataacttggccaacgcccaggaactgacaaaggtggaagcagacgaacaagaagaagaggaggcagccaatcagaagctggcgttgcagaaagctaaagaggttgctgaggtttctcctctgagtgcagctaacatgagtatcgcagtcaaagaacagcagaagaaccagaagcccgctaaatcagtttgggagcagaggacttccgagatgcgcaaacagaatctgctggcatcacgggaagctttatataacgagatggacccagacgagcggtggaaggccgcctacactagacatctgaggccagacatgaagacccatctcgaccgtccactcgtcgtcgaccctcaggagaacaggaataacaacactaataaaagccgagccgccgagccaaccgtggatcaacgactgggacaacagcgcgctgaggatttcctgcgtaagcaggccagatatcacgatagagctcgggatccaagtgggtccgccggtctcgacgcacgcagaccttgggccggcagtcaagaagccgagctgtcaagggaggggccgtatggccgggaatcagatcaccacgccagggaagggtccttagaacagcccggcttctgggagggcgaagcagagaggggtaaggctggcgacccgcacaggcgccacgttcaccgacagggaggaagtagagagagcagatccggatcccctagaaccggagcagatggggaacacagaaggcatagggcccaccgcagaccaggggaggagggcccagaggacaaggccgaaaggcgagcaaggcatagagagggctcgcgcccagccaggggaggtgagggcgaaggggaagggcccgacggcggagaaaggagacgaagacatcgccacggtgcccctgccacatacgaaggggacgcgagacgagaagataaagaaaggcgccataggaggcgcaaggagaaccaggggagtggtgtgccagtctctggtcctaatctttctaccacacgaccgatccagcaggacctgggccgccaggatccccccttggcagaagatattgataacatgaagaataataaattggcgaccgccgagagtgcagcacctcacggcagtcttggtcatgcaggtctaccccagagccccgcgaaaatgggaaacagtaccgaccctgggcccatgcttgctatcccggccatggccaccaacccacagaacgccgcgagtcggcgcacccccaacaaccctggtaacccctcaaatccagggcccccgaaaacaccagagaactccctgatcgtcaccaatcccagcggcactcaaaccaatagcgcaaagacggccagaaagcctgaccacaccactgttgacatacctcctgcttgccccccaccgttgaaccacaccgtcgtgcaggttaacaaaaacgccaaccctgatcccctccccaagaaggaggaggaaaaaaaggaggaagaggaagacgacaggggcgaagacgggcctaaacctatgcctccgtattctagtatgttcatccttagcacaaccaatccgctgcgaaggctgtgccattacatcctgaacctacgctattttgagatgtgcatattgatggtgattgccatgagctccattgccctagcagcagaagatcctgtgcagcctaatgcccctagaaataacgtgcttcggtacttcgattacgtctttaccggggtgttcacatttgaaatggtaataaagatgattgacctcggccttgtcctgcatcagggcgcatactttcgcgatttgtggaatattcttgattttatcgtggttagcggtgccctagtggcttttgcatttaccgggaacagtaaagggaaagacatcaacactatcaaatcactaagagttttgcgtgtgctaagacccctgaagaccatcaagaggctccccaaacttaaggcagtctttgactgcgtggtcaatagcctcaagaatgtgttcaatatcctcatagtctacatgctgtttatgttcatctttgccgtggtagccgtgcagttattcaagggcaaattctttcactgcacggacgaatcaaaagagttcgaaaaggactgccgcgggaaatacctgctgtatgaaaaaaacgaagtgaaagcccgtgatagggagtggaagaaatatgagttccattatgacaacgtgctctgggcccttctaactctctttacagtctcaaccggagaaggctggccacaggttctcaagcacagcgtggacgctactttcgaaaaccaggggccatcacccggatacagaatggagatgtccattttttatgtggtttactttgtcgtcttcccctttttctttgtaaatatctttgtcgcgctgatcatcatcacttttcaagagcagggggacaaaatgatggaggagtactctttggagaagaacgaacgtgcttgcattgattttgcaatcagcgcaaagccactaacaagacatatgccacaaaacaaacagtcatttcagtaccgaatgtggcagtttgttgtgagccccccctttgagtacactatcatggctatgattgcattaaacactattgtattgatgatgaagttttatggtgctagtgtcgcatatgaaaacgccttgcgggtgtttaacatcgtctttacatcattattcagcttggagtgcgtcctgaaggttatggcgtttggcatactaaactatttcagggatgcctggaatatttttgattttgttaccgtgcttggctccatcacagacatcctggtgactgaattcgggaaccccaataatttcatcaatttgagttttcttcgcttgtttcgagcggcacggcttattaagctgctgcgtcaggggtatactattcgaatcctgctgtggacctttgttcagagtttcaaagccctgccttacgtctgcttgctgatcgctatgctgtttttcatctacgcaattatcggaatgcaggtcttcggcaacattggaattgacgtcgaagacgaggactccgacgaagacgaatttcaaatcaccgaacacaataatttccggaccttcttccaggctctgatgctgttgtttcgtagcgccacgggcgaggcatggcacaatataatgctgtcatgtctgagtgggaagccgtgcgacaaaaattcgggaatcctgacaagagaatgcggtaatgagtttgcctatttctacttcgtatccttcatctttttgtgctctttcctaatgctcaacctattcgtggctgtgatcatggataattttgaataccttactcgtgattctagtatcctcggaccacaccatctcgacgagtatgtgagagtatgggccgagtatgacccggcagcatggggacgtatgccgtacttggacatgtaccaaatgcttcggcatatgagtcccccactggggctgggtaagaagtgcccggccagggtggcctacaagagactactgcggatggaccttcctgtggcggatgataacacagtgcattttaacagtactcttatggcactcatacgtaccgctcttgatatcaagatcgctaaaggaggcgccgataagcaacagatggatgctgaactccgaaaagagatgatggccatctggccaaacctgagtcagaagacacttgacctcctggttacaccccataagtctaccgacctgacggtgggcaagatctacgcagctatgatgattatggaatactacaggcaatcaaaggccaagaaactccaggcaatgcgagaggaacaggaccggaccccgctgatgttccagagaatggagcctccaagccccacccaggaaggaggacctgggcagaatgctctccccagcactcagcttgatccaggaggcgcactcatggcccacgagtctgggctgaaagagtctccgagctgggtgacccagcgggcacaagaaatgttccagaagaccggcacatggagtccggaacaaggcccaccaaccgatatgcccaactcccaacccaacagtcagtctgtggaaatgagggaaatggggcgagacggctattccgatagtgaacattatctgcctatggagggccaggggcgcgcagcttcaatgcctcgcctccccgccgaaaatcagcggcggcggggacgtccgcgtggaaataatctcagcaccatttcagatacctccccaatgaagaggtcagccagcgtgctcggtcccaaagcacgccggttagacgactacagcctcgagcgcgttcccccggaggagaatcaacgccatcatcagcgacgcagagaccgtagtcacagagcatcagaacgatccctagggcggtacacggatgtggatactgggcttgggactgatctttccatgaccactcagtccggtgacctaccatcaaaagagcgagatcaggaacgaggacgaccaaaagaccggaagcatcgccaacaccaccatcatcatcaccaccatcatcacccaccaccacccgataaagatcggtacgctcaagagagaccagaccatgggcgggcccgggcacgtgatcagcggtggtctcgttctcctagcgaaggtagggaacacatggcccacagacaaggctcttcctcagtttctggctcacccgcccctagcacttcaggaacatcaacacctcggcgaggcaggcgccagctccctcagactccgtccaccccgcggccgcacgtcagctattccccagtaattcgtaaagcaggtggaagcggcccccctcagcaacagcagcagcagcagcaacaacaacagcaacaggctgtcgccagacccggcagagccgcaacttccggacccagacggtatcctggccccacagccgagccactcgctggcgaccgacccccaactggcgggcacagttctgggaggagtccaaggatggagcgccgggtaccaggccctgcccgatcagagtccccccgcgcatgcagacatggaggggcccgttggccagcaagtggaccgcacgtatcagagggccctccagggccgcggcaccatgggtactatcgaggttctgactacgacgaggctgatgggcccgggtcaggcggtggcgaagaggcaatggcgggtgcttacgacgctccccctcccgtgcggcacgcctcttccggagcaaccggtcgatccccacgcacccccagagcttccggacctgcatgcgcctcaccaagtagacatgggagaaggttaccaaacggatactacccagctcatggcctagcccggccccgcggccctgggtccaggaagggtctccacgagccgtactccgaatctgacgacgattggtgttag

SEQ ID NO: 213883 - DNA, 7539 bp, Artificial Sequence
  derived and/or modified sequence
atggccaggtttggagatgagatgcctgcccgctatggaggcggcggcagcggggctgctgctggggtggtggtgggcagcggcggcggcagaggagctgggggcagccggcagggcggccagcccggggcccagaggatgtacaagcagagcatggcccagagggcccggaccatggccctgtacaaccccatccctgtgcggcagaactgcctgactgtgaacagaagcctcttcctgttctctgaagataatgtggtgaggaaatatgccaagaagatcacagagtggcccccatttgagtacatgatcctggccaccatcatcgccaactgcatcgtgctggccctggagcagcacctgcctgatgatgacaagacccccatgtctgagcggctggatgacacagagccctacttcatcggcatcttctgctttgaggccggcatcaagatcatcgccctgggctttgccttccacaagggcagctacctgagaaatggctggaatgtgatggactttgtggtggtgctgaccggcatcctggccaccgtgggcacagaatttgacctgcggaccctgcgggctgtgcgggtgctgcggcccctgaagctggtgtctggcatccccagcctgcaggtggtgctgaagagcatcatgaaggccatgatccccctgctgcagatcggcctgctgctcttctttgccatcctgatctttgccatcatcggcctggagttctacatgggcaagttccacaccacctgctttgaggagggcacagatgacatccagggcgagagccctgccccctgtggcacagaggagcccgcccggacctgccccaacggcaccaagtgccagccctactgggagggccccaacaacggcatcacccagtttgacaacatcctgtttgctgtgctgaccgtcttccagtgcatcaccatggagggctggacagacctgctgtacaacagcaatgatgccagcggcaacacctggaactggctgtacttcatccccctcatcatcatcggcagcttcttcatgctgaacctggtgctgggcgtgctgagcggggagtttgccaaggagcgggagcgggtggagaacagaagagccttcctgaagctgcggcggcagcagcagatcgagcgggagctgaatggctacatggagtggatcagcaaggccgaggaggtgatcctggccgaggatgaaacagatggagagcagaggcacccctttgatggagccctgcggaggaccaccatcaagaagagcaagacagacctgctgaaccctgaggaggccgaggaccagctggccgacatcgcctctgtgggcagcccctttgcccgggccagcatcaagagcgccaagctggagaacagcaccttcttccacaagaaggagaggaggatgaggttctacatccggaggatggtgaagacccaggccttctactggacagtgctgagcctggtggccctgaacaccctgtgtgtggccatcgtgcactacaaccagcctgagtggctgagtgacttcctgtactatgcagagttcatcttcctgggcctcttcatgtctgagatgttcatcaagatgtatggcctgggcacccggccctacttccacagcagcttcaactgctttgactgtggggtcatcatcggcagcatctttgaggtgatctgggccgtcatcaagccaggcaccagctttggcatctctgtgctgcgggccctgcggctgctgcgcatcttcaaggtgaccaagtactgggccagcctgaggaacctggtggtgtccctgctgaacagcatgaagagcatcatcagcctgctcttcctgctcttcctgttcatcgtggtgtttgccctgctgggcatgcagctgtttggaggccagttcaactttgatgagggcaccccacccaccaactttgacaccttccctgctgccatcatgaccgtcttccagatcctgaccggggaggactggaatgaggtgatgtatgatggcatcaagagccagggcggcgtgcagggcggcatggtgttcagcatctacttcatcgtgctgaccctgtttggaaactacaccctgctgaatgtgttcctggccatcgctgtggacaacctggccaatgcccaggagctgaccaaggtggaggctgatgagcaggaggaggaggaggccgccaaccagaagctggccctgcagaaggccaaggaggtggccgaggtgagccccctgtctgctgccaacatgagcattgctgtgaaggagcagcagaagaaccagaagccagccaagtctgtgtgggagcagaggaccagcgagatgaggaagcagaacctgctggccagccgggaggccctgtacaatgagatggaccctgatgagcgctggaaggccgcctacaccaggcacctgcggccagacatgaagacccacctggaccggcccctggtggtggacccccaggagaacagaaacaacaacaccaacaagagcagagctgctgagcccaccgtggaccagaggctgggccagcagagagctgaggacttcctgaggaagcaggcccgctaccatgaccgggcccgggaccccagcggcagcgctggcctggatgcccggcggccctgggccggcagccaggaggccgagctgagccgggagggcccctacggccgggagagtgaccaccacgcccgggagggcagcctggagcagcccggcttctgggagggggaggccgagcggggcaaggccggggacccccaccggcggcacgtgcaccggcagggcggcagccgggagagccgcagcggcagccccaggactggagcagatggagagcaccggcggcaccgggcccaccggcggcctggagaggagggccctgaggacaaggccgagcggcgggcccggcaccgggagggcagcaggcctgcccggggcggggagggggagggggagggcccagatggaggagagaggagaagaagacacagacatggagccccagccacctatgaaggagatgcccggcgggaggacaaggagcggcggcacagaagaagaaaagaaaaccagggcagcggcgtgcctgtgtctggccccaacctgagcaccacccggcccatccagcaggacctgggccggcaggacccccccctggctgaagatattgacaacatgaagaacaacaagctggccacagctgagagcgctgccccccacggcagcctgggccacgccggcctgccccagagccctgccaagatgggcaacagcacagatcctggccccatgctggccatcccagccatggccaccaacccccagaatgctgccagcaggaggacccccaacaaccctggcaaccccagcaaccctggcccccccaagaccccagagaacagcctgattgtgaccaaccccagcggcacccagaccaacagcgccaagacagccaggaagccagaccacaccaccgtggacatccccccagcctgccccccacccctgaaccacacagtggtgcaggtgaacaagaatgccaacccagaccccctgcccaagaaggaggaggagaagaaggaggaggaggaggatgacagaggagaagatggccccaagcccatgccaccctacagctccatgttcatcctgagcaccaccaaccccctgcggcggctgtgccactacatcctgaacctgcgctactttgagatgtgcatcctgatggtgattgccatgagcagcatcgccctggccgcagaagatcctgtgcagcccaatgcccccaggaacaacgtgctgcgctactttgattatgtgttcaccggggtcttcacctttgagatggtgatcaagatgattgacctgggcctggtgctgcaccagggcgcctacttccgggacctgtggaacatcctggacttcatcgtggtgtctggggccctggtggcctttgccttcaccggcaacagcaagggcaaggacatcaacaccatcaagagcctgcgggtgctgcgggtgctgcggcccctgaagaccatcaagaggctgcccaagctgaaggctgtgtttgactgtgtggtgaacagcctgaagaatgtgttcaacatcctgattgtgtacatgctgttcatgttcatctttgctgtggtggccgtgcagctgttcaagggcaagttcttccactgcacagatgagagcaaggagtttgagaaggactgccggggcaagtacctgctgtatgagaagaatgaggtgaaggcccgggaccgggagtggaagaagtatgagttccactatgacaacgtgctgtgggccctgctgaccctcttcaccgtgtccactggagagggctggccccaggtgctgaagcacagcgtggatgccacctttgagaaccagggccccagccctggctacaggatggagatgagcatcttctacgtggtgtactttgtggtgttccccttcttctttgtgaacatctttgtggccctgatcatcatcaccttccaggagcagggcgacaagatgatggaggagtacagcctggagaagaatgaaagagcctgcatcgactttgccatcagcgccaagcccctgaccaggcacatgccccagaacaagcagagcttccagtacaggatgtggcagtttgtggtgtccccaccatttgagtacaccatcatggccatgattgccctgaacaccatcgtgctgatgatgaagttctatggagcctctgtggcctatgaaaatgccctgcgggtcttcaacatcgtgttcaccagcctcttcagcctggagtgtgtgctgaaggtgatggccttcggcatcctgaactacttcagagatgcctggaacatctttgattttgtgacagtgctgggcagcatcacagacatcctggtgacagaatttggaaaccccaacaacttcatcaacctgtccttcctgcggctcttccgggccgcccggctcatcaagctgctgcggcagggctacaccatccgcatcctgctgtggacctttgtgcagagcttcaaggccctgccctacgtgtgcctgctgattgccatgctgttcttcatctatgccatcatcggcatgcaggtgtttggaaacatcggcattgatgtggaggatgaagattctgatgaagatgagttccagatcacagagcacaacaacttccgcaccttcttccaggccctgatgctgctcttccgcagcgccactggagaggcctggcacaacatcatgctgagctgcctgagcggcaagccctgtgacaagaacagcggcatcctgacccgggagtgtggaaatgaatttgcctacttctactttgtgtccttcatcttcctgtgcagcttcctgatgctgaacctgtttgtggccgtcatcatggacaactttgagtacctgacccgggacagcagcatcctgggcccccaccacctggatgaatatgtgcgggtgtgggccgagtatgaccctgctgcctggggccgcatgccctacctggacatgtaccagatgctgcggcacatgagcccccccctgggcctgggcaagaagtgcccagcccgggtggcctacaagaggctgctgaggatggacctgcctgtggctgatgacaacacagtgcacttcaacagcaccctgatggccctgatcagaacagccctggacatcaagatcgccaagggcggcgctgacaagcagcagatggatgctgagctgaggaaggagatgatggccatctggcccaacctgagccagaagaccctggacctgctggtgaccccccacaagagcacagacctgactgtgggcaagatctatgctgccatgatgatcatggagtactaccggcagagcaaggccaagaagctgcaggccatgagggaggagcaggacaggacccccctgatgttccagaggatggagccccccagccccacccaggagggcggccctggccagaatgccctgcccagcacccagctggaccctggaggagccctgatggcccacgagagcggcctgaaggagagccccagctgggtgacccagagggcccaggagatgttccagaagacaggcacctggagccctgagcagggccccccaacagacatgcccaacagccagcccaacagccagagcgtggagatgagggagatgggcagagatggctacagcgacagcgagcactacctgcccatggagggccagggccgggccgcctccatgccccggctgcctgctgagaaccagaggagaagaggccggccccggggcaacaacctgagcaccatcagtgacaccagccccatgaagaggtctgcctctgtgctgggccccaaggcccggcggctggatgactacagcctggagcgggtgcccccagaggagaaccagaggcaccaccagaggagaagagacaggagccaccgggccagcgagaggagcctgggccgctacacagatgtggacaccggcctgggcacagacctgtccatgaccacccagagcggggacctgcccagcaaggagcgggaccaggagcggggccggcccaaggacaggaagcaccggcagcaccaccaccaccaccaccaccaccaccaccccccacctccagacaaggacagatatgcccaggagaggccagaccacggccgggcccgggcccgggaccagcgctggagccgcagccccagcgagggccgggagcacatggcccaccggcagggcagcagctctgtgtctggcagccctgcccccagcaccagcggcaccagcaccccccggcggggccggcggcagctgccccagacccccagcaccccccggccccacgtgtcctacagccctgtgatcaggaaggccggcggcagcggccccccccagcagcagcagcagcagcagcagcagcagcagcagcaggccgtggcccggcccggccgggccgccaccagcggcccccggcgctacccaggccccacagctgagcccctggccggggaccggccccccaccggcggccacagcagcggccgcagccccaggatggagaggagagtgcccggccctgcccggtctgagagcccccgggcctgcagacatggaggagcccgctggccagccagcggcccccacgtgtctgagggccccccaggccccaggcaccacggctactaccggggcagtgactatgatgaagcagatggccctggcagcggcggcggggaggaggccatggccggggcctatgatgcccctcctcctgtgagacatgccagcagcggggccaccggccgcagccccaggaccccccgggccagcggccctgcctgtgccagccccagccgccacggccggcggctgcccaacggctactacccagcccacggcctggcccggccccggggccctggcagcaggaagggcctgcacgagccctacagcgagagtgatgatgactggtgctag

SEQ ID NO: 213884 - DNA, 7539 bp, Artificial Sequence
  derived and/or modified sequence
atggcccggttcggcgacgagatgcccgcccggtacggcggcggcggtagcggtgccgccgccggagtggtagtggggtctggcgggggacggggagccgggggatcgcgccagggcggccaaccaggagcccagcggatgtataagcagtctatggcgcagcgcgctcgtaccatggccctgtacaatcccatccccgtgcggcagaactgtcttaccgtgaatcggtccctcttcttattcagtgaggataacgtggttcgcaagtacgccaagaaaattactgaatggccacccttcgagtacatgatcctggccaccataatcgctaactgcattgtgttggcactggagcagcatctccccgatgacgataaaactcccatgtctgagcgccttgacgatactgagccttactttatcggcattttctgcttcgaggcagggattaaaataatcgccctaggcttcgcgtttcataaggggtcttacctgcggaacgggtggaacgtgatggatttcgtagtggtcttaacaggtattctggccactgtgggcaccgagttcgatctgcgaacactgcgggcagtgagagtgctgcgcccacttaagttagtgtccggcatcccctcactgcaggtagttctaaagtcaatcatgaaagccatgattcccctccttcaaatcgggttgctgctgttctttgccatcctcatctttgctattataggactagagttctacatgggcaagttccacactacttgcttcgaggaaggcactgatgatatacagggcgaatcacccgctccttgtggtacagaggagcccgcccgaacatgtcccaacggcaccaagtgccagccgtactgggagggtcccaacaacgggattacccaatttgacaacatactttttgcagtcttgaccgtttttcagtgcattacgatggagggctggacggacttattgtataattcaaacgatgcatctggcaatacttggaactggctctactttattcctctcatcatcattggtagcttctttatgctgaatcttgttcttggagttctgagtggggaattcgctaaggagcgagagcgtgttgaaaacagaagggctttcctgaagctgcggcggcagcagcagattgagcgtgagctcaatggctacatggagtggatctccaaggcagaagaagttattctggccgaggatgagacagacggcgaacagagacaccccttcgacggagcattgagacgcacaacaatcaagaagagtaagacggacctgttgaaccccgaggaagctgaggaccagttagcggacatcgcttcagtcggcagtcccttcgccagagctagcatcaagagcgctaaacttgagaattcgacattctttcataagaaggaacgacgcatgcggttttacattagacgtatggtcaagacgcaggccttctactggacagttctgagcctggtggccctcaatacgttgtgcgttgctatcgtgcactacaaccagcccgagtggctgtccgatttcctgtactacgctgagttcatcttcctgggcctgttcatgtccgaaatgttcatcaagatgtatggcctgggtacccgcccttacttccactccagctttaattgcttcgattgcggtgtaattattggaagtatttttgaagtcatctgggccgtcatcaagcctggtacatctttcgggatcagcgttttgcgtgctcttagactcctgaggatctttaaagtgacaaaatactgggccagtctacgaaacctagtcgtctcacttctgaacagcatgaagtcaatcatctcattgttatttctcttgttcctgtttatagtagtgttcgctctgctaggtatgcagctctttggagggcagtttaatttcgatgagggtacaccccccactaactttgacactttccctgcagcaatcatgaccgtcttccagatcttgactggcgaggactggaacgaggttatgtatgacgggatcaaatcccagggaggcgtgcagggcggaatggtattcagtatttacttcattgtgctgactctgtttggcaattacacattattaaatgtcttccttgccatcgccgtggacaatctggccaacgcccaggaacttaccaaagttgaggctgacgagcaggaggaggaggaggctgccaatcagaaacttgcactgcaaaaagcaaaagaagtagctgaggtatctcctttatctgcagctaacatgtctattgccgtgaaggaacaacagaagaaccagaagccagccaaatccgtctgggaacagcgcacctccgaaatgagaaagcagaatctgctggcttctcgtgaagctttgtataacgagatggaccctgacgaacgctggaaagcagcgtatacacggcacctcagacccgatatgaagactcatttggacagaccactggtggtagaccctcaggagaaccggaacaacaacacaaacaaaagccgcgctgctgagcccaccgtagaccagaggctcgggcagcagcgagctgaggacttcctgaggaaacaagcaaggtaccacgatcgagccagggatcccagtgggtctgctggacttgatgcccgcaggccttgggccgggtcccaggaggcagagctgtccagagaggggccttacggccgagagtcagatcatcacgctagggaaggaagtctcgagcaaccgggtttctgggaaggggaagccgaaagaggaaaggctggtgatccacatcgcaggcacgtccatcggcagggtggctccagagagtcacggagcgggagccccagaaccggagcggatggggaacaccgccggcaccgtgcccaccgacggcccggagaagagggacccgaggacaaggccgagcggcgggctagacatcgggaaggttccaggccggcgcgggggggggagggggagggcgagggaccagacggcggcgaacgacgccgacggcatagacacggtgcccctgcgacatacgaaggagatgcgcggcgggaggataaagagaggcggcataggaggcgcaaggaaaaccagggttccggggtgcccgtgagtgggccgaatctgtctaccaccaggcccattcagcaagatctgggtcggcaggacccgcccttggccgaagatatcgataacatgaaaaacaacaagcttgcgactgctgagagtgcggcccctcacggctccctcggccacgcaggtctcccacagtccccagctaaaatgggcaattccacagacccaggccctatgttagccatacctgcaatggccaccaatccccaaaacgccgcatcacgaagaacacccaataatcctgggaatccaagcaacccgggccctccaaagacacctgaaaattctctgattgttaccaacccgagcggcacacaaacaaatagtgcaaaaacagccagaaagccagaccacacaacagtggatattccccctgcttgcccaccacccctaaaccatactgtggtgcaggtaaacaagaacgccaacccagatcctcttccgaaaaaggaagaagagaagaaggaggaggaagaagatgaccgcggtgaggatgggccaaaacccatgcctccctacagctccatgttcattctcagcacgacaaacccactccgacgactgtgccattacattttaaacctgcgatattttgaaatgtgtatacttatggtaatcgcaatgagcagtatcgcgctggccgccgaggaccctgttcaacccaacgcaccccggaataacgtgctgcggtatttcgattacgtgttcaccggtgtgtttacgtttgagatggttatcaagatgattgacttaggattggtcttacatcagggagcctatttcagggacctgtggaatatcctggatttcattgtggtgtctggcgccctggttgccttcgcattcaccggaaattccaagggaaaagatataaatactattaagtcactccgcgtcctgcgagtgctaagacctcttaaaactatcaagagattaccaaagctcaaggctgtttttgactgtgtggtgaactccctgaaaaatgtgttcaacatcctgattgtctatatgctgttcatgtttatttttgccgttgtcgccgtgcaactgtttaaggggaagttctttcactgtacggatgaatccaaagagttcgagaaggactgccgtggaaagtacctactgtacgaaaaaaacgaggtgaaagcacgggaccgcgaatggaagaagtacgaatttcattatgataacgtgctctgggccctcctaacactgtttactgtgtccacgggcgagggttggccccaggttctgaagcattctgtggatgctacgttcgagaatcagggaccttcgcccggctatcgaatggaaatgtccatcttctacgtggtgtacttcgtggtgttcccctttttttttgttaacatcttcgtggctcttattatcattacctttcaggaacagggggacaagatgatggaggagtacagcctggagaagaacgagagagcttgtattgacttcgcaatttccgctaaaccgctgacacgccatatgccacagaacaagcagtcgtttcaatacaggatgtggcagtttgttgtgtctcccccttttgagtacacaatcatggccatgattgcattaaataccattgtgttgatgatgaagttctacggggctagtgtcgcgtacgagaacgcattaagagtcttcaacatcgtcttcacatccttgtttagcctggagtgtgttcttaaagtgatggcctttggaattttaaactacttccgagatgcctggaatatcttcgatttcgtcacagttctcggtagtatcaccgacatcttggtcaccgagttcgggaaccctaacaactttatcaacctcagcttcctgagactgtttagagcggcgcggctgatcaaactgctgaggcaaggatatacgatccgaatactgctttggacctttgtccaaagctttaaggctctcccctacgtctgcctcttaatcgcgatgctgttttttatctacgcgattatcggcatgcaggtgtttgggaacatagggatcgacgtggaggacgaagatagcgacgaggacgagttccagatcaccgagcacaacaactttagaacattctttcaggccctgatgctgttattccgctccgccacaggcgaggcctggcataacatcatgctgtcatgtctatctggaaagccctgtgataaaaatagcgggattttaacgagagagtgtggaaacgaattcgcctacttttattttgtctcctttatctttttatgctctttcctcatgctcaacctcttcgtggctgttataatggacaactttgaatacctgactagggactcatcaatcctcgggccacaccatctcgatgagtacgtgcgggtatgggccgagtatgaccctgctgcctggggaagaatgccttatcttgacatgtatcagatgctgcgccatatgtctccccctctgggcctgggcaaaaagtgccccgccagagtagcctacaaacgactccttagaatggacttgcccgttgccgatgacaacaccgtccactttaactccaccctgatggccctgattaggaccgctctggatatcaagatcgcaaaagggggggcagataaacagcagatggacgcggaactccggaaagagatgatggcaatttggccgaatttgtcccagaaaacattggatctgttagtgacaccccacaaatctacagacctcacagttggcaagatctacgcagccatgatgattatggagtattacaggcagtccaaagcgaagaagctacaggcaatgagagaagaacaagatcggacgcccctcatgttccagcgcatggagccaccttctccaacgcaggagggcgggcctgggcagaacgccttgccatccacccagctcgaccctggaggcgcactgatggcacacgaatcaggattaaaggaatccccttcttgggtgacccagagggcccaagaaatgtttcagaagactgggacatggtcccctgagcaggggcccccaactgacatgcccaattcacagcccaattctcagtcagtcgagatgcgcgagatgggcagggatgggtacagcgattccgagcactatcttccaatggaaggacaaggcagagccgcttccatgccaagattgcctgctgagaatcagaggcgcagggggcgtccccgaggaaataatctctccacaatttctgatacaagcccgatgaaacgttccgccagcgttctcgggcctaaagccagaagacttgacgattattccttagagcgggtgcccccagaagaaaaccaacgtcatcaccagaggcgaagagataggtcccatagagcttctgaacggagtctcggaagatacaccgacgtggacactggccttgggaccgacctgagtatgaccactcagagcggtgatctcccatccaaggagcgcgatcaagaacggggcagaccaaaggaccgaaaacataggcagcaccatcaccaccatcaccaccaccaccacccacctcccccagataaagacagatacgcccaggagaggcctgaccacggccgggcgcgagccagggaccaacggtggtctcggagcccctctgagggacgggagcatatggcccacagacagggatcatcaagtgtgtcaggaagcccagctccttcaactagtggcaccagtacaccccggcgcggtcgcaggcagctgcctcagaccccttctacacccaggccccatgtcagctactctccagttatccggaaagcggggggttcaggccccccacagcagcagcagcaacagcagcaacagcagcagcaacaggcagtcgcgcgacccggtagagccgctacttcaggacctagaagataccccggcccaacagcagaacccttagccggagatcggccaccaactggggggcacagcagcggacggtctccgcgtatggagcgacgggtgcctggccctgcaagaagcgaaagccccagagcctgtcggcatggaggggctcgttggcccgctagcggcccacatgtctccgagggaccccctggccctaggcatcacggttactatcggggatcagattatgacgaagcagatggcccgggctctggagggggcgaggaggctatggcaggtgcttatgacgctcccccaccggtacgacatgcctcttctggagctacaggaagaagtcctcggacccccagagcatcaggtcccgcgtgtgcctccccaagtcgacatgggcgtaggctgccaaacggctattatcccgctcacggcctggcacgaccccggggaccagggtcgaggaagggattacacgaaccttatagtgaatcagatgatgattggtgttag

SEQ ID NO: 213885 - DNA, 7538 bp, Artificial Sequence
  derived and/or modified sequence
atggcaaggtttggcgatgaaatgccagcacgctatgggggtggcggatctggtgcagctgctggcgtcgtggttggctccggtggcggaagaggggcagggggatcccgacaggggggacagccaggggcacagcgaatgtacaagcagtccatggcccagcgggctagaactatggccttatacaaccccattccagtgcggcagaattgtcttacagtgaatcggagtctgttcttgttctccgaagacaatgtcgtgagaaaatatgctaaaaaaattacagagtggcctccgtttgaatacatgatcctcgctaccatcatcgccaactgcatcgtgttggcgttggagcagcacctgccagacgacgacaaaactcccatgtcggagaggctcgatgataccgaaccgtactttatcggaattttctgcttcgaggcgggaattaaaatcatcgcactggggttcgcattccacaagggtagttatctgaggaatggttggaacgttatggatttcgtcgttgtgctcaccgggatcctggcaacagtcggaaccgaatttgatttgagaaccttacgcgctgttagagtgctcagacctctgaaattagtaagcggcattccaagcctccaggtagtgcttaagagtattatgaaggctatgatcccattgctgcagatcgggctgttactgttctttgctatcctgatttttgctattattggcctggaattctacatgggtaaattccatactacttgttttgaggaaggtacggacgacattcagggagaatcccctgcaccttgcgggactgaggaacccgcacggacctgccccaacgggaccaaatgtcagccatactgggagggccctaataatgggattacacagttcgacaacatactgtttgccgtgcttactgttttccagtgcatcacaatggaaggctggacagatctgctttataacagcaatgacgctagcgggaacacctggaattggctgtattttatccctctaattatcatcggttctttcttcatgctcaacttggttttgggcgttctgagcggtgaattcgcaaaggagcgtgaacgggtggaaaaccggagagcttttctgaagctcagacgccagcagcaaatcgagagggaactaaatgggtacatggaatggatctctaaagccgaagaggtaatcctcgcagaggatgaaactgatggggaacagcgccaccccttcgacggggctctgaggagaaccaccataaagaagtctaaaaccgacctgttaaacccagaagaagccgaagaccagctggccgacatagccagcgttggatcccccttcgcccgagcaagtatcaaaagcgctaagctggaaaatagcactttctttcacaagaaagagaggcgaatgcgcttttacatccggagaatggtgaaaacacaggcattttattggaccgtgctgtccttggtggctctgaacacactttgtgtggccattgtacactacaaccagccagagtggctgtcagattttctctattatgccgagtttatttttctggggctgtttatgtccgagatgtttatcaagatgtatggactggggaccaggccttactttcacagctcttttaactgctttgactgcggggttattattggatcaatatttgaagtcatctgggccgtgattaagcccggaactagttttggaattagcgtgctgagggcacttcgactgctgaggatctttaaggttacaaagtattgggcctctctgaggaaccttgtggtgtcactgctgaattccatgaagtctatcatttctcttctgtttctgctgttcctatttattgtcgttttcgctctgctgggtatgcagctgtttggcggacagttcaactttgacgagggcactcctcccacaaatttcgacactttccccgcagccattatgaccgttttccagatactaaccggcgaagattggaacgaggtgatgtatgacgggatcaagtctcagggaggagttcaggggggaatggtcttcagcatatattttatagtgcttacactgtttgggaattataccttgttgaatgtgttcctcgctatagccgtggacaatctagccaatgcccaagagctcactaaagtcgaagccgacgagcaagaggaagaagaggctgcaaaccagaagttggcactccagaaggcgaaagaggtggcagaggtaagccctcttagtgctgccaacatgtcaatcgcagtgaaggagcagcagaagaaccaaaaacctgccaagtccgtgtgggagcagcgcacaagtgagatgcgtaagcagaacctgctggcttcacgtgaggcactgtacaatgagatggacccagacgaaaggtggaaggccgcatacactcgtcacctgcgcccagacatgaagacacacctggatagaccgctggtcgtagaccctcaggagaatcgcaataataatacaaataagagcagggcagcagagccgaccgttgaccagcgactgggacaacagcgcgctgaggacttcttacggaagcaagccagatatcacgatcgggcacgcgacccttctggatcagccggacttgacgcccgacgaccttgggctggatcccaggaggccgagctgagtagggagggaccctacgggcgtgagtccgaccaccatgctagagaggggtcactggagcagccaggattctgggagggcgaagccgagcgcggaaaagcgggagaccctcaccggagacatgtgcacagacaagggggatcccgcgaatctagatctggttcccctcgaaccggagccgacggcgagcaccggagacatagagcccatcggaggccaggagaggagggtccagaggataaagctgagagacgtgccaggcatcgtgagggcagccggccagccaggggaggcgaaggcgaaggggaaggcccagacgggggagagcggagacgcaggcataggcacggagcacccgctacctacgagggtgacgccaggcgagaagataaggagaggcgtcaccgccgtcgaaaggaaaaccaggggtccggcgtgcctgtctctggccctaatctgagcacaacccggccaatacaacaagatcttggcaggcaagaccctccactggctgaagatatcgacaatatgaaaaacaataagctggcaaccgcggagtcggccgcacctcatggctccctgggacatgccggactgccccagtcacccgcaaaaatgggcaactccacggacccgggacctatgttggccatcccagcgatggccacaaatccacagaatgccgcttccaggagaaccccgaacaaccccggtaatccctccaatcccggtcccccaaaaacccctgaaaatagtcttatcgtgaccaatcctagtggaacccagaccaactcggccaaaaccgctcggaagcctgatcatacgactgttgatatcccacccgcatgccctccaccgttgaaccatacagtcgtgcaggtgaataagaacgccaatccagatccactacccaaaaaagaggaggaaaaaaaggaggaagaggaagacgatcggggtgaggacggccctaaacctatgcctccatattcatctatgttcatcttatcaacaactaacccgctgcggcgactctgccactacatactcaacctgcgctacttcgagatgtgcatactaatggtgattgcaatgagttccattgccttggccgctgaagatcccgttcagcccaatgcccctaggaataatgtcctacgctattttgactatgtattcaccggagtgtttacttttgagatggtcatcaagatgattgacctcggactagtgcttcaccagggcgcttactttagggatttgtggaacatccttgattttatcgttgtgtctggtgccctggtggctttcgcttttaccggaaatagcaaaggtaaggacatcaacacaattaaaagccttcgcgtgctgcgagtgcttagacccttgaagactattaaaaggcttccaaaattaaaggcagtgtttgattgtgttgtcaattcactcaagaatgtgttcaatatcctgatagtctacatgcttttcatgtttattttcgccgttgtggccgtgcaattatttaaaggtaaattctttcactgcactgacgaatcaaaagaatttgagaaagactgtcggggaaaatatctcctgtacgaaaagaacgaggttaaggcgagggaccgggagtggaagaaatacgagttccattacgataacgtcctatgggccttgctcactttgtttaccgtgagtaccggtgagggctggcctcaggtgctgaaacacagtgtggacgccacttttgagaatcagggcccttcacccggttaccgaatggaaatgtccatcttttatgtggtgtactttgtggtcttcccattctttttcgtgaatatcttcgtggccctgatcatcattacattccaggaacaaggcgataagatgatggaggagtacagtttggaaaagaatgagagagcgtgcattgacttcgcaataagcgccaagccacttacgaggcacatgccacagaataagcagtctttccagtatcggatgtggcagttcgtggttagtcctcctttcgagtacacgatcatggccatgattgctctcaatacgattgtattgatgatgaaattttatggtgccagtgtcgcatacgagaatgctctgagggtgtttaacattgtgttcacgtccttgttttccttagagtgtgtcctgaaagtgatggccttcggaatccttaattatttccgcgacgcttggaacatttttgactttgtcacggtgcttgggagcattacggacattctggtcactgagtttggaaatcccaataacttcattaatctgagctttctgaggctattccgggcagcgcgtcttattaaactgctcaggcaggggtatactattcggattctcttgtggacattcgtccagtctttcaaagcccttccttatgtgtgcctcctgatagcaatgctgttctttatctacgctattattgggatgcaggtgttcggaaacattggaattgacgttgaagatgaagactccgacgaagatgagttccagattaccgaacataataacttccgcaccttcttccaggccctgatgctgctttttagatcggccactggggaagcttggcacaatatcatgctgagctgtctttctgggaagccttgtgataaaaactcaggtattctcaccagggaatgcggcaacgaattcgcctacttctacttcgtgtccttcatcttcctgtgtagctttcttatgcttaatttatttgttgccgtgataatggataatttcgagtacttgacccgcgattcaagtatcctcggccctcaccatctggatgagtacgttcgcgtatgggccgagtatgaccccgcagcctggggaagaatgccttacctcgacatgtatcaaatgctgaggcatatgtcccctcctctcggcctgggaaagaaatgtcccgctcgagtcgcttacaagcgcctgctcaggatggacttgcccgtggccgacgacaacacagtgcactttaattccaccttgatggcgctcataagaaccgctcttgacataaaaattgccaaggggggtgccgataagcagcagatggacgctgaactcagaaaggaaatgatggccatctggcctaatctatcacagaagaccctggaccttctggttacccctcacaagagcaccgacctcacagtggggaagatctacgctgcgatgatgattatggaatactacagacaaagtaaagcgaagaaacttcaagcaatgcgggaggagcaggatcgaacgccgctgatgttccagaggatggagccgccatccccaactcaggaggggggtcccggacagaacgctttgccgtcaacacagttagaccctgggggagcgcttatggcccatgagtcagggctgaaagagagccccagttgggtaacacagcgggcacaggaaatgttccaaaagacaggaacttggagccctgaacaggggccacccacagacatgccaaattctcaaccaaacagtcagtcagtcgaaatgcgggagatgggtagggatgggtattccgatagcgagcactacctgccaatggagggccagggcagagccgcaagcatgccgcgacttccagccgaaaatcaaaggcgcagaggaagaccacgaggaaataacctgagcaccatatcagacacctctccaatgaagagaagcgcctctgttctcgggcctaaagctagacgccttgacgactatagtctcgagagggtgccaccagaagaaaaccaacgacaccatcagcgtaggcgcgataggagccatcgtgcatccgaaagatcactagggagatacaccgacgtggacactggactgggtaccgatctgtctatgacaactcagtctggcgatttgccgagtaaggaaagagaccaggagagaggcaggccaaaagatcgcaaacaccgccaacaccaccaccaccaccaccaccaccaccatcctccaccacctgataaagataggtatgctcaggaacgaccggatcacgggagagcgagggcaagagatcagcgctggtctagatctccctcagaagggagagagcatatggcacaccgtcagggaagcagctccgtcagcgggtccccggctcccagcacctcaggcacctctaccccacggaggggtcggagacagctgccccagactccgagtacccctagaccccatgtgtcctatagcccagtcataaggaaggcagggggaagcggccctcctcagcaacagcaacagcaacaacagcagcagcagcagcaagctgttgctaggcccggacgcgcagccacctcaggacccagacggtaccccggtccgaccgccgagcccctcgccggtgacagaccccctaccggcggtcactcctcggggaggtcacctagaatggagcggcgagtaccaggccctgcaagatcagagtcgccacgcgcttgcaggcatgggggtgccagatggcctgcctctgggccacacgtctctgagggacctcctggaccacgacaccatggatactacaggggttcagactatgacgaggccgatggtccaggctccggtggcggagaggaagcaatggctggagcatacgatgcccctccacccgtgcgccacgccagcagcggggcaactgggagaagtcccaggacacctagagcgtcaggaccggcatgcgcgtcacccagccggcacgggaggcggctgcccaatggctattatccagcccacggcctggccaggcctaggggccctggctcacgtaaggggctgcatgagccctacagcgaaagcgacgatgattggtgtta

SEQ ID NO: 213886 - DNA, 8410 bp, Artificial Sequence
  derived and/or modified sequence
atggcccgcttcggagacgagatgccggcccgctacgggggaggaggctccggggcagccgccggggtggtcgtgggcagcggaggcgggcgaggagccgggggcagccggcagggcgggcagcccggggcgcaaaggatgtacaagcagtcaatggcgcagagagcgcggaccatggcactctacaaccccatccccgtccgacagaactgcctcacggttaaccggtctctcttcctcttcagcgaagacaacgtggtgagaaaatacgccaaaaagatcaccgaatggccaccctttgaatatatgattttagccaccatcatagcgaattgcatcgtcctcgcactggagcagcatctgcctgatgatgacaagaccccgatgtctgaacggctggatgacacagaaccatacttcattggaattttttgtttcgaggctggaattaaaatcattgcccttgggtttgccttccacaaaggctcctacttgaggaatggctggaatgtcatggactttgtggtggtgctaacgggcatcttggcgacagttgggacggagtttgacctacggacgctgagggcagttcgagtgctgcggccgctcaagctggtgtctggaatcccaagtttacaagtcgtcctgaagtcgatcatgaaggcgatgatccctttgctgcagatcggcctcctcctattttttgcaatccttatttttgcaatcatagggttagaattttatatgggaaaatttcataccacctgctttgaagaggggacagatgacattcagggtgagtctccggctccatgtgggacagaagagcccgcccgcacctgccccaatgggaccaaatgtcagccctactgggaagggcccaacaacgggatcactcagttcgacaacatcctgtttgcagtgctgactgttttccagtgcataaccatggaagggtggactgatctcctctacaatagcaacgatgcctcagggaacacttggaactggttgtacttcatccccctcatcatcatcggctccttttttatgctgaaccttgtgctgggtgtgctgtcaggggagtttgccaaagaaagggaacgggtggagaaccggcgggcttttctgaagctgaggcggcaacaacagattgaacgtgagctcaatgggtacatggagtggatctcaaaagcagaagaggtgatcctcgccgaggatgaaactgacggggagcagaggcatccctttgatggagctctgcggagaaccaccataaagaaaagcaagacagatttgctcaaccccgaagaggctgaggatcagctggctgatatagcctctgtgggttctcccttcgcccgagccagcattaaaagtgccaagctggagaactcgaccttttttcacaaaaaggagaggaggatgcgtttctacatccgccgcatggtcaaaactcaggccttctactggactgtactcagtttggtagctctcaacacgctgtgtgttgctattgttcactacaaccagcccgagtggctctccgacttcctttactatgcagaattcattttcttaggactctttatgtccgaaatgtttataaaaatgtacgggcttgggacgcggccttacttccactcttccttcaactgctttgactgtggggttatcattgggagcatcttcgaggtcatctgggctgtcataaaacctggcacatcctttggaatcagcgtgttacgagccctcaggttattgcgtattttcaaagtcacaaagtactgggcatctctcagaaacctggtcgtctctctcctcaactccatgaagtccatcatcagcctgttgtttctccttttcctgttcattgtcgtcttcgcccttttgggaatgcaactcttcggcggccagtttaatttcgatgaagggactcctcccaccaacttcgatacttttccagcagcaataatgacggtgtttcagatcctgacgggcgaagactggaacgaggtcatgtacgacgggatcaagtctcaggggggcgtgcagggcggcatggtgttctccatctatttcattgtactgacgctctttgggaactacaccctcctgaatgtgttcttggccatcgctgtggacaatctggccaacgcccaggagctcaccaaggtggaggcggacgagcaagaggaagaagaagcagcgaaccagaaacttgccctacagaaagccaaggaggtggcagaagtgagtcctctgtccgcggccaacatgtctatagctgtgaaagagcaacagaagaatcaaaagccagccaagtccgtgtgggagcagcggaccagtgagatgcgaaagcagaacttgctggccagccgggaggccctgtataacgaaatggacccggacgagcgctggaaggctgcctacacgcggcacctgcggccagacatgaagacgcacttggaccggccgctggtggtggacccgcaggagaaccgcaacaacaacaccaacaagagccgggcggccgagcccaccgtggaccagcgcctcggccagcagcgcgccgaggacttcctcaggaaacaggcccgctaccacgatcgggcccgggaccccagcggctcggcgggcctggacgcacggaggccctgggcgggaagccaggaggccgagctgagccgggagggaccctacggccgcgagtcggaccaccacgcccgggagggcagcctggagcaacccgggttctgggagggcgaggccgagcgaggcaaggccggggacccccaccggaggcacgtgcaccggcaggggggcagcagggagagccgcagcgggtccccgcgcacgggcgcggacggggagcatcgacgtcatcgcgcgcaccgcaggcccggggaggagggtccggaggacaaggcggagcggagggcgcggcaccgcgagggcagccggccggcccggggcggcgagggcgagggcgagggccccgacgggggcgagcgcaggagaaggcaccggcatggcgctccagccacgtacgagggggacgcgcggagggaggacaaggagcggaggcatcggaggaggaaagagaaccagggctccggggtccctgtgtcgggccccaacctgtcaaccacccggccaatccagcaggacctgggccgccaagacccacccctggcagaggatattgacaacatgaagaacaacaagctggccaccgcggagtcggccgctccccacggcagccttggccacgccggcctgccccagagcccagccaagatgggaaacagcaccgaccccggccccatgctggccatccctgccatggccaccaacccccagaacgccgccagccgccggacgcccaacaacccggggaacccatccaatcccggcccccccaagacccccgagaatagccttatcgtcaccaaccccagcggcacccagaccaattcagctaagactgccaggaaacccgaccacaccacagtggacatccccccagcctgcccaccccccctcaaccacaccgtcgtacaagtgaacaaaaacgccaacccagacccactgccaaaaaaagaggaagagaagaaggaggaggaggaagacgaccgtggggaagacggccctaagccaatgcctccctatagctccatgttcatcctgtccacgaccaacccccttcgccgcctgtgccattacatcctgaacctgcgctactttgagatgtgcatcctcatggtcattgccatgagcagcatcgccctggccgccgaggaccctgtgcagcccaacgcacctcggaacaacgtgctgcgatactttgactacgtttttacaggcgtctttacctttgagatggtgatcaagatgattgacctggggctcgtcctgcatcagggtgcctacttccgtgacctctggaatattctcgacttcatagtggtcagtggggccctggtagcctttgccttcactggcaatagcaaaggaaaagacatcaacacgattaaatccctccgagtcctccgggtgctacgacctcttaaaaccatcaagcggctgccaaagctcaaggctgtgtttgactgtgtggtgaactcacttaaaaacgtcttcaacatcctcatcgtctacatgctattcatgttcatcttcgccgtggtggctgtgcagctcttcaaggggaaattcttccactgcactgacgagtccaaagagtttgagaaagattgtcgaggcaaatacctcctctacgagaagaatgaggtgaaggcgcgagaccgggagtggaagaagtatgaattccattacgacaatgtgctgtgggctctgctgaccctcttcaccgtgtccacgggagaaggctggccacaggtcctcaagcattcggtggacgccacctttgagaaccagggccccagccccgggtaccgcatggagatgtccattttctacgtcgtctactttgtggtgttccccttcttctttgtcaatatctttgtggccttgatcatcatcaccttccaggagcaaggggacaagatgatggaggaatacagcctggagaaaaatgagagggcctgcattgatttcgccatcagcgccaagccgctgacccgacacatgccgcagaacaagcagagcttccagtaccgcatgtggcagttcgtggtgtctccgcctttcgagtacacgatcatggccatgatcgccctcaacaccatcgtgcttatgatgaagttctatggggcttctgttgcttatgaaaatgccctgcgggtgttcaacatcgtcttcacctccctcttctctctggaatgtgtgctgaaagtcatggcttttgggattctgaattatttccgcgatgcctggaacatcttcgactttgtgactgttctgggcagcatcaccgatatcctcgtgactgagtttgggaatccgaataacttcatcaacctgagctttctccgcctcttccgagctgcccggctcatcaaacttctccgtcagggttacaccatccgcattcttctctggacctttgtgcagtccttcaaggccctgccttatgtctgtctgctgatcgccatgctcttcttcatctatgccatcattgggatgcaggtgtttggtaacattggcatcgacgtggaggacgaggacagtgatgaagatgagttccaaatcactgagcacaataacttccggaccttcttccaggccctcatgcttctcttccggagtgccaccggggaagcttggcacaacatcatgctttcctgcctcagcgggaaaccgtgtgataagaactctggcatcctgactcgagagtgtggcaatgaatttgcttatttttactttgtttccttcatcttcctctgctcgtttctgatgctgaatctctttgtcgccgtcatcatggacaactttgagtacctcacccgagactcctccatcctgggcccccaccacctggatgagtacgtgcgtgtctgggccgagtatgaccccgcagcttggggccgcatgccttacctggacatgtatcagatgctgagacacatgtctccgcccctgggtctggggaagaagtgtccggccagagtggcttacaagcggcttctgcggatggacctgcccgtcgcagatgacaacaccgtccacttcaattccaccctcatggctctgatccgcacagccctggacatcaagattgccaagggaggagccgacaaacagcagatggacgctgagctgcggaaggagatgatggcgatttggcccaatctgtcccagaagacgctagacctgctggtcacacctcacaagtccacggacctcaccgtggggaagatctacgcagccatgatgatcatggagtactaccggcagagcaaggccaagaagctgcaggccatgcgcgaggagcaggaccggacacccctcatgttccagcgcatggagcccccgtccccaacgcaggaagggggacctggccagaacgccctcccctccacccagctggacccaggaggagccctgatggctcacgaaagcggcctcaaggagagcccgtcctgggtgacccagcgtgcccaggagatgttccagaagacgggcacatggagtccggaacaaggcccccctaccgacatgcccaacagccagcctaactctcagtccgtggagatgcgagagatgggcagagatggctactccgacagcgagcactacctccccatggaaggccagggccgggctgcctccatgccccgcctccctgcagagaaccagaggagaaggggccggccacgtgggaataacctcagtaccatctcagacaccagccccatgaagcgttcagcctccgtgctgggccccaaggcccgacgcctggacgattactcgctggagcgggtcccgcccgaggagaaccagcggcaccaccagcggcgccgcgaccgcagccaccgcgcctctgagcgctccctgggccgctacaccgatgtggacacaggcttggggacagacctgagcatgaccacccaatccggggacctgccgtcgaaggagcgggaccaggagcggggccggcccaaggatcggaagcatcgacagcaccaccaccaccaccaccaccaccaccatcccccgccccccgacaaggaccgctatgcccaggaacggccggaccacggccgggcacgggctcgggaccagcgctggtcccgctcgcccagcgagggccgagagcacatggcgcaccggcagggcagtagttccgtaagtggaagcccagccccctcaacatctggtaccagcactccgcggcggggccgccgccagctcccccagaccccctccaccccccggccacacgtgtcctattcccctgtgatccgtaaggccggcggctcggggcccccgcagcagcagcagcagcagcagcagcagcagcagcagcaggcggtggccaggccgggccgggcggccaccagcggccctcggaggtacccaggccccacggccgagcctctggccggagatcggccgcccacggggggccacagcagcggccgctcgcccaggatggagaggcgggtcccaggcccggcccggagcgagtcccccagggcctgtcgacacggcggggcccggtggccggcatctggcccgcacgtgtccgaggggcccccgggtccccggcaccatggctactaccggggctccgactacgacgaggccgatggcccgggcagcgggggcggcgaggaggccatggccggggcctacgacgcgccaccccccgtacgacacgcgtcctcgggcgccaccgggcgctcgcccaggactccccgggcctcgggcccggcctgcgcctcgccttctcggcacggccggcgactccccaacggctactacccggcgcacggactggccaggccccgcgggccgggctccaggaagggcctgcacgaaccctacagcgagagtgacgatgattggtgctaagcccgggcgaggtggcgcccgcccggccccccacgcaccccacgcacacaccccacccgaggagccgcgcagaggccgcgggggcccagcacagagggcccgggagagggccagccgggagaccccagactctggagaggccagggctgggccacaagggtgtcccgcagagaccctcggccaaaagagaccctcctgggcagccacggcgccccccaaccagccccgatccccccacccacgacaggggctctcgggtgggaggcagggagcagacaaaccacacagccaagggatttgaattaactcagccatttttggagaactttggggaacatgaaaaaaaaaaaaaaaaaaaaaaaaaaaaacatttttaaaagaaaaaacggggagaaaaaaatagcttctattgatgagttttatcatctcaattgaatctttcctttccctgatgaagacagctggtggccgagtgcggcaaagaagccagaaggaaccagaatcccagtgccctacacccaccaccagacacactcacacccacacacgttctcagacacacacaagagtgcttgccggttataccaaaccctactattactgcctgcagaaatcaatttaaaaaaataataataacaataaacaattttaaaaaggacaaaaaaattaatgattgagaaaagaggcatttttttctgacatttggtcctgcttgaaacaacaaaagaagaagaaaaacccaccatcaccaccgattcctttgcttcttttttccttttttcctaccttgtttgaaaaccgtgggcttgggactgtgaattattgcatgacattcaaaaagaaaaaaaaaataaaaaaaagttgaatcaaa

SEQ ID NO: 213887 - DNA, 7539 bp, Artificial Sequence
  derived and/or modified sequence
atggccagattcggcgacgagatgcccgccagatacggcggcggcggcagcggcgccgccgccggcgtggtggtgggcagcggcggcggcagaggcgccggcggcagcagacagggcggccagcccggcgcccagagaatgtacaagcagagcatggcccagagagccagaaccatggccctgtacaaccccatccccgtgagacagaactgcctgaccgtgaacagaagcctgttcctgttcagcgaggacaacgtggtgagaaagtacgccaagaagatcaccgagtggccccccttcgagtacatgatcctggccaccatcatcgccaactgcatcgtgctggccctggagcagcacctgcccgacgacgacaagacccccatgagcgagagactggacgacaccgagccctacttcatcggcatcttctgcttcgaggccggcatcaagatcatcgccctgggcttcgccttccacaagggcagctacctgagaaacggctggaacgtgatggacttcgtggtggtgctgaccggcatcctggccaccgtgggcaccgagttcgacctgagaaccctgagagccgtgagagtgctgagacccctgaagctggtgagcggcatccccagcctgcaggtggtgctgaagagcatcatgaaggccatgatccccctgctgcagatcggcctgctgctgttcttcgccatcctgatcttcgccatcatcggcctggagttctacatgggcaagttccacaccacctgcttcgaggagggcaccgacgacatccagggcgagagccccgccccctgcggcaccgaggagcccgccagaacctgccccaacggcaccaagtgccagccctactgggagggccccaacaacggcatcacccagttcgacaacatcctgttcgccgtgctgaccgtgttccagtgcatcaccatggagggctggaccgacctgctgtacaacagcaacgacgccagcggcaacacctggaactggctgtacttcatccccctgatcatcatcggcagcttcttcatgctgaacctggtgctgggcgtgctgagcggcgagttcgccaaggagagagagagagtggagaacagaagagccttcctgaagctgagaagacagcagcagatcgagagagagctgaacggctacatggagtggatcagcaaggccgaggaggtgatcctggccgaggacgagaccgacggcgagcagagacaccccttcgacggcgccctgagaagaaccaccatcaagaagagcaagaccgacctgctgaaccccgaggaggccgaggaccagctggccgacatcgccagcgtgggcagccccttcgccagagccagcatcaagagcgccaagctggagaacagcaccttcttccacaagaaggagagaagaatgagattctacatcagaagaatggtgaagacccaggccttctactggaccgtgctgagcctggtggccctgaacaccctgtgcgtggccatcgtgcactacaaccagcccgagtggctgagcgacttcctgtactacgccgagttcatcttcctgggcctgttcatgagcgagatgttcatcaagatgtacggcctgggcaccagaccctacttccacagcagcttcaactgcttcgactgcggcgtgatcatcggcagcatcttcgaggtgatctgggccgtgatcaagcccggcaccagcttcggcatcagcgtgctgagagccctgagactgctgagaatcttcaaggtgaccaagtactgggccagcctgagaaacctggtggtgagcctgctgaacagcatgaagagcatcatcagcctgctgttcctgctgttcctgttcatcgtggtgttcgccctgctgggcatgcagctgttcggcggccagttcaacttcgacgagggcaccccccccaccaacttcgacaccttccccgccgccatcatgaccgtgttccagatcctgaccggcgaggactggaacgaggtgatgtacgacggcatcaagagccagggcggcgtgcagggcggcatggtgttcagcatctacttcatcgtgctgaccctgttcggcaactacaccctgctgaacgtgttcctggccatcgccgtggacaacctggccaacgcccaggagctgaccaaggtggaggccgacgagcaggaggaggaggaggccgccaaccagaagctggccctgcagaaggccaaggaggtggccgaggtgagccccctgagcgccgccaacatgagcatcgccgtgaaggagcagcagaagaaccagaagcccgccaagagcgtgtgggagcagagaaccagcgagatgagaaagcagaacctgctggccagcagagaggccctgtacaacgagatggaccccgacgagagatggaaggccgcctacaccagacacctgagacccgacatgaagacccacctggacagacccctggtggtggacccccaggagaacagaaacaacaacaccaacaagagcagagccgccgagcccaccgtggaccagagactgggccagcagagagccgaggacttcctgagaaagcaggccagataccacgacagagccagagaccccagcggcagcgccggcctggacgccagaagaccctgggccggcagccaggaggccgagctgagcagagagggcccctacggcagagagagcgaccaccacgccagagagggcagcctggagcagcccggcttctgggagggcgaggccgagagaggcaaggccggcgacccccacagaagacacgtgcacagacagggcggcagcagagagagcagaagcggcagccccagaaccggcgccgacggcgagcacagaagacacagagcccacagaagacccggcgaggagggccccgaggacaaggccgagagaagagccagacacagagagggcagcagacccgccagaggcggcgagggcgagggcgagggccccgacggcggcgagagaagaagaagacacagacacggcgcccccgccacctacgagggcgacgccagaagagaggacaaggagagaagacacagaagaagaaaggagaaccagggcagcggcgtgcccgtgagcggccccaacctgagcaccaccagacccatccagcaggacctgggcagacaggacccccccctggccgaggacatcgacaacatgaagaacaacaagctggccaccgccgagagcgccgccccccacggcagcctgggccacgccggcctgccccagagccccgccaagatgggcaacagcaccgaccccggccccatgctggccatccccgccatggccaccaacccccagaacgccgccagcagaagaacccccaacaaccccggcaaccccagcaaccccggcccccccaagacccccgagaacagcctgatcgtgaccaaccccagcggcacccagaccaacagcgccaagaccgccagaaagcccgaccacaccaccgtggacatcccccccgcctgccccccccccctgaaccacaccgtggtgcaggtgaacaagaacgccaaccccgaccccctgcccaagaaggaggaggagaagaaggaggaggaggaggacgacagaggcgaggacggccccaagcccatgcccccctacagcagcatgttcatcctgagcaccaccaaccccctgagaagactgtgccactacatcctgaacctgagatacttcgagatgtgcatcctgatggtgatcgccatgagcagcatcgccctggccgccgaggaccccgtgcagcccaacgcccccagaaacaacgtgctgagatacttcgactacgtgttcaccggcgtgttcaccttcgagatggtgatcaagatgatcgacctgggcctggtgctgcaccagggcgcctacttcagagacctgtggaacatcctggacttcatcgtggtgagcggcgccctggtggccttcgccttcaccggcaacagcaagggcaaggacatcaacaccatcaagagcctgagagtgctgagagtgctgagacccctgaagaccatcaagagactgcccaagctgaaggccgtgttcgactgcgtggtgaacagcctgaagaacgtgttcaacatcctgatcgtgtacatgctgttcatgttcatcttcgccgtggtggccgtgcagctgttcaagggcaagttcttccactgcaccgacgagagcaaggagttcgagaaggactgcagaggcaagtacctgctgtacgagaagaacgaggtgaaggccagagacagagagtggaagaagtacgagttccactacgacaacgtgctgtgggccctgctgaccctgttcaccgtgagcaccggcgagggctggccccaggtgctgaagcacagcgtggacgccaccttcgagaaccagggccccagccccggctacagaatggagatgagcatcttctacgtggtgtacttcgtggtgttccccttcttcttcgtgaacatcttcgtggccctgatcatcatcaccttccaggagcagggcgacaagatgatggaggagtacagcctggagaagaacgagagagcctgcatcgacttcgccatcagcgccaagcccctgaccagacacatgccccagaacaagcagagcttccagtacagaatgtggcagttcgtggtgagcccccccttcgagtacaccatcatggccatgatcgccctgaacaccatcgtgctgatgatgaagttctacggcgccagcgtggcctacgagaacgccctgagagtgttcaacatcgtgttcaccagcctgttcagcctggagtgcgtgctgaaggtgatggccttcggcatcctgaactacttcagagacgcctggaacatcttcgacttcgtgaccgtgctgggcagcatcaccgacatcctggtgaccgagttcggcaaccccaacaacttcatcaacctgagcttcctgagactgttcagagccgccagactgatcaagctgctgagacagggctacaccatcagaatcctgctgtggaccttcgtgcagagcttcaaggccctgccctacgtgtgcctgctgatcgccatgctgttcttcatctacgccatcatcggcatgcaggtgttcggcaacatcggcatcgacgtggaggacgaggacagcgacgaggacgagttccagatcaccgagcacaacaacttcagaaccttcttccaggccctgatgctgctgttcagaagcgccaccggcgaggcctggcacaacatcatgctgagctgcctgagcggcaagccctgcgacaagaacagcggcatcctgaccagagagtgcggcaacgagttcgcctacttctacttcgtgagcttcatcttcctgtgcagcttcctgatgctgaacctgttcgtggccgtgatcatggacaacttcgagtacctgaccagagacagcagcatcctgggcccccaccacctggacgagtacgtgagagtgtgggccgagtacgaccccgccgcctggggcagaatgccctacctggacatgtaccagatgctgagacacatgagcccccccctgggcctgggcaagaagtgccccgccagagtggcctacaagagactgctgagaatggacctgcccgtggccgacgacaacaccgtgcacttcaacagcaccctgatggccctgatcagaaccgccctggacatcaagatcgccaagggcggcgccgacaagcagcagatggacgccgagctgagaaaggagatgatggccatctggcccaacctgagccagaagaccctggacctgctggtgaccccccacaagagcaccgacctgaccgtgggcaagatctacgccgccatgatgatcatggagtactacagacagagcaaggccaagaagctgcaggccatgagagaggagcaggacagaacccccctgatgttccagagaatggagccccccagccccacccaggagggcggccccggccagaacgccctgcccagcacccagctggaccccggcggcgccctgatggcccacgagagcggcctgaaggagagccccagctgggtgacccagagagcccaggagatgttccagaagaccggcacctggagccccgagcagggcccccccaccgacatgcccaacagccagcccaacagccagagcgtggagatgagagagatgggcagagacggctacagcgacagcgagcactacctgcccatggagggccagggcagagccgccagcatgcccagactgcccgccgagaaccagagaagaagaggcagacccagaggcaacaacctgagcaccatcagcgacaccagccccatgaagagaagcgccagcgtgctgggccccaaggccagaagactggacgactacagcctggagagagtgccccccgaggagaaccagagacaccaccagagaagaagagacagaagccacagagccagcgagagaagcctgggcagatacaccgacgtggacaccggcctgggcaccgacctgagcatgaccacccagagcggcgacctgcccagcaaggagagagaccaggagagaggcagacccaaggacagaaagcacagacagcaccaccaccaccaccaccaccaccaccacccccccccccccgacaaggacagatacgcccaggagagacccgaccacggcagagccagagccagagaccagagatggagcagaagccccagcgagggcagagagcacatggcccacagacagggcagcagcagcgtgagcggcagccccgcccccagcaccagcggcaccagcacccccagaagaggcagaagacagctgccccagacccccagcacccccagaccccacgtgagctacagccccgtgatcagaaaggccggcggcagcggccccccccagcagcagcagcagcagcagcagcagcagcagcagcaggccgtggccagacccggcagagccgccaccagcggccccagaagataccccggccccaccgccgagcccctggccggcgacagaccccccaccggcggccacagcagcggcagaagccccagaatggagagaagagtgcccggccccgccagaagcgagagccccagagcctgcagacacggcggcgccagatggcccgccagcggcccccacgtgagcgagggcccccccggccccagacaccacggctactacagaggcagcgactacgacgaggccgacggccccggcagcggcggcggcgaggaggccatggccggcgcctacgacgcccccccccccgtgagacacgccagcagcggcgccaccggcagaagccccagaacccccagagccagcggccccgcctgcgccagccccagcagacacggcagaagactgcccaacggctactaccccgcccacggcctggccagacccagaggccccggcagcagaaagggcctgcacgagccctacagcgagagcgacgacgactggtgctag

SEQ ID NO: 213888 - protein, 402 aa, Artificial Sequence
  derived and/or modified sequence
MRTTLTPSCSSALDPQEIKRAATHLSWHPDGNRKLAVAYSCLDFQRAPVGMSSDSYIWDLENPNKPELALKPSSPLVTLEFNPKDSHVLLGGCYNGQIACWDTRKGSLVAELSTIESSHRDPVYGTIWLQSKTGTECFSASTDGQVMWWDIRKMSEPTEVVILDITKKEQLENALGAISLEFESTLPTKFMVGTEQGIVISCNRKAKTSAEKIVCTFPGHHGPIYALQRNPFYPKNFLTVGDWTARIWSEDSRESSIMWTKYHMAYLTDAAWSPVRPTVFFTTRMDGTLDIWDFMFEQCDPTLSLKVCDEALFCLRVQDNGCLIACGSQLGTTTLLEVSPGLSTLQRNEKNVASSMFERETRREKILEARHREMRLKEKAATKSRRRPGGGGGRGSSGGRRG

SEQ ID NO: 213889 - protein, 605 aa, Artificial Sequence
  derived and/or modified sequence
MEIVYVYVKKRSEFGKQCNFSDRQAELNIDIMPNPELAEQFVERNPVDTGIQCSISMSEHEANSERFEMETRGVNHVEGGWPKDVNPLELEQTIRFRKKVEKDENYVNAIMQLGSIMEHCIKQNNAIDIYEEYFNDEEAMEVMEEDPSAKTINVFRDPQEIKRAATHLSWHPDGNRKLAVAYSCLDFQRAPVGMSSDSYIWDLENPNKPELALKPSSPLVTLEFNPKDSHVLLGGCYNGQIACWDTRKGSLVAELSTIESSHRDPVYGTIWLQSKTGTECFSASTDGQVMWWDIRKMSEPTEVVILDITKKEQLENALGAISLEFESTLPTKFMVGTEQGIVISCNRKAKTSAEKIVCTFPGHHGPIYALQRNPFYPKNFLTVGDWTARIWSEDSRESSIMWTKYHMAYLTDAAWSPVRPTVFFTTRMDGTLDIWDFMFEQCDPTLSLKVCDEALFCLRVQDNGCLIACGSQLGTTTLLEVSPGLSTLQRNEKNVASSMFERETRREKILEARHREMRLKEKGKAEGRDEEQTDEELAVDLEALVSKAEEEFFDIIFAELKKKEADAIKLTPVPQQPSPEEDQVVEEGEEAAGEEGDEEVEEDLA

SEQ ID NO: 213890 - DNA, 1209 bp, Artificial Sequence
  derived and/or modified sequence
atgcgtacaaccctcacaccctcctgtagcagcgctctcgatccacaggaaataaaacgggccgcaacccacctttcctggcaccccgacggaaaccggaagctcgccgttgcatattcatgcttggactttcagagagccccagttggcatgtcaagtgattcctacatctgggatttggaaaatccgaataaacccgaacttgcacttaaaccctcctctccattggtcacactcgaattcaatcccaaggactcacacgtcctcctgggggggtgctataatgggcagatcgcatgttgggatacacgaaaagggagcctcgtggccgagctctcaactattgaatctagccatcgagaccctgtctacgggaccatctggctgcagtccaaaacaggaacagaatgtttttctgcttcaacagacggacaagtaatgtggtgggacattcggaagatgagtgaaccaaccgaagttgtcatcctggacatcactaaaaaggaacagctagaaaacgctctgggcgcgatatcgcttgaattcgaaagtacactgccgactaagttcatggtgggcaccgagcagggaattgtgattagctgcaaccgcaaggctaagaccagcgccgaaaagatcgtctgtaccttccccggccaccatgggcccatctatgcacttcagcgcaatccattttacccaaagaacttccttacagttggagactggacagcccggatatggagcgaggatagccgagagagctccattatgtggaccaagtaccacatggcttacctgaccgacgctgcatggagccccgtgaggcccacggtatttttcacaaccaggatggacggcacccttgatatctgggacttcatgttcgagcaatgtgaccccaccctgtcactgaaagtatgtgacgaggcactgttctgtcttagagttcaagataacggatgtctgattgcctgcggttctcagctgggtacaacaaccctcctggaagtcagtcccggtctgtcaacgctccagaggaacgagaagaatgttgcctcatccatgttcgagagagaaacccgtcgagagaagattcttgaagcacgccatcgtgagatgaggctaaaggagaaagctgcaaccaaaagtcggagacgacctggcggtgggggtggtcggggaagcagcggcggacggcggggttag

SEQ ID NO: 213891 - DNA, 1818 bp, Artificial Sequence
  derived and/or modified sequence
atggagatcgtctacgtctacgtcaagaagaggagcgagttcggcaagcagtgcaatttctcagacagacaggcggagctcaacatcgatattatgcctaatcctgaactggcagagcaattcgtggaacggaacccagtggacactggcatccagtgctcgatctctatgagtgaacacgaggccaatagcgagcggttcgaaatggagacaagaggtgtgaatcacgttgagggcggttggcccaaagatgtgaaccccctcgagttggagcagacgatccggttcaggaagaaggttgagaaagatgaaaattatgtaaatgctataatgcagctcggcagtattatggaacattgcattaagcagaataatgccatcgacatttatgaggaatatttcaacgacgaggaggccatggaagtcatggaggaagatcccagtgctaagactatcaacgtgtttcgcgatccccaggagatcaagcgtgccgcaactcacctctcctggcatcccgacggtaaccgcaaactggccgtagcgtactcatgtctcgattttcagcgtgccccggtgggtatgagttccgacagctatatctgggacctcgaaaatccgaacaaaccggagctcgctctaaaacccagctcacccctcgtaaccctggaatttaaccctaaggatagccatgtgctgcttggtggatgttacaacgggcagatagcctgttgggataccagaaagggctcactggtcgctgaactgagtaccatagagtctagccatagagatcccgtatacgggacgatctggcttcagtcaaaaacaggtaccgaatgcttctcggcctcaaccgacggccaggtcatgtggtgggatattcggaagatgtctgaaccaacagaggttgtgatcctcgacatcaccaagaaggaacagctcgaaaacgcacttggagctatttccttggaatttgaatccaccctgcctaccaagttcatggtgggcaccgaacagggtattgttatcagttgtaaccgcaaagccaagaccagcgcggaaaagattgtttgtacctttccaggacatcacgggcccatttatgctctgcagcgcaaccccttctatcccaagaactttctgactgttggagactggactgctcggatctggagcgaggatagcagggagtcctccataatgtggaccaaatatcacatggcatacctgaccgatgctgcctggagcccagtccgccctaccgtcttcttcacaacccggatggacggcacactcgacatctgggacttcatgtttgaacagtgcgaccctacactgtcccttaaggtgtgtgatgaagccctgttttgtcttcgagtgcaggataacggttgcctaatcgcttgcggatcccagttaggcactaccactctgctggaagtgagtccagggttgtcaactctacagcggaacgaaaaaaatgtggccagctctatgtttgagagagagaccaggagagagaagatactggaagcccgccacagagagatgcgattgaaagagaagggtaaggccgaaggtcgggacgaggagcagactgatgaggagctagcagtcgacctggaagctctcgttagcaaagcagaggaagaatttttcgatatcatctttgctgaattgaaaaaaaaggaggccgacgccattaagttgacacccgtccctcaacagccctctcctgaggaagatcaggttgttgaagagggggaagaagctgctggggaagagggggatgaagaggtggaagaagatctggcctag

SEQ ID NO: 213892 - DNA, 1818 bp, Artificial Sequence
  derived and/or modified sequence
atggagatcgtgtatgtgtacgtcaaaaagcgttctgaatttggaaagcaatgcaactttagcgatcgacaagccgagctcaatatcgatatcatgcctaaccccgaactcgccgaacagttcgtcgagaggaaccccgtggacactggcatacagtgcagcatttcgatgtcagaacatgaagcaaatagcgagagatttgagatggagacacgcggggtgaaccacgtggaaggcgggtggccaaaggatgtcaaccccctagaactggagcaaacaatccgtttcaggaaaaaggtcgagaaggatgagaattatgtgaatgccattatgcagctgggaagtataatggagcattgtataaaacaaaataacgcaatcgacatatacgaggaatacttcaacgatgaagaggctatggaggtaatggaggaggatccttccgccaaaaccatcaacgtctttagggacccccaggaaataaagcgggctgccacccacctgtcatggcaccccgatgggaacagaaaactggcagttgcttactcatgcttggactttcagcgcgcccccgtgggcatgagctctgatagctatatctgggatctagaaaaccctaacaagcccgaactggctctcaaaccttcgagccctctcgtgactcttgagttcaatccgaaggacagccacgtcctgctggggggttgctataatggccagattgcctgttgggacactcggaaaggcagcctggtggccgaactgagtactatagagagcagccaccgggatcccgtctatggcaccatctggcttcaatcaaagactggtaccgagtgcttctccgcctccaccgatggccaggtcatgtggtgggacatcagaaagatgtccgagcctactgaggttgtgatcctagacatcaccaagaaagagcagctggagaatgcactgggggcaatctccctggagttcgagagcacactgcccactaaatttatggttggcactgaacagggaattgtcatttcatgcaataggaaagccaaaacaagtgccgagaaaatcgtctgcacattcccaggacatcacgggcctatttacgccctacaaaggaatccattttatcctaagaattttctaactgtcggcgattggactgctaggatatggagcgaagattcgcgtgaaagctccatcatgtggactaagtaccatatggcctatcttactgatgccgcatggtcgccagtgaggcctactgtgttcttcactactcgtatggatgggacgctggatatttgggatttcatgttcgagcaatgcgaccctaccctctccttaaaagtgtgtgacgaagccttgttctgcttgagggtccaggacaacgggtgtctgatcgcatgtgggagccaattggggacgaccaccctgctcgaagtctcacctggactctccactctgcagcggaacgaaaagaacgtcgcctcgtccatgtttgaacgcgagacccgccgggaaaagatcttggaagcccgccaccgcgaaatgcggctgaaagagaagggtaaagctgaaggtagggacgaagaacagactgatgaagaactggctgtcgacctggaagccctggtgtcaaaggctgaagaggaattttttgatattatttttgcagaactgaagaagaaggaagcagatgcaatcaaactgaccccggtgccccaacagccatctcccgaagaggaccaggtggtggaggaaggtgaggaagcagcaggggaggaaggagacgaggaggtcgaagaggatctcgcctag

SEQ ID NO: 213893 - DNA, 1209 bp, Artificial Sequence
  derived and/or modified sequence
atgaggaccaccctgacccccagctgcagcagcgccctggacccccaggagatcaagagagctgccacccacctgtcctggcacccagatggcaacaggaagctggccgtggcctacagctgcctggacttccagagggcccctgtgggcatgagcagtgacagctacatctgggacctggagaaccccaacaagccagagctggccctgaagcccagcagccccctggtgaccctggagttcaaccccaaggacagccacgtgctgctgggcggctgctacaacggccagatcgcctgctgggacaccaggaagggcagcctggtggccgagctgagcaccatcgagagcagccaccgggaccctgtgtatggcaccatctggctgcagagcaagacaggaacagagtgcttcagcgccagcacagatggccaggtgatgtggtgggacatcaggaagatgtctgagcccacagaggtggtgatcctggacatcaccaagaaggagcagctggagaatgccctgggcgccatcagcctggagtttgagagcaccctgcccaccaagttcatggtgggcacagagcagggcatcgtcatcagctgcaacaggaaggccaagaccagcgctgagaagatcgtgtgcaccttccctggccaccacggccccatctatgccctgcagaggaaccccttctaccccaagaacttcctgactgtgggggactggacagcccgcatctggagcgaggacagccgggagagcagcatcatgtggaccaagtaccacatggcctacctgacagatgctgcctggagccctgtgcggcccaccgtcttcttcaccaccaggatggatggcaccctggacatctgggacttcatgtttgagcagtgtgaccccaccctgagcctgaaggtgtgtgatgaggccctcttctgcctgcgggtgcaggacaatggctgcctgattgcctgtggcagccagctgggcaccaccaccctgctggaggtgtccccaggcctgagcaccctgcagagaaatgagaagaatgtggccagctccatgtttgagcgggagacccggcgggagaagatcctggaggcccggcaccgggagatgaggctgaaggagaaggccgccaccaagagcagaagaagacctgggggcggcggcggccggggcagcagcggcggccggcggggctag

SEQ ID NO: 213894 - DNA, 1818 bp, Artificial Sequence
  derived and/or modified sequence
atggagatcgtgtatgtgtatgtgaagaagagaagtgaatttgggaagcagtgcaacttcagtgaccggcaggccgagctgaacatcgacatcatgcccaaccctgagctggccgagcagtttgtggagaggaaccctgtggacaccggcatccagtgcagcatctccatgtctgagcacgaggccaacagcgagagatttgagatggagacccggggcgtgaaccacgtggagggcggctggcccaaggatgtgaaccccctggagctggagcagaccatccgcttcaggaagaaggtggagaaggatgagaactacgtgaatgccatcatgcagctgggcagcatcatggagcactgcatcaagcagaacaatgccatcgacatctatgaggagtacttcaatgatgaggaggccatggaggtgatggaggaggaccccagcgccaagaccatcaacgtgttccgggacccccaggagatcaagagagctgccacccacctgtcctggcacccagatggcaacaggaagctggccgtggcctacagctgcctggacttccagagggcccctgtgggcatgagcagtgacagctacatctgggacctggagaaccccaacaagccagagctggccctgaagcccagcagccccctggtgaccctggagttcaaccccaaggacagccacgtgctgctgggcggctgctacaacggccagatcgcctgctgggacaccaggaagggcagcctggtggccgagctgagcaccatcgagagcagccaccgggaccctgtgtatggcaccatctggctgcagagcaagacaggaacagagtgcttcagcgccagcacagatggccaggtgatgtggtgggacatcaggaagatgtctgagcccacagaggtggtgatcctggacatcaccaagaaggagcagctggagaatgccctgggcgccatcagcctggagtttgagagcaccctgcccaccaagttcatggtgggcacagagcagggcatcgtcatcagctgcaacaggaaggccaagaccagcgctgagaagatcgtgtgcaccttccctggccaccacggccccatctatgccctgcagaggaaccccttctaccccaagaacttcctgactgtgggggactggacagcccgcatctggagcgaggacagccgggagagcagcatcatgtggaccaagtaccacatggcctacctgacagatgctgcctggagccctgtgcggcccaccgtcttcttcaccaccaggatggatggcaccctggacatctgggacttcatgtttgagcagtgtgaccccaccctgagcctgaaggtgtgtgatgaggccctcttctgcctgcgggtgcaggacaatggctgcctgattgcctgtggcagccagctgggcaccaccaccctgctggaggtgtccccaggcctgagcaccctgcagagaaatgagaagaatgtggccagctccatgtttgagcgggagacccggcgggagaagatcctggaggcccggcaccgggagatgaggctgaaggagaagggcaaggccgagggcagagatgaggagcagacagatgaggagctggccgtggacctggaggccctggtgtccaaggccgaggaggagttctttgacatcatctttgctgagctgaagaagaaggaggctgatgccatcaagctgacccctgtgccccagcagcccagccctgaggaggaccaggtggtggaggagggggaggaggccgccggggaggagggagatgaggaggtggaggaggacctggcctag

SEQ ID NO: 213895 - DNA, 1209 bp, Artificial Sequence
  derived and/or modified sequence
atgcggaccaccctgacccccagctgcagcagcgccctggacccccaggaaatcaaaagggcggccacccacctctcttggcaccctgacggcaacagaaagctcgccgtggcgtactcttgtctggattttcagagagcccccgtcggcatgtcatctgactcctatatttgggaccttgagaatccaaacaagccggagctggcattaaaacccagctctcctctcgtcacactggaattcaatcccaaggacagccacgtcctactcggagggtgttacaacgggcagattgcctgctgggacaccagaaaggggtctttggttgcggaactttccacgatcgaaagtagccatagggaccctgtgtacggaactatttggcttcagtcaaagacagggactgagtgttttagcgcttctacggacggtcaggtgatgtggtgggacattagaaagatgagcgaacctactgaggtggttattctggatatcactaaaaaggagcagctcgaaaatgcgctgggggctatttctctggagttcgagtcaaccttgcccactaaattcatggtaggcactgaacagggcatcgttatcagctgcaacagaaaagccaagaccagcgccgaaaaaatcgtgtgcaccttcccaggacatcacgggcctatctatgctttgcaacgtaatcctttttatcccaagaactttctgacagtaggggactggacagcccgcatttggtctgaagattcccgcgagtccagcatcatgtggaccaaatatcacatggcctacctgacggacgccgcttggagccctgtaaggcccactgttttcttcactacacggatggacgggacgctggacatatgggattttatgttcgaacagtgcgaccccactctttcccttaaagtatgtgatgaggccttattttgcctgagagtacaggacaacggatgcctgattgcgtgcggttcgcagctcggaactacaaccctgctggaggtcagtcccggactatccactcttcagagaaacgagaagaacgtggcttcgtccatgttcgagcgtgaaactcggagggaaaaaattctggaggctaggcacagggagatgcggctgaaggaaaaagccgcaacaaaatctcggcggcggcctggggggggcggggggagaggatcaagcgggggtcgtagaggctag

SEQ ID NO: 213896 - DNA, 1818 bp, Artificial Sequence
  derived and/or modified sequence
atggagatcgtgtacgtgtacgtgaagaagcggagcgagttcggcaagcaatgcaatttttctgaccgacaggcggaattgaacatcgacatcatgccaaatcccgagctcgctgagcaattcgtcgagagaaatcccgtggacacgggtatacagtgcagcatcagtatgtcagagcatgaggccaactccgaaaggtttgagatggagacacggggagtaaaccacgtagaaggagggtggccgaaggatgtgaatccgctggagctcgagcaaaccatccgttttcggaaaaaggtcgaaaaagacgaaaactacgtaaacgctatcatgcagctgggttccatcatggagcattgtattaaacaaaataacgctatcgacatttacgaagaatacttcaacgacgaggaggcaatggaagttatggaggaggacccctcagccaaaaccatcaacgtgttccgggatccgcaggaaattaaacgtgcggccacccacctgtcttggcaccctgatggaaacagaaaactggcagttgcttattcctgcctagacttccagcgcgcacccgtggggatgagcagtgatagctatatttgggacctggagaatccaaacaagccggagttagccctcaagccctccagtcccctggtcaccctggaattcaacccaaaggattctcatgtcctgttgggcgggtgctataacggacagattgcctgctgggacaccaggaagggctccctagtagcagaactgtcaacaattgaatcttcccaccgggaccctgtctatgggaccatctggctgcagagcaagacaggtaccgaatgcttcagtgcctctacagatggccaagttatgtggtgggacatcaggaagatgtcagagcccacagaagtagtcatattggacattacaaagaaggaacagctggagaatgctctgggtgcgatctctctggagtttgaatcgactctgccgactaagtttatggtcgggactgaacaggggatcgtgatatcatgtaaccggaaggccaaaacaagcgctgaaaagattgtctgtactttcccaggccaccacggcccaatctacgcactccagcggaaccccttttaccccaagaactttctgacagtgggtgattggacagcaagaatatggagtgaggacagtcgggagagcagtatcatgtggaccaagtaccatatggcctatctcactgacgccgcatggtccccagtccggcctacagtgtttttcacaactcgaatggacgggacactagacatatgggatttcatgtttgaacaatgtgacccaactttatctttaaaggtgtgcgacgaggcactcttttgcctgcgggtgcaggacaatggctgcctaatagcctgtgggtctcagctgggtaccaccacactcctcgaggtcagtcctggcttgtctactttgcagagaaacgagaagaatgtggcctcatcaatgttcgagcgggagactcgtagggaaaagatcctggaggcaagacatagggagatgcgtctcaaggaaaaggggaaggccgaaggcagggacgaggagcagaccgatgaggaactggcggtggaccttgaggcactcgtttctaaggccgaggaggagtttttcgatataatcttcgccgagttgaagaagaaagaggctgatgcaattaagctgacacccgttccccagcagccgagccccgaggaggaccaggtggttgaagaaggtgaggaggctgctggagaggagggggacgaggaggtagaagaagacttggcctag

SEQ ID NO: 213897 - DNA, 1818 bp, Artificial Sequence
  derived and/or modified sequence
atggagatcgtgtacgtgtacgtgaagaagcggagcgagttcggcaaacagtgcaatttctcagataggcaagccgagttaaacattgatatcatgcccaatccagagctcgctgaacaattcgtggagaggaatccagttgatactggcattcagtgctccatatccatgagcgagcacgaagctaatagtgagcgttttgaaatggagactcggggtgtgaaccatgtggagggtggttggcctaaggacgtgaaccctctcgaactggagcagacaatccgctttcgtaagaaagtcgaaaaggacgagaattacgttaacgccattatgcagctagggagcattatggagcattgcataaaacagaacaacgccattgatatttatgaagaatactttaacgatgaggaggcgatggaagttatggaagaggacccttccgccaagacaattaacgtgttcagggatccccaagaaataaagcgggcagcgacccacctgtcctggcatccagatgggaaccgtaaactcgctgtggcttactcttgcctggacttccagagagcaccggtcggtatgtcctcagactcgtatatatgggacctggaaaacccaaacaagccagaactcgccctgaagcctagcagcccactggtgaccctcgagttcaatcctaaagattctcacgtgcttctgggcggatgttacaacggacagattgcctgctgggataccaggaaaggcagtctggtagctgagctgtcaaccattgaatcgtcgcaccgtgacccagtgtacgggacgatctggttgcagagtaaaacaggcactgaatgcttcagcgcctcgactgatggtcaggtcatgtggtgggacattcgaaagatgagtgagcccaccgaagtcgtaattttggatatcaccaagaaagagcagttagaaaatgctttaggcgcaatcagcctggaattcgagagtacattgcctaccaaatttatggtgggcacagagcaagggatcgtcataagttgcaaccgaaaggccaaaacctctgccgagaagattgtgtgtacctttcccgggcaccacggccctatctacgcgttgcaacgaaatccattttaccccaagaacttcctgaccgtgggagattggaccgcaagaatttggtccgaggacagtcgcgagtcaagcattatgtggaccaagtaccacatggcctacttaacagatgcagcatggtcaccagtccggccaacggtcttcttcaccacccgaatggatggaacactcgatatttgggattttatgttcgagcagtgcgacccaaccctcagcctcaaggtttgtgatgaggctttgttctgtttgcgggtgcaggataacggctgcttgatcgcctgtggctcccaattgggaactacgaccctgttggaggtgagcccaggactctccactctacagcgaaatgaaaaaaatgtggcaagcagcatgtttgaaagggagacccgtcgggaaaagattttagaagctcgccaccgtgagatgcgtctgaaagagaagggcaaagctgaaggacgagatgaagagcagacggatgaagaactggctgtggatttagaagccctggtgagcaaggcagaggaggaattctttgacattatcttcgcagagttgaaaaagaaagaggcagatgcaatcaaacttacccccgtccctcagcaaccctcaccagaagaggaccaggttgtggaagagggcgaggaagccgctggcgaagagggagatgaagaagttgaagaggacctcgcttag

SEQ ID NO: 213898 - DNA, 1209 bp, Artificial Sequence
  derived and/or modified sequence
atgcgaacaactcttacaccctcatgctcctccgccctggacccccaggagataaaacgagcagcaactcacctatcctggcatccagacgggaaccggaaactggcagttgcctactcctgtctggactttcaacgagcaccagtggggatgtccagtgactcttacatctgggaccttgagaatcccaataagcctgagctggctcttaaaccatcctctcccctagtaacactggagtttaaccctaaagattctcacgtgctcctgggaggatgttacaacggccagatcgcttgctgggacaccaggaaaggtagcctggtggctgagctctctaccatcgaatccagccaccgagacccagtgtatggcactatctggctgcagtccaaaacagggacagaatgtttcagcgcctccacagacggtcaggtcatgtggtgggacattaggaaaatgagcgaaccaactgaggtggtgattctcgacattacaaagaaggaacagttggagaatgcgcttggtgccatcagcctggagtttgagtctactctgcccacaaagtttatggtggggaccgagcagggcatcgtcatatcatgcaaccggaaagccaaaactagtgcggagaagatcgtgtgcacatttccgggacaccacgggcctatctacgccttgcagaggaatccattttacccaaagaacttcctcaccgtgggagattggaccgccaggatctggtctgaagactcccgggaatcatccataatgtggactaagtatcacatggcgtacctgacggacgccgcttggtcccctgtgaggcccaccgtgttttttaccactagaatggatggaacgctggatatctgggactttatgtttgaacagtgtgacccgacactctcactcaaggtctgcgatgaagcattgttttgcctccgagtgcaggataatggatgcctgattgcttgcggttcacagctggggactaccacactccttgaggtgtcccctgggctgtctactctccagcggaacgaaaagaacgttgccagctccatgtttgaacgcgaaacaaggagggaaaagatcttggaagccaggcacagggagatgagactgaaggagaaggcggctaccaaatcccggagaaggccgggagggggtgggggacggggaagttcaggtgggcgtagaggctag

SEQ ID NO: 213899 - DNA, 1818 bp, Artificial Sequence
  derived and/or modified sequence
atggagattgtttacgtttatgtgaaaaagaggtccgagttcggcaaacaatgtaacttcagcgacaggcaggctgagctgaatatcgatataatgccaaaccccgaactggctgagcagtttgtggagcgcaaccccgtggacaccggaatacaatgctccatcagtatgtccgaacacgaggctaattcagagagatttgagatggaaacacggggtgtcaatcacgtggaggggggttggcctaaggacgtgaaccctctggagctggagcagaccatacgtttccggaagaaggtagagaaagacgagaattacgtgaacgccatcatgcagctgggttccatcatggagcattgcatcaaacagaacaacgccattgacatctatgaggaatatttcaacgatgaggaagcgatggaggtgatggaggaagacccctcagctaagactattaatgttttccgtgatccacaggagattaaaagggctgccacccatctgagttggcacccagacggcaatcgaaagctcgcagtagcctacagctgcttggactttcagcgggctcctgtcggtatgtccagcgacagttatatctgggatctggagaacccaaacaagccggagctggctctcaagcctagctcaccccttgttactttagagtttaaccctaaagatagccatgttctgctcggcggttgctataatggccagatcgcttgctgggatacacgaaaaggctcactcgtcgcagagctgtctacgattgagtccagccacagagatccagtgtatggtacaatctggttacagagcaagactggaacggaatgcttttctgcatccacagacggtcaggtcatgtggtgggatattcgcaagatgagcgagcctaccgaggttgtcattcttgatatcaccaagaaagagcagctggaaaacgctctgggggcaatctcccttgaatttgaatcaacgctgcccacgaagtttatggtaggcaccgagcagggcatcgttatcagttgcaaccgtaaagcgaagactagcgcagaaaagatagtctgtactttccctggccaccacggcccaatctatgccctccagcgcaatccgttctaccccaaaaacttcctaacagtaggagattggacggctcgaatttggagtgaggatagcagggagagctcaatcatgtggacgaagtaccatatggcttatctgactgatgccgcatggtctcccgttcgccctacggtgtttttcactaccagaatggatgggacactggacatatgggatttcatgtttgagcagtgcgatcccaccctgagcttgaaagtttgtgatgaagccctgttttgcctcagagttcaggacaatggttgtctcatcgcttgtggcagccagctcggcactactactctcctcgaggtttcacctggtcttagcacactccagagaaatgagaaaaacgtggcatcatccatgtttgagcgcgaaacccgtcgtgaaaagatcctggaagctaggcacagagagatgcggttaaaggagaagggcaaggccgagggacgtgacgaggaacagacagacgaagagctcgctgtggacttagaggccctggtgagcaaagcagaggaggagttctttgatattatattcgccgaactgaagaagaaagaagccgacgccattaagctaacccccgtgccccagcagccttccccggaggaggaccaggtggtcgaagagggagaggaggccgcaggcgaggagggcgatgaggaagtggaagaggatcttgcttag

SEQ ID NO: 213900 - DNA, 1818 bp, Artificial Sequence
  derived and/or modified sequence
atggagatcgtgtacgtgtacgtcaagaaaagaagtgagtttggaaagcagtgtaactttagtgatcgccaggcagaactgaacatcgacatcatgcctaatcccgagctggctgagcaattcgtcgagagaaacccagtcgacacagggatacagtgtagcatcagtatgtctgaacatgaagccaactccgagaggtttgagatggaaacacgaggagtgaaccatgtggaaggtggttggcccaaggacgtaaacccactggagctggaacagaccatcagattccgcaaaaaggttgagaaggatgagaattacgttaatgccatcatgcagctgggcagcatcatggagcactgtataaaacagaacaacgcaatcgatatatacgaggaatattttaacgatgaggaggcgatggaagtgatggaggaagacccctccgccaaaactattaacgtctttcgggacccccaggaaataaaacgagccgcaacacacctgtcatggcacccggacgggaacaggaaattggcagtggcctattcctgtcttgatttccaaagagcaccagttggtatgtccagcgactcttacatttgggacctggaaaacccaaataagcctgaactcgccctgaaaccatccagtcctcttgtcacacttgaattcaacccgaaggattcacacgtactgctgggcggatgctataatgggcagatagcctgttgggacacacggaaagggtccctagtggcagaactgagtacaattgagagcagtcatagggaccctgtctacggtacgatttggctgcaaagcaaaaccgggaccgaatgcttcagcgcttctaccgacggccaggtgatgtggtgggacatcagaaaaatgtccgaacccacagaggttgtcattttggacattactaagaaggagcaactggagaatgctctgggggctatctcacttgaattcgaaagtacccttcctacgaagtttatggtcggcacggaacaggggatcgtcatctcttgcaacagaaaagctaaaacaagcgctgagaaaatcgtatgcacgtttccgggtcaccatggccctatttacgcactgcagcggaaccctttttatccaaagaattttcttacagtgggtgactggaccgctcgtatatggtctgaagatagtcgcgaatcatctattatgtggacaaaatatcatatggcctacctgaccgacgctgcatggtcaccagtcaggccaacagtatttttcacaacccggatggatggaaccttggacatctgggattttatgtttgagcagtgcgacccgactctgtctctcaaggtgtgtgatgaggccctcttttgtctgagggtgcaggataacggttgcctgattgcatgtggttcacaactcgggacgaccacactgttggaagtctccccaggtctgagtaccctccaacggaacgagaaaaacgtggcgtcgtcaatgttcgaacgagagaccaggcgggagaaaatactggaagcaaggcatcgcgagatgcggctcaaggaaaaggggaaggctgagggacgagatgaggaacagaccgacgaggagctagctgtcgacttggaggcgctggtgtccaaagccgaagaggaatttttcgacatcatctttgccgagctgaagaagaaggaggctgatgcgatcaaactgacacccgtgccccagcaaccctcacctgaagaggatcaggtggtggaagaaggcgaagaggcagctggcgaagagggcgacgaagaagtagaggaggatctagcatag

SEQ ID NO: 213901 - DNA, 1209 bp, Artificial Sequence
  derived and/or modified sequence
atgagaaccaccctgacccccagctgcagcagcgccctggacccccaggagatcaagagagccgccacccacctgagctggcaccccgacggcaacagaaagctggccgtggcctacagctgcctggacttccagagagcccccgtgggcatgagcagcgacagctacatctgggacctggagaaccccaacaagcccgagctggccctgaagcccagcagccccctggtgaccctggagttcaaccccaaggacagccacgtgctgctgggcggctgctacaacggccagatcgcctgctgggacaccagaaagggcagcctggtggccgagctgagcaccatcgagagcagccacagagaccccgtgtacggcaccatctggctgcagagcaagaccggcaccgagtgcttcagcgccagcaccgacggccaggtgatgtggtgggacatcagaaagatgagcgagcccaccgaggtggtgatcctggacatcaccaagaaggagcagctggagaacgccctgggcgccatcagcctggagttcgagagcaccctgcccaccaagttcatggtgggcaccgagcagggcatcgtgatcagctgcaacagaaaggccaagaccagcgccgagaagatcgtgtgcaccttccccggccaccacggccccatctacgccctgcagagaaaccccttctaccccaagaacttcctgaccgtgggcgactggaccgccagaatctggagcgaggacagcagagagagcagcatcatgtggaccaagtaccacatggcctacctgaccgacgccgcctggagccccgtgagacccaccgtgttcttcaccaccagaatggacggcaccctggacatctgggacttcatgttcgagcagtgcgaccccaccctgagcctgaaggtgtgcgacgaggccctgttctgcctgagagtgcaggacaacggctgcctgatcgcctgcggcagccagctgggcaccaccaccctgctggaggtgagccccggcctgagcaccctgcagagaaacgagaagaacgtggccagcagcatgttcgagagagagaccagaagagagaagatcctggaggccagacacagagagatgagactgaaggagaaggccgccaccaagagcagaagaagacccggcggcggcggcggcagaggcagcagcggcggcagaagaggctag

SEQ ID NO: 213902 - DNA, 1818 bp, Artificial Sequence
  derived and/or modified sequence
atggagatcgtgtacgtgtacgtgaagaagagaagcgagttcggcaagcagtgcaacttcagcgacagacaggccgagctgaacatcgacatcatgcccaaccccgagctggccgagcagttcgtggagagaaaccccgtggacaccggcatccagtgcagcatcagcatgagcgagcacgaggccaacagcgagagattcgagatggagaccagaggcgtgaaccacgtggagggcggctggcccaaggacgtgaaccccctggagctggagcagaccatcagattcagaaagaaggtggagaaggacgagaactacgtgaacgccatcatgcagctgggcagcatcatggagcactgcatcaagcagaacaacgccatcgacatctacgaggagtacttcaacgacgaggaggccatggaggtgatggaggaggaccccagcgccaagaccatcaacgtgttcagagacccccaggagatcaagagagccgccacccacctgagctggcaccccgacggcaacagaaagctggccgtggcctacagctgcctggacttccagagagcccccgtgggcatgagcagcgacagctacatctgggacctggagaaccccaacaagcccgagctggccctgaagcccagcagccccctggtgaccctggagttcaaccccaaggacagccacgtgctgctgggcggctgctacaacggccagatcgcctgctgggacaccagaaagggcagcctggtggccgagctgagcaccatcgagagcagccacagagaccccgtgtacggcaccatctggctgcagagcaagaccggcaccgagtgcttcagcgccagcaccgacggccaggtgatgtggtgggacatcagaaagatgagcgagcccaccgaggtggtgatcctggacatcaccaagaaggagcagctggagaacgccctgggcgccatcagcctggagttcgagagcaccctgcccaccaagttcatggtgggcaccgagcagggcatcgtgatcagctgcaacagaaaggccaagaccagcgccgagaagatcgtgtgcaccttccccggccaccacggccccatctacgccctgcagagaaaccccttctaccccaagaacttcctgaccgtgggcgactggaccgccagaatctggagcgaggacagcagagagagcagcatcatgtggaccaagtaccacatggcctacctgaccgacgccgcctggagccccgtgagacccaccgtgttcttcaccaccagaatggacggcaccctggacatctgggacttcatgttcgagcagtgcgaccccaccctgagcctgaaggtgtgcgacgaggccctgttctgcctgagagtgcaggacaacggctgcctgatcgcctgcggcagccagctgggcaccaccaccctgctggaggtgagccccggcctgagcaccctgcagagaaacgagaagaacgtggccagcagcatgttcgagagagagaccagaagagagaagatcctggaggccagacacagagagatgagactgaaggagaagggcaaggccgagggcagagacgaggagcagaccgacgaggagctggccgtggacctggaggccctggtgagcaaggccgaggaggagttcttcgacatcatcttcgccgagctgaagaagaaggaggccgacgccatcaagctgacccccgtgccccagcagcccagccccgaggaggaccaggtggtggaggagggcgaggaggccgccggcgaggagggcgacgaggaggtggaggaggacctggcctag

SEQ ID NO: 213903 - DNA, 1992 bp, Artificial Sequence
  derived and/or modified sequence
ggtaaacgccgccgtttgaggagcaccggagccgcgaccgtggattgaacgcttccccagagacccagaagcagaaggagcggacccaggcagccggcaccatggagattgtgtacgtgtacgtcaagaagcgcagcgagttcgggaagcagtgcaatttctcggaccgccaggccgagctgaacatcgacatcatgcccaaccctgagctggccgagcagttcgtggagcggaacccagtggacacgggcatccagtgctcgatcagcatgtcggaacacgaggccaactcagagcggtttgagatggagacccggggagttaaccatgtcgaggggggctggcccaaggacgtgaaccccctggagctggagcagaccatccgtttccggaagaaagtggagaaagatgagaactacgttaacgccatcatgcagctcggctctggacccccaggaaatcaagagggctgccacacacctctcctggcaccccgatggcaacaggaagttggcagtggcatactcctgcttggattttcagcgggcacctgtgggcatgagcagcgattcatacatctgggacctggaaaaccccaacaagcctgaacttgctctgaagccatcgtctccactcgtgacgttggagttcaaccccaaagattcccacgtactcctgggtggctgctacaatggacagatagcctgctgggacacccgaaagggcagcctggtggcggagctatccaccattgagtccagccaccgagaccctgtgtatggcaccatctggctgcagtcgaagacgggcaccgagtgcttctcagcttccacggatgggcaggtcatgtggtgggacatccgaaagatgagcgagcccactgaagttgtgatcttggacatcaccaagaaggaacagttggaaaatgccttgggggccatctccctggagttcgaatctactttgcccaccaagttcatggtggggaccgagcagggcatcgtcatctcctgcaaccgcaaggccaagacgtcagctgaaaagattgtgtgcaccttcccgggccatcatggccccatctacgccctccagagaaaccccttctacccgaagaacttcctgacggttggcgactggacagcccgcatttggtctgaagacagccgggaatcgtccatcatgtggaccaagtaccacatggcttacctcactgatgctgcctggagccccgtgaggccgaccgttttctttaccaccaggatggacggaaccctggatatctgggacttcatgttcgagcagtgcgatcccaccctcagcttgaaggtgtgtgacgaggccctcttctgcctccgggtgcaggacaatgggtgtctcatcgcctgcggctcccagctggggacaaccaccctgctggaggtctcgcctgggctctctaccctccagaggaatgagaagaacgtagcctcttccatgtttgagcgtgagacccggcgagagaagatcctggaggccaggcaccgggagatgcggctgaaggagaaggcagcaaccaagtccagaagaagaccaggtggtggaggagggagaggaagcagcgggggaagaaggggatgaagaagtggaagaagacttagcctagaagtcagccttcgactgcggcgctatccctgtgtgccttcctttcccacctcttgaccctcaaccagacttgcatggccatggcagggcctcgggaagaccttcaggagtggggaagggtttctcctccatgatcgaccctcctcgtccacctacaaatcaggaacagaaagtctgtccactttgaaaatacctttccaggcagctccctgaccatttggacacattgccacgacaggagcctccaagtatgtgggaggggacgggcgggacgagcttggctgttctgctgcacctgaatgctttctgttatcctaattcttgtaaaattaaatgaatcgtaacaatgcc

SEQ ID NO: 213904 - DNA, 2278 bp, Artificial Sequence
  derived and/or modified sequence
caagcaaccggtaaacgccgccgtttgaggagcaccggagccgcgaccgtggattgaacgcttccccagagacccagaagcagaaggagcggacccaggcagccggcaccatggagattgtgtacgtgtacgtcaagaagcgcagcgagttcgggaagcagtgcaatttctcggaccgccaggccgagctgaacatcgacatcatgcccaaccctgagctggccgagcagttcgtggagcggaacccagtggacacgggcatccagtgctcgatcagcatgtcggaacacgaggccaactcagagcggtttgagatggagacccggggagttaaccatgtcgaggggggctggcccaaggacgtgaaccccctggagctggagcagaccatccgtttccggaagaaagtggagaaagatgagaactacgttaacgccatcatgcagctcggctctatcatggagcactgcatcaagcagaacaatgccattgacatctatgaagagtatttcaatgacgaggaggccatggaagtgatggaggaggacccttcagctaaaaccatcaatgtgttcagggacccccaggaaatcaagagggctgccacacacctctcctggcaccccgatggcaacaggaagttggcagtggcatactcctgcttggattttcagcgggcacctgtgggcatgagcagcgattcatacatctgggacctggaaaaccccaacaagcctgaacttgctctgaagccatcgtctccactcgtgacgttggagttcaaccccaaagattcccacgtactcctgggtggctgctacaatggacagatagcctgctgggacacccgaaagggcagcctggtggcggagctatccaccattgagtccagccaccgagaccctgtgtatggcaccatctggctgcagtcgaagacgggcaccgagtgcttctcagcttccacggatgggcaggtcatgtggtgggacatccgaaagatgagcgagcccactgaagttgtgatcttggacatcaccaagaaggaacagttggaaaatgccttgggggccatctccctggagttcgaatctactttgcccaccaagttcatggtggggaccgagcagggcatcgtcatctcctgcaaccgcaaggccaagacgtcagctgaaaagattgtgtgcaccttcccgggccatcatggccccatctacgccctccagagaaaccccttctacccgaagaacttcctgacggttggcgactggacagcccgcatttggtctgaagacagccgggaatcgtccatcatgtggaccaagtaccacatggcttacctcactgatgctgcctggagccccgtgaggccgaccgttttctttaccaccaggatggacggaaccctggatatctgggacttcatgttcgagcagtgcgatcccaccctcagcttgaaggtgtgtgacgaggccctcttctgcctccgggtgcaggacaatgggtgtctcatcgcctgcggctcccagctggggacaaccaccctgctggaggtctcgcctgggctctctaccctccagaggaatgagaagaacgtagcctcttccatgtttgagcgtgagacccggcgagagaagatcctggaggccaggcaccgggagatgcggctgaaggagaagggtaaggcggagggcagggatgaggagcagaccgatgaggagctggccgtagacctggaggcgctggtcagcaaggccgaggaggagttcttcgacatcatcttcgcagagctgaagaagaaggaggcagacgccataaagctgacgccagtgcctcagcaaccaagtccagaagaagaccaggtggtggaggagggagaggaagcagcgggggaagaaggggatgaagaagtggaagaagacttagcctagaagtcagccttcgactgcggcgctatccctgtgtgccttcctttcccacctcttgaccctcaaccagacttgcatggccatggcagggcctcgggaagaccttcaggagtggggaagggtttctcctccatgatcgaccctcctcgtccacctacaaatcaggaacagaaagtctgtccactttgaaaatacctttccaggcagctccctgaccatttggacacattgccacgacaggagcctccaagtatgtgggaggggacgggcgggacgagcttggctgttctgctgcacctgaatgctttctgttatcctaattcttgtaaaattaaatgaatcgtaacaatgcc

SEQ ID NO: 213905 - DNA, 2474 bp, Artificial Sequence
  derived and/or modified sequence
cctcccaatgtgctgggattacagttgtcagctaccgcgcctggccaaaatttttattgccctcctcagagagcaactgcaataactaaacagggtaatgcttagcatatagtcggcactcaggatttttttttaatgcggatgcagcttctggacaaattcctaggatctccccaccaccccttgcttcctgccccaaccagattgagaacctggagctgtcctggcaggacctgtggagatagggaaggggccggtggggtccctcaccccacaccctccctctgccccccagcagccggcaccatggagattgtgtacgtgtacgtcaagaagcgcagcgagttcgggaagcagtgcaatttctcggaccgccaggccgagctgaacatcgacatcatgcccaaccctgagctggccgagcagttcgtggagcggaacccagtggacacgggcatccagtgctcgatcagcatgtcggaacacgaggccaactcagagcggtttgagatggagacccggggagttaaccatgtcgaggggggctggcccaaggacgtgaaccccctggagctggagcagaccatccgtttccggaagaaagtggagaaagatgagaactacgttaacgccatcatgcagctcggctctatcatggagcactgcatcaagcagaacaatgccattgacatctatgaagagtatttcaatgacgaggaggccatggaagtgatggaggaggacccttcagctaaaaccatcaatgtgttcagggacccccaggaaatcaagagggctgccacacacctctcctggcaccccgatggcaacaggaagttggcagtggcatactcctgcttggattttcagcgggcacctgtgggcatgagcagcgattcatacatctgggacctggaaaaccccaacaagcctgaacttgctctgaagccatcgtctccactcgtgacgttggagttcaaccccaaagattcccacgtactcctgggtggctgctacaatggacagatagcctgctgggacacccgaaagggcagcctggtggcggagctatccaccattgagtccagccaccgagaccctgtgtatggcaccatctggctgcagtcgaagacgggcaccgagtgcttctcagcttccacggatgggcaggtcatgtggtgggacatccgaaagatgagcgagcccactgaagttgtgatcttggacatcaccaagaaggaacagttggaaaatgccttgggggccatctccctggagttcgaatctactttgcccaccaagttcatggtggggaccgagcagggcatcgtcatctcctgcaaccgcaaggccaagacgtcagctgaaaagattgtgtgcaccttcccgggccatcatggccccatctacgccctccagagaaaccccttctacccgaagaacttcctgacggttggcgactggacagcccgcatttggtctgaagacagccgggaatcgtccatcatgtggaccaagtaccacatggcttacctcactgatgctgcctggagccccgtgaggccgaccgttttctttaccaccaggatggacggaaccctggatatctgggacttcatgttcgagcagtgcgatcccaccctcagcttgaaggtgtgtgacgaggccctcttctgcctccgggtgcaggacaatgggtgtctcatcgcctgcggctcccagctggggacaaccaccctgctggaggtctcgcctgggctctctaccctccagaggaatgagaagaacgtagcctcttccatgtttgagcgtgagacccggcgagagaagatcctggaggccaggcaccgggagatgcggctgaaggagaagggtaaggcggagggcagggatgaggagcagaccgatgaggagctggccgtagacctggaggcgctggtcagcaaggccgaggaggagttcttcgacatcatcttcgcagagctgaagaagaaggaggcagacgccataaagctgacgccagtgcctcagcaaccaagtccagaagaagaccaggtggtggaggagggagaggaagcagcgggggaagaaggggatgaagaagtggaagaagacttagcctagaagtcagccttcgactgcggcgctatccctgtgtgccttcctttcccacctcttgaccctcaaccagacttgcatggccatggcagggcctcgggaagaccttcaggagtggggaagggtttctcctccatgatcgaccctcctcgtccacctacaaatcaggaacagaaagtctgtccactttgaaaatacctttccaggcagctccctgaccatttggacacattgccacgacaggagcctccaagtatgtgggaggggacgggcgggacgagcttggctgttctgctgcacctgaatgctttctgttatcctaattcttgtaaaattaaatgaatcgtaacaatgcc

SEQ ID NO: 213906 - protein, 522 aa, Artificial Sequence
  derived and/or modified sequence
MALTETQPQLLSADLVLALQVLMLWEMTEANKVLKRRQHPQRSHCISSKILESYPGEKPLTKSLQRGEDPQFDQVISSMSSLSEYCLPSILRTLFDCDEQQRDYLMERRDLAIDFIFSLVLIEVLKQGSLTCLIIPYLGTLVPTLAICILWQTCMQKSLECWHKPSKFPAVKKKFMAELKELRHKEQNPYVVQSIISLIMGMKFFRIKMYPVEDFEASLQFMQECAHYFLEVKDKDIKHALAGLFVEILVPVAAAVKNEVNVPCLRNFVESLYDTTLELSSRKKHSLALYPLVTCLLCVSQKQLFLNRWHIFLNNCLSNLKNKDPKMARVALESLYRLLWVYMIRIKCESNTATQSRLITIITTLFPKGSRGVVPRDMPLNIFVKIIQFIAQERLDFAMKEIIFDFLCVGKPAKAFSLNPERMNIGLRAFLVIADSLQQKDGEPPMPVTGAVLPSGNTLRVKKTYLSKTLTEEEAKMIGMSLYYSQVRKAVDNILRHLDKEVGRCMMLTNVQMLNKEPEDMI

SEQ ID NO: 213907 - protein, 3013 aa, Artificial Sequence
  derived and/or modified sequence
MASQQDSGFFEISIKYLLKSWSNTSPVGNGYIKPPVPPASGTHREKGPPTMLPINVDPDSKPGEYVLKSLFVNFTTQAERKIRIIMAEPLEKPLTKSLQRGEDPQFDQVISSMSSLSEYCLPSILRTLFDWYKRQNGIEDESHEYRPRTSNKSKSDEQQRDYLMERRDLAIDFIFSLVLIEVLKQIPLHPVIDSLIHDVINLAFKHFKYKEGYLGPNTGNMHIVADLYAEVIGVLAQAKFPAVKKKFMAELKELRHKEQNPYVVQSIISLIMGMKFFRIKMYPVEDFEASLQFMQECAHYFLEVKDKDIKHALAGLFVEILVPVAAAVKNEVNVPCLRNFVESLYDTTLELSSRKKHSLALYPLVTCLLCVSQKQLFLNRWHIFLNNCLSNLKNKDPKMARVALESLYRLLWVYMIRIKCESNTATQSRLITIITTLFPKGSRGVVPRDMPLNIFVKIIQFIAQERLDFAMKEIIFDFLCVGKPAKAFSLNPERMNIGLRAFLVIADSLQQKDGEPPMPVTGAVLPSGNTLRVKKTYLSKTLTEEEAKMIGMSLYYSQVRKAVDNILRHLDKEVGRCMMLTNVQMLNKEPEDMITGERKPKIDLFRTCVAAIPRLLPDGMSKLELIDLLARLSIHMDDELRHIAQNSLQGLLVDFSDWREDVLFGFTNFLLREVNDMHHTLLDSSLKLLLQLLTQWKLVIQTQGKVYEQANKIRNSELIANGSSHRIQSERGPHCSVLHAVEGFALVLLCSFQVATRKLSVLILKEIRALFIALGQPEDDDRPMIDVMDQLSSSILESFIHVAVSDSATLPLTHNVDLQWLVEWNAVLVNSHYDVKSPSHVWIFAQSVKDPWVLCLFSFLRQENLPKHCPTALSYAWPYAFTRLQSVMPLVDPNSPINAKKTSTAGSGDNYVTLWRNYLILCFGVAKPSIMSPGHLRASTPEIMATTPDGTVSYDNKAIGTPSVGVLLKQLVPLMRLESIEITESLVLGFGRTNSLVFRELVEELHPLMKEALERRPENKKRRERRDLLRLQLLRIFELLADAGVISDSTNGALERDTLALGALFLEYVDLTRMLLEAENDKEVEILKDIRAHFSAMVANLIQCVPVHHRRFLFPQQSLRHHLFILFSQWAGPFSIMFTPLDRYSDRNHQITRYQYCALKAMSAVLCCGPVFDNVGLSPDGYLYKWLDNILACQDLRVHQLGCEVVVLLLELNPDQINLFNWAIDRCYTGSYQLASGCFKAIATVCGSRNYPFDIVTLLNLVLFKASDTNREIYEISMQLMQILEAKLFVYSKKVAEQRPGSILYGTHGPLPPLYSVSLALLSCELARMYPELTLPLFSEVSQRFPTTHPNGRQIMLTYLLPWLHNIELVDSRLLLPGSSPSSPEDEVKDREGDVTASHGLRGNGWGSPEATSLVLNNLMYMTAKYGDEVPGPEMENAWNALANNEKWSNNLRITLQFLISLCGVSSDTVLLPYIKKVAIYLCRNNTIQTMEELLFELQQTEPVNPIVQHCDNPPFYRFTASSKASAAASGTTSSSNTVVAGQENFPDAEENKILKESDERFSNVIRAHTRLESRYSNSSGGSYDEDKNDPISPYTGWLLTITETKQPQPLPMPCTGGCWAPLVDYLPETITPRGPLHRCNIAVIFMTEMVVDHSVREDWALHLPLLLHAVFLGLDHYRPEVFEHSKKLLLHLLIALSCNSNFHSIASVLLQTREMGEAKTLTVQPAYQPEYLYTGGFDFLREDQSSPVPDSGLSSSSTSSSISLGGSSGNLPQMTQEVEDVDTAAETDEKANKLIEFLTTRAFGPLWCHEDITPKNQNSKSAEQLTNFLRHVVSVFKDSKSGFHLEHQLSEVALQTALASSSRHYAGRSFQIFRALKQPLSAHALSDLLSRLVEVIGEHGDEIQGYVMEALLTLEAAVDNLSDCLKNSDLLTVLSRSSSPDLSSSSKLTASRKSTGQLNMNPGTTSGNTATAERSRHQRSFSVPKKFGVIDRSSDPPRSATLDRIQACTQQGLSSKTRSSSSLKDSLTDPSHINHPTNLLATIFWVTVALMESDFEFEYLMALRLLSRLLAHMPLDKAENREKLEKLQAQLKWADFSGLQQLLLKGFTSLTTTDLTLQLFSLLTPVSKISMVDASHAIGFPLNVLCLLPQLIQHFENPNQFCKDIAERIAQVCLEEKNPKLSNLAHVMTLYKTHSYTRDCATWVNVVCRYLHEAYADITLNMVTYLAELLEKGLPSVQQPLLQVIYSLLSYMDLSVVPVKQFNVEVLKTIEKYVQSVHWREALNILKLVVSRSASLVLPSYQHSDLSKIEIHRVWTSASKELPGKTLDFHFDISETPIIGRRYDELQNSSGRDGKPRAMAVTRSTSSTSSGSNSNVLVPVSWKRPQYSQKRTKEKLVHVLSLCGQEVGLSKNPSVIFSSCGDLDLLEHQTSLVSSEDGAREQENMDDTNSEQQFRVFRDFDFLDVELEDGEGESMDNFNWGVRRRSLDSLDKCDMQILEERQLSGSTPSLNKMHHEDSDESSEEEDLTASQILEHSDLIMTLSPSEETNPMELLTTACDSTPAEPHSFNTRMSSFDASLPDMNNLQISEGSKAEAVREEEDTTVHEDDLSSSINELPAAFECSDSFSLDMTEGEEKGNRALDQFTLASFGEGDRGVSPPPSPFFSAILAAFQPAACDDAEEAWRSHINQLMCDSDGSCAVYTFHVFSSLFKNIQKRFCFLTCDAASYLGDNLRGIGSKFVSSSQMLTSCSECPTLFVDAETLLSCGLLDKLKFSVLELQEYLDTYNNRKEATLSWLANCKATFAGGSRDGVITCQPGDSEEKQLELCQRLYKLHFQLLLLFQSYCKLIGQVHEVSSMPELLNMSRELSDLKKHLKEASAVIAADPLYSDGAWSEPTFTSTEAAIQSMLECLKNNELGKALRQIRECRSLWPNDIFGSSSDDEVQTLLNIYFRHQTLGQTGTYALVGSNQSLTEICTKLMELNMEIRDMIRRAQSYRVLTTFLPDSSVSGTSL

SEQ ID NO: 213908 - protein, 383 aa, Artificial Sequence
  derived and/or modified sequence
MTEGEEKGNRALDQFTLASFGEGDRGVSPPPSPFFSAILAAFQPAACDDAEEAWRSHINQLMCDSDGSCAVYTFHVFSSLFKNIQKRFCFLTCDAASYLGDNLRGIGSKFVSSSQMLTSCSECPTLFVDAETLLSCGLLDKLKFSVLELQEYLDTYNNRKEATLSWLANCKATFAGGSRDGVITCQPGDSEEKQLELCQRLYKLHFQLLLLFQSYCKLIGQVHEVSSMPELLNMSRELSDLKKHLKEASAVIAADPLYSDGAWSEPTFTSTEAAIQSMLECLKNNELGKALRQIRECRSLWPNDIFGSSSDDEVQTLLNIYFRHQTLGQTGTYALVGSNQSLTEICTKLMELNMEIRDMIRRAQSYRVLTTFLPDSSVSGTSL

SEQ ID NO: 213909 - DNA, 1569 bp, Artificial Sequence
  derived and/or modified sequence
atggccctgaccgagacccagccccagctgctgagcgccgacctggtgctggccctgcaggtgctgatgctgtgggagatgaccgaggccaacaaggtgctgaagagaagacagcacccccagagaagccactgcatcagcagcaagatcctggagagctaccccggcgagaagcccctgaccaagagcctgcagagaggcgaggacccccagttcgaccaggtgatcagcagcatgagcagcctgagcgagtactgcctgcccagcatcctgagaaccctgttcgactgcgacgagcagcagagagactacctgatggagagaagagacctggccatcgacttcatcttcagcctggtgctgatcgaggtgctgaagcagggcagcctgacctgcctgatcatcccctacctgggcaccctggtgcccaccctggccatctgcatcctgtggcagacctgcatgcagaagagcctggagtgctggcacaagcccagcaagttccccgccgtgaagaagaagttcatggccgagctgaaggagctgagacacaaggagcagaacccctacgtggtgcagagcatcatcagcctgatcatgggcatgaagttcttcagaatcaagatgtaccccgtggaggacttcgaggccagcctgcagttcatgcaggagtgcgcccactacttcctggaggtgaaggacaaggacatcaagcacgccctggccggcctgttcgtggagatcctggtgcccgtggccgccgccgtgaagaacgaggtgaacgtgccctgcctgagaaacttcgtggagagcctgtacgacaccaccctggagctgagcagcagaaagaagcacagcctggccctgtaccccctggtgacctgcctgctgtgcgtgagccagaagcagctgttcctgaacagatggcacatcttcctgaacaactgcctgagcaacctgaagaacaaggaccccaagatggccagagtggccctggagagcctgtacagactgctgtgggtgtacatgatcagaatcaagtgcgagagcaacaccgccacccagagcagactgatcaccatcatcaccaccctgttccccaagggcagcagaggcgtggtgcccagagacatgcccctgaacatcttcgtgaagatcatccagttcatcgcccaggagagactggacttcgccatgaaggagatcatcttcgacttcctgtgcgtgggcaagcccgccaaggccttcagcctgaaccccgagagaatgaacatcggcctgagagccttcctggtgatcgccgacagcctgcagcagaaggacggcgagccccccatgcccgtgaccggcgccgtgctgcccagcggcaacaccctgagagtgaagaagacctacctgagcaagaccctgaccgaggaggaggccaagatgatcggcatgagcctgtactacagccaggtgagaaaggccgtggacaacatcctgagacacctggacaaggaggtgggcagatgcatgatgctgaccaacgtgcagatgctgaacaaggagcccgaggacatgatctag

SEQ ID NO: 213910 - DNA, 9042 bp, Artificial Sequence
  derived and/or modified sequence
atggccagccagcaggacagcggcttcttcgagatcagcatcaagtacctgctgaagagctggagcaacaccagccccgtgggcaacggctacatcaagccccccgtgccccccgccagcggcacccacagagagaagggcccccccaccatgctgcccatcaacgtggaccccgacagcaagcccggcgagtacgtgctgaagagcctgttcgtgaacttcaccacccaggccgagagaaagatcagaatcatcatggccgagcccctggagaagcccctgaccaagagcctgcagagaggcgaggacccccagttcgaccaggtgatcagcagcatgagcagcctgagcgagtactgcctgcccagcatcctgagaaccctgttcgactggtacaagagacagaacggcatcgaggacgagagccacgagtacagacccagaaccagcaacaagagcaagagcgacgagcagcagagagactacctgatggagagaagagacctggccatcgacttcatcttcagcctggtgctgatcgaggtgctgaagcagatccccctgcaccccgtgatcgacagcctgatccacgacgtgatcaacctggccttcaagcacttcaagtacaaggagggctacctgggccccaacaccggcaacatgcacatcgtggccgacctgtacgccgaggtgatcggcgtgctggcccaggccaagttccccgccgtgaagaagaagttcatggccgagctgaaggagctgagacacaaggagcagaacccctacgtggtgcagagcatcatcagcctgatcatgggcatgaagttcttcagaatcaagatgtaccccgtggaggacttcgaggccagcctgcagttcatgcaggagtgcgcccactacttcctggaggtgaaggacaaggacatcaagcacgccctggccggcctgttcgtggagatcctggtgcccgtggccgccgccgtgaagaacgaggtgaacgtgccctgcctgagaaacttcgtggagagcctgtacgacaccaccctggagctgagcagcagaaagaagcacagcctggccctgtaccccctggtgacctgcctgctgtgcgtgagccagaagcagctgttcctgaacagatggcacatcttcctgaacaactgcctgagcaacctgaagaacaaggaccccaagatggccagagtggccctggagagcctgtacagactgctgtgggtgtacatgatcagaatcaagtgcgagagcaacaccgccacccagagcagactgatcaccatcatcaccaccctgttccccaagggcagcagaggcgtggtgcccagagacatgcccctgaacatcttcgtgaagatcatccagttcatcgcccaggagagactggacttcgccatgaaggagatcatcttcgacttcctgtgcgtgggcaagcccgccaaggccttcagcctgaaccccgagagaatgaacatcggcctgagagccttcctggtgatcgccgacagcctgcagcagaaggacggcgagccccccatgcccgtgaccggcgccgtgctgcccagcggcaacaccctgagagtgaagaagacctacctgagcaagaccctgaccgaggaggaggccaagatgatcggcatgagcctgtactacagccaggtgagaaaggccgtggacaacatcctgagacacctggacaaggaggtgggcagatgcatgatgctgaccaacgtgcagatgctgaacaaggagcccgaggacatgatcaccggcgagagaaagcccaagatcgacctgttcagaacctgcgtggccgccatccccagactgctgcccgacggcatgagcaagctggagctgatcgacctgctggccagactgagcatccacatggacgacgagctgagacacatcgcccagaacagcctgcagggcctgctggtggacttcagcgactggagagaggacgtgctgttcggcttcaccaacttcctgctgagagaggtgaacgacatgcaccacaccctgctggacagcagcctgaagctgctgctgcagctgctgacccagtggaagctggtgatccagacccagggcaaggtgtacgagcaggccaacaagatcagaaacagcgagctgatcgccaacggcagcagccacagaatccagagcgagagaggcccccactgcagcgtgctgcacgccgtggagggcttcgccctggtgctgctgtgcagcttccaggtggccaccagaaagctgagcgtgctgatcctgaaggagatcagagccctgttcatcgccctgggccagcccgaggacgacgacagacccatgatcgacgtgatggaccagctgagcagcagcatcctggagagcttcatccacgtggccgtgagcgacagcgccaccctgcccctgacccacaacgtggacctgcagtggctggtggagtggaacgccgtgctggtgaacagccactacgacgtgaagagccccagccacgtgtggatcttcgcccagagcgtgaaggacccctgggtgctgtgcctgttcagcttcctgagacaggagaacctgcccaagcactgccccaccgccctgagctacgcctggccctacgccttcaccagactgcagagcgtgatgcccctggtggaccccaacagccccatcaacgccaagaagaccagcaccgccggcagcggcgacaactacgtgaccctgtggagaaactacctgatcctgtgcttcggcgtggccaagcccagcatcatgagccccggccacctgagagccagcacccccgagatcatggccaccacccccgacggcaccgtgagctacgacaacaaggccatcggcacccccagcgtgggcgtgctgctgaagcagctggtgcccctgatgagactggagagcatcgagatcaccgagagcctggtgctgggcttcggcagaaccaacagcctggtgttcagagagctggtggaggagctgcaccccctgatgaaggaggccctggagagaagacccgagaacaagaagagaagagagagaagagacctgctgagactgcagctgctgagaatcttcgagctgctggccgacgccggcgtgatcagcgacagcaccaacggcgccctggagagagacaccctggccctgggcgccctgttcctggagtacgtggacctgaccagaatgctgctggaggccgagaacgacaaggaggtggagatcctgaaggacatcagagcccacttcagcgccatggtggccaacctgatccagtgcgtgcccgtgcaccacagaagattcctgttcccccagcagagcctgagacaccacctgttcatcctgttcagccagtgggccggccccttcagcatcatgttcacccccctggacagatacagcgacagaaaccaccagatcaccagataccagtactgcgccctgaaggccatgagcgccgtgctgtgctgcggccccgtgttcgacaacgtgggcctgagccccgacggctacctgtacaagtggctggacaacatcctggcctgccaggacctgagagtgcaccagctgggctgcgaggtggtggtgctgctgctggagctgaaccccgaccagatcaacctgttcaactgggccatcgacagatgctacaccggcagctaccagctggccagcggctgcttcaaggccatcgccaccgtgtgcggcagcagaaactaccccttcgacatcgtgaccctgctgaacctggtgctgttcaaggccagcgacaccaacagagagatctacgagatcagcatgcagctgatgcagatcctggaggccaagctgttcgtgtacagcaagaaggtggccgagcagagacccggcagcatcctgtacggcacccacggccccctgccccccctgtacagcgtgagcctggccctgctgagctgcgagctggccagaatgtaccccgagctgaccctgcccctgttcagcgaggtgagccagagattccccaccacccaccccaacggcagacagatcatgctgacctacctgctgccctggctgcacaacatcgagctggtggacagcagactgctgctgcccggcagcagccccagcagccccgaggacgaggtgaaggacagagagggcgacgtgaccgccagccacggcctgagaggcaacggctggggcagccccgaggccaccagcctggtgctgaacaacctgatgtacatgaccgccaagtacggcgacgaggtgcccggccccgagatggagaacgcctggaacgccctggccaacaacgagaagtggagcaacaacctgagaatcaccctgcagttcctgatcagcctgtgcggcgtgagcagcgacaccgtgctgctgccctacatcaagaaggtggccatctacctgtgcagaaacaacaccatccagaccatggaggagctgctgttcgagctgcagcagaccgagcccgtgaaccccatcgtgcagcactgcgacaacccccccttctacagattcaccgccagcagcaaggccagcgccgccgccagcggcaccaccagcagcagcaacaccgtggtggccggccaggagaacttccccgacgccgaggagaacaagatcctgaaggagagcgacgagagattcagcaacgtgatcagagcccacaccagactggagagcagatacagcaacagcagcggcggcagctacgacgaggacaagaacgaccccatcagcccctacaccggctggctgctgaccatcaccgagaccaagcagccccagcccctgcccatgccctgcaccggcggctgctgggcccccctggtggactacctgcccgagaccatcacccccagaggccccctgcacagatgcaacatcgccgtgatcttcatgaccgagatggtggtggaccacagcgtgagagaggactgggccctgcacctgcccctgctgctgcacgccgtgttcctgggcctggaccactacagacccgaggtgttcgagcacagcaagaagctgctgctgcacctgctgatcgccctgagctgcaacagcaacttccacagcatcgccagcgtgctgctgcagaccagagagatgggcgaggccaagaccctgaccgtgcagcccgcctaccagcccgagtacctgtacaccggcggcttcgacttcctgagagaggaccagagcagccccgtgcccgacagcggcctgagcagcagcagcaccagcagcagcatcagcctgggcggcagcagcggcaacctgccccagatgacccaggaggtggaggacgtggacaccgccgccgagaccgacgagaaggccaacaagctgatcgagttcctgaccaccagagccttcggccccctgtggtgccacgaggacatcacccccaagaaccagaacagcaagagcgccgagcagctgaccaacttcctgagacacgtggtgagcgtgttcaaggacagcaagagcggcttccacctggagcaccagctgagcgaggtggccctgcagaccgccctggccagcagcagcagacactacgccggcagaagcttccagatcttcagagccctgaagcagcccctgagcgcccacgccctgagcgacctgctgagcagactggtggaggtgatcggcgagcacggcgacgagatccagggctacgtgatggaggccctgctgaccctggaggccgccgtggacaacctgagcgactgcctgaagaacagcgacctgctgaccgtgctgagcagaagcagcagccccgacctgagcagcagcagcaagctgaccgccagcagaaagagcaccggccagctgaacatgaaccccggcaccaccagcggcaacaccgccaccgccgagagaagcagacaccagagaagcttcagcgtgcccaagaagttcggcgtgatcgacagaagcagcgacccccccagaagcgccaccctggacagaatccaggcctgcacccagcagggcctgagcagcaagaccagaagcagcagcagcctgaaggacagcctgaccgaccccagccacatcaaccaccccaccaacctgctggccaccatcttctgggtgaccgtggccctgatggagagcgacttcgagttcgagtacctgatggccctgagactgctgagcagactgctggcccacatgcccctggacaaggccgagaacagagagaagctggagaagctgcaggcccagctgaagtgggccgacttcagcggcctgcagcagctgctgctgaagggcttcaccagcctgaccaccaccgacctgaccctgcagctgttcagcctgctgacccccgtgagcaagatcagcatggtggacgccagccacgccatcggcttccccctgaacgtgctgtgcctgctgccccagctgatccagcacttcgagaaccccaaccagttctgcaaggacatcgccgagagaatcgcccaggtgtgcctggaggagaagaaccccaagctgagcaacctggcccacgtgatgaccctgtacaagacccacagctacaccagagactgcgccacctgggtgaacgtggtgtgcagatacctgcacgaggcctacgccgacatcaccctgaacatggtgacctacctggccgagctgctggagaagggcctgcccagcgtgcagcagcccctgctgcaggtgatctacagcctgctgagctacatggacctgagcgtggtgcccgtgaagcagttcaacgtggaggtgctgaagaccatcgagaagtacgtgcagagcgtgcactggagagaggccctgaacatcctgaagctggtggtgagcagaagcgccagcctggtgctgcccagctaccagcacagcgacctgagcaagatcgagatccacagagtgtggaccagcgccagcaaggagctgcccggcaagaccctggacttccacttcgacatcagcgagacccccatcatcggcagaagatacgacgagctgcagaacagcagcggcagagacggcaagcccagagccatggccgtgaccagaagcaccagcagcaccagcagcggcagcaacagcaacgtgctggtgcccgtgagctggaagagaccccagtacagccagaagagaaccaaggagaagctggtgcacgtgctgagcctgtgcggccaggaggtgggcctgagcaagaaccccagcgtgatcttcagcagctgcggcgacctggacctgctggagcaccagaccagcctggtgagcagcgaggacggcgccagagagcaggagaacatggacgacaccaacagcgagcagcagttcagagtgttcagagacttcgacttcctggacgtggagctggaggacggcgagggcgagagcatggacaacttcaactggggcgtgagaagaagaagcctggacagcctggacaagtgcgacatgcagatcctggaggagagacagctgagcggcagcacccccagcctgaacaagatgcaccacgaggacagcgacgagagcagcgaggaggaggacctgaccgccagccagatcctggagcacagcgacctgatcatgaccctgagccccagcgaggagaccaaccccatggagctgctgaccaccgcctgcgacagcacccccgccgagccccacagcttcaacaccagaatgagcagcttcgacgccagcctgcccgacatgaacaacctgcagatcagcgagggcagcaaggccgaggccgtgagagaggaggaggacaccaccgtgcacgaggacgacctgagcagcagcatcaacgagctgcccgccgccttcgagtgcagcgacagcttcagcctggacatgaccgagggcgaggagaagggcaacagagccctggaccagttcaccctggccagcttcggcgagggcgacagaggcgtgagccccccccccagccccttcttcagcgccatcctggccgccttccagcccgccgcctgcgacgacgccgaggaggcctggagaagccacatcaaccagctgatgtgcgacagcgacggcagctgcgccgtgtacaccttccacgtgttcagcagcctgttcaagaacatccagaagagattctgcttcctgacctgcgacgccgccagctacctgggcgacaacctgagaggcatcggcagcaagttcgtgagcagcagccagatgctgaccagctgcagcgagtgccccaccctgttcgtggacgccgagaccctgctgagctgcggcctgctggacaagctgaagttcagcgtgctggagctgcaggagtacctggacacctacaacaacagaaaggaggccaccctgagctggctggccaactgcaaggccaccttcgccggcggcagcagagacggcgtgatcacctgccagcccggcgacagcgaggagaagcagctggagctgtgccagagactgtacaagctgcacttccagctgctgctgctgttccagagctactgcaagctgatcggccaggtgcacgaggtgagcagcatgcccgagctgctgaacatgagcagagagctgagcgacctgaagaagcacctgaaggaggccagcgccgtgatcgccgccgaccccctgtacagcgacggcgcctggagcgagcccaccttcaccagcaccgaggccgccatccagagcatgctggagtgcctgaagaacaacgagctgggcaaggccctgagacagatcagagagtgcagaagcctgtggcccaacgacatcttcggcagcagcagcgacgacgaggtgcagaccctgctgaacatctacttcagacaccagaccctgggccagaccggcacctacgccctggtgggcagcaaccagagcctgaccgagatctgcaccaagctgatggagctgaacatggagatcagagacatgatcagaagagcccagagctacagagtgctgaccaccttcctgcccgacagcagcgtgagcggcaccagcctgtag

SEQ ID NO: 213911 - DNA, 3849 bp, Artificial Sequence
  derived and/or modified sequence
atgagcgccgtgctgtgctgcggccccgtgttcgacaacgtgggcctgagccccgacggctacctgtacaagtggctggacaacatcctggcctgccaggacctgagagtgcaccagctgggctgcgaggtggtggtgctgctgctggagctgaaccccgaccagatcaacctgttcaactgggccatcgacagatgctacaccggcagctaccagctggccagcggctgcttcaaggccatcgccaccgtgtgcggcagcagaaactaccccttcgacatcgtgaccctgctgaacctggtgctgttcaaggccagcgacaccaacagagagatctacgagatcagcatgcagctgatgcagatcctggaggccaagctgttcgtgtacagcaagaaggtggccgagcagagacccggcagcatcctgtacggcacccacggccccctgccccccctgtacagcgtgagcctggccctgctgagctgcgagctggccagaatgtaccccgagctgaccctgcccctgttcagcggcaagcccgccatcccccacaacaccccccagagagcccccgaccacgcctacctgcccgccgccctggccgcccagcacagagccggcggccagcaggcccccccccccggcagccccagcagccccgaggacgaggtgaaggacagagagggcgacgtgaccgccagccacggcctgagaggcaacggctggggcagccccgaggccaccagcctggtgctgaacaacctgatgtacatgaccgccaagtacggcgacgaggtgcccggccccgagatggagaacgcctggaacgccctggccaacaacgagaagtggagcaacaacctgagaatcaccctgcagttcctgatcagcctgtgcggcgtgagcagcgacaccgtgctgctgccctacatcaagaaggtggccatctacctgtgcagaaacaacaccatccagaccatggaggagctgctgttcgagctgcagcagaccgagcccgtgaaccccatcgtgcagcactgcgacaacccccccttctacagattcaccgccagcagcaaggccagcgccgccgccagcggcaccaccagcagcagcaacaccgtggtggccggccaggagaacttccccgacgccgaggagaacaagatcctgaaggagagcgacgagagattcagcaacgtgatcagagcccacaccagactggagagcagatacagcaacagcagcggcggcagctacgacgaggacaagaacgaccccatcagcccctacaccggctggctgctgaccatcaccgagaccaagcagccccagcccctgcccatgccctgcaccggcggctgctgggcccccctggtggactacctgcccgagaccatcacccccagaggccccctgcacagatgcaacatcgccgtgatcttcatgaccgagatggtggtggaccacagcgtgagagaggactgggccctgcacctgcccctgctgctgcacgccgtgttcctgggcctggaccactacagacccgaggtgttcgagcacagcaagaagctgctgctgcacctgctgatcgccctgagctgcaacagcaacttccacagcatcgccagcgtgctgctgcagaccagagagatgggcgaggccaagaccctgaccgtgcagcccgcctaccagcccgagtacctgtacaccggcggcttcgacttcctgagagaggaccagagcagccccgtgcccgacagcggcctgagcagcagcagcaccagcagcagcatcagcctgggcggcagcagcggcaacctgccccagatgacccaggaggtggaggacgtggacaccgccgccgagaccgacgagaaggccaacaagctgatcgagttcctgaccaccagagccttcggccccctgtggtgccacgaggacatcacccccaagaaccagaacagcaagagcgccgagcagctgaccaacttcctgagacacgtggtgagcgtgttcaaggacagcaagagcggcttccacctggagcaccagctgagcgaggtggccctgcagaccgccctggccagcagcagcagacactacgccggcagaagcttccagatcttcagagccctgaagcagcccctgagcgcccacgccctgagcgacctgctgagcagactggtggaggtgatcggcgagcacggcgacgagatccagggctacgtgatggaggccctgctgaccctggaggccgccgtggacaacctgagcgactgcctgaagaacagcgacctgctgaccgtgctgagcagaagcagcagccccgacctgagcagcagcagcaagctgaccgccagcagaaagagcaccggccagctgaacatgaaccccggcaccaccagcggcaacaccgccaccgccgagagaagcagacaccagagaagcttcagcgtgcccaagaagttcggcgtgatcgacagaagcagcgacccccccagaagcgccaccctggacagaatccaggcctgcacccagcagggcctgagcagcaagaccagaagcagcagcagcctgaaggacagcctgaccgaccccagccacatcaaccaccccaccaacctgctggccaccatcttctgggtgaccgtggccctgatggagagcgacttcgagttcgagtacctgatggccctgagactgctgagcagactgctggcccacatgcccctggacaaggccgagaacagagagaagctggagaagctgcaggcccagctgaagtgggccgacttcagcggcctgcagcagctgctgctgaagggcttcaccagcctgaccaccaccgacctgaccctgcagctgttcagcctgctgacccccgtgagcaagatcagcatggtggacgccagccacgccatcggcttccccctgaacgtgctgtgcctgctgccccagctgatccagcacttcgagaaccccaaccagttctgcaaggacatcgccgagagaatcgcccaggtgtgcctggaggagaagaaccccaagctgagcaacctggcccacgtgatgaccctgtacaagacccacagctacaccagagactgcgccacctgggtgaacgtggtgtgcagatacctgcacgaggcctacgccgacatcaccctgaacatggtgacctacctggccgagctgctggagaagggcctgcccagcgtgcagcagcccctgctgcaggtgatctacagcctgctgagctacatggacctgagcgtggtgcccgtgaagcagttcaacgtggaggtgctgaagaccatcgagaagtacgtgcagcacagcgacctgagcaagatcgagatccacagagtgtggaccagcgccagcaaggagctgcccggcaagaccctggacttccacttcgacatcagcgagacccccatcatcggcagaagatacgacgagctgcagaacagcagcggcagagacggcaagcccagagccatggccgtgaccagaagcaccagcagcaccagcagcggcagcaacagcaacgtgctggtgcccgtgagctggaagagaccccagtacagccagaagagaaccaaggagaagctggtgcacgtgctgagcctgtgcggccaggaggtgggcctgagcaagaaccccagcgtgatcttcagcagctgcggcgacctggacctgctggagcaccagaccagcctggtgagcagcgaggacggcgccagagagcaggagaacatggacgacaccaacagcgagcagcagttcagagtgttcagagacttcgacttcctggacgtggagctggaggacggcgagtag

SEQ ID NO: 213912 - DNA, 1152 bp, Artificial Sequence
  derived and/or modified sequence
atgaccgagggcgaggagaagggcaacagagccctggaccagttcaccctggccagcttcggcgagggcgacagaggcgtgagccccccccccagccccttcttcagcgccatcctggccgccttccagcccgccgcctgcgacgacgccgaggaggcctggagaagccacatcaaccagctgatgtgcgacagcgacggcagctgcgccgtgtacaccttccacgtgttcagcagcctgttcaagaacatccagaagagattctgcttcctgacctgcgacgccgccagctacctgggcgacaacctgagaggcatcggcagcaagttcgtgagcagcagccagatgctgaccagctgcagcgagtgccccaccctgttcgtggacgccgagaccctgctgagctgcggcctgctggacaagctgaagttcagcgtgctggagctgcaggagtacctggacacctacaacaacagaaaggaggccaccctgagctggctggccaactgcaaggccaccttcgccggcggcagcagagacggcgtgatcacctgccagcccggcgacagcgaggagaagcagctggagctgtgccagagactgtacaagctgcacttccagctgctgctgctgttccagagctactgcaagctgatcggccaggtgcacgaggtgagcagcatgcccgagctgctgaacatgagcagagagctgagcgacctgaagaagcacctgaaggaggccagcgccgtgatcgccgccgaccccctgtacagcgacggcgcctggagcgagcccaccttcaccagcaccgaggccgccatccagagcatgctggagtgcctgaagaacaacgagctgggcaaggccctgagacagatcagagagtgcagaagcctgtggcccaacgacatcttcggcagcagcagcgacgacgaggtgcagaccctgctgaacatctacttcagacaccagaccctgggccagaccggcacctacgccctggtgggcagcaaccagagcctgaccgagatctgcaccaagctgatggagctgaacatggagatcagagacatgatcagaagagcccagagctacagagtgctgaccaccttcctgcccgacagcagcgtgagcggcaccagcctgtag

SEQ ID NO: 213913 - DNA, 10005 bp, Artificial Sequence
  derived and/or modified sequence
atggcattgacagagacacaaccacagctcctttcagcagacctggtcttagccctccaggtgctcatgctttgggagatgacagaggcaaacaaagtacttaagagaagacaacacccccaacgatctcactgtatttccagcaaaatacttgagtcctacccaggtgaaaagccattgacaaaatctctgcaacgtggagaagacccccaatttgatcaggtcatcagctcaatgagctccctttctgagtactgcctgccttccattctacgtacattatttgactgcgatgaacaacagcgagattatttaatggaaagacgggacctcgccattgattttattttttctttagtattaatagaagttttgaaacagggatccctaacttgtctaattataccctacttaggtaccttggtcccaacactggcaatatgcatattgtggcagacctgtatgcagaagtcattggagtgttggcacaagccaagtaaattccctgctgtaaagaagaaatttatggcggagctaaaagaattacggcacaaagagcagaacccatatgtggttcaaagcattatcagcttaataatgggcatgaaattctttcgaattaagatgtatccagtggaggattttgaggcctctcttcagtttatgcaggaatgtgcacattacttcctcgaggtcaaagacaaagatatcaagcatgccttggctgggctttttgttgaaatacttgttccagttgctgctgctgttaaaaatgaagtaaatgttccctgccttagaaattttgtggaaagcctgtatgacaccacgctggaactttcttctcgaaagaagcattccttggccttgtaccccctggtgacctgtttgctctgtgtcagtcagaagcagctgttcctgaacaggtggcacattttcctcaacaactgcttgtccaaccttaaaaacaaagatcccaagatggctcgagttgcactggaatctctctacagattactttgggtttacatgattcgaattaaatgtgaaagcaacacagctactcagagccgacttataaccatcatcacaacacttttccccaaagggtcccgcggtgtggtaccaagggacatgcctctgaacatctttgtgaaaatcatccagttcattgcccaggaacgtttagattttgcaatgaaagaaatcattttcgattttctttgtgtgggaaaaccagcaaaagcattcagtctcaacccagagagaatgaacattggtttacgggcattcttggtcatagctgatagcttgcagcagaaagatggggaacctcccatgccggttacaggagccgttcttccttcaggaaacacgttaagagtaaagaaaacatatttgagtaaaacactaactgaagaggaagccaaaatgataggcatgtccttatattactctcaagtacgaaaagctgtagacaacattttaaggcaccttgataaagaagtaggaaggtgtatgatgctgactaatgtacagatgttaaacaaagaaccggaagacatgatcacgggtgagagaaagccaaaaatagatcttttcaggacctgtgttgctgctattcctcgactgcttcctgatgggatgtcaaaacttgaacttattgacttactggctaggctctctattcatatggatgatgaattgcgacatattgcacaaaattctcttcagggtttacttgttgacttctcagattggagggaagatgtactatttggctttaccaacttcctgctccgggaagtaaatgatatgcatcacacactccttgattcgtccctgaagttgctgctgcagctgctcacccagtggaaactagtcatccagacacaaggaaaagtctatgaacaagccaacaaaatcagaaattcagagctcatcgcaaatggctccagtcacagaattcagtcggaacgaggtccccactgcagtgtactccacgctgtagaaggttttgctctggttttactctgcagtttccaggtggccacacgcaaactgtccgttttaatactcaaggaaattcgagcgttgtttattgccctggggcagcctgaggatgacgacaggccgatgattgatgtcatggatcagctaagttcttccattctagaaagttttattcatgtagcagtttcggattcagcaacattaccactcacccacaatgtggatctgcagtggttggtggaatggaacgcagtcctggtcaatagccattatgatgtgaaaagcccttcccatgtctggatatttgcacagtctgtcaaagacccctgggtcctctgcctcttcagcttcctccggcaggagaacttacccaagcactgccccacagccctcagctatgcctggccttatgccttcactcggctccagtcggtgatgcctctggtggacccaaatagcccaattaatgccaagaaaaccagcactgccggcagcggagacaactatgttactttgtggagaaattacctaattctttgttttggagttgcaaaacccagtattatgagcccaggacacttaagagcttccactccagaaataatggcgaccacacctgatggtacagtgagctacgataacaaggccataggcaccccatcggtgggagttctgttaaagcagttggtgcctttgatgagactagagagcattgagatcacagagtccttagttttaggatttggaagaacaaattcccttgttttcagagaattggtagaagaacttcatccattaatgaaagaagctctggaaagaagaccagagaacaagaaacgccgagaacggcgagacttgttaaggctacaactacttcgaatttttgaacttttggctgatgctggtgtaataagtgacagcacaaatggagccctagagcgggatactttagccctgggagctttgttcttagaatatgtggacttgacccgcatgctcctagaagctgaaaatgacaaagaagttgaaattcttaaagatatccgggcacattttagtgcaatggtggccaacttgattcagtgtgttccagttcaccaccgaagatttctcttcccccagcaaagtctgaggcaccaccttttcatcttattcagccagtgggcaggacccttcagcattatgttcactcctctggatcgttacagtgacagaaatcatcagattacaagatatcagtattgtgcattaaaagcaatgtcagcagtactgtgctgtggccctgtctttgacaatgtgggcctttccccagatggctacctatataaatggcttgacaacattctggcttgtcaagatttacgagttcatcaacttggctgcgaagttgttgtcttgctactggaacttaatcctgaccaaataaatctttttaactgggcaattgaccgatgctacacaggttcctaccaacttgcatctggctgcttcaaagccatagcaactgtgtgtggaagcaggaactatcccttcgacatagtgacattgttaaaccttgttctattcaaggcctctgacaccaacagagagatttatgaaatctccatgcagctcatgcagatccttgaagcaaagctttttgtatactcaaagaaagtcgctgagcaaagaccgggaagtattctctatggaacacacggcccgctgccacccctctacagcgtgtcacttgccctcttgtcatgtgagctggccaggatgtaccctgagctcacactccccctcttctcagaggtaagccagcgattccccacaacacaccccaacgggcgccagatcatgcttacctacctgctgccctggctgcacaacatcgagctggtggacagcaggctcctcctcccggggtcgagccccagcagcccagaggacgaagtcaaggaccgggaaggtgacgtgactgcttctcacgggctgagaggaaatggctggggctctccagaagccacgtcactggtcctgaacaacctcatgtacatgacggccaagtatggagatgaagttcctgggccagaaatggaaaatgcttggaatgctttagccaacaatgagaaatggagcaacaacctgaggatcaccttgcagttcctgattagcctctgtggggtcagcagcgacacagttctcctaccctatattaaaaaagtggcaatatacttgtgccgtaacaacaccattcaaaccatggaagagcttctctttgagctgcagcagacagagcccgtgaaccccatcgtccagcattgtgacaacccgcccttctaccgcttcacggccagtagcaaggcttccgcagcagcctcaggaaccacctctagcagcaatacagtggttgctggccaggaaaatttcccagatgctgaggagaacaagatattgaaagaatctgatgaaaggtttagtaatgtcatcagagcccacactcgcctcgagtcaagatacagcaatagctctggaggatcctacgatgaagataaaaatgatccaatttctccctacacgggctggttgctgactattacagagaccaagcagccgcagcccttaccgatgccttgtactggaggatgctgggcccccctggttgactatctcccggagaccatcactccccgggggccactccacaggtgcaatattgctgtaatttttatgactgaaatggtggtggatcacagtgtacgagaagactgggcgcttcatctaccattattacttcatgctgtcttcttaggtttagaccactaccggcctgaagtctttgaacacagcaaaaaactgcttcttcacctcttgattgccctctcttgcaacagcaatttccattccattgcttccgtgctcctgcagacccgagagatgggtgaagctaagactctaaccgtgcagccagcctaccaacctgaatatctctatacaggtggctttgacttcctgagagaggaccagtcatccccggtgcctgactcagggcttagttcaagctccacctcctctagcatcagtctgggaggcagcagtggaaacctcccacagatgacccaggaggtagaagatgtggacacagctgctgaaacagatgagaaggcaaacaagctcattgagtttctcacgaccagggcatttggtccactttggtgccatgaagacatcacacctaaaaatcaaaattcaaagagtgctgaacagctcactaattttctacgtcacgttgtatctgtatttaaagattccaaatcaggcttccatctggagcaccagttgagtgaagttgcattgcagacagccctcgcaagctcttcaaggcactatgctggtcggtccttccagatattccgggccctcaagcaacctctgtcagcacatgccttatctgaccttctctcaagattggtggaggtgataggagaacatggagatgagattcagggttatgtaatggaagcgctcctaaccttggaggcggctgtggataacttgtctgactgcttgaagaacagtgacctcctaactgtattgtcccgctcttcctcaccagatttaagctccagcagtaaactaacagcaagcagaaagagcacaggacaactaaacatgaacccgggaaccaccagcggcaacaccgcaactgccgaacggagccggcatcaacgaagcttctctgtgcccaagaagtttggtgtcatcgaccgatcctctgacccacctcgaagtgccacactggacagaattcaggcttgtacccaacaaggcctctcctcaaaaaccagaagctcatcctccttgaaggacagtctcacggacccatcccacataaaccatcccaccaacctgctggccaccatattctgggtcacagtggccttgatggagtctgattttgagtttgaatacttaatggccttaaggctgttgagcagactactggcacatatgccactcgataaggctgagaaccgagaaaagcttgagaaactccaggcacagctgaagtgggccgacttctccgggctgcagcagctgctgctgaaaggattcacatccctcaccaccacagacctgaccctgcagctcttcagtctgctgacaccagtgtccaaaatatccatggtggatgcatcccacgctattgggtttccactgaatgtcttgtgtctcctgcctcagctgattcagcattttgaaaatcccaatcagttctgtaaggatatagccgaaaggattgctcaggtttgtttagaagagaagaaccccaaactttcaaatcttgcacatgtcatgactctttataaaacgcacagctacacgagggactgtgccacgtgggtcaatgtggtctgtcgataccttcatgaagcatatgctgacattaccttgaatatggttacctacctggcagagctgctggagaagggcctccctagtgtgcagcagcccctgctccaggtgatctacagtcttctcagctacatggacctttctgtcgttcctgtcaaacagttcaatgtggaagttctgaagacaattgaaaaatatgtgcaaagtgttcactggagagaagctctgaatatcttgaagctggtagtttctcggtcagccagccttgttttaccttcataccagcacagtgacctctcaaaaatagaaatacatcgagtgtggactagtgcttccaaggaattacctgggaaaaccctggacttccacttcgatatttcggagactccaatcatcgggaggcggtatgatgagctgcagaattcttctgggcgtgatgggaagcccagggccatggccgtcacccggagcacatcttccacttcctcaggctccaactccaacgtccttgttccagtgagctggaaaaggccccagtattctcagaagagaacaaaagagaagttggtacatgtcctttctctgtgtggccaagaagtaggattgagcaaaaatccatcagtgattttttcatcgtgtggggatctggatctgcttgagcaccagacaagcttggtatcttctgaggacggtgcccgagagcaggagaacatggatgacacaaacagcgagcagcagtttagagtcttcagagacttcgacttcctagatgtggagctggaggatggagagggtgagagtatggacaatttcaactggggagtgcgcagacgttctctggacagcctggataagtgtgatatgcagattctggaggagcgccaactgtcaggaagcactcctagcctgaataaaatgcaccatgaggactccgatgaatcatccgaggaggaggacctcacagccagccagatcctggagcactcagacctaatcatgactctctccccctctgaagagacgaatcccatggagctgctcaccacagcctgtgactcgacccctgcagaacctcattcctttaacaccagaatgtccagctttgatgcttccttgcctgatatgaataatctgcagatttctgagggttcaaaggctgaagctgttcgtgaggaggaggacaccaccgtgcatgaggatgatctttctagttccatcaatgaactcccagcagcttttgaatgcagcgacagctttagcctggacatgactgagggggaagaaaaaggcaatcgggcactggaccagtttaccctggcgagctttggagaaggtgacaggggagtctctccccctccctcgcccttcttctcagccatccttgccgcctttcagcccgcagcctgtgacgatgccgaggaggcctggcgcagccacatcaaccagcttatgtgtgactcagatggctcctgtgctgtgtatacatttcatgtgttctcctccttgtttaagaatattcagaaaaggttctgcttcctaacctgtgatgcagccagttaccttggagataacctccggggaatcggatccaaatttgtcagctcttcccagatgctcacctcctgctctgaatgtcctacactttttgtggatgccgagactctcctttcatgtggacttctggacaagctcaagttcagtgtgttagaactgcaagaatatttggatacctacaacaacaggaaagaggccacactctcttggcttgcaaattgtaaggcaacatttgcagggggatcaagagatggagtaattacctgtcaaccaggggactccgaagaaaagcaattggaactgtgtcagagattatataagctacacttccagctgctattgctttttcagtcctactgtaagctcatcggccaggtgcacgaagttagctccatgccagagctgctgaatatgtccagggaactgagtgacctaaagaaacacctgaaggaagccagtgcagtcattgcagctgaccctctctattcagacggcgcgtggtccgagcccaccttcacgtccactgaagcagccatccagtccatgctggagtgcctgaagaacaacgaactcggcaaagctttgcggcagatcagggagtgcagaagtctgtggcccaatgacatctttggaagcagttctgatgatgaggtccagacactactgaatatttatttccgtcaccaaactctgggacagacgggtacttatgccctggtggggtctaaccagagcctgaccgagatctgcaccaagctgatggagctgaacatggagatccgggacatgatccgcagggcccagagttaccgagtcctcactacttttcttccagactccagtgtttctggcactagtctctgacaggagcctcctgtccccactgggttccaaactggcagtgctgccatgctggggcaacgtcattcagtgtcttctcggccttcaaaaggcttggacagactgttctccctcttgttacctgtagggctttttctaaagaggatggcagaacttccaacgtgtagcaatactataagaaccaaggtagcttagaacgtcctggacagactccactcatcatgctgtgtggcacaaatgtgttacatttgaccgagcatatgcaactcgctactgaagaagtgacttccgttgcataccaaagccgactacactgaacagtaccttcctttctagaaacaattttagattggcaaaagtgcaatgttttcttcactcaaaaaattttatattctcaaacatgtatattctttccctgtcttgttccattttcttttcttttttcttttttctttttcctttctttcgtgggctgagaaaggggcaggcaaaatgaagctggccactgaaaactgtaagatggtcaaaagctgacagcctgtgtatgtgaaaagggaattgtaaatggactgcaatgtaatgtacactgtaatttgaatacaattactgtatctaaaaggagctgctatgaagtacctttcttatgttgctaggctactgtttctgaaagccctggatctctttgcaccaaaaatggtccagatagactctttttaaggatcttggctgctttttactagaaggttgcttttatgagcatatttatactgctgaaggatgagtgttaattttaattaactttgccgttttgtagagaaaactattcacaagataaattccaagtcttttcacctgtcaggcatgcatattttaatatctgtttggatagtcagaagtagaatcataaaggtaaaatatgagttgttactttgtttcttcgatgtcatattttatgtgtaatatatatgtaaagggccattcttaagttctctccttaaacttaatgctgtcaagtgttagatgtgtgcatgtgaacttgttgcactgcagaaacatattcagagtttatctatgtaacttattcactctgtaaatacatttaaagtttttgtgatgtaagcttaattgatattctgttcagaactttctttagactaaaaaaaaaaaaaaagacaaaataca

SEQ ID NO: 213914 - DNA, 8848 bp, Artificial Sequence
  derived and/or modified sequence
agggggcggcgctcccggcccatcccttagccccgcggcggccgtgtgggccggaggctgcctgcaccgcgtcagggaggccggcctagaaaccctccctcccagaagaaagccgatcccagttcaggtggggtcttcctcggttgcgtacctggctggagccgagctggtgggcggccggcagccggcgtttctggtgatgacagccccgaaatgaaagcagcgcggccgccgcctccgagggctgcagggagatcagcgtccagcaaataagaagcaagtcctggacccggaggaggaggagcggccgagcatctctctctgctccgccgtgtcctttagatgagcactcccggccggagccggaggtggatccgcagagctgcctctgggcgcctgaccccgcgctgacatcacaacctgtgacaggcgcatcacgcccggtacctgctcccggccgctgcccgtcctcccagcctctttgtatgccgcagacatggccagccagcaggattcgggcttctttgagatcagtatcaaatatttactgaaatcctggagtaatacttctcccgttggcaacggttacatcaagcctccggttccacctgcttctggcacgcacagggagaaagggccgccaaccatgctacccatcaatgtggacccagacagtaaaccaggagaatatgtcctcaaaagtttatttgtcaacttcaccactcaggctgaacgcaagattcgtatcattatggcagagcccctggaaaagccattgacaaaatctctgcaacgtggagaagacccccaatttgatcaggtcatcagctcaatgagctccctttctgagtactgcctgccttccattctacgtacattatttgactggtataaaaggcaaaatggcattgaggatgaatcacatgaatacagaccaagaacaagcaataaatcaaaaagcgatgaacaacagcgagattatttaatggaaagacgggacctcgccattgattttattttttctttagtattaatagaagttttgaaacagattccacttcatcctgtaatagacagtttaatacatgatgttattaacttggctttcaagcactttaaatacaaagaagggtaccttggtcccaacactggcaatatgcatattgtggcagacctgtatgcagaagtcattggagtgttggcacaagccaaattccctgctgtaaagaagaaatttatggcggagctaaaagaattacggcacaaagagcagaacccatatgtggttcaaagcattatcagcttaataatgggcatgaaattctttcgaattaagatgtatccagtggaggattttgaggcctctcttcagtttatgcaggaatgtgcacattacttcctcgaggtcaaagacaaagatatcaagcatgccttggctgggctttttgttgaaatacttgttccagttgctgctgctgttaaaaatgaagtaaatgttccctgccttagaaattttgtggaaagcctgtatgacaccacgctggaactttcttctcgaaagaagcattccttggccttgtaccccctggtgacctgtttgctctgtgtcagtcagaagcagctgttcctgaacaggtggcacattttcctcaacaactgcttgtccaaccttaaaaacaaagatcccaagatggctcgagttgcactggaatctctctacagattactttgggtttacatgattcgaattaaatgtgaaagcaacacagctactcagagccgacttataaccatcatcacaacacttttccccaaagggtcccgcggtgtggtaccaagggacatgcctctgaacatctttgtgaaaatcatccagttcattgcccaggaacgtttagattttgcaatgaaagaaatcattttcgattttctttgtgtgggaaaaccagcaaaagcattcagtctcaacccagagagaatgaacattggtttacgggcattcttggtcatagctgatagcttgcagcagaaagatggggaacctcccatgccggttacaggagccgttcttccttcaggaaacacgttaagagtaaagaaaacatatttgagtaaaacactaactgaagaggaagccaaaatgataggcatgtccttatattactctcaagtacgaaaagctgtagacaacattttaaggcaccttgataaagaagtaggaaggtgtatgatgctgactaatgtacagatgttaaacaaagaaccggaagacatgatcacgggtgagagaaagccaaaaatagatcttttcaggacctgtgttgctgctattcctcgactgcttcctgatgggatgtcaaaacttgaacttattgacttactggctaggctctctattcatatggatgatgaattgcgacatattgcacaaaattctcttcagggtttacttgttgacttctcagattggagggaagatgtactatttggctttaccaacttcctgctccgggaagtaaatgatatgcatcacacactccttgattcgtccctgaagttgctgctgcagctgctcacccagtggaaactagtcatccagacacaaggaaaagtctatgaacaagccaacaaaatcagaaattcagagctcatcgcaaatggctccagtcacagaattcagtcggaacgaggtccccactgcagtgtactccacgctgtagaaggttttgctctggttttactctgcagtttccaggtggccacacgcaaactgtccgttttaatactcaaggaaattcgagcgttgtttattgccctggggcagcctgaggatgacgacaggccgatgattgatgtcatggatcagctaagttcttccattctagaaagttttattcatgtagcagtttcggattcagcaacattaccactcacccacaatgtggatctgcagtggttggtggaatggaacgcagtcctggtcaatagccattatgatgtgaaaagcccttcccatgtctggatatttgcacagtctgtcaaagacccctgggtcctctgcctcttcagcttcctccggcaggagaacttacccaagcactgccccacagccctcagctatgcctggccttatgccttcactcggctccagtcggtgatgcctctggtggacccaaatagcccaattaatgccaagaaaaccagcactgccggcagcggagacaactatgttactttgtggagaaattacctaattctttgttttggagttgcaaaacccagtattatgagcccaggacacttaagagcttccactccagaaataatggcgaccacacctgatggtacagtgagctacgataacaaggccataggcaccccatcggtgggagttctgttaaagcagttggtgcctttgatgagactagagagcattgagatcacagagtccttagttttaggatttggaagaacaaattcccttgttttcagagaattggtagaagaacttcatccattaatgaaagaagctctggaaagaagaccagagaacaagaaacgccgagaacggcgagacttgttaaggctacaactacttcgaatttttgaacttttggctgatgctggtgtaataagtgacagcacaaatggagccctagagcgggatactttagccctgggagctttgttcttagaatatgtggacttgacccgcatgctcctagaagctgaaaatgacaaagaagttgaaattcttaaagatatccgggcacattttagtgcaatggtggccaacttgattcagtgtgttccagttcaccaccgaagatttctcttcccccagcaaagtctgaggcaccaccttttcatcttattcagccagtgggcaggacccttcagcattatgttcactcctctggatcgttacagtgacagaaatcatcagattacaagatatcagtattgtgcattaaaagcaatgtcagcagtactgtgctgtggccctgtctttgacaatgtgggcctttccccagatggctacctatataaatggcttgacaacattctggcttgtcaagatttacgagttcatcaacttggctgcgaagttgttgtcttgctactggaacttaatcctgaccaaataaatctttttaactgggcaattgaccgatgctacacaggttcctaccaacttgcatctggctgcttcaaagccatagcaactgtgtgtggaagcaggaactatcccttcgacatagtgacattgttaaaccttgttctattcaaggcctctgacaccaacagagagatttatgaaatctccatgcagctcatgcagatccttgaagcaaagctttttgtatactcaaagaaagtcgctgagcaaagaccgggaagtattctctatggaacacacggcccgctgccacccctctacagcgtgtcacttgccctcttgtcatgtgagctggccaggatgtaccctgagctcacactccccctcttctcagaggtaagccagcgattccccacaacacaccccaacgggcgccagatcatgcttacctacctgctgccctggctgcacaacatcgagctggtggacagcaggctcctcctcccggggtcgagccccagcagcccagaggacgaagtcaaggaccgggaaggtgacgtgactgcttctcacgggctgagaggaaatggctggggctctccagaagccacgtcactggtcctgaacaacctcatgtacatgacggccaagtatggagatgaagttcctgggccagaaatggaaaatgcttggaatgctttagccaacaatgagaaatggagcaacaacctgaggatcaccttgcagttcctgattagcctctgtggggtcagcagcgacacagttctcctaccctatattaaaaaagtggcaatatacttgtgccgtaacaacaccattcaaaccatggaagagcttctctttgagctgcagcagacagagcccgtgaaccccatcgtccagcattgtgacaacccgcccttctaccgcttcacggccagtagcaaggcttccgcagcagcctcaggaaccacctctagcagcaatacagtggttgctggccaggaaaatttcccagatgctgaggagaacaagatattgaaagaatctgatgaaaggtttagtaatgtcatcagagcccacactcgcctcgagtcaagatacagcaatagctctggaggatcctacgatgaagataaaaatgatccaatttctccctacacgggctggttgctgactattacagagaccaagcagccgcagcccttaccgatgccttgtactggaggatgctgggcccccctggttgactatctcccggagaccatcactccccgggggccactccacaggtgcaatattgctgtaatttttatgactgaaatggtggtggatcacagtgtacgagaagactgggcgcttcatctaccattattacttcatgctgtcttcttaggtttagaccactaccggcctgaagtctttgaacacagcaaaaaactgcttcttcacctcttgattgccctctcttgcaacagcaatttccattccattgcttccgtgctcctgcagacccgagagatgggtgaagctaagactctaaccgtgcagccagcctaccaacctgaatatctctatacaggtggctttgacttcctgagagaggaccagtcatccccggtgcctgactcagggcttagttcaagctccacctcctctagcatcagtctgggaggcagcagtggaaacctcccacagatgacccaggaggtagaagatgtggacacagctgctgaaacagatgagaaggcaaacaagctcattgagtttctcacgaccagggcatttggtccactttggtgccatgaagacatcacacctaaaaatcaaaattcaaagagtgctgaacagctcactaattttctacgtcacgttgtatctgtatttaaagattccaaatcaggcttccatctggagcaccagttgagtgaagttgcattgcagacagccctcgcaagctcttcaaggcactatgctggtcggtccttccagatattccgggccctcaagcaacctctgtcagcacatgccttatctgaccttctctcaagattggtggaggtgataggagaacatggagatgagattcagggttatgtaatggaagcgctcctaaccttggaggcggctgtggataacttgtctgactgcttgaagaacagtgacctcctaactgtattgtcccgctcttcctcaccagatttaagctccagcagtaaactaacagcaagcagaaagagcacaggacaactaaacatgaacccgggaaccaccagcggcaacaccgcaactgccgaacggagccggcatcaacgaagcttctctgtgcccaagaagtttggtgtcatcgaccgatcctctgacccacctcgaagtgccacactggacagaattcaggcttgtacccaacaaggcctctcctcaaaaaccagaagctcatcctccttgaaggacagtctcacggacccatcccacataaaccatcccaccaacctgctggccaccatattctgggtcacagtggccttgatggagtctgattttgagtttgaatacttaatggccttaaggctgttgagcagactactggcacatatgccactcgataaggctgagaaccgagaaaagcttgagaaactccaggcacagctgaagtgggccgacttctccgggctgcagcagctgctgctgaaaggattcacatccctcaccaccacagacctgaccctgcagctcttcagtctgctgacaccagtgtccaaaatatccatggtggatgcatcccacgctattgggtttccactgaatgtcttgtgtctcctgcctcagctgattcagcattttgaaaatcccaatcagttctgtaaggatatagccgaaaggattgctcaggtttgtttagaagagaagaaccccaaactttcaaatcttgcacatgtcatgactctttataaaacgcacagctacacgagggactgtgccacgtgggtcaatgtggtctgtcgataccttcatgaagcatatgctgacattaccttgaatatggttacctacctggcagagctgctggagaagggcctccctagtgtgcagcagcccctgctccaggtgatctacagtcttctcagctacatggacctttctgtcgttcctgtcaaacagttcaatgtggaagttctgaagacaattgaaaaatatgtgcaaagtgttcactggagagaagctctgaatatcttgaagctggtagtttctcggtcagccagccttgttttaccttcataccagcacagtgacctctcaaaaatagaaatacatcgagtgtggactagtgcttccaaggaattacctgggaaaaccctggacttccacttcgatatttcggagactccaatcatcgggaggcggtatgatgagctgcagaattcttctgggcgtgatgggaagcccagggccatggccgtcacccggagcacatcttccacttcctcaggctccaactccaacgtccttgttccagtgagctggaaaaggccccagtattctcagaagagaacaaaagagaagttggtacatgtcctttctctgtgtggccaagaagtaggattgagcaaaaatccatcagtgattttttcatcgtgtggggatctggatctgcttgagcaccagacaagcttggtatcttctgaggacggtgcccgagagcaggagaacatggatgacacaaacagcgagcagcagtttagagtcttcagagacttcgacttcctagatgtggagctggaggatggagagggcctaagaggtgagagtatggacaatttcaactggggagtgcgcagacgttctctggacagcctggataagtgtgatatgcagattctggaggagcgccaactgtcaggaagcactcctagcctgaataaaatgcaccatgaggactccgatgaatcatccgaggaggaggacctcacagccagccagatcctggagcactcagacctaatcatgactctctccccctctgaagagacgaatcccatggagctgctcaccacagcctgtgactcgacccctgcagaacctcattcctttaacaccagaatgtccagctttgatgcttccttgcctgatatgaataatctgcagatttctgagggttcaaaggctgaagctgttcgtgaggaggaggacaccaccgtgcatgaggatgatctttctagttccatcaatgaactcccagcagcttttgaatgcagcgacagctttagcctggacatgactgagggggaagaaaaaggcaatcgggcactggaccagtttaccctggcgagctttggagaaggtgacaggggagtctctccccctccctcgcccttcttctcagccatccttgccgcctttcagcccgcagcctgtgacgatgccgaggaggcctggcgcagccacatcaaccagcttatgtgtgactcagatggctcctgtgctgtgtatacatttcatgtgttctcctccttgtttaagaatattcagaaaaggttctgcttcctaacctgtgatgcagccagttaccttggagataacctccggggaatcggatccaaatttgtcagctcttcccagatgctcacctcctgctctgaatgccgagctcaagttcagtgtgttagaactgcaagaatatttggatacctacaacaacaggaaagaggccacactctctgtaagctt

SEQ ID NO: 213915 - DNA, 10735 bp, Artificial Sequence
  derived and/or modified sequence
agggggcggcgctcccggcccatcccttagccccgcggcggccgtgtgggccggaggctgcctgcaccgcgtcagggaggccggcctagaaaccctccctcccagaagaaagccgatcccagttcaggtggggtcttcctcggttgcgtacctggctggagccgagctggtgggcggccggcagccggcgtttctggtgatgacagccccgaaatgaaagcagcgcggccgccgcctccgagggctgcagggagatcagcgtccagcaaataagaagcaagtcctggacccggaggaggaggagcggccgagcatctctctctgctccgccgtgtcctttagatgagcactcccggccggagccggaggtggatccgcagagctgcctctgggcgcctgaccccgcgctgacatcacaacctgtgacaggcgcatcacgcccggtacctgctcccggccgctgcccgtcctcccagcctctttgtatgccgcagacatggccagccagcaggattcgggcttctttgagatcagtatcaaatatttactgaaatcctggagtaatacttctcccgttggcaacggttacatcaagcctccggttccacctgcttctggcacgcacagggagaaagggccgccaaccatgctacccatcaatgtggacccagacagtaaaccaggagaatatgtcctcaaaagtttatttgtcaacttcaccactcaggctgaacgcaagattcgtatcattatggcagagcccctggaaaagccattgacaaaatctctgcaacgtggagaagacccccaatttgatcaggtcatcagctcaatgagctccctttctgagtactgcctgccttccattctacgtacattatttgactggtataaaaggcaaaatggcattgaggatgaatcacatgaatacagaccaagaacaagcaataaatcaaaaagcgatgaacaacagcgagattatttaatggaaagacgggacctcgccattgattttattttttctttagtattaatagaagttttgaaacagattccacttcatcctgtaatagacagtttaatacatgatgttattaacttggctttcaagcactttaaatacaaagaagggtaccttggtcccaacactggcaatatgcatattgtggcagacctgtatgcagaagtcattggagtgttggcacaagccaaattccctgctgtaaagaagaaatttatggcggagctaaaagaattacggcacaaagagcagaacccatatgtggttcaaagcattatcagcttaataatgggcatgaaattctttcgaattaagatgtatccagtggaggattttgaggcctctcttcagtttatgcaggaatgtgcacattacttcctcgaggtcaaagacaaagatatcaagcatgccttggctgggctttttgttgaaatacttgttccagttgctgctgctgttaaaaatgaagtaaatgttccctgccttagaaattttgtggaaagcctgtatgacaccacgctggaactttcttctcgaaagaagcattccttggccttgtaccccctggtgacctgtttgctctgtgtcagtcagaagcagctgttcctgaacaggtggcacattttcctcaacaactgcttgtccaaccttaaaaacaaagatcccaagatggctcgagttgcactggaatctctctacagattactttgggtttacatgattcgaattaaatgtgaaagcaacacagctactcagagccgacttataaccatcatcacaacacttttccccaaagggtcccgcggtgtggtaccaagggacatgcctctgaacatctttgtgaaaatcatccagttcattgcccaggaacgtttagattttgcaatgaaagaaatcattttcgattttctttgtgtgggaaaaccagcaaaagcattcagtctcaacccagagagaatgaacattggtttacgggcattcttggtcatagctgatagcttgcagcagaaagatggggaacctcccatgccggttacaggagccgttcttccttcaggaaacacgttaagagtaaagaaaacatatttgagtaaaacactaactgaagaggaagccaaaatgataggcatgtccttatattactctcaagtacgaaaagctgtagacaacattttaaggcaccttgataaagaagtaggaaggtgtatgatgctgactaatgtacagatgttaaacaaagaaccggaagacatgatcacgggtgagagaaagccaaaaatagatcttttcaggacctgtgttgctgctattcctcgactgcttcctgatgggatgtcaaaacttgaacttattgacttactggctaggctctctattcatatggatgatgaattgcgacatattgcacaaaattctcttcagggtttacttgttgacttctcagattggagggaagatgtactatttggctttaccaacttcctgctccgggaagtaaatgatatgcatcacacactccttgattcgtccctgaagttgctgctgcagctgctcacccagtggaaactagtcatccagacacaaggaaaagtctatgaacaagccaacaaaatcagaaattcagagctcatcgcaaatggctccagtcacagaattcagtcggaacgaggtccccactgcagtgtactccacgctgtagaaggttttgctctggttttactctgcagtttccaggtggccacacgcaaactgtccgttttaatactcaaggaaattcgagcgttgtttattgccctggggcagcctgaggatgacgacaggccgatgattgatgtcatggatcagctaagttcttccattctagaaagttttattcatgtagcagtttcggattcagcaacattaccactcacccacaatgtggatctgcagtggttggtggaatggaacgcagtcctggtcaatagccattatgatgtgaaaagcccttcccatgtctggatatttgcacagtctgtcaaagacccctgggtcctctgcctcttcagcttcctccggcaggagaacttacccaagcactgccccacagccctcagctatgcctggccttatgccttcactcggctccagtcggtgatgcctctggtggacccaaatagcccaattaatgccaagaaaaccagcactgccggcagcggagacaactatgttactttgtggagaaattacctaattctttgttttggagttgcaaaacccagtattatgagcccaggacacttaagagcttccactccagaaataatggcgaccacacctgatggtacagtgagctacgataacaaggccataggcaccccatcggtgggagttctgttaaagcagttggtgcctttgatgagactagagagcattgagatcacagagtccttagttttaggatttggaagaacaaattcccttgttttcagagaattggtagaagaacttcatccattaatgaaagaagctctggaaagaagaccagagaacaagaaacgccgagaacggcgagacttgttaaggctacaactacttcgaatttttgaacttttggctgatgctggtgtaataagtgacagcacaaatggagccctagagcgggatactttagccctgggagctttgttcttagaatatgtggacttgacccgcatgctcctagaagctgaaaatgacaaagaagttgaaattcttaaagatatccgggcacattttagtgcaatggtggccaacttgattcagtgtgttccagttcaccaccgaagatttctcttcccccagcaaagtctgaggcaccaccttttcatcttattcagccagtgggcaggacccttcagcattatgttcactcctctggatcgttacagtgacagaaatcatcagattacaagatatcagtattgtgcattaaaagcaatgtcagcagtactgtgctgtggccctgtctttgacaatgtgggcctttccccagatggctacctatataaatggcttgacaacattctggcttgtcaagatttacgagttcatcaacttggctgcgaagttgttgtcttgctactggaacttaatcctgaccaaataaatctttttaactgggcaattgaccgatgctacacaggttcctaccaacttgcatctggctgcttcaaagccatagcaactgtgtgtggaagcaggaactatcccttcgacatagtgacattgttaaaccttgttctattcaaggcctctgacaccaacagagagatttatgaaatctccatgcagctcatgcagatccttgaagcaaagctttttgtatactcaaagaaagtcgctgagcaaagaccgggaagtattctctatggaacacacggcccgctgccacccctctacagcgtgtcacttgccctcttgtcatgtgagctggccaggatgtaccctgagctcacactccccctcttctcagaggtaagccagcgattccccacaacacaccccaacgggcgccagatcatgcttacctacctgctgccctggctgcacaacatcgagctggtggacagcaggctcctcctcccggggtcgagccccagcagcccagaggacgaagtcaaggaccgggaaggtgacgtgactgcttctcacgggctgagaggaaatggctggggctctccagaagccacgtcactggtcctgaacaacctcatgtacatgacggccaagtatggagatgaagttcctgggccagaaatggaaaatgcttggaatgctttagccaacaatgagaaatggagcaacaacctgaggatcaccttgcagttcctgattagcctctgtggggtcagcagcgacacagttctcctaccctatattaaaaaagtggcaatatacttgtgccgtaacaacaccattcaaaccatggaagagcttctctttgagctgcagcagacagagcccgtgaaccccatcgtccagcattgtgacaacccgcccttctaccgcttcacggccagtagcaaggcttccgcagcagcctcaggaaccacctctagcagcaatacagtggttgctggccaggaaaatttcccagatgctgaggagaacaagatattgaaagaatctgatgaaaggtttagtaatgtcatcagagcccacactcgcctcgagtcaagatacagcaatagctctggaggatcctacgatgaagataaaaatgatccaatttctccctacacgggctggttgctgactattacagagaccaagcagccgcagcccttaccgatgccttgtactggaggatgctgggcccccctggttgactatctcccggagaccatcactccccgggggccactccacaggtgcaatattgctgtaatttttatgactgaaatggtggtggatcacagtgtacgagaagactgggcgcttcatctaccattattacttcatgctgtcttcttaggtttagaccactaccggcctgaagtctttgaacacagcaaaaaactgcttcttcacctcttgattgccctctcttgcaacagcaatttccattccattgcttccgtgctcctgcagacccgagagatgggtgaagctaagactctaaccgtgcagccagcctaccaacctgaatatctctatacaggtggctttgacttcctgagagaggaccagtcatccccggtgcctgactcagggcttagttcaagctccacctcctctagcatcagtctgggaggcagcagtggaaacctcccacagatgacccaggaggtagaagatgtggacacagctgctgaaacagatgagaaggcaaacaagctcattgagtttctcacgaccagggcatttggtccactttggtgccatgaagacatcacacctaaaaatcaaaattcaaagagtgctgaacagctcactaattttctacgtcacgttgtatctgtatttaaagattccaaatcaggcttccatctggagcaccagttgagtgaagttgcattgcagacagccctcgcaagctcttcaaggcactatgctggtcggtccttccagatattccgggccctcaagcaacctctgtcagcacatgccttatctgaccttctctcaagattggtggaggtgataggagaacatggagatgagattcagggttatgtaatggaagcgctcctaaccttggaggcggctgtggataacttgtctgactgcttgaagaacagtgacctcctaactgtattgtcccgctcttcctcaccagatttaagctccagcagtaaactaacagcaagcagaaagagcacaggacaactaaacatgaacccgggaaccaccagcggcaacaccgcaactgccgaacggagccggcatcaacgaagcttctctgtgcccaagaagtttggtgtcatcgaccgatcctctgacccacctcgaagtgccacactggacagaattcaggcttgtacccaacaaggcctctcctcaaaaaccagaagctcatcctccttgaaggacagtctcacggacccatcccacataaaccatcccaccaacctgctggccaccatattctgggtcacagtggccttgatggagtctgattttgagtttgaatacttaatggccttaaggctgttgagcagactactggcacatatgccactcgataaggctgagaaccgagaaaagcttgagaaactccaggcacagctgaagtgggccgacttctccgggctgcagcagctgctgctgaaaggattcacatccctcaccaccacagacctgaccctgcagctcttcagtctgctgacaccagtgtccaaaatatccatggtggatgcatcccacgctattgggtttccactgaatgtcttgtgtctcctgcctcagctgattcagcattttgaaaatcccaatcagttctgtaaggatatagccgaaaggattgctcaggtttgtttagaagagaagaaccccaaactttcaaatcttgcacatgtcatgactctttataaaacgcacagctacacgagggactgtgccacgtgggtcaatgtggtctgtcgataccttcatgaagcatatgctgacattaccttgaatatggttacctacctggcagagctgctggagaagggcctccctagtgtgcagcagcccctgctccaggtgatctacagtcttctcagctacatggacctttctgtcgttcctgtcaaacagttcaatgtggaagttctgaagacaattgaaaaatatgtgcaaagtgttcactggagagaagctctgaatatcttgaagctggtagtttctcggtcagccagccttgttttaccttcataccagcacagtgacctctcaaaaatagaaatacatcgagtgtggactagtgcttccaaggaattacctgggaaaaccctggacttccacttcgatatttcggagactccaatcatcgggaggcggtatgatgagctgcagaattcttctgggcgtgatgggaagcccagggccatggccgtcacccggagcacatcttccacttcctcaggctccaactccaacgtccttgttccagtgagctggaaaaggccccagtattctcagaagagaacaaaagagaagttggtacatgtcctttctctgtgtggccaagaagtaggattgagcaaaaatccatcagtgattttttcatcgtgtggggatctggatctgcttgagcaccagacaagcttggtatcttctgaggacggtgcccgagagcaggagaacatggatgacacaaacagcgagcagcagtttagagtcttcagagacttcgacttcctagatgtggagctggaggatggagagggtgagagtatggacaatttcaactggggagtgcgcagacgttctctggacagcctggataagtgtgatatgcagattctggaggagcgccaactgtcaggaagcactcctagcctgaataaaatgcaccatgaggactccgatgaatcatccgaggaggaggacctcacagccagccagatcctggagcactcagacctaatcatgactctctccccctctgaagagacgaatcccatggagctgctcaccacagcctgtgactcgacccctgcagaacctcattcctttaacaccagaatgtccagctttgatgcttccttgcctgatatgaataatctgcagatttctgagggttcaaaggctgaagctgttcgtgaggaggaggacaccaccgtgcatgaggatgatctttctagttccatcaatgaactcccagcagcttttgaatgcagcgacagctttagcctggacatgactgagggggaagaaaaaggcaatcgggcactggaccagtttaccctggcgagctttggagaaggtgacaggggagtctctccccctccctcgcccttcttctcagccatccttgccgcctttcagcccgcagcctgtgacgatgccgaggaggcctggcgcagccacatcaaccagcttatgtgtgactcagatggctcctgtgctgtgtatacatttcatgtgttctcctccttgtttaagaatattcagaaaaggttctgcttcctaacctgtgatgcagccagttaccttggagataacctccggggaatcggatccaaatttgtcagctcttcccagatgctcacctcctgctctgaatgtcctacactttttgtggatgccgagactctcctttcatgtggacttctggacaagctcaagttcagtgtgttagaactgcaagaatatttggatacctacaacaacaggaaagaggccacactctcttggcttgcaaattgtaaggcaacatttgcagggggatcaagagatggagtaattacctgtcaaccaggggactccgaagaaaagcaattggaactgtgtcagagattatataagctacacttccagctgctattgctttttcagtcctactgtaagctcatcggccaggtgcacgaagttagctccatgccagagctgctgaatatgtccagggaactgagtgacctaaagaaacacctgaaggaagccagtgcagtcattgcagctgaccctctctattcagacggcgcgtggtccgagcccaccttcacgtccactgaagcagccatccagtccatgctggagtgcctgaagaacaacgaactcggcaaagctttgcggcagatcagggagtgcagaagtctgtggcccaatgacatctttggaagcagttctgatgatgaggtccagacactactgaatatttatttccgtcaccaaactctgggacagacgggtacttatgccctggtggggtctaaccagagcctgaccgagatctgcaccaagctgatggagctgaacatggagatccgggacatgatccgcagggcccagagttaccgagtcctcactacttttcttccagactccagtgtttctggcactagtctctgacaggagcctcctgtccccactgggttccaaactggcagtgctgccatgctggggcaacgtcattcagtgtcttctcggccttcaaaaggcttggacagactgttctccctcttgttacctgtagggctttttctaaagaggatggcagaacttccaacgtgtagcaatactataagaaccaaggtagcttagaacgtcctggacagactccactcatcatgctgtgtggcacaaatgtgttacatttgaccgagcatatgcaactcgctactgaagaagtgacttccgttgcataccaaagccgactacactgaacagtaccttcctttctagaaacaattttagattggcaaaagtgcaatgttttcttcactcaaaaaattttatattctcaaacatgtatattctttccctgtcttgttccattttcttttcttttttcttttttctttttcctttctttcgtgggctgagaaaggggcaggcaaaatgaagctggccactgaaaactgtaagatggtcaaaagctgacagcctgtgtatgtgaaaagggaattgtaaatggactgcaatgtaatgtacactgtaatttgaatacaattactgtatctaaaaggagctgctatgaagtacctttcttatgttgctaggctactgtttctgaaagccctggatctctttgcaccaaaaatggtccagatagactctttttaaggatcttggctgctttttactagaaggttgcttttatgagcatatttatactgctgaaggatgagtgttaattttaattaactttgccgttttgtagagaaaactattcacaagataaattccaagtcttttcacctgtcaggcatgcatattttaatatctgtttggatagtcagaagtagaatcataaaggtaaaatatgagttgttactttgtttcttcgatgtcatattttatgtgtaatatatatgtaaagggccattcttaagttctctccttaaacttaatgctgtcaagtgttagatgtgtgcatgtgaacttgttgcactgcagaaacatattcagagtttatctatgtaacttattcactctgtaaatacatttaaagtttttgtgatgtaagcttaattgatattctgttcagaactttctttagactaaaaaaaaaaaaaaagacaaaatacacgttgaccatggacttta

SEQ ID NO: 213916 - DNA, 10630 bp, Artificial Sequence
  derived and/or modified sequence
agggggcggcgctcccggcccatcccttagccccgcggcggccgtgtgggccggaggctgcctgcaccgcgtcagggaggccggcctagaaaccctccctcccagaagaaagccgatcccagttcaggtggggtcttcctcggttgcgtacctggctggagccgagctggtgggcggccggcagccggcgtttctggtgatgacagccccgaaatgaaagcagcgcggccgccgcctccgagggctgcagggagatcagcgtccagcaaataagaagcaagtcctggacccggaggaggaggagcggccgagcatctctctctgctccgccgtgtcctttagatgagcactcccggccggagccggaggtggatccgcagagctgcctctgggcgcctgaccccgcgctgacatcacaacctgtgacaggcgcatcacgcccggtacctgctcccggccgctgcccgtcctcccagcctctttgtatgccgcagacatggccagccagcaggattcgggcttctttgagatcagtatcaaatatttactgaaatcctggagtaatacttctcccgttggcaacggttacatcaagcctccggttccacctgcttctggcacgcacagggagaaagggccgccaaccatgctacccatcaatgtggacccagacagtaaaccaggagaatatgtcctcaaaagtttatttgtcaacttcaccactcaggctgaacgcaagattcgtatcattatggcagagcccctggaaaagccattgacaaaatctctgcaacgtggagaagacccccaatttgatcaggtcatcagctcaatgagctccctttctgagtactgcctgccttccattctacgtacattatttgactggtataaaaggcaaaatggcattgaggatgaatcacatgaatacagaccaagaacaagcaataaatcaaaaagcgatgaacaacagcgagattatttaatggaaagacgggacctcgccattgattttattttttctttagtattaatagaagttttgaaacagattccacttcatcctgtaatagacagtttaatacatgatgttattaacttggctttcaagcactttaaatacaaagaagggtaccttggtcccaacactggcaatatgcatattgtggcagacctgtatgcagaagtcattggagtgttggcacaagccaaattccctgctgtaaagaagaaatttatggcggagctaaaagaattacggcacaaagagcagaacccatatgtggttcaaagcattatcagcttaataatgggcatgaaattctttcgaattaagatgtatccagtggaggattttgaggcctctcttcagtttatgcaggaatgtgcacattacttcctcgaggtcaaagacaaagatatcaagcatgccttggctgggctttttgttgaaatacttgttccagttgctgctgctgttaaaaatgaagtaaatgttccctgccttagaaattttgtggaaagcctgtatgacaccacgctggaactttcttctcgaaagaagcattccttggccttgtaccccctggtgacctgtttgctctgtgtcagtcagaagcagctgttcctgaacaggtggcacattttcctcaacaactgcttgtccaaccttaaaaacaaagatcccaagatggctcgagttgcactggaatctctctacagattactttgggtttacatgattcgaattaaatgtgaaagcaacacagctactcagagccgacttataaccatcatcacaacacttttccccaaagggtcccgcggtgtggtaccaagggacatgcctctgaacatctttgtgaaaatcatccagttcattgcccaggaacgtttagattttgcaatgaaagaaatcattttcgattttctttgtgtgggaaaaccagcaaaagcattcagtctcaacccagagagaatgaacattggtttacgggcattcttggtcatagctgatagcttgcagcagaaagatggggaacctcccatgccggttacaggagccgttcttccttcaggaaacacgttaagagtaaagaaaacatatttgagtaaaacactaactgaagaggaagccaaaatgataggcatgtccttatattactctcaagtacgaaaagctgtagacaacattttaaggcaccttgataaagaagtaggaaggtgtatgatgctgactaatgtacagatgttaaacaaagaaccggaagacatgatcacgggtgagagaaagccaaaaatagatcttttcaggacctgtgttgctgctattcctcgactgcttcctgatgggatgtcaaaacttgaacttattgacttactggctaggctctctattcatatggatgatgaattgcgacatattgcacaaaattctcttcagggtttacttgttgacttctcagattggagggaagatgtactatttggctttaccaacttcctgctccgggaagtaaatgatatgcatcacacactccttgattcgtccctgaagttgctgctgcagctgctcacccagtggaaactagtcatccagacacaaggaaaagtctatgaacaagccaacaaaatcagaaattcagagctcatcgcaaatggctccagtcacagaattcagtcggaacgaggtccccactgcagtgtactccacgctgtagaaggttttgctctggttttactctgcagtttccaggtggccacacgcaaactgtccgttttaatactcaaggaaattcgagcgttgtttattgccctggggcagcctgaggatgacgacaggccgatgattgatgtcatggatcagctaagttcttccattctagaaagttttattcatgtagcagtttcggattcagcaacattaccactcacccacaatgtggatctgcagtggttggtggaatggaacgcagtcctggtcaatagccattatgatgtgaaaagcccttcccatgtctggatatttgcacagtctgtcaaagacccctgggtcctctgcctcttcagcttcctccggcaggagaacttacccaagcactgccccacagccctcagctatgcctggccttatgccttcactcggctccagtcggtgatgcctctggtggacccaaatagcccaattaatgccaagaaaaccagcactgccggcagcggagacaactatgttactttgtggagaaattacctaattctttgttttggagttgcaaaacccagtattatgagcccaggacacttaagagcttccactccagaaataatggcgaccacacctgatggtacagtgagctacgataacaaggccataggcaccccatcggtgggagttctgttaaagcagttggtgcctttgatgagactagagagcattgagatcacagagtccttagttttaggatttggaagaacaaattcccttgttttcagagaattggtagaagaacttcatccattaatgaaagaagctctggaaagaagaccagagaacaagaaacgccgagaacggcgagacttgttaaggctacaactacttcgaatttttgaacttttggctgatgctggtgtaataagtgacagcacaaatggagccctagagcgggatactttagccctgggagctttgttcttagaatatgtggacttgacccgcatgctcctagaagctgaaaatgacaaagaagttgaaattcttaaagatatccgggcacattttagtgcaatggtggccaacttgattcagtgtgttccagttcaccaccgaagatttctcttcccccagcaaagtctgaggcaccaccttttcatcttattcagccagtgggcaggacccttcagcattatgttcactcctctggatcgttacagtgacagaaatcatcagattacaagatatcagtattgtgcattaaaagcaatgtcagcagtactgtgctgtggccctgtctttgacaatgtgggcctttccccagatggctacctatataaatggcttgacaacattctggcttgtcaagatttacgagttcatcaacttggctgcgaagttgttgtcttgctactggaacttaatcctgaccaaataaatctttttaactgggcaattgaccgatgctacacaggttcctaccaacttgcatctggctgcttcaaagccatagcaactgtgtgtggaagcaggaactatcccttcgacatagtgacattgttaaaccttgttctattcaaggcctctgacaccaacagagagatttatgaaatctccatgcagctcatgcagatccttgaagcaaagctttttgtatactcaaagaaagtcgctgagcaaagaccgggaagtattctctatggaacacacggcccgctgccacccctctacagcgtgtcacttgccctcttgtcatgtgagctggccaggatgtaccctgagctcacactccccctcttctcaggtaagccagcgattccccacaacacaccccaacgggcgccagatcatgcttacctacctgctgccctggctgcacaacatcgagctggtggacagcaggctcctcctcccgggagccccagcagcccagaggacgaagtcaaggaccgggaaggtgacgtgactgcttctcacgggctgagaggaaatggctggggctctccagaagccacgtcactggtcctgaacaacctcatgtacatgacggccaagtatggagatgaagttcctgggccagaaatggaaaatgcttggaatgctttagccaacaatgagaaatggagcaacaacctgaggatcaccttgcagttcctgattagcctctgtggggtcagcagcgacacagttctcctaccctatattaaaaaagtggcaatatacttgtgccgtaacaacaccattcaaaccatggaagagcttctctttgagctgcagcagacagagcccgtgaaccccatcgtccagcattgtgacaacccgcccttctaccgcttcacggccagtagcaaggcttccgcagcagcctcaggaaccacctctagcagcaatacagtggttgctggccaggaaaatttcccagatgctgaggagaacaagatattgaaagaatctgatgaaaggtttagtaatgtcatcagagcccacactcgcctcgagtcaagatacagcaatagctctggaggatcctacgatgaagataaaaatgatccaatttctccctacacgggctggttgctgactattacagagaccaagcagccgcagcccttaccgatgccttgtactggaggatgctgggcccccctggttgactatctcccggagaccatcactccccgggggccactccacaggtgcaatattgctgtaatttttatgactgaaatggtggtggatcacagtgtacgagaagactgggcgcttcatctaccattattacttcatgctgtcttcttaggtttagaccactaccggcctgaagtctttgaacacagcaaaaaactgcttcttcacctcttgattgccctctcttgcaacagcaatttccattccattgcttccgtgctcctgcagacccgagagatgggtgaagctaagactctaaccgtgcagccagcctaccaacctgaatatctctatacaggtggctttgacttcctgagagaggaccagtcatccccggtgcctgactcagggcttagttcaagctccacctcctctagcatcagtctgggaggcagcagtggaaacctcccacagatgacccaggaggtagaagatgtggacacagctgctgaaacagatgagaaggcaaacaagctcattgagtttctcacgaccagggcatttggtccactttggtgccatgaagacatcacacctaaaaatcaaaattcaaagagtgctgaacagctcactaattttctacgtcacgttgtatctgtatttaaagattccaaatcaggcttccatctggagcaccagttgagtgaagttgcattgcagacagccctcgcaagctcttcaaggcactatgctggtcggtccttccagatattccgggccctcaagcaacctctgtcagcacatgccttatctgaccttctctcaagattggtggaggtgataggagaacatggagatgagattcagggttatgtaatggaagcgctcctaaccttggaggcggctgtggataacttgtctgactgcttgaagaacagtgacctcctaactgtattgtcccgctcttcctcaccagatttaagctccagcagtaaactaacagcaagcagaaagagcacaggacaactaaacatgaacccgggaaccaccagcggcaacaccgcaactgccgaacggagccggcatcaacgaagcttctctgtgcccaagaagtttggtgtcatcgaccgatcctctgacccacctcgaagtgccacactggacagaattcaggcttgtacccaacaaggcctctcctcaaaaaccagaagctcatcctccttgaaggacagtctcacggacccatcccacataaaccatcccaccaacctgctggccaccatattctgggtcacagtggccttgatggagtctgattttgagtttgaatacttaatggccttaaggctgttgagcagactactggcacatatgccactcgataaggctgagaaccgagaaaagcttgagaaactccaggcacagctgaagtgggccgacttctccgggctgcagcagctgctgctgaaaggattcacatccctcaccaccacagacctgaccctgcagctcttcagtctgctgacaccagtgtccaaaatatccatggtggatgcatcccacgctattgggtttccactgaatgtcttgtgtctcctgcctcagctgattcagcattttgaaaatcccaatcagttctgtaaggatatagccgaaaggattgctcaggtttgtttagaagagaagaaccccaaactttcaaatcttgcacatgtcatgactctttataaaacgcacagctacacgagggactgtgccacgtgggtcaatgtggtctgtcgataccttcatgaagcatatgctgacattaccttgaatatggttacctacctggcagagctgctggagaagggcctccctagtgtgcagcagcccctgctccaggtgatctacagtcttctcagctacatggacctttctgtcgttcctgtcaaacagttcaatgtggaagttctgaagacaattgaaaaatatgtgcaacacagtgacctctcaaaaatagaaatacatcgagtgtggactagtgcttccaaggaattacctgggaaaaccctggacttccacttcgatatttcggagactccaatcatcgggaggcggtatgatgagctgcagaattcttctgggcgtgatgggaagcccagggccatggccgtcacccggagcacatcttccacttcctcaggctccaactccaacgtccttgttccagtgagctggaaaaggccccagtattctcagaagagaacaaaagagaagttggtacatgtcctttctctgtgtggccaagaagtaggattgagcaaaaatccatcagtgattttttcatcgtgtggggatctggatctgcttgagcaccagacaagcttggtatcttctgaggacggtgcccgagagcaggagaacatggatgacacaaacagcgagcagcagtttagagtcttcagagacttcgacttcctagatgtggagctggaggatggagagggtgagagtatggacaatttcaactggggagtgcgcagacgttctctggacagcctggataagtgtgatatgcagattctggaggagcgccaactgtcaggaagcactcctagcctgaataaaatgcaccatgaggactccgatgaatcatccgaggaggaggacctcacagccagccagatcctggagcactcagacctaatcatgactctctccccctctgaagagacgaatcccatggagctgctcaccacagcctgtgactcgacccctgcagaacctcattcctttaacaccagaatgtccagctttgatgcttccttgcctgatatgaataatctgcagatttctgagggttcaaaggctgaagctgttcgtgaggaggaggacaccaccgtgcatgaggatgatctttctagttccatcaatgaactcccagcagcttttgaatgcagcgacagctttagcctggacatgactgagggggaagaaaaaggcaatcgggcactggaccagtttaccctggcgagctttggagaaggtgacaggggagtctctccccctccctcgcccttcttctcagccatccttgccgcctttcagcccgcagcctgtgacgatgccgaggaggcctggcgcagccacatcaaccagcttatgtgtgactcagatggctcctgtgctgtgtatacatttcatgtgttctcctccttgtttaagaatattcagaaaaggttctgcttcctaacctgtgatgcagccagttaccttggagataacctccggggaatcggatccaaatttgtcagctcttcccagatgctcacctcctgctctgaatgtcctacactttttgtggatgccgagactctcctttcatgtggacttctggacaagctcaagttcagtgtgttagaactgcaagaatatttggatacctacaacaacaggaaagaggccacactctcttggcttgcaaattgtaaggcaacatttgcagggggatcaagagatggagtaattacctgtcaaccaggggactccgaagaaaagcaattggaactgtgtcagagattatataagctacacttccagctgctattgctttttcagtcctactgtaagctcatcggccaggtgcacgaagttagctccatgccagagctgctgaatatgtccagggaactgagtgacctaaagaaacacctgaaggaagccagtgcagtcattgcagctgaccctctctattcagacggcgcgtggtccgagcccaccttcacgtccactgaagcagccatccagtccatgctggagtgcctgaagaacaacgaactcggcaaagctttgcggcagatcagggagtgcagaagtctgtggcccaatgacatctttggaagcagttctgatgatgaggtccagacactactgaatatttatttccgtcaccaaactctgggacagacgggtacttatgccctggtggggtctaaccagagcctgaccgagatctgcaccaagctgatggagctgaacatggagatccgggacatgatccgcagggcccagagttaccgagtcctcactacttttcttccagactccagtgtttctggcactagtctctgacaggagcctcctgtccccactgggttccaaactggcagtgctgccatgctggggcaacgtcattcagtgtcttctcggccttcaaaaggcttggacagactgttctccctcttgttacctgtagggctttttctaaagaggatggcagaacttccaacgtgtagcaatactataagaaccaaggtagcttagaacgtcctggacagactccactcatcatgctgtgtggcacaaatgtgttacatttgaccgagcatatgcaactcgctactgaagaagtgacttccgttgcataccaaagccgactacactgaacagtaccttcctttctagaaacaattttagattggcaaaagtgcaatgttttcttcactcaaaaaattttatattctcaaacatgtatattctttccctgtcttgttccattttcttttcttttttcttttttctttttcctttctttcgtgggctgagaaaggggcaggcaaaatgaagctggccactgaaaactgtaagatggtcaaaagctgacagcctgtgtatgtgaaaagggaattgtaaatggactgcaatgtaatgtacactgtaatttgaatacaattactgtatctaaaaggagctgctatgaagtacctttcttatgttgctaggctactgtttctgaaagccctggatctctttgcaccaaaaatggtccagatagactctttttaaggatcttggctgctttttactagaaggttgcttttatgagcatatttatactgctgaaggatgagtgttaattttaattaactttgccgttttgtagagaaaactattcacaagataaattccaagtcttttcacctgtcaggcatgcatattttaatatctgtttggatagtcagaagtagaatcataaaggtaaaatatgagttgttactttgtttcttcgatgtcatattttatgtgtaatatatatgtaaagggccattcttaagttctctccttaaacttaatgctgtcaagtgttagatgtgtgcatgtgaacttgttgcactgcagaaacatattcagagtttatctatgtaacttattcactctgtaaatacatttaaagtttttgtgatgtaagcttaattgatattctgttcagaactttctttagactaaaaaaaaaaaaaaagacaaaataca

SEQ ID NO: 213917 - DNA, 1517 bp, Artificial Sequence
  derived and/or modified sequence
ctctcactgatcctggttctgcctgccctagagccctttcattgtcctgctcattccacattttgtagtcaggctgaagctgttcgtgaggaggaggacaccaccgtgcatgaggatgatctttctagttccatcaatgaactcccagcagcttttgaatgcagcgacagctttagcctggacatgactgagggggaagaaaaaggcaatcgggcactggaccagtttaccctggcgagctttggagaaggtgacaggggagtctctccccctccctcgcccttcttctcagccatccttgccgcctttcagcccgcagcctgtgacgatgccgaggaggcctggcgcagccacatcaaccagcttatgtgtgactcagatggctcctgtgctgtgtatacatttcatgtgttctcctccttgtttaagaatattcagaaaaggttctgcttcctaacctgtgatgcagccagttaccttggagataacctccggggaatcggatccaaatttgtcagctcttcccagatgctcacctcctgctctgaatgtcctacactttttgtggatgccgagactctcctttcatgtggacttctggacaagctcaagttcagtgtgttagaactgcaagaatatttggatacctacaacaacaggaaagaggccacactctcttggcttgcaaattgtaaggcaacatttgcagggggatcaagagatggagtaattacctgtcaaccaggggactccgaagaaaagcaattggaactgtgtcagagattatataagctacacttccagctgctattgctttttcagtcctactgtaagctcatcggccaggtgcacgaagttagctccatgccagagctgctgaatatgtccagggaactgagtgacctaaagaaacacctgaaggaagccagtgcagtcattgcagctgaccctctctattcagacggcgcgtggtccgagcccaccttcacgtccactgaagcagccatccagtccatgctggagtgcctgaagaacaacgaactcggcaaagctttgcggcagatcagggagtgcagaagtctgtggcccaatgacatctttggaagcagttctgatgatgaggtccagacactactgaatatttatttccgtcaccaaactctgggacagacgggtacttatgccctggtggggtctaaccagagcctgaccgagatctgcaccaagctgatggagctgaacatggagatccgggacatgatccgcagggcccagagttaccgagtcctcactacttttcttccagactccagtgtttctggcactagtctctgacaggagcctcctgtccccactgggttccaaactggcagtgctgccatgctggggcaacgtcattcagtgtcttctcggccttcaaaaggcttggacagactgttctccctcttgttacctgtagggctttttctaaagaggatggcagaacttccaacgtgtagcaatactataagaaccaa

SEQ ID NO: 213918 - DNA, 1569 bp, Artificial Sequence
  derived and/or modified sequence
atggctttgaccgagacccaaccccagttgctgagcgccgacctggttctggcactgcaggtactcatgctctgggagatgacagaggctaacaaggtattaaagagacgccagcatccccaaaggagccattgtatttctagtaagatcctggagtcctacccaggggagaagccactgactaaaagcctgcagaggggagaggacccacagttcgatcaggtcattagcagcatgagctcactctccgagtactgtctcccttctattctgcgcactttattcgactgcgatgagcagcagagagactacttaatggagagaagagacctcgccatcgactttattttcagtctcgtgctgatcgaggtgctaaagcagggcagcttgacgtgcctcataatcccctacttggggacactggtccctaccctggccatttgtatcctgtggcaaacctgtatgcaaaagtcactggagtgttggcataagccaagcaagttcccggcggtcaagaaaaaatttatggcagagctcaaggagctgcgccataaagaacagaacccatacgtcgtccagtccattatttcattaattatgggaatgaagttctttagaatcaaaatgtacccagttgaagatttcgaggccagcctgcagttcatgcaggagtgcgctcattattttctcgaggtgaaagacaaagacatcaaacatgccttggcaggtctttttgttgagatcctcgtgccagtcgccgcagccgtaaagaacgaggttaatgtcccatgtttgaggaacttcgtggaatctctatatgatactactctggagcttagctctcgtaaaaaacacagcctagctctataccccctggtgacttgtctcctatgcgtaagccagaaacaactatttctgaacaggtggcacatcttcctgaataactgtctgtccaacctgaaaaacaaagacccaaaaatggcccgagtggcactcgaatcactgtaccggctgttatgggtgtacatgatccggattaagtgcgaaagcaatacagcaactcaatctcgactcatcaccattattacaactctatttcctaagggcagccgcggcgtcgtgcctcgagacatgccgttgaacattttcgtaaaaatcatccagtttatcgctcaggagcgtttggacttcgctatgaaggagatcattttcgatttcctttgtgtgggcaaaccggccaaggcgttttctctaaatcccgaacgaatgaacatagggctcagagccttcttagtcatcgccgactctctgcagcagaaggatggcgagccaccaatgccagtgaccggagccgttctgccatcaggcaacacactgcgcgttaagaaaacatatctctccaagaccctgactgaagaagaggccaaaatgatcgggatgagtctttattactcccaggtgagaaaagccgtagacaatattctgcgccatcttgacaaggaagtcggccgctgtatgatgctcacaaatgtacagatgctcaataaggagccagaggacatgatttag

SEQ ID NO: 213919 - DNA, 9042 bp, Artificial Sequence
  derived and/or modified sequence
atggccagtcaacaggatagtggctttttcgaaatctccatcaaatatctcctaaagagctggagcaataccagtccggttggcaacggctacatcaagcctcctgtaccacctgccagcggaacacaccgggagaagggtcccccaaccatgctgccaatcaacgtggatccggattctaaaccaggcgagtacgtgctgaaatccttgtttgtgaattttactacccaggccgagcgaaaaattcggataataatggccgagcctctcgaaaagcccctgacaaaatccctgcagcggggcgaggatccccagttcgaccaggtgatttcatccatgtcatccttgagtgaatattgtctgcctagtattttgcgaacactgtttgactggtataaacgccagaacggcatagaggacgagtcacacgaatatcgccctaggaccagcaataagtccaagagcgatgagcagcagagggactatctcatggaacgtcgagatctggcaatcgacttcattttcagtttagtgctaattgaggtgctcaaacagatacccttgcatcctgtgattgatagcttaattcacgacgtgatcaatctggccttcaaacacttcaagtataaagaaggctacctaggaccaaatacgggaaacatgcacattgtagctgatctgtacgccgaggtgatcggtgtgctggctcaggcaaaatttcccgcagtgaagaaaaagttcatggcggagcttaaagagttgcgccataaagaacaaaacccttacgtcgtgcagtctataatcagtctgattatgggtatgaagtttttccgaatcaagatgtatcctgttgaggacttcgaggcctctctgcagtttatgcaggagtgtgcccattactttcttgaagttaaggacaaagacattaagcacgcccttgcgggactctttgttgagatcttagtaccagttgccgccgcagtcaagaacgaggtaaacgtcccctgcctcaggaattttgtcgaatcactgtacgacactactttggagctatcatcccgcaagaagcatagcctagctctgtacccgcttgttacctgcctgttgtgcgtgagccagaagcagctgtttttaaaccggtggcatattttcttgaataactgcctctccaacttaaaaaacaaggatcctaagatggcccgcgtggctctggagtctctctaccgccttctgtgggtgtacatgatcagaattaaatgtgagagtaatacggcaactcagtctcggctgattacaatcatcaccaccctctttcccaagggtagccgcggagttgttccaagggacatgcccctgaacatcttcgtgaaaatcattcagttcattgcccaggagcgattggacttcgccatgaaggaaataatatttgattttttgtgcgtcggcaagcctgccaaggccttttctcttaatccagagcgtatgaacatcggcctcagggcctttttagtaatagcggacagcctccaacaaaaagatggagagccgccaatgccagtgaccggggccgtgttaccttccggcaacaccctgcgggtgaagaagacttatttgtccaagaccctgactgaagaggaggcgaaaatgataggaatgtcactttactactcccaggtaagaaaggccgtagataacatcctgcgtcatctggacaaggaggtgggacgctgcatgatgctcactaatgttcaaatgctcaataaggagccagaagacatgattaccggagagagaaaacctaaaattgatctgttcaggacatgcgtcgccgctatccctaggctcctccctgacgggatgtccaagttggagctgatcgatcttttagccagactttccattcacatggacgatgaactcagacatattgcacagaatagtttgcaggggctactggtcgatttctcagactggagagaagatgtgctatttggcttcacaaactttttgctgagagaagttaatgacatgcaccataccctgcttgacagttccctcaagctgttattgcagttgcttacacagtggaagctggtgatccagacccagggcaaggtgtacgaacaagcgaacaaaattagaaactctgaactgatagcaaacggctcaagccaccggattcagtctgaaagggggcctcactgttctgtgttgcacgcagtcgagggtttcgctctcgtgctgctgtgttcattccaggtggcaaccaggaagctttcggtactcatcttgaaagaaattcgcgccttatttattgcactcggccaacctgaagacgatgaccgcccaatgatcgatgttatggaccagcttagctcgagcattttggagagctttatccatgtggcggtgagtgattcagccacacttcccttaacacataacgtggacctgcagtggctagtagagtggaatgccgtgctggttaatagccactatgacgttaagtccccatctcacgtgtggattttcgctcaaagtgttaaggacccatgggtcctttgtctcttttccttcctgcgccaggaaaatctccccaagcactgcccaaccgctttgtcttacgcctggccctacgccttcacacgactacaatccgttatgcccctggtagaccccaactcaccaataaacgcaaaaaaaactagcacagccgggagtggggataattacgtgacattgtggaggaattacctgattctctgctttggcgtggcgaagcctagcattatgtctccggggcacttaagagcctcaacacccgaaataatggccaccacacccgatggtactgtgagctacgataacaaagctatcggcacaccctccgtgggtgttctgctgaagcagctcgttcctcttatgaggcttgagtcgatcgaaatcaccgagtccctggttcttggcttcggcagaaccaactctctcgtcttccgggaactggttgaagagttgcatcccctgatgaaagaggcgctggagcggagacctgaaaacaagaaaagacgcgagagacgtgacctgctacgactgcagctcttgcgtatctttgagctgttagccgacgctggcgtaattagcgattccaccaatggtgccttggagagggatacactggcactcggcgcactctttctggaatacgtcgatctcactcgcatgctacttgaggccgagaacgataaggaggtagagatactgaaagatattcgcgcgcacttttccgccatggtcgccaatctgatccagtgtgtgccagtgcaccacagaaggtttctgttcccccagcagtcactgcgccaccaccttttcatcctttttagccagtgggccggacctttctcgatcatgttcacacccctggatcggtatagtgataggaatcaccagataacgcgataccagtattgtgccctgaaagccatgtcagccgtgctgtgctgtggcccagtgttcgataatgtcggcctatccccggacgggtacttatacaagtggcttgacaatattttggcctgccaggacctgcgcgttcaccagctgggctgtgaagtcgtggtgctcctgcttgaactcaaccctgatcaaatcaacctttttaactgggctatcgataggtgctataccggcagttaccagttggcctcgggctgcttcaaagccatcgccaccgtatgcgggtcgaggaactatcctttcgatatcgtgaccttgctcaacctcgtgctttttaaggcatccgatacaaaccgcgagatctatgaaatctccatgcagctaatgcagatcctggaggccaagctcttcgtttacagtaagaaagtagctgaacagcgccccgggtctatcttgtacgggacccatggacccctgcctcccctgtactcagtgtctctggccctcctatcttgcgagctggccagaatgtatccagaactgacattaccactgttctcagaggtgagtcaacgttttcctacgacccaccctaacgggcggcagattatgctgacatacctcctcccatggctgcacaacatcgaacttgtggacagccggctgctcctgcccggttctagtccaagcagtcccgaggacgaggtgaaagacagggaaggggacgtgactgcgtcacatgggttaagaggaaacgggtggggatcgccagaggccacctccctcgttctgaataacctgatgtacatgaccgcaaaatatggagatgaggtgccagggcccgaaatggagaacgcctggaatgcccttgctaataacgagaaatggagtaacaacctgcgcattacgttgcagtttctcatttctctgtgtggtgtttcatccgacacagtgctgctcccttacatcaaaaaggtcgcaatctatctttgccggaataacaccatacaaactatggaggagttgctcttcgagctgcaacaaacggagcccgtcaaccccatcgtgcagcattgcgataaccctccgttttacagattcacggcaagttctaaggcaagtgcagcggctagtgggacaaccagttccagtaatactgtggtggctgggcaggaaaattttcccgacgcagaagagaacaagattctcaaagaatcagatgagagattctccaacgtgataagagcacacacgcgcctagagtctcgatattccaactcatcaggggggtcctacgatgaagacaagaacgacccaattagcccttataccggatggctcctgacaatcacagaaaccaagcagccccagccactacctatgccatgcactgggggctgctgggcaccgttggttgactaccttcccgagactattacccctaggggtcccctccacagatgtaatatagccgtcatctttatgacagagatggtcgtggaccactcagttcgcgaggattgggccctgcatttgcccctgctgcttcacgctgtattcctcggcctcgaccattataggccagaagtattcgagcactcgaaaaaactgctcctacacctgctgatcgccctatcgtgtaattcgaatttccattctatcgcgagcgtcctgctccagaccagagagatgggggaggcaaaaacgctgactgttcagccagcataccagcctgagtatctttacacaggcggcttcgatttcctccgtgaggatcaaagctcacccgtgccggatagtgggctctcatcaagttcgacgtctagtagcattagtctcggaggatccagcgggaaccttcctcagatgacgcaagaagtcgaggatgtcgacacggcggccgaaactgatgaaaaggctaataagcttatagaatttctcactacgcgagcctttggtcccctgtggtgccatgaggacatcactccaaagaatcagaattctaagtcagccgaacagttgacaaatttcttgcggcatgtggtctccgtgttcaaggatagcaagagcggcttccatctggagcaccagcttagcgaagtggcattacagacagcacttgcttcctcgtcacgccattatgcggggagatctttccagatcttccgagcactgaagcaacccctgagcgctcacgctctgtctgacttgctaagccgtctggtagaggtgattggcgagcatggcgacgagattcaaggatacgttatggaagctctgctgacacttgaagccgctgtggacaatctaagcgattgtctcaaaaatagtgatctccttactgtcctgtcccgttccagctcaccagacttatcttcatccagtaaattaaccgcgagtcgcaagtcgaccggccagcttaacatgaacccgggcactaccagcggtaacacggccaccgctgaacgaagcagacaccaaagatctttctctgtccctaaaaaatttggagttatcgatcgcagctcagacccgccacggagcgctacacttgaccgcatacaggcctgcacccagcagggcctaagctcaaaaactaggtccagcagcagccttaaagactccctgaccgatccttcccacatcaatcacccaaccaacctcctcgctacgatattctgggtgactgtggctctgatggagtcggacttcgaatttgaatatctgatggcgctcaggttgctgagtaggcttctggcccacatgcccctggacaaggccgagaaccgagagaagctggaaaagctccaagctcagcttaaatgggcagatttttcagggctgcagcagttgctcctgaagggatttacgagcctgaccaccaccgatctgactctacagctgttctcattgctgacccccgtgtccaaaatcagcatggtggatgctagccacgccatcggcttccccctcaacgtactgtgtctcctgccacagctgatccagcactttgagaacccaaatcagttttgtaaggacattgctgagcgaatcgctcaagtctgtctcgaggaaaagaatccgaaactttctaatctagcgcacgttatgacactatataagacccattcatacacccgcgattgcgcgacatgggtgaacgtcgtgtgccggtacctgcacgaagcatacgccgatatcactctgaatatggtgacctacctggctgagcttctggaaaagggattgccaagtgtacaacaaccattattgcaagtcatttattcattacttagctatatggacctcagcgtcgtaccagtgaaacagttcaacgtagaagtcctgaagacgattgaaaaatatgttcaaagcgtccactggcgcgaggccctgaatatacttaaactggtcgtgtcccgttccgcttccttagtgctgccctcatatcagcattctgacctgtccaagatcgagatccacagagtttggacgtcggctagtaaagaactacctggaaagaccctcgactttcatttcgatatctctgaaactccaatcattggaaggagatatgacgaattgcagaactcctcaggtcgcgatggaaagccccgcgctatggctgtcactagatctacctcttctacctcaagtgggtccaattcaaacgtgttggtccctgtgtcatggaagcggccacagtactctcaaaaacgcactaaagagaaactagtgcacgtactatcactgtgcggacaagaagtgggcctgtcaaaaaacccttcggtgatcttctccagctgtggagacttggatttgctggagcatcagacctccttggtgtcgtccgaggacggtgcgcgggaacaggaaaatatggatgacacaaattcagaacagcagttccgcgtgtttcgcgactttgactttctggatgtggagctcgaagatggcgaaggcgaaagtatggataacttcaattggggcgtgagacgacgttcactggacagcctggacaagtgcgacatgcagattctcgaagagcgacagctgtccggaagtaccccctcgctcaacaaaatgcaccatgaagatagcgacgagagcagtgaggaggaggatcttacggcgagccagattctcgaacacagtgatttaatcatgaccctctcaccatcggaggagacaaacccaatggagttgctgaccaccgcgtgtgactccacccccgccgaaccccatagcttcaataccagaatgagctcctttgatgcctccctgcccgacatgaacaatctacaaatttctgagggctccaaagctgaggctgttcgagaggaggaagacacaacagtgcacgaagatgatctatccagcagcatcaacgagctgcccgctgccttcgaatgctcagattcattctctcttgatatgacggagggggaagagaagggcaacagagccctcgatcaattcacgctggcaagtttcggcgagggtgataggggagtctccccaccaccaagcccgttcttttcagcaatcttggccgcatttcagcccgcagcctgcgacgacgccgaggaggcttggcgatctcacattaatcaacttatgtgtgacagcgacggttcctgtgccgtctacacttttcacgtgtttagctcactcttcaagaacattcaaaagagattttgcttcctgacatgcgatgctgcttcttacttgggagacaatctgcgcggtatcgggagcaaattcgtgtcctcttcacagatgttgacgtcttgtagcgaatgccctacactgtttgtggatgcggaaactctcctctcttgtggccttctggacaagcttaagttttccgtgttggagttgcaggaatacctggacacctataacaaccggaaggaggctactctgagctggctggcaaactgtaaggcaacttttgcaggcgggtctagggacggagtgataacatgccaacccggcgactctgaggaaaaacagttagagctgtgtcaaaggctgtacaaactccacttccagctgttgctgttgtttcagagctattgtaagctgatcggtcaggtgcatgaggtgagtagcatgcctgagctgctgaacatgagccgggagctttcggatttaaagaaacatctgaaagaggcaagtgctgtgattgcagccgatccgctgtactcagatggagcttggtccgagcctacttttacttccactgaggcagccattcaatcgatgttggagtgcttaaaaaataatgagctaggcaaagcactgcgccaaatccgggaatgccgctctttgtggcccaatgatatcttcgggtctagtagtgatgatgaggttcagaccctgctaaatatatatttccggcatcagacccttggacagactggaacatacgcactggttggtagcaaccagtcactgactgagatctgcaccaaattaatggagctgaatatggaaatccgggatatgatacgaagggcacagtcgtatcgcgtgttgactactttcctcccagactctagcgtctcagggacgtccctatag

SEQ ID NO: 213920 - DNA, 3849 bp, Artificial Sequence
  derived and/or modified sequence
atgagcgctgttctatgctgcggcccagtgttcgataatgttggcctgtcaccagacggttacctctataagtggctggacaatatccttgcgtgccaggaccttcgcgtccaccaactgggctgcgaggtggttgtcctgcttctggagctgaaccctgatcagatcaacttatttaactgggctattgacagatgctacacaggcagttatcagctcgcgagtggctgcttcaaggccatcgcaaccgtatgtggcagtcgtaactatccttttgacattgtcacgctcctgaacttggtactttttaaggcatcggacactaaccgcgagatctatgagatttcaatgcaactcatgcagatcttagaggccaaattgtttgtgtactctaaaaaagtggcagagcagcgtcctgggtccatcctttacggaacacatggtcctctgcctccactctacagcgtgtcccttgcgcttctttcatgtgagttggcacgcatgtacccagaattgactctccctctcttttcaggaaagcctgcaatccctcataatacaccacagagggcacccgatcacgcctacctcccagccgcactggccgcccagcacagggcaggtgggcaacaggctccacctccagggtccccatcttccccggaggatgaggttaaggatagagagggcgatgttaccgccagccacggccttaggggcaacgggtggggcagtcccgaggctacatcgcttgtgcttaacaatttaatgtacatgacagcaaagtacggtgacgaagtgccagggccggagatggagaacgcctggaatgcattagctaataacgagaagtggagcaacaatcttcgaattacactgcagtttctcatctccctgtgcggcgtctcatcagatacagttttactgccgtatatcaagaaggtggccatctatctgtgcagaaataacactattcagactatggaggagctgctattcgagctgcaacagaccgaaccggtcaatcctattgttcagcactgtgacaatccccctttttatcgtttcacggctagttccaaggcaagtgcagcagcttctgggacaaccagctcctctaacacagtcgtcgccgggcaggaaaattttcccgatgccgaggaaaataaaattctaaaggaatcggatgaacgctttagtaacgtaattagagcacataccaggctggaatcccggtactctaactcttctggaggctcctacgacgaagacaagaatgaccccatcagtccttataccggatggcttctgacgataacagagaccaaacagccacagcctcttccaatgccatgcaccggcgggtgctgggctcctctcgttgactatctcccagaaactattactcccagaggaccactgcaccgttgtaatattgcggtaatcttcatgaccgagatggtcgttgaccactctgttcgggaagactgggccctccatctgccattgttgctccacgctgtgtttctggggttagaccactaccgccctgaggtgtttgaacactcaaagaaactgttacttcaccttctcatcgcactttcctgtaattcaaatttccacagcatcgcttcagtgttactgcagaccagggaaatgggtgaggctaagactcttacggtccagccagcataccagcccgagtacttgtacactgggggctttgactttttgcgagaggaccagagcagccctgttcccgactctggactatccagctcctctacctcttctagcatatctcttggtgggtcaagtgggaacttgcctcaaatgactcaggaggtggaagatgtcgacacagccgccgagaccgatgagaaagcgaacaagcttattgagtttcttaccacacgagctttcggcccgttgtggtgtcacgaggacattacgcctaaaaaccagaacagcaagagcgccgaacagctcacgaacttcctgcgacatgtggtctcagtttttaaggattccaagagtggatttcatctagaacatcagctgagtgaggttgcactgcaaacagcgttagcatccagctctcggcactacgctggacgctccttccagatctttcgcgctctgaagcagcctttgtcagcccacgctcttagcgatctcctctctagactggtggaagtgatcggcgagcacggcgacgaaatccaggggtatgtcatggaggccctactgaccttggaagccgccgtcgataacctttccgattgccttaagaactccgatttgctcacggtccttagtagatcttccagcccggacctttcgagcagctcaaagttgaccgcctcccgaaagtctactgggcagttgaacatgaatccagggacgacctcaggaaataccgctacagcagagaggtcgcggcaccagcgatctttctcagtgccaaaaaagtttggagtgattgatcggtcgagcgatcccccgagatctgccactctggatagaatccaggcatgtacacagcaaggtttgtcctccaagacccgctcaagctcctcgctgaaagacagcctgaccgatcccagtcatattaaccacccgacgaacctgctcgccaccatcttttgggtgacagtcgctctgatggagagcgactttgaatttgaatacctcatggcactaaggctcctgtcaagattactggctcacatgcctctagataaggctgaaaacagggagaagctggagaagctgcaagcccaacttaaatgggccgacttcagcgggctgcaacagttgctgctcaaaggcttcacatcactcactaccactgacctcactttacagctgttcagtctcttaacgccagtctctaagatcagtatggtggacgcttcacacgctattgggttccctctgaatgtcctgtgtttactcccgcagttgatccagcattttgaaaatcccaatcagttttgtaaagacattgccgaaagaattgcccaggtatgcctcgaggaaaaaaatcccaaattgagcaatctggcgcatgtgatgacgctgtacaagactcatagctacacaagagactgcgcaacatgggtcaacgtcgtttgtaggtatcttcacgaggcatatgccgatattactctcaatatggttacttacttggcagagctgctggagaagggcctcccctcagtccagcagcccctgctgcaggtgatctatagtttactttcttacatggacctctctgtggtcccagtgaaacaattcaatgtggaagtccttaagactattgagaaatatgtccagcacagcgatttgtctaagattgagatacacagagtgtggacctcggccagtaaggagctgcctggcaaaactttggactttcatttcgatatatccgagaccccgatcatcggcaggcggtacgacgaattacagaattcctcaggacgcgacgggaagcctagggccatggccgtcacgcgctccacatcaagcacctcatccgggagtaatagtaacgttctcgttcctgtttcctggaaacgaccccagtactcacagaaaagaacaaaggagaagctcgtgcatgtgctgtcactctgcggccaggaggtgggccttagcaagaatccctccgtgatctttagtagttgcggcgatctggacctgttggagcaccagacgagtctcgtgtcctcggaggatggtgcgagggaacaggagaatatggatgatacgaactctgaacagcaattcagggtatttagggattttgactttctagacgtcgaattggaagatggggaatag

SEQ ID NO: 213921 - DNA, 1152 bp, Artificial Sequence
  derived and/or modified sequence
atgaccgagggggaggagaaagggaaccgcgccctggatcagttcaccctggcaagttttggtgagggagatcgcggagtgtcaccacctcctagtcctttctttagtgcaattctggcagcctttcagcctgcggcatgcgatgacgctgaggaagcctggcgctcccatataaatcagctgatgtgcgactctgacggatcttgcgcagtatatactttccatgtattttctagcctttttaagaacatccagaaacggttttgctttctgacatgtgacgcagcttcctaccttggcgacaatctgcgcgggatcggtagcaagtttgtgagctcaagccaaatgctcacgtcttgctctgaatgccccacgcttttcgtcgatgcagagactctgttatcctgtggcctgctggacaagctgaagttctccgttctggagctgcaggaatacttggatacctacaacaataggaaggaggctacgctcagctggctggctaattgtaaggccacttttgcgggcggctctcgcgatggcgtgatcacttgtcaaccgggcgatagtgaagaaaaacagctagagttgtgtcagagattatacaagctgcactttcagcttctcctcctatttcagagttattgcaaactgattgggcaggtacacgaggtgagttccatgcccgaactcctgaacatgtcacgggaactgtctgatctgaagaaacacctgaaggaagctagtgctgttatcgcagcggaccccctgtacagcgatggggcctggtctgagccaactttcacatccactgaggctgccattcaaagcatgctggagtgtctgaagaataacgagcttggaaaggctctgaggcagataagggaatgccgctccttgtggcccaatgacatctttggatcctcaagcgatgacgaagttcagactcttttgaacatctactttagacaccaaactctgggtcagacgggaacttacgcactggtcggaagtaaccagagcctgaccgagatctgcaccaagctcatggagctcaatatggagatacgggacatgattcggcgtgcgcagtcatacagagtgctgacgacatttctgcctgacagttcggtgtcggggacatcgctatag

SEQ ID NO: 213922 - DNA, 1569 bp, Artificial Sequence
  derived and/or modified sequence
atggccctgacagagacccagccccagctgctgtctgctgacctggtgctggccctgcaggtgctgatgctgtgggagatgacagaggccaacaaggtgctgaagaggcggcagcacccccagaggagccactgcatcagcagcaagatcctggagagctacccaggagagaagcccctgaccaagagcctgcagagaggagaggacccccagtttgaccaggtgatcagctccatgagcagcctgtctgagtactgcctgcccagcatcctgcggaccctgtttgactgtgatgagcagcagagggactacctgatggagcggcgggacctggccatcgacttcatcttcagcctggtgctgattgaggtgctgaagcagggcagcctgacctgcctgatcatcccctacctgggcaccctggtgcccaccctggccatctgcatcctgtggcagacctgcatgcagaagagcctggagtgctggcacaagcccagcaagtttcctgctgtgaagaagaagttcatggccgagctgaaggagctgcggcacaaggagcagaacccctacgtggtgcagagcatcatcagcctcatcatgggcatgaagttcttccgcatcaagatgtaccctgtggaggactttgaggccagcctgcagttcatgcaggagtgtgcccactacttcctggaggtgaaggacaaggacatcaagcacgccctggccggcctgtttgtggagatcctggtgcctgtggccgctgctgtgaagaatgaggtgaatgtgccctgcctgaggaactttgtggagagcctgtatgacaccaccctggagctgagcagcaggaagaagcacagcctggccctgtaccccctggtgacctgcctgctgtgtgtgtcccagaagcagctgttcctgaaccgctggcacatcttcctgaacaactgcctgagcaacctgaagaacaaggaccccaagatggcccgggtggccctggagagcctgtaccgcctgctgtgggtgtacatgatccgcatcaagtgtgagagcaacacagccacccagagccgcctcatcaccatcatcaccaccctcttccccaagggcagccggggcgtggtgccccgggacatgcccctgaacatctttgtgaagatcatccagttcatcgcccaggagcggctggactttgccatgaaggagatcatctttgacttcctgtgtgtgggcaagccagccaaggccttcagcctgaaccctgagaggatgaacatcggcctgcgggccttcctggtgattgctgacagcctgcagcagaaggatggagagccccccatgcctgtgactggagctgtgctgcccagcggcaacaccctgcgggtgaagaagacctacctgagcaagaccctgacagaggaggaggccaagatgattggcatgagcctgtactacagccaggtgaggaaggctgtggacaacatcctgcggcacctggacaaggaggtgggccgctgcatgatgctgaccaacgtgcagatgctgaacaaggagcctgaggacatgatctag

SEQ ID NO: 213923 - DNA, 9042 bp, Artificial Sequence
  derived and/or modified sequence
atggccagccagcaggacagcggcttctttgagatcagcatcaagtacctgctgaagtcctggagcaacaccagccctgtgggcaatggctacatcaagccccctgtgcccccagccagcggcacccaccgggagaagggcccccccaccatgctgcccatcaacgtggaccctgacagcaagccaggagaatatgtgctgaagagcctgtttgtgaacttcaccacccaggccgagaggaagatccgcatcatcatggccgagcccctggagaagcccctgaccaagagcctgcagagaggagaggacccccagtttgaccaggtgatcagctccatgagcagcctgtctgagtactgcctgcccagcatcctgcggaccctgtttgactggtacaagaggcagaatggaattgaagatgagagccatgagtaccggcccaggaccagcaacaagagcaagagtgatgagcagcagagggactacctgatggagcggcgggacctggccatcgacttcatcttcagcctggtgctgattgaggtgctgaagcagatccccctgcaccctgtgattgacagcctcatccatgatgtgatcaacctggccttcaagcacttcaagtacaaggagggctacctgggccccaacacaggcaacatgcacatcgtggccgacctgtatgcagaggtgattggagtgctggcccaggccaagtttcctgctgtgaagaagaagttcatggccgagctgaaggagctgcggcacaaggagcagaacccctacgtggtgcagagcatcatcagcctcatcatgggcatgaagttcttccgcatcaagatgtaccctgtggaggactttgaggccagcctgcagttcatgcaggagtgtgcccactacttcctggaggtgaaggacaaggacatcaagcacgccctggccggcctgtttgtggagatcctggtgcctgtggccgctgctgtgaagaatgaggtgaatgtgccctgcctgaggaactttgtggagagcctgtatgacaccaccctggagctgagcagcaggaagaagcacagcctggccctgtaccccctggtgacctgcctgctgtgtgtgtcccagaagcagctgttcctgaaccgctggcacatcttcctgaacaactgcctgagcaacctgaagaacaaggaccccaagatggcccgggtggccctggagagcctgtaccgcctgctgtgggtgtacatgatccgcatcaagtgtgagagcaacacagccacccagagccgcctcatcaccatcatcaccaccctcttccccaagggcagccggggcgtggtgccccgggacatgcccctgaacatctttgtgaagatcatccagttcatcgcccaggagcggctggactttgccatgaaggagatcatctttgacttcctgtgtgtgggcaagccagccaaggccttcagcctgaaccctgagaggatgaacatcggcctgcgggccttcctggtgattgctgacagcctgcagcagaaggatggagagccccccatgcctgtgactggagctgtgctgcccagcggcaacaccctgcgggtgaagaagacctacctgagcaagaccctgacagaggaggaggccaagatgattggcatgagcctgtactacagccaggtgaggaaggctgtggacaacatcctgcggcacctggacaaggaggtgggccgctgcatgatgctgaccaacgtgcagatgctgaacaaggagcctgaggacatgatcactggagagaggaagcccaagattgacctcttccgcacctgtgtggccgccatcccccggctgctgcctgatggcatgagcaagctggagctgattgacctgctggcccggctgagcatccacatggatgatgagctgcggcacatcgcccagaacagcctgcagggcctgctggtggacttcagtgactggagagaagatgtgctgtttggcttcaccaacttcctgctgcgggaggtgaatgacatgcaccacaccctgctggacagcagcctgaagctgctgctgcagctgctgacccagtggaagctggtgatccagacccagggcaaggtgtatgagcaggccaacaagatccggaacagcgagctgattgccaacggcagcagccaccgcatccagagcgagcggggcccccactgcagcgtgctgcatgctgtggagggctttgccctggtgctgctgtgcagcttccaggtggccaccaggaagctgtctgtgctgatcctgaaggagatccgggccctcttcatcgccctgggccagccagaagatgatgaccggcccatgattgatgtgatggaccagctgagcagcagcatcctggagagcttcatccacgtggccgtgtctgattctgccaccctgcccctgacccacaacgtggacctgcagtggctggtggagtggaatgctgtgctggtgaacagccactatgatgtgaagagccccagccacgtgtggatctttgcccagagcgtgaaggacccctgggtgctgtgcctcttctccttcctgcggcaggagaacctgcccaagcactgccccacagccctgtcctatgcctggccctatgccttcacccggctgcagagcgtgatgcccctggtggaccccaacagccccatcaatgccaagaagaccagcacagctggcagcggggacaactacgtgaccctgtggaggaactacctgatcctgtgctttggagtggccaagcccagcatcatgagccctggccacctgcgggccagcaccccagagatcatggccaccaccccagatggcaccgtgtcctatgacaacaaggccatcggcaccccatctgtgggcgtgctgctgaagcagctggtgcccctgatgaggctggagagcattgagatcacagagagcctggtgctgggcttcggccgcaccaacagcctggtgttccgggagctggtggaggagctgcaccccctgatgaaggaggccctggagaggaggcctgagaacaagaagaggcgggagcggcgggacctgctgcggctgcagctgctgcgcatctttgagctgctggctgatgctggggtcatcagtgacagcaccaatggagccctggagcgggacaccctggccctgggcgccctcttcctggagtatgtggacctgaccaggatgctgctggaggctgaaaatgacaaggaggtggagatcctgaaggacatccgggcccacttcagcgccatggtggccaacctgatccagtgtgtgcctgtgcaccaccggcgcttcctgttcccccagcagagcctgcggcaccacctgttcatcctcttcagccagtgggccggccccttcagcatcatgttcacccccctggaccgctacagcgacaggaaccaccagatcacccgctaccagtactgtgccctgaaggccatgtctgctgtgctgtgctgcggccctgtgtttgacaacgtgggcctgagcccagatggctacctgtacaagtggctggacaacatcctggcctgccaggacctgcgggtgcaccagctgggctgtgaggtggtggtgctgctgctggagctgaacccagaccagatcaacctcttcaactgggccatcgaccgctgctacacaggcagctaccagctggccagcggctgcttcaaggccatcgccaccgtgtgtggcagcaggaactacccctttgatattgtgaccctgctgaacctggtgctcttcaaggccagtgacaccaaccgggagatctatgagatctccatgcagctgatgcagatcctggaggccaagctgtttgtgtacagcaagaaggtggccgagcagaggcctggcagcatcctgtatggcacccacggccccctgccccccctgtacagcgtgtccctggccctgctgagctgtgagctggccaggatgtacccagagctgaccctgcccctcttcagcgaggtgtcccagcgcttccccaccacccaccccaacggccggcagatcatgctgacctacctgctgccctggctgcacaacatcgagctggtggacagccggctgctgctgcccggcagcagccccagcagcccagaagatgaggtgaaggaccgggagggagatgtgacagccagccacggcctgcggggaaatggctggggcagccctgaggccaccagcctggtgctgaacaacctgatgtacatgacagccaagtatggagatgaggtgcccggccctgagatggagaatgcctggaatgccctggccaacaatgagaagtggagcaacaacctgcgcatcaccctgcagttcctgatcagcctgtgtggggtgtccagtgacacagtgctgctgccctacatcaagaaggtggccatctacctgtgcaggaacaacaccatccagaccatggaggagctgctgtttgagctgcagcagacagagcctgtgaaccccatcgtgcagcactgtgacaacccccccttctaccgcttcaccgccagcagcaaggccagcgctgctgccagcggcaccaccagcagcagcaacacagtggtggccggccaggagaacttcccagatgctgaggagaacaagatcctgaaggagagtgatgagcgcttcagcaatgtcatccgggcccacacccggctggagagccgctacagcaacagcagcggcggcagctatgatgaggacaagaatgaccccatcagcccctacacaggctggctgctgaccatcacagagaccaagcagccccagcccctgcccatgccctgcaccggcggctgctgggcccccctggtggactacctgcctgagaccatcaccccccggggccccctgcaccgctgcaacattgctgtgatcttcatgacagagatggtggtggaccacagcgtgcgggaggactgggccctgcacctgcccctgctgctgcatgctgtgttcctgggcctggaccactacagacctgaggtgtttgagcacagcaagaagctgctgctgcacctgctgattgccctgagctgcaacagcaacttccacagcatcgcctctgtgctgctgcagacccgggagatgggagaggccaagaccctgactgtgcagcctgcctaccagcctgagtacctgtacacaggaggctttgacttcctgcgggaggaccagagcagccctgtgcctgacagcggcctgagcagcagcagcaccagcagcagcatcagcctgggcggcagcagcggcaacctgccccagatgacccaggaggtggaggatgtggacacagctgctgagacagatgagaaggccaacaagctgattgagttcctgaccacccgggccttcggccccctgtggtgccacgaggacatcacccccaagaaccagaacagcaagtctgctgagcagctgaccaacttcctgcggcacgtggtgtctgtgttcaaggacagcaagagcggcttccacctggagcaccagctgtctgaggtggccctgcagacagccctggccagcagcagccgccactacgccggccgctccttccagatcttccgggccctgaagcagcccctgagcgcccacgccctgagtgacctgctgagccggctggtggaggtgattggagagcacggagatgagatccagggctacgtgatggaggccctgctgaccctggaggccgctgtggacaacctgagtgactgcctgaagaacagcgacctgctgactgtgctgagccgcagcagcagcccagacctgagcagcagcagcaagctgacagccagcaggaagagcacaggccagctgaacatgaaccctggcaccaccagcggcaacacagccacagctgagaggagccgccaccagaggagcttctctgtgcccaagaagtttggagtgattgacaggagcagtgaccccccaagaagtgccaccctggaccgcatccaggcctgcacccagcagggcctgagcagcaagaccaggagcagcagcagcctgaaggacagcctgacagaccccagccacatcaaccaccccaccaacctgctggccaccatcttctgggtgacagtggccctgatggagagtgactttgaatttgagtacctgatggccctgcggctgctgagccggctgctggcccacatgcccctggacaaggccgagaaccgggagaagctggagaagctgcaggcccagctgaagtgggccgacttcagcggcctgcagcagctgctgctgaagggcttcaccagcctgaccaccacagacctgaccctgcagctgttcagcctgctgacccctgtgtccaagatctccatggtggatgccagccacgccatcggcttccccctgaatgtgctgtgcctgctgccccagctgatccagcactttgagaaccccaaccagttctgcaaggacattgctgagcgcatcgcccaggtgtgcctggaggagaagaaccccaagctgagcaacctggcccacgtgatgaccctgtacaagacccacagctacacccgggactgtgccacctgggtgaatgtggtgtgccgctacctgcacgaggcctatgctgacatcaccctgaacatggtgacctacctggccgagctgctggagaagggcctgcccagcgtgcagcagcccctgctgcaggtgatctacagcctgctgagctacatggacctgtctgtggtgcctgtgaagcagttcaacgtggaggtgctgaagaccatcgagaagtatgtgcagagcgtgcactggagggaggccctgaacatcctgaagctggtggtgagccgcagcgccagcctggtgctgcccagctaccagcacagcgacctgagcaagattgagatccaccgggtgtggaccagcgccagcaaggagctgcccgggaagaccctggacttccactttgacatcagcgagacccccatcatcggccgccgctatgatgagctgcagaacagcagcggcagagatggcaagccccgggccatggctgtgaccaggagcaccagcagcaccagcagcggcagcaacagcaatgtgctggtgcctgtgtcctggaagaggccccagtacagccagaagaggaccaaggagaagctggtgcacgtgctgagcctgtgtggccaggaggtgggcctgagcaagaaccccagcgtcatcttcagcagctgtggggacctggacctgctggagcaccagaccagcctggtgtccagtgaagatggagcccgggagcaggagaacatggatgacaccaacagcgagcagcagttccgggtcttccgggactttgacttcctggatgtggagctggaggatggagagggggagagcatggacaacttcaactggggcgtgagaagaagaagcctggacagcctggacaagtgtgacatgcagatcctggaggagcggcagctgagcggcagcacccccagcctgaacaagatgcaccatgaagattctgatgagagcagcgaggaggaggacctgacagccagccagatcctggagcacagcgacctgatcatgaccctgagccccagcgaggagaccaaccccatggagctgctgaccacagcctgtgacagcaccccagctgagccccacagcttcaacaccaggatgagcagctttgatgccagcctgcctgacatgaacaacctgcagatcagcgagggcagcaaggccgaggccgtgcgggaggaggaggacaccaccgtgcatgaagatgacctgagcagcagcatcaatgagctgcctgctgcctttgagtgcagcgacagcttcagcctggacatgacagaaggagaggagaagggcaacagagccctggaccagttcaccctggccagctttggagagggggaccggggcgtgtccccaccacccagccccttcttcagcgccatcctggccgccttccagcctgctgcctgtgatgatgctgaggaggcctggaggagccacatcaaccagctgatgtgtgacagtgatggcagctgtgctgtgtacaccttccacgtgttcagcagcctcttcaagaacatccagaagcgcttctgcttcctgacctgtgatgctgccagctacctgggggacaacctgcggggcatcggcagcaagtttgtgagcagcagccagatgctgaccagctgcagcgagtgccccaccctgtttgtggatgctgagaccctgctgagctgtggcctgctggacaagctgaagttctctgtgctggagctgcaggagtacctggacacctacaacaacaggaaggaggccaccctgtcctggctggccaactgcaaggccacctttgctgggggcagcagagatggagtcatcacctgccagcccggggacagcgaggagaagcagctggagctgtgccagaggctgtacaagctgcacttccagctgctgctgctcttccagagctactgcaagctgattggccaggtgcatgaggtgtcctccatgcctgagctgctgaacatgagccgggagctgagtgacctgaagaagcacctgaaggaggccagcgctgtgattgctgctgaccccctgtacagtgatggagcctggagcgagcccaccttcaccagcacagaagctgccatccagagcatgctggagtgcctgaagaacaatgagctgggcaaggccctgcggcagatccgggagtgccgcagcctgtggcccaatgacatcttcggcagcagcagtgatgatgaggtgcagaccctgctgaacatctacttccgccaccagaccctgggccagacaggcacctacgccctggtgggcagcaaccagagcctgacagagatctgcaccaagctgatggagctgaacatggagatccgggacatgatcagaagagcccagagctacagagtgctgaccaccttcctgcctgacagctctgtgtctggcaccagcctgtag

SEQ ID NO: 213924 - DNA, 3849 bp, Artificial Sequence
  derived and/or modified sequence
atgtctgctgtgctgtgctgcggccctgtgtttgacaacgtgggcctgagcccagatggctacctgtacaagtggctggacaacatcctggcctgccaggacctgcgggtgcaccagctgggctgtgaggtggtggtgctgctgctggagctgaacccagaccagatcaacctcttcaactgggccatcgaccgctgctacacaggcagctaccagctggccagcggctgcttcaaggccatcgccaccgtgtgtggcagcaggaactacccctttgacatcgtgaccctgctgaacctggtgctcttcaaggccagtgacaccaaccgggagatctatgagatctccatgcagctgatgcagatcctggaggccaagctgtttgtgtacagcaagaaggtggccgagcagaggcctggcagcatcctgtatggcacccacggccccctgccccccctgtacagcgtgtccctggccctgctgagctgtgagctggccaggatgtacccagagctgaccctgcccctcttcagcggcaagccagccatcccccacaacaccccccagagggccccagaccacgcctacctgcctgctgccctggccgcccagcacagagctgggggccagcaggcccctcctcctggcagccccagcagcccagaagatgaggtgaaggaccgggagggagatgtgacagccagccacggcctgcggggaaatggctggggcagccctgaggccaccagcctggtgctgaacaacctgatgtacatgacagccaagtatggagatgaggtgcccggccctgagatggagaatgcctggaatgccctggccaacaatgagaagtggagcaacaacctgcgcatcaccctgcagttcctgatcagcctgtgtggggtgtccagtgacacagtgctgctgccctacatcaagaaggtggccatctacctgtgcaggaacaacaccatccagaccatggaggagctgctgtttgagctgcagcagacagagcctgtgaaccccatcgtgcagcactgtgacaacccccccttctaccgcttcaccgccagcagcaaggccagcgctgctgccagcggcaccaccagcagcagcaacacagtggtggccggccaggagaacttcccagatgctgaggagaacaagatcctgaaggagagtgatgagcgcttcagcaatgtcatccgggcccacacccggctggagagccgctacagcaacagcagcggcggcagctatgatgaggacaagaatgaccccatcagcccctacacaggctggctgctgaccatcacagagaccaagcagccccagcccctgcccatgccctgcacaggaggctgctgggcccccctggtggactacctgcctgagaccatcaccccccggggccccctgcaccgctgcaacattgctgtgatcttcatgacagagatggtggtggaccacagcgtgcgggaggactgggccctgcacctgcccctgctgctgcatgctgtgttcctgggcctggaccactacagacctgaggtgtttgagcacagcaagaagctgctgctgcacctgctgattgccctgagctgcaacagcaacttccacagcatcgcctctgtgctgctgcagacccgggagatgggagaggccaagaccctgactgtgcagcctgcctaccagcctgagtacctgtacacaggaggctttgacttcctgcgggaggaccagagcagccctgtgcctgattctggcctgagcagcagcagcaccagcagcagcatcagcctgggcggcagcagcggcaacctgccccagatgacccaggaggtggaggatgtggacacagctgctgagacagatgagaaggccaacaagctgattgagttcctgaccacccgggccttcggccccctgtggtgccacgaggacatcacccccaagaaccagaacagcaagtctgctgagcagctgaccaacttcctgcggcacgtggtgtctgtgttcaaggacagcaagagcggcttccacctggagcaccagctgtctgaggtggccctgcagacagccctggccagcagcagccgccactacgccggccgctccttccagatcttccgggccctgaagcagcccctgagcgcccacgccctgagtgacctgctgagccggctggtggaggtgattggagaacatggagatgagatccagggctacgtgatggaggccctgctgaccctggaggccgctgtggacaacctgagtgactgcctgaagaacagcgacctgctgactgtgctgagccgcagcagcagcccagacctgagcagcagcagcaagctgacagccagcaggaagagcacaggccagctgaacatgaaccctggcaccaccagcggcaacacagccacagctgagaggagccgccaccagaggagcttctctgtgcccaagaagtttggagtcatcgacaggagcagtgacccccccaggtctgccaccctggaccgcatccaggcctgcacccagcagggcctgagcagcaagaccaggagcagcagcagcctgaaggacagcctgacagaccccagccacatcaaccaccccaccaacctgctggccaccatcttctgggtgacagtggccctgatggagagtgactttgaatttgagtacctgatggccctgcggctgctgagccggctgctggcccacatgcccctggacaaggcagaaaatcgggagaagctggagaagctgcaggcccagctgaagtgggccgacttcagcggcctgcagcagctgctgctgaagggcttcaccagcctgaccaccacagacctgaccctgcagctgttcagcctgctgacccctgtgtccaagatctccatggtggatgccagccacgccatcggcttccccctgaatgtgctgtgcctgctgccccagctgatccagcactttgagaaccccaaccagttctgcaaggacattgctgagagaattgcccaggtgtgcctggaggagaagaaccccaagctgagcaacctggcccacgtgatgaccctgtacaagacccacagctacacccgggactgtgccacctgggtgaatgtggtgtgccgctacctgcacgaggcctatgctgacatcaccctgaacatggtgacctacctggccgagctgctggagaagggcctgcccagcgtgcagcagcccctgctgcaggtgatctacagcctgctgagctacatggacctgtctgtggtgcctgtgaagcagttcaacgtggaggtgctgaagaccatcgagaagtatgtgcagcacagcgacctgagcaagattgagatccaccgggtgtggaccagcgccagcaaggagctgcccgggaagaccctggacttccactttgacatcagcgagacccccatcatcggccgccgctatgatgagctgcagaacagcagcggcagagatggcaagccccgggccatggctgtgaccaggagcaccagcagcaccagcagcggcagcaacagcaatgtgctggtgcctgtgtcctggaagaggccccagtacagccagaagaggaccaaggagaagctggtgcacgtgctgagcctgtgtggccaggaggtgggcctgagcaagaaccccagcgtcatcttcagcagctgtggggacctggacctgctggagcaccagaccagcctggtgtccagtgaagatggagcccgggagcaggagaacatggatgacaccaacagcgagcagcagttccgggtcttccgggactttgacttcctggatgtggagctggaggatggagagtag

SEQ ID NO: 213925 - DNA, 1152 bp, Artificial Sequence
  derived and/or modified sequence
atgacagaaggagaggagaagggcaacagagccctggaccagttcaccctggccagctttggagagggggaccggggcgtgtccccaccacccagccccttcttcagcgccatcctggccgccttccagcctgctgcctgtgatgatgctgaggaggcctggaggagccacatcaaccagctgatgtgtgacagtgatggcagctgtgctgtgtacaccttccacgtgttcagcagcctcttcaagaacatccagaagcgcttctgcttcctgacctgtgatgctgccagctacctgggggacaacctgcggggcatcggcagcaagtttgtgagcagcagccagatgctgaccagctgcagcgagtgccccaccctgtttgtggatgctgagaccctgctgagctgtggcctgctggacaagctgaagttctctgtgctggagctgcaggagtacctggacacctacaacaacaggaaggaggccaccctgtcctggctggccaactgcaaggccacctttgctgggggcagcagagatggagtcatcacctgccagcccggggacagcgaggagaagcagctggagctgtgccagaggctgtacaagctgcacttccagctgctgctgctcttccagagctactgcaagctgattggccaggtgcatgaggtgtcctccatgcctgagctgctgaacatgagccgggagctgagtgacctgaagaagcacctgaaggaggccagcgctgtgattgctgctgaccccctgtacagtgatggagcctggagcgagcccaccttcaccagcacagaagctgccatccagagcatgctggagtgcctgaagaacaatgagctgggcaaggccctgcggcagatccgggagtgccgcagcctgtggcccaatgacatcttcggcagcagcagtgatgatgaggtgcagaccctgctgaacatctacttccgccaccagaccctgggccagacaggcacctacgccctggtgggcagcaaccagagcctgacagagatctgcaccaagctgatggagctgaacatggagatccgggacatgatcagaagagcccagagctacagagtgctgaccaccttcctgcctgacagctctgtgtctggcaccagcctgtag

SEQ ID NO: 213926 - DNA, 1569 bp, Artificial Sequence
  derived and/or modified sequence
atggccctgaccgagacccagccccagctgctgagcgccgacctggtcctggctctccaggttctgatgttatgggaaatgaccgaggccaataaagtgctgaagagaagacagcacccccagcgctcacattgcatttcgagcaaaatactcgagtcgtatcccggggaaaagccactgaccaaatctctgcagcgtggcgaggacccccagtttgaccaagtgatctcttcaatgagttccctgtctgaatactgtctgccatctattctcagaactctgttcgattgcgacgagcagcagcgcgattacctgatggagcggcgagacctagccatagatttcatcttttctctcgtgctgattgaggtcctgaagcagggatcacttacctgcttgatcatcccctacctggggactctggtccctaccctggccatctgtatcctgtggcagacttgtatgcaaaaatccctagagtgttggcataagccatccaagtttcccgctgtgaagaagaaattcatggctgaactgaaggaactgaggcataaggagcagaatccgtatgtggtgcaatccatcatcagtctcatcatgggcatgaagttctttaggatcaaaatgtatccggtcgaggacttcgaggcttccctccagttcatgcaggagtgcgctcactactttctggaagtgaaagacaaagacatcaagcacgccttggccggtctgtttgttgaaatactggtgccagtagccgccgccgtaaagaatgaagtgaacgtgccctgcctgcggaattttgtcgagagtttatatgatactactttggaattatctagtcggaaaaaacactcgctggctctgtacccactcgttacatgcctactttgcgtcagtcaaaagcagttattcctcaatagatggcatatatttctgaataattgcctgtccaatctaaagaacaaggatcctaaaatggcacgagtagcactggagagcctttatagactcttgtgggtttacatgatccggattaagtgcgagagtaacacagccactcaatcacgcctgatcacgataattactacgctctttcccaagggcagccgaggagttgtacctcgggacatgcctctgaatatttttgtgaagattatccaattcatcgctcaggaaagactcgactttgcaatgaaagaaattatattcgacttcttgtgcgtgggtaagcccgcaaaggccttctctctgaatccggagaggatgaacattgggcttcgtgccttcctcgtgatagccgattccctgcagcagaaggacggggaaccaccgatgcctgtcactggtgccgttttaccatctggaaatacattgcgcgttaaaaagacttacctgtctaagacactcacggaagaggaagcaaaaatgatcggaatgtccctatattacagccaggttcgcaaggcagtggacaacatccttagacatctcgataaagaagttggaaggtgcatgatgctgaccaacgtgcaaatgctgaacaaagaacccgaagacatgatctag

SEQ ID NO: 213927 - DNA, 9042 bp, Artificial Sequence
  derived and/or modified sequence
atggccagccagcaggacagcggcttcttcgagatcagcatcaagtacctactgaagtcttggagtaacacaagccctgtcggcaatggatacatcaagccaccggttccgccagcaagcggcacacaccgcgaaaaggggccacccacgatgctgcccattaatgtggacccggattcaaagcccggagaatacgtcttaaagagcctgtttgtgaactttacgacacaggcggaaaggaaaataaggataatcatggcagaacccctggaaaaacctctgacaaaaagcctgcagagaggcgaagaccctcagtttgaccaagtaatcagctcaatgagctccctctccgaatattgtctccccagcatcctgcggacactgtttgattggtataagaggcagaacggaatcgaagacgagtctcacgagtaccgccccaggacctccaataagtcaaagagcgacgaacagcagcgggactatcttatggaaagacgtgatctggctatcgattttatattcagtctggtgcttattgaggtgcttaaacagattccgttgcatcctgttatcgactcactgatacacgacgttataaacctagcctttaagcattttaaatacaaagagggctacctgggaccaaacacgggaaatatgcacatcgtggcagacctgtatgccgaagttatcggagttttggctcaggctaaattccctgccgttaaaaagaaatttatggctgagcttaaagaactgcgacataaggaacaaaatccatacgtagtgcagtctattatcagcttgatcatgggaatgaaattttttagaatcaagatgtatccggtcgaggatttcgaggcaagtctgcagtttatgcaggagtgcgctcactacttcctggaggtgaaggacaaggatatcaagcacgccctagcaggtctgtttgtggaaatccttgtaccggtagccgcagccgtcaaaaatgaggtaaatgttccgtgcttgcgaaattttgtcgagagcctttacgacaccacgcttgaactcagtagtcgtaagaaacacagcctagctctttaccctttagttacctgtctgctgtgcgtttcccagaagcagctgtttctgaatcgctggcacatatttctgaataattgtctgtcaaatctgaaaaataaggacccgaagatggcacgcgtggccttggaatccctctacaggttgctgtgggtatatatgatacggataaagtgcgaatcaaatacagcaacccagtctcgcctcataaccatcatcacaactttgtttcccaaaggatcaagaggagttgttcccagagacatgccactgaatatcttcgtaaaaattatacaattcattgctcaggagcgcctcgatttcgccatgaaagaaatcatcttcgattttctgtgcgttggaaaacccgctaaggccttctcactgaatcccgaacgtatgaacattggcctgagagccttcctggttatcgccgacagtctccagcagaaggacggcgaaccacctatgccggtaacgggcgccgtcctgccatctggaaacaccctcagagtgaaaaaaacatacctttctaagacccttaccgaggaagaggcgaaaatgatcggcatgagcctgtactactcccaggtgcggaaagctgtggacaatatcctccgacacttggacaaagaggtgggtaggtgcatgatgttgacaaatgtccagatgctgaacaaggagccagaggatatgatcactggcgagcgtaagcccaaaattgatttattccgtacatgcgttgccgctattccacggctgctgcctgatgggatgtcgaaattggaactcattgatcttttggctaggctgtccatacatatggacgatgaactgcggcatattgcccaaaattcccttcagggcctgctcgtcgacttttcagattggagggaagatgtgctttttggattcaccaattttcttctgagagaagtcaatgatatgcaccacacgctgcttgactcatccctgaagctgctgcttcaacttctgacacaatggaagttagtgatccagacacagggaaaggtgtacgagcaggctaacaagatcagaaattccgagctgattgcaaatggaagcagccatcgaatacagtctgaacgcggcccacactgttccgtcttacatgccgtggaaggatttgccttggtgcttctctgcagcttccaggtggctactcgcaaactgtcagtcttaatccttaaagagattcgcgctctcttcattgcccttgggcagccagaagatgatgataggccgatgattgacgtgatggatcagctttcttctagcatcctggagtccttcatccacgttgccgtcagcgactcagcaacactgccacttacccataacgtggatctccaatggctggtggagtggaatgcagtgctggttaactcgcactacgacgtcaagagtccgtcccacgtctggatctttgcccagtccgtcaaagacccctgggtgttgtgtttgttcagcttcttgcgccaggagaaccttcccaagcactgtcctaccgccctgtcctatgcttggccttacgcattcactcgcttgcagtctgttatgcccctcgtggatcccaactctcccattaacgctaagaagacctcgaccgccggcagtggcgataactacgtaactctgtggagaaattatctgatcctgtgtttcggcgttgcaaaaccatcgatcatgtcaccagggcacttgcgggcctctacccctgaaatcatggctacaacccccgacggtacagtgtcttacgataataaggcaatcggcacgccatccgtaggcgttcttctaaagcagctagtccctctcatgcggttagagagtatcgagatcacggagtctttagtactcggattcggaagaacgaactctctggtcttccgggagctcgtggaagaactgcacccgcttatgaaagaagccttggagcgcaggcccgagaacaagaagcgaagggagcgccgggacctgcttagactgcaactgctgagaatctttgagctgctggctgatgctggagtcatctccgacagcaccaacggcgccctggagcgggacactctggcattaggtgcccttttccttgagtacgtggacctgaccagaatgctcctggaggctgaaaacgacaaagaagtggagattctgaaggatatccgagctcacttttctgccatggtggcgaatctgatacagtgtgttcccgtccaccaccgcagatttctctttccacaacagtccctgcggcaccacctctttattcttttcagtcagtgggctggccccttctcaataatgtttacaccactggatcgatattctgataggaaccaccagattacgagataccaatattgtgccttaaaagcaatgagcgcagttctatgctgcggccctgttttcgataatgtaggtttgtcccctgacgggtacctgtacaagtggctggataatatcttggcctgccaagacctgcgggtgcatcagctcggatgcgaggtcgtggtcctgctgctggagcttaatccagaccaaattaatctgtttaattgggctattgatagatgctacacaggcagttaccagctggctagtggctgcttcaaggcaatcgccacagtctgtggctctcgtaattaccctttcgacatcgtgacactgctgaatcttgtgctctttaaggcatctgacacaaaccgggaaatctatgagatatccatgcagctgatgcaaatactcgaggcaaagctttttgtttacagcaagaaggtggctgaacagcggccaggcagcatcctgtatgggacccacggccccctgcctccactgtattcggtcagcctggcattgctgagctgcgagctggcaagaatgtatcccgagctgacgctgcctcttttttccgaagtctctcagagatttccaactacacatcccaatgggcgccagattatgttgacttatctgctcccatggctgcataacatcgaattggtagattctaggttactcctgccgggcagctcccccagttcacccgaggacgaggtgaaggatagggaaggcgatgttacagcatcacacgggctacgtgggaacggatggggctcccctgaagccaccagtctcgtgctgaataacctgatgtacatgacagcgaagtacggcgatgaagtgcccggaccagagatggaaaatgcctggaatgccctcgccaacaacgaaaagtggtccaataatctgcggatcactctccagttcttgatctccctctgtggagtgtcatctgacactgtgctgctgccatatattaagaaagttgccatttacctttgtcggaataatactatacaaactatggaagagcttctcttcgaactccagcagaccgaacccgtgaatcccatcgtccagcattgcgacaatccgcccttttacagattcacagcctccagcaaggcatctgcagcagcatccgggactacaagttcatcgaatacagtggtggcggggcaggagaactttcctgatgctgaggaaaataagattttgaaagagtcggatgaaaggttttcgaatgtcattagagcccacacgcgcttagagtcccgatactccaactccagtggggggtcatatgacgaagataaaaatgacccaatctccccttacacagggtggctgctgaccatcactgagacaaagcaaccacagcccctgcctatgccttgcactggtggctgttgggcccctctggtggactatcttcccgagactattacccctagaggacctctgcatcgctgcaacatcgccgtcattttcatgactgaaatggtggtcgaccatagtgttcgcgaagactgggcacttcacttgcctctccttctgcacgccgtcttcctgggcctcgatcattatcgtcctgaggtgttcgagcacagtaagaagctcctcctacacttgctaatcgccctctcgtgtaactccaatttccactctattgcatctgtgttgctgcagactcgcgagatgggagaggccaagaccttgactgtgcagcccgcctatcagcccgagtacctctacaccggcggcttcgattttttaagagaagaccaatcctccccggtaccggatagcgggctgtcatccagctcgaccagctccagtatctcactgggcggatcatctggcaacttaccgcaaatgactcaagaggtggaggacgtagatacggcagcggagactgatgaaaaggctaacaaactaatagaattccttacgacccgtgcattcggaccattgtggtgtcacgaggatataacaccgaaaaatcaaaattccaagagcgcagagcagctaacaaactttctgaggcatgtggtgtctgtgttcaaagactctaagagcggtttccatctagaacatcagctgtcagaggtggccctgcagactgccctcgccagttcatcccggcattacgcggggaggtctttccaaatattccgtgcattaaagcaaccactgtcggcccacgcactcagcgacctcctctctcggctggtggaagtgattggcgagcacggggacgagatacagggatatgttatggaggccctgcttaccctggaggcagcagtggacaacttgagcgactgtctgaagaacagcgacctcttgactgtgctgagccgctcctcttctcccgacctgtcctcttcttcaaagctgacggcctcgaggaaaagtacgggccaactgaacatgaatcccggaactacttccggcaacacagccaccgccgaacggagtaggcatcagaggtcattctctgtgcctaaaaaatttggcgtaattgaccggtctagcgatccacctcgcagcgccaccctggaccggatacaggcctgcacccagcagggcctgtcttctaagaccaggtcatcatctagccttaaagacagccttactgacccttcacacattaaccaccccaccaatctgctggctacaatcttttgggtgactgtcgcactgatggagtccgactttgagttcgagtacttgatggccctgagacttttgtccaggctgctggcccacatgcctcttgacaaagccgaaaaccgggaaaagctcgaaaaattgcaggctcagttgaaatgggctgacttttctggattacagcagctccttctgaagggttttaccagtttaaccacaacagacctgactttacagctcttttcactcctgacccctgtgtcaaagatttccatggtagatgccagccatgctattggctttcccctcaatgtgctctgtcttctcccacagctcattcagcacttcgagaatcctaaccagttttgtaaggatatcgccgagcggatagcccaagtatgtctcgaagagaagaatcctaaactgtccaacctggcccacgtcatgactctttacaagactcatagttacacccgcgattgtgcgacctgggtgaatgtcgtatgccgctatttgcacgaggcttacgctgacattacactgaacatggtgacctacctcgctgagttgttagaaaaaggcctgcctagcgttcagcaacctctgctccaggtaatctacagtttgctgtcatatatggatcttagtgtcgtacccgttaaacaatttaatgtagaggtcctgaagactattgagaagtacgtgcagagcgtacactggagagaggccctgaatatccttaaactggtggtgagtagatccgcttcactggtgttgccatcatatcagcattccgatctgagcaagatcgaaatccaccgagtctggacgagcgccagcaaggaactccctggcaaaacactagactttcactttgatatatctgagacacccatcatcgggagaaggtacgacgagctccagaattccagtgggcgggacggaaagccacgtgccatggcagtcacccgcagtacatcttctacatcctctggctctaattcgaatgtgctcgtgccagtgtcgtggaagcggccccagtatagccagaaacggacaaaggaaaagcttgttcatgtgcttagcttgtgtgggcaagaggtcggactgagcaagaatccctctgtaatcttttcatcatgcggcgacctcgacctactggagcatcagacctcgttggtcagtagcgaggacggagctcgggaacaggagaacatggatgataccaactctgagcagcagtttcgtgtttttcgcgattttgattttctggatgtcgaactggaagatggcgaaggcgagtcaatggacaatttcaattggggcgtgagacgccgtagccttgattctctcgacaagtgtgacatgcagattttagaggaaagacagctgtcaggtagtacaccgtctctcaataaaatgcaccatgaagattctgacgaaagctctgaggaagaagacctcactgcctcccagattcttgagcacagtgacctcataatgacactcagccccagcgaggagactaaccctatggaattgctaacaaccgcctgcgattccactcccgccgagccacacagttttaacaccagaatgagcagcttcgacgcttccttacctgatatgaacaacctccagatatcggaaggaagtaaagccgaggccgtccgcgaggaagaggacaccaccgtgcatgaggacgacctgagcagctcaattaacgagctgccagcagcctttgaatgttccgactctttctcgctcgacatgacagagggagaagaaaaaggaaaccgggctctggatcagttcacacttgcctccttcggggaaggagacagaggcgtgagccccccgcctagccccttctttagcgcgattctggcggccttccagccagctgcatgtgacgacgccgaagaggcatggcggtcacatatcaaccaactcatgtgcgatagcgatggtagttgtgcagtctatacctttcatgtgttttcttcactgttcaagaatattcaaaaacggttctgcttcctaacatgcgacgctgcctcttatctcggggacaatctccgcgggatcgggagtaagtttgtctcgtcctctcagatgttaacctcgtgtagtgaatgcccgaccctgtttgtggacgctgaaacgctgctgtcctgcgggctgctggataagttgaagttctcagttttggagctccaggagtacttggacacatacaataacagaaaggaggctaccctctcctggctggccaactgtaaggcgacattcgccggcggctcgcgtgacggcgttattacctgccagcctggagactcagaggaaaagcagctcgaactctgtcagcgactatataaattgcacttccaactgctgctactgttccaaagttactgtaaactgatcggccaggtacacgaggtctcatccatgcccgaactgctgaacatgtcccgcgagctttccgatttgaaaaagcatctgaaggaagcctccgccgtgatagccgccgaccctctctatagcgatggcgcctggtctgagcccacattcacctctactgaagccgctatccagagcatgctcgagtgtttgaaaaacaacgagctcggaaaagctctccggcagattcgggagtgtcgctccctctggccaaatgacattttcggttcttcaagcgacgacgaagtacaaactctactgaacatttattttagacatcaaaccctgggacagacgggcacttacgccctcgtagggagcaatcaatccctgacagagatatgcaccaagctaatggagctgaatatggaaattcgtgatatgatcagacgggcccaatcttacagggtcctgacaacctttctgcccgactcctcagtgtcaggtacatcgttgtag

SEQ ID NO: 213928 - DNA, 3849 bp, Artificial Sequence
  derived and/or modified sequence
atgagcgccgtgctgtgctgcggccccgtgttcgacaacgtgggcctgagcccggacggttacctttacaaatggttagacaacattctggcgtgtcaggatctcagagtccatcaactggggtgtgaggtcgttgttctgctcctcgagctcaacccagaccaaattaacctcttcaactgggctattgaccgctgttacacgggcagctaccagctggcatctggatgctttaaagccatcgcaaccgtctgcggatcccggaactatccgtttgatatcgttaccctcttgaacctagtgttgttcaaggcctccgataccaatagagagatatacgagatttccatgcagctcatgcaaatcctcgaggcgaaattgttcgtctacagcaagaaggttgcggaacagaggccaggctctatcttatacggaactcacggtccgctgccacccctttattccgtgagcctcgctctgctctcttgtgaactggcccgtatgtatcctgagttaaccctccctctgttttctgggaaacctgccatcccacacaatactcctcaaagagccccagaccacgcctatcttcccgctgctcttgctgctcagcatcgtgccggcgggcagcaggccccaccacctggatcccctagcagcccggaagacgaagtcaaggatagagagggcgacgttacggctagccacggtctaaggggaaacggttggggcagccctgaggcaactagcctggtgctcaataatctgatgtatatgacagctaagtatggcgacgaggtcccaggtcccgagatggagaacgcctggaatgcactcgcaaataatgaaaagtggtccaacaacctcagaatcaccttgcagttcctcatttccctgtgcggggtttcttctgataccgtccttctaccctacatcaagaaggtggctatctacctgtgccggaataacacaattcaaacaatggaggagctgctgttcgagctccagcagacagagccagtcaatcccattgtacagcactgcgataacccccctttctacaggttcacagcgagtagtaaagcaagcgccgccgcgagcggtactacatcctccagtaatacagtggtggccggccaggagaactttcctgacgctgaggagaacaaaatcttgaaagaaagtgatgagcggtttagtaatgtaattagggctcacacacggctggaatcacgctactctaattcctccggtggctcatacgatgaagacaaaaacgaccccataagcccatataccggttggctgctgactattacagagaccaagcagccacagcccctccctatgccttgcacagggggctgctgggctccacttgtcgattatttgccagagacaatcaccccccgtgggccgctgcacaggtgtaatatagccgtgattttcatgaccgagatggtcgtcgaccatagcgtgagagaagattgggctctccacctcccactccttctgcacgcagtgtttctgggactggaccactacagacccgaggtctttgagcattccaaaaagctgttattacacctcctcatcgcattgtcctgcaactctaactttcattccattgccagcgtcctgttgcaaacccgggagatgggcgaggctaagactctgacggttcaaccagcctaccaaccggagtacctgtacactggaggatttgacttcttaagagaggatcagtctagccctgtcccagactcagggctctcctcttcaagtacctcaagtagcatcagcctgggcggatccagcgggaacctaccacagatgacacaagaggtggaggatgtcgatacggcagcagagaccgacgagaaagctaacaaacttatcgagttccttacaactcgcgcttttggaccactgtggtgtcatgaagacataacacctaaaaatcagaatagcaagagcgcagaacagctgaccaattttctcagacatgtagtttccgtgttcaaagattccaaatctggctttcaccttgagcaccagctgagcgaggtggcccttcagacagccctggcgtcgagcagtcggcactatgccggaaggagttttcaaatattccgggccctcaagcagccattgtctgcgcatgctctttcagatttgctgagcaggttggtggaagttattggagaacatggtgatgaaatccagggatatgtgatggaagctctgctgacactcgaagctgccgtcgataatctaagtgactgcctgaagaactccgacttattaactgtcctgagtaggtcatccagcccagacctgtcttcaagcagcaaactcacagcctcgcgaaagagcactgggcagttgaacatgaaccctggtactacttctggcaacactgcaaccgccgagaggtcaaggcatcaaagatccttttctgtgcccaagaagtttggggtcatcgatcgttctagtgatcctcctcgcagcgctacacttgatcgcatccaggcctgtacacagcaagggctttctagtaaaactcgcagtagctctagcctgaaggattcacttaccgatccgagtcacatcaaccatcccactaacctgctagccaccatcttttgggtaaccgtggcactgatggagtctgattttgagtttgaatacctaatggccctccgactgctttcgaggttgctcgcccacatgccgctggacaaggccgagaaccgggagaagctcgagaagctacaagcacagctcaagtgggctgactttagtggactccagcagctgctgctgaaaggcttcacgagtctgaccacaactgatctgacgcttcagttattcagcttgcttactccagtctctaaaatttcaatggtggacgccagtcacgccatcggtttccctcttaatgtgctgtgtcttcttccacaactgattcagcacttcgaaaaccccaaccagttctgtaaggacatcgctgagagaatcgcccaggtttgcctggaggagaagaacccaaagctttccaacctcgcccacgtgatgaccctgtacaagacgcactcatacaccagggattgtgccacttgggtgaatgtggtatgcagatatctccatgaggcttatgccgacatcaccctgaatatggtaacttacctggctgagcttctggagaagggactgccatctgtccagcagcctttactccaagtgatctacagccttctcagctacatggatctgagtgttgttccagtcaaacagttcaacgtcgaagtcctgaaaactatcgaaaagtatgtgcagcatagcgatctgtctaagattgaaatacatagggtgtggacatcagccagcaaagagctgcctggcaagactctggattttcatttcgacatatctgaaacgcccatcattggccgaagatatgatgagctccaaaacagtagcggacgagatggaaagccacgcgcaatggcagttacacggtccactagctctacttctagcggatcaaactcaaacgtgctcgtgccagtctcttggaaaagaccacaatattcccaaaaacgcacgaaagagaagctcgtgcatgtgctgtcactgtgcggccaagaggtggggctctctaagaatccctccgtgatcttcagctcctgcggtgacttggatctcctcgaacaccagacatcgctggtctcctcagaggacggcgctcgcgagcaagagaatatggacgataccaattctgaacagcagtttagggtgttcagagactttgacttccttgacgtggaactggaggacggtgagtag

SEQ ID NO: 213929 - DNA, 1152 bp, Artificial Sequence
  derived and/or modified sequence
atgaccgagggcgaggagaagggcaaccgggccctggaccagttcactctggcctccttcggagaaggggatcgtggcgtatctccaccaccttcaccattcttctcagccatcttggctgccttccagcccgctgcctgtgacgatgctgaggaagcgtggaggtcccacataaatcaattaatgtgtgacagcgacggctcttgcgctgtatacacgttccatgtattttcatcactcttcaaaaatatccaaaaacgtttttgtttccttacctgtgacgctgcatcttaccttggtgataacttacggggcattggtagtaagttcgtaagctccagtcagatgctgacctcttgcagtgaatgccctactctgtttgtggatgccgagacattactatcctgtggcctgttggataagttgaagttctcagtgctggaattgcaggaatacctggatacctataataatcggaaagaagccacactatcctggttggctaactgcaaggctacgttcgccggtggaagtcgggacggcgtgatcacttgtcagcctggcgactccgaggagaagcagctggaactgtgtcagaggctgtataaacttcacttccagctactgcttctgtttcagagctattgcaagcttatcgggcaagtccacgaggtctcaagtatgccagaactgcttaacatgtcgagggagctctcggatcttaagaagcatctgaaggaggcaagcgccgtgattgcagccgaccccctatactcagatggtgcgtggagcgaacccacattcacttccactgaagcagctatacagtctatgctggagtgtttgaagaataatgagctcggaaaagccctgaggcagatacgtgagtgtaggagcctctggcccaatgacatttttggttcaagttccgacgacgaggttcaaaccttgctgaatatttacttccgccaccagacattgggccagacaggcacctacgccctggtgggtagtaatcaatcgctaactgagatctgcacaaaattgatggaactaaatatggagattcgagacatgatacgacgagcacaatcttacagggtgctaacaacctttttgccggatagtagtgtgagcggcacctctctctag

SEQ ID NO: 213930 - DNA, 1569 bp, Artificial Sequence
  derived and/or modified sequence
atggccctgaccgaaacacagcctcagttgcttagcgctgacctggtgctggccctccaggtgcttatgctctgggaaatgacagaagcaaacaaggtcttgaaaagacggcaacacccccaaaggtcacattgtattagctctaagattctggagtcatacccgggagagaagcctctgaccaagtcccttcagagaggcgaggaccctcaattcgatcaggtaatttcttcgatgtcttcactgtcggagtactgcttgccttctattctgagaacactgttcgactgcgatgaacagcagcgcgattacttgatggagcgcagggaccttgccattgactttatctttagcctggtcctgatcgaagttcttaagcaagggagcttaacctgcctgattattccttacctgggcacgcttgtcccgaccctggccatctgtattctgtggcagacatgcatgcagaaatcactggagtgctggcacaaaccctcaaaattccccgctgtcaaaaaaaagttcatggctgagttaaaggaactgagacacaaagaacagaatccttacgttgttcagtccattatttctctgatcatgggcatgaagttttttagaataaaaatgtacccagtcgaagacttcgaagcctctctgcagtttatgcaggagtgtgcacactactttctcgaggtaaaggataaggacattaagcatgccctagcgggacttttcgttgagattctggtgccggttgcagccgcagtgaaaaatgaggtcaacgtaccttgcctgagaaacttcgtcgagtccttatatgataccactctggaactgagctctagaaaaaagcattctctggcgctctatccactggtcacttgcctgctgtgtgtctcacaaaaacagttatttctaaacagatggcatatatttctcaacaattgtttgagcaacctcaaaaataaggaccccaaaatggcacgcgttgcacttgaaagcctttataggctcctgtgggtttatatgataaggatcaaatgcgagtctaacacagctacccagagtaggctgattacaataataactactctgttccccaaaggatcaagaggagtggtccctagggacatgcctcttaacatttttgtgaagattatccagttcatcgctcaggagaggctcgacttcgccatgaaggagataattttcgatttcctctgcgttggaaagcctgctaaagctttcagcttgaaccccgagagaatgaatatcggcctcagagccttcctggtgattgctgattcattgcagcagaaggacggcgaaccacccatgcctgtgacgggcgctgtactgccttcgggaaacacccttcgcgtgaagaagacttacctgagtaagacactgacagaagaggaagccaaaatgattggcatgagtttgtattactcccaagtaaggaaggctgtcgacaacatcctgcgccatctcgataaggaagtgggcagatgcatgatgctgaccaacgtgcagatgttaaataaggaaccggaggacatgatctag

SEQ ID NO: 213931 - DNA, 9041 bp, Artificial Sequence
  derived and/or modified sequence
atggcctcccagcaggacagtgggttcttcgaaatatctattaaatacctgctaaagagttggtctaacaccagccccgttggaaatgggtacattaaacccccagtcccaccggcaagtggtacccatagggaaaaaggccctcctacaatgctcccgattaacgtggaccccgactccaagccaggcgagtacgtgttgaaatctttgtttgtgaactttaccactcaggcggaaaggaagatccggataataatggccgagcctctcgagaagcccctaacaaagtccctacagcggggagaggatccccagttcgaccaggtgatttcaagcatgtcttcgctgagtgagtactgtttgccctcaattcttcggacactcttcgattggtacaaacgccagaatgggattgaggacgagtctcatgagtacaggcctcgcactagcaataagtcaaagtcggacgagcagcagcgcgattatctgatggagcggcgagacctggccatcgattttatcttctcccttgtcctcattgaagtgctcaagcaaattcccctgcatccagtcattgattccctcattcacgacgtgattaacttagcttttaaacattttaagtataaggaaggatatctcgggcctaataccggcaacatgcatattgtggcagatctatatgccgaggtgattggagtgctagcacaagctaagtttccggcagtgaagaaaaagtttatggcagaactcaaagagctgagacacaaggagcaaaacccttacgtggttcaaagtatcatctctcttattatggggatgaagttctttaggatcaaaatgtacccagtcgaggatttcgaggcctctcttcagttcatgcaggaatgcgcacattacttcttagaggtgaaggataaggatatcaaacatgctttggccggactgtttgtcgaaattctggtccccgtagcggcagccgtgaaaaacgaagtaaatgttccctgtctcaggaactttgtggagtctctctatgataccaccctggaactaagcagtcggaagaagcacagcttagcactttatcctttggtgacttgtctattatgtgtgagccaaaaacagttattcctaaatagatggcacatcttcctcaacaattgcctctccaacctgaagaacaaggatcctaaaatggcaagagttgccttggaatccctgtaccgccttctatgggtttacatgatacgcattaagtgtgagtccaacaccgccacccagtcaagactcatcaccatcattacaactctttttcctaaagggtctaggggagtggtacccagggacatgccccttaacatttttgtcaagattattcaatttattgctcaggagaggctagacttcgcaatgaaggaaatcatctttgactttctttgcgttggaaagcccgcaaaagcattctctctgaatccggagcgtatgaatattgggctgcgcgctttccttgtgatcgctgactccctgcaacagaaagacggagaaccaccgatgccagtcaccggggcagtacttccttccgggaatactttgcgggtgaaaaagacatatctttcaaagacactaacagaagaggaggctaaaatgattggtatgtctctctattacagccaggtccgcaaagccgtggacaacatccttaggcatctcgataaagaagtgggacgttgcatgatgctcacaaatgtgcagatgctcaacaaggagcctgaggatatgatcacaggcgagcggaagcccaaaatcgacttatttcgtacctgtgtcgcagccattcccaggctgctgcctgacggcatgtcaaagctggagcttattgatttgcttgcccgactctcgatccacatggacgatgaactgaggcatatagcgcagaatagtctgcagggactactagttgatttctccgactggagagaagacgtcttattcggttttactaatttcttgttgagggaagtcaacgatatgcatcatacactcctcgactccagcttgaagttgctgctccaattgctgacccagtggaagctggttattcaaacccaggggaaggtgtatgagcaagcgaataaaataagaaactcagagttaatcgccaatggttcttctcatcggatccagtctgaaaggggaccccattgctccgtgctgcatgcggtggaaggtttcgccctcgtgctgctctgctcttttcaggtcgcgacacgtaaactcagtgtcctgatcctgaaggaaatcagagccctgttcatcgcactcggacagcctgaagacgacgatagaccaatgatcgacgtgatggaccagctttctagcagcatacttgagtccttcatccacgtcgctgtgtcagatagtgctaccttacccctcacccataatgtggatctgcagtggttggtagagtggaacgctgttctggttaacagccattacgatgtaaagtctccgtcccacgtatggattttcgctcagtctgtgaaggatccatgggtcctgtgtctgttttcatttctccgtcaggagaacctccccaagcattgtccaacagcccttagttatgcctggccttacgcgtttaccagattacagagtgtgatgcctcttgttgatccgaactctccgatcaatgcaaaaaagacatctactgcgggttcaggcgacaactatgtcacactgtggcggaattatctgattctatgcttcggcgtggccaagcccagtatcatgtctccagggcacctgcgggcttccacccctgaaatcatggctactacacccgacggtacagtctcatatgacaataaagctattggaacaccatcagttggtgttctgctaaaacagctcgttcctttgatgcggctggagagcatcgagatcaccgaatctctggtgctggggttcggaagaaccaattcgctcgtattccgcgagctggtggaagagctccaccccttaatgaaagaggccctggaaaggcgtccggaaaataagaagcgaagggaacggcgtgacctgctgcggcttcagctgctccggatcttcgaactgctggcagacgccggagtgatttcagattcgaccaatggcgcactcgagcgcgacactctcgcccttggtgccctctttctcgaatatgtggacctgacacgtatgctcctggaagctgaaaacgataaggaggttgaaatactgaaggatatccgggctcacttcagcgccatggtggccaacctgatacagtgcgtccctgtgcatcacagacgattcctgtttcctcagcagtcactgagacatcatctctttattctcttctcccaatgggcaggtccgttctccatcatgttcacacctcttgacaggtatagcgatcggaatcatcagattacgcggtaccagtactgtgccttaaaggcaatgtccgcggtactgtgctgcggccctgtgtttgacaacgtgggcctgtctcccgacgggtacctttataagtggctggataatatcctcgcgtgccaagatctcagagtccaccagttgggctgtgaggtggtggtcctattgcttgagctgaaccccgaccagataaatctgtttaattgggcaatcgatcggtgttatacaggatcttatcagctcgcctctggctgctttaaggctatcgccaccgtctgcggttcacggaactacccttttgacatcgtgactctgttaaacttggtgctctttaaagcaagtgatactaaccgcgagatatatgaaatctccatgcagctcatgcaaatcttagaggcgaaactctttgtttactctaagaaagttgcggagcagcgcccaggaagtatcctttacggcacccatggaccactgccgccactgtactccgtatcgttagctctccttagttgtgagctcgccaggatgtaccctgaactaaccctccccctcttttccgaggtgagccaacggtttcccactactcaccccaacggtcgacagattatgcttacctacctgctcccatggctgcacaacatcgagctcgttgacagtcgactgctgctcccagggtcctcaccatcatcgccagaagatgaggtgaaagaccgtgagggcgatgtgaccgccagccacggtctccggggaaatggctggggctccccggaggccacatcacttgtcctgaataacctgatgtatatgactgctaagtatggggacgaggtgccaggccctgagatggaaaatgcctggaatgcattggccaataatgagaagtggtccaacaatttgcgcattacactccagttcttaatctccctgtgcggcgtgtcatcggataccgtcctcctcccctatatcaagaaggtagccatctatctatgccgaaataacaccatccagactatggaggaactgctgtttgagctgcagcagacagaacccgtaaacccgattgtgcaacactgtgataacccaccattctatcgattcaccgcatcttcgaaggcttccgctgcagccagcggaacgacctcctctagcaatacagttgtcgcagggcaggaaaattttccagacgccgaagaaaataaaatactgaaggaaagtgacgagagattttcaaatgtgatccgagcccacacacgcctggagagtagatactcaaactcgagtggcggaagctatgacgaggacaaaaacgaccctatcagtccctataccgggtggctgctgactatcactgaaaccaagcagccccaaccgctgccaatgccctgcaccggcggttgttgggccccacttgtggactacttgcccgaaacaattacgcccagaggtcctttacacagatgtaatattgctgtcatctttatgactgagatggtcgtagaccacagtgttagggaggattgggctttacacctccctctgctccttcatgctgtgttcttgggtctggaccactatcggccagaggttttcgaacactcaaagaagctcctgttgcacctgctcattgccctgtcgtgtaattccaattttcactccatagcgtcggtgctgctgcagacccgggagatgggggaagccaagactctaactgtgcagccagcataccaacccgaatatttgtacactggcggttttgactttctccgcgaagaccaatccagtccggtgcccgatagtggactgtctagttcaagtacatcttcctctatttcactcgggggttccagtggcaatttacctcagatgacccaggaagtcgaagacgtggatacagctgctgagactgatgagaaggctaacaagctaatcgaattcctgaccacccgggcatttgggcctctgtggtgccatgaagatatcacccctaagaatcaaaattctaagagcgctgaacaactgacaaattttctgcgccatgttgtttctgtattcaaggactcaaagtctggattccatctggagcatcagctgtccgaggtcgcactgcagaccgctctggcctcctcttcccggcattacgccggacgcagcttccagatattcagggcccttaagcagccattatcagcacacgcgctttcagacctgctttctcgcctggtggaagtgataggggaacacggcgacgaaattcagggctacgtgatggaagccttactgacattggaagctgcagtggataatctctctgactgtctgaagaattctgatctcttgacagtcctctccaggtcgagtagcccggacttgtctagctccagcaagcttactgcctcgagaaagagtaccggccagctcaacatgaatccgggaactacgtcagggaacaccgcaaccgctgagcggtctcgacaccagcgcagttttagcgttcccaagaaattcggcgtcattgaccgctcctccgacccgccacgctcagccacactggaccggatccaggcctgtacacaacagggtctaagctccaagacacgcagtagcagtagcttgaaggacagtttgacagatcccagccacataaaccatccaactaacttactcgcaaccatcttctgggttactgtagccttgatggagtccgacttcgaatttgaatatttgatggcacttcggctgctgagtagattactagcccatatgccattggataaggccgagaacagggaaaagctagagaagctccaggcccagctgaagtgggctgacttttccggccttcagcaattgttgttgaaaggtttcactagcctgaccacaacagatctgacgctgcagctgttctccctgttgaccccagtgtctaagatttcgatggtagatgccagccacgccattgggtttcccttgaacgtgctctgcctgttgccacaactcattcagcacttcgaaaacccaaaccagttctgtaaagatatcgcggagaggatcgcccaggtatgcctggaggagaaaaatccaaagctttcgaacctggcacatgtcatgacattgtacaagacacactcttatactcgcgattgcgcaacctgggtcaacgtagtgtgccggtacctacatgaagcctacgctgatataacactcaacatggtgacatatttagctgaactacttgagaaaggactcccttccgtgcagcaacccctgctgcaggtgatctactccctgctgtcatacatggatctttccgttgtccctgtgaagcaattcaacgttgaggtacttaagactatcgagaaatacgtgcagagtgtacattggcgtgaagcactcaacatcttgaagcttgtggtatcccggtctgcatcgcttgtgctaccctcataccagcatagcgacctgagtaagattgagattcaccgtgtttggacctccgcctcaaaggagctgccaggaaaaaccctggatttccactttgacatatcggagacacctattatcggcagacgttacgacgagctgcagaattcgtccggacgggacggcaaaccccgtgctatggccgtgaccaggagtactagctccacatccagtggttccaactctaacgtcctggttccagttagctggaaacggcctcaatacagccagaaacggaccaaagaaaaacttgttcacgtcctcagcctttgtgggcaagaagtggggctgtctaagaacccatccgtgattttcagcagttgtggcgacctcgacttactggagcaccagacctccctagttagctcagaggacggcgctagagaacaggagaacatggacgatacaaacagcgaacaacagtttcgcgtgtttcgagactttgactttctggatgtggagctcgaagatggagagggtgaatctatggacaattttaattggggggtccgccgtaggtccttagactccttggacaagtgcgacatgcagatcctagaggagcgccagctgtctggctctactccatcactgaacaagatgcatcatgaggacagcgatgaaagtagtgaagaagaggacttgactgcctctcagatccttgaacactcggacctgatcatgactctttcgccctcagaggaaacgaacccaatggaacttttgaccacggcctgtgattctactccggcagaacctcattctttcaatacccgcatgagtagcttcgatgcgtctctcccagatatgaataatctgcagatcagtgaagggagtaaggccgaggcagtgcgcgaggaagaggataccacagtacatgaggacgatctgtcctcatccatcaacgaacttccggctgcatttgagtgctccgatagcttttcattggacatgaccgagggtgaagaaaaaggcaatagagcacttgatcagtttaccttagcatccttcggagagggtgataggggagtgagtccccctccatccccattttttagtgcaatcctggctgccttccagccggcagcatgcgatgatgccgaagaggcatggagatcccatattaatcagctcatgtgtgattcagacggcagctgtgccgtgtacacttttcatgtgtttagttcattgttcaaaaatatccagaagagattctgtttcctgacttgcgatgccgcatcctacctgggggataatctgcgtggtattggctctaagtttgtctcctcaagtcagatgctgactagttgctccgaatgccctacactgttcgttgatgcagagacactcttatcatgtggcctgctagataagttgaaattttcagtgctggaattacaagaatacctggatacctataacaaccggaaggaggcaacactatcttggctggctaattgcaaagcaactttcgctggcggaagcagagacggagtcataacatgtcagccaggagacagtgaagaaaaacagctggagctgtgccagcgactatacaagctacacttccagctgcttttgctgttccagtcttactgtaaactcattggacaggtgcacgaagttagttcaatgccagaactgttaaatatgtctcgggagttgtccgacctgaagaaacatctcaaggaagccagcgcagttatcgcagcagatccactgtactctgacggcgcatggtctgagccaaccttcacttccacagaggcagcaattcaatctatgctcgaatgtctcaagaataacgagctagggaaggcgctgcggcagataagagagtgccgaagtctctggcccaatgacattttcggcagtagctcggacgacgaagtacaaaccctgctcaacatctatttccgtcatcagactttggggcaaaccggaacttacgccctggtcggaagcaatcaatccctgactgagatttgcactaaacttatggagctgaacatggaaatacgcgatatgatacgccgtgcccagtcataccgggtcctgaccaccttcttgcctgatagctcagtatcagggacctccttata

SEQ ID NO: 213932 - DNA, 3849 bp, Artificial Sequence
  derived and/or modified sequence
atgtccgccgttctatgctgtggcccagtattcgataacgttggcctcagccctgacggctacctatataaatggctggacaatatcctggcctgtcaagacctaagagttcatcaactgggttgtgaggtggtcgttctgctcctcgaactaaacccagaccaaattaacctgttcaactgggccatcgaccggtgctacactgggtcataccagctggcctcgggctgtttcaaggccatcgccacagtctgcggatcacggaactatccttttgatatagtaacactgttgaacctcgtcctgttcaaggcaagcgacacaaaccgggagatttacgagatctctatgcaactcatgcaaatcctggaagccaagctgtttgtctactccaagaaggtggctgagcagcggcctggcagcattctgtatgggactcatgggccactgccccctctgtacagtgtgagtttagccctgctcagctgtgagcttgccagaatgtatccagagctgactctgccattattctctgggaagccagccattccacataacacccctcagagagcccctgatcacgcttatctgcccgcagcattggcagcccagcatcgcgctggaggccaacaggcaccacctcccggttctcctagtagccctgaagatgaagtcaaggatagggaaggtgacgtgactgcctctcacggcctccgtgggaacggctggggcagtcccgaagcgacgtccctggtattgaataacctgatgtatatgactgctaaatacggtgatgaagttcctggccctgaaatggaaaacgcttggaacgcccttgccaataacgagaaatggtcaaacaacctgagaatcacgctacagttcctgatcagcctgtgtggagtgtcgagtgatacggtgctgcttccctacataaagaaagtggcgatatacctctgccgcaacaacacaattcagacgatggaggaattactcttcgagctgcagcagacagaaccagtgaatcccattgtgcagcactgtgataatccgccattctatcgctttacagcatcttcaaaagcgtccgccgctgccagtggtacaaccagttccagcaacaccgttgtcgccggtcaagagaatttccctgacgctgaagagaacaagatcttaaaggagtctgacgagcggtttagtaacgtgatccgagcgcacaccaggctggagagccgttacagcaacagctccgggggttcctacgacgaagacaagaatgatcccatctctccttacacaggctggttgctcacaattacggaaacgaagcagccacaaccactgcctatgccctgtacaggaggctgctgggccccacttgtcgactatctcccagagaccataactcctagggggcctcttcaccgttgcaatattgctgtgatctttatgactgagatggtcgtcgatcattctgtgagggaggactgggctttgcatctgcccttactgctacatgccgtgtttttggggctggaccattatagacctgaagtattcgagcacagtaaaaaactgcttttgcacttacttattgcactgtcatgcaatagcaacttccactcaatcgcttcagtgctactgcagacccgagagatgggggaggccaagactctcaccgtccaacctgcttatcagccagagtatctgtataccggagggttcgacttcctgagggaggatcagagcagtcccgtccccgatagcgggctgagctcatcctctaccagcagttcaataagccttggaggctcctcaggaaacctgccccagatgacacaggaggttgaggacgttgacactgccgctgagaccgatgagaaggctaacaagctgatcgagttcctcactactagagctttcggaccgctgtggtgccacgaagatatcacacctaagaatcagaatagtaaaagcgctgagcagcttactaatttcctgcgacacgttgttagcgtctttaaggatagcaagagcggcttccacctagaacaccaactgtctgaggttgccttgcaaaccgctctggcctcttcatcaaggcattacgccggaagatcttttcagattttccgggctcttaaacagcctttgtccgcacatgctctgagcgacttgttgtctaggctcgtggaagttattggggaacacggcgacgaaattcaaggttatgtcatggaggccctcctgaccctggaggctgccgtggataacctgtccgactgtctgaaaaactcggatctgttgacagtgctgtccaggtccagttcccccgacctcagctcatcctccaaactcacagcatcccgtaagtcaacgggtcaattgaacatgaaccccggaaccacatctgggaatactgctaccgccgaacgaagcagacaccagcggtcctttagcgtgcctaaaaagttcggagtgatcgatcgctcgagcgatcctcctcggtccgctacactggacagaatccaagcatgcacgcaacagggactcagctcgaaaactaggagctcctcatcactcaaagattcgctgacagatccctcccacataaaccatcccactaatctcttggcgaccattttttgggtgacagttgccctgatggagtcagactttgagttcgaatacttgatggccttgaggctgcttagcaggcttctcgctcacatgcctctcgataaggccgagaatagagaaaaattagagaagcttcaagcccagctgaagtgggccgacttcagcggactccaacagttgttactgaagggctttacatccctgactacaaccgatttaaccctccagctgttctccctcctgacaccagtgtctaagatcagcatggtggacgcttcacatgccatagggtttccattgaatgtgctatgtctgctgccacagctgatccagcattttgaaaatcccaaccagttttgcaaggatattgccgaaagaatagcccaggtctgcctcgaggagaaaaaccctaaattgagcaacctcgcacatgtgatgactctctataagacccatagttacactcgggattgtgccacctgggtgaatgtcgtctgtagatatcttcacgaagcttacgcggatattactctgaatatggtgacatacctcgcagaactgttagaaaaaggcttgcccagtgtacaacaaccattgctccaggtcatttattcactccttagttacatggatctttcagtggtgcccgtgaagcagttcaatgtggaagttctgaagacaatagaaaaatacgtacaacactcagacttgtctaagatcgaaatccaccgcgtgtggacttccgcctcgaaagagttgcccggtaagactctcgacttccactttgacatttcagaaaccccgatcattggccgacggtatgatgagctgcagaactcgtcaggcagagacggcaagcccagggccatggctgtgactcgcagtacctcatcgacaagttctggctccaattccaacgtgctggtgccagtttcctggaagcgccctcagtacagccagaaaagaactaaggagaaattggtccatgtgctatcactgtgtggccaggaggtcgggttatccaaaaatcccagtgtgatatttagttcttgcggagatctagatctgctcgaacaccagacctctctcgtttcctcagaagacggcgcacgtgagcaggaaaatatggacgacaccaacagcgaacaacagtttagagtgttccgcgacttcgacttcctcgatgtggaactcgaggatggagagtag

SEQ ID NO: 213933 - DNA, 1152 bp, Artificial Sequence
  derived and/or modified sequence
atgacagaaggagaagagaaggggaaccgcgctcttgatcaatttaccctggcttcattcggagaaggcgaccgcggagtctcgcctccacctagtccatttttctctgctatactagccgcttttcagcccgctgcttgtgacgatgcggaggaagcttggcgttcccacatcaatcagctcatgtgtgattctgacggaagttgtgccgtctatacctttcatgtgttcagctccctgttcaaaaacatccagaagagattttgttttctcacttgtgatgctgcttcgtaccttggggacaacctgcgtggcataggttccaagtttgtgtcatcctcgcagatgctgacctcttgctccgaatgtccaacgttgtttgtggacgccgagaccctgctatcttgcgggctcctggacaagttgaaattctctgttttggaactccaggagtatctcgatacctacaacaaccgcaaagaagcgactctctcctggctggccaactgtaaggcaactttcgccggtggaagcagagatggcgtcatcacttgccagcccggtgacagcgaggagaaacagctcgagctgtgtcagcgcctgtacaagctacacttccagctgctgctcctgttccagagttactgcaagctgataggccaggttcacgaggtctcttcaatgcctgaattattgaacatgagtcgcgagctgtcagacctaaaaaagcacttgaaggaggcctctgctgtgattgctgctgatcccctgtatagcgacggcgcttggagtgagcctacgttcactagcacagaggccgctatacagtctatgctggaatgcctgaagaacaatgagttaggtaaggcattgagacagattcgggaatgcaggagtctgtggccaaacgatatctttgggtctagcagtgacgatgaggtacagacactcctgaatatctactttcgacaccaaaccctaggtcaaaccgggacatatgccttggtaggctctaaccagtccctgacagaaatttgtaccaaactcatggagctgaacatggaaatacgcgacatgattagacgagctcagtcatatcgcgtgcttacgactttcctccctgactcctcagtttccggaaccagtctttag

SEQ ID NO: 213934 - protein, 376 aa, Artificial Sequence
  derived and/or modified sequence
MMASYPEPEDAAGALLAPETGRTVKEPEGPPPSPGKGGGGGGGTAPEKPDPAQKPPYSYVALIAMAIRESAEKRLTLSGIYQYIIAKFPFYEKNKKGWQNSIRHNLSLNECFIKVPREGGGERKGNYWTLDPACEDMFEKGNYRRRRRMKRPFRPPPAHFQPGKGLFGAGGAAGGCGVAGAGADGYGYLAPPKYLQSGFLNNSWPLPQPPSPMPYASCQMAAAAAAAAAAAAAAGPGSPGAAAVVKGLAGPAASYGPYTRVQSMALPPGVVNSYNGLGGPPAAPPPPPHPHPHPHAHHLHAAAAPPPAPPHHGAAAPPPGQLSPASPATAAPPAPAPTSAPGLQFACARQPELAMMHCSYWDHDSKTGALHSRLDL

SEQ ID NO: 213935 - protein, 269 aa, Artificial Sequence
  derived and/or modified sequence
MMASYPEPEDAAGALLAPETGRTVKEPEGPPPSPGKGGGGGGGTAPEKPDPAQKPPYSYVALIAMAIRESAEKRLTLSGIYQYIIAKFPFYEKNKKGWQNSIRHNLSLNECFIKVPREGGGERKGNYWTLDPACEDMFEKGNYRRRRRMKRPFRPPPAHFQPGKGLFGAGGAAGGCGVAGAGADGYGYLAPPKYLQSGFLNNSWPLPQPPSPMPYASCQMAAAAAAAAAAAAAAGPGSLARPLWSRGWRARPPRTGRTHACRAWRCPPA

SEQ ID NO: 213936 - DNA, 2917 bp, Artificial Sequence
  derived and/or modified sequence
atcagaacagagcgaggctcctggcgcactagggactccaggaggcagctccgccagagacgcgggtcgtgcttcgggaaaccggggggcggggggaggggaagagcgcagaaaagaaaacccaccaaggcggggactggcctgagcggggaggggcggcgaggccggagcccctctctgttgggcggactccccatggccagaggctgagctccactcccgccggccgctccctaggggaaggggaaggagaggggagagcagcgacaggcctccagcaagcaagcgcgggcggcatccgcagtctccagaagtttgagacttggccgtaagcggactcgtgcgccccaactctttgccgcgccagcgcctggagcggagagcagaggcggcccggccgcggcgcgccggctttgtcatgatggccagctaccccgagcccgaggacgcggcgggggccctgctggccccagagaccggtcgcacagtcaaggagccagaagggccgccgccgagcccaggcaagggcggtgggggtggcggcgggacagccccggagaagccggacccggcgcagaagcccccgtactcgtacgtggcgctcatcgccatggcgatccgcgagagcgcggagaagaggctcacgctgtccggcatctaccagtacatcatcgcgaagttcccgttctacgagaagaataagaagggctggcaaaatagcatccgccacaacctcagcctcaacgagtgcttcatcaaggtgccgcgcgagggcggcggcgagcgcaagggcaactactggacgctggacccggcctgcgaagacatgttcgagaagggcaactaccggcgccgccgccgcatgaagaggcccttccggccgccgcccgcgcacttccagcccggcaaggggctcttcggggccggaggcgccgcaggcgggtgcggcgtggcgggcgccggggccgacggctacggctacctggcgccccccaagtacctgcagtctggcttcctcaacaactcgtggccgctaccgcagcctccctcacccatgccctatgcctcctgccagatggcggcagccgcagcggctgcagcagctgcggctgcagccgcgggccccggtagccctggcgcggccgctgtggtcaaggggctggcgggcccggccgcctcgtacgggccgtacacacgcgtgcagagcatggcgctgccccccggcgtagtgaactcgtacaatggcctgggaggcccgccggccgcacccccgcctccgccgcacccccacccgcatccgcacgcacaccatctgcacgcggccgccgcaccgccgcctgccccaccgcaccacggggccgccgcgccgccgccgggccagctcagccctgccagcccagccaccgccgcgcccccggcgcccgcgcccaccagtgcgccgggcctgcagttcgcttgtgcccggcagcccgagctcgccatgatgcattgctcttactgggaccacgacagcaagaccggcgcgctgcattcgcgcctcgatctctgagagcccaccgcatgccggtgcagacggatgcgaggatgcagggacgcgcgacgccggccccggtcgcagccgacgacgccgccgccagcctgacctcacaccctctgggcccgcctctggagccagcgcccagggtccctctgtgctttttcgctttcctaagctcctgtcgctcctctttgtcccctcagtttatgtcctcctgtgctcacctccctgacctctgtgaccttgcactcccctggcctgaagctgcctctctgcgcgctttctactgggctcgtctctttccggagccccagcgtctcctgcccaaattcaccgcggaaagggcccggggcggaggtgcgaccgggcgtcggcagcgcagacctcttggccttctctcacaggtcggtgcgctcgctctccgcgttccccgcccgactgccgtgcagtccatggctagacgcgccggacaggactgatggcgggaccgcgctgcccgagaaagggacggaccaatacgtgtgtttgctccgcgaaccctcttgaagctgttcagaagccgcttgccgcggggcccactaggcggggcgggggttgggacccagcgggagccggggcagcctggctccacggcctgtactcggtttacaccgcgggcgggcgcggagggaggctgcgtttcctccgctatcagtcccgtcgcttcgggcacctccgggccccggcggctggctaatgttttgtttgaaagatcggtggaactttttaagagagtatttaaaaaaaaaaaaaggaaaaaaaattcaccgggcaaccggggaagtattgtggccttggagtttgctaaatccaaatatgaaaatcaaaagctttagtattcctcatcttctcttctggaagatttgcgttagagtttttgttgggccttcaaaaagctgtgttcagagttaggagaatatatccaataaaagatggtttcgtctaccaattggggaagtttcaccctctccctatctgaagaaaaaaatcaaaaacaaatgtccccggatctttcgatgcaagtcctggaggcagggagatcactgcctgcctggcccacgctgctgggacggctcgtcctccctgctttttgtttttcaaacctcctgcttctcccaccttgggaaggagaaatgtgaaacccggcagcggccgacctaggcggtcttgtggcccggagccggcccggcccgaaaaccatagacctggttgtactgtagcttgttgtttgggggaccaaattttctagagagaactagagcacttttgttgtgtttttttgttttgtttttgttttttgccttgtcgattcccgaataaattttgtgttccttcttttaa

SEQ ID NO: 213937 - DNA, 2733 bp, Artificial Sequence
  derived and/or modified sequence
tgggcggactccccatggccagaggctgagctccactcccgccggccgctccctaggggaaggggaaggagaggggagagcagcgacaggcctccagcaagcaagcgcgggcggcatccgcagtctccagaagtttgagacttggccgtaagcggactcgtgcgccccaactctttgccgcgccagcgcctggagcggagagcagaggcggcccggccgcggcgcgccggctttgtcatgatggccagctaccccgagcccgaggacgcggcgggggccctgctggccccagagaccggtcgcacagtcaaggagccagaagggccgccgccgagcccaggcaagggcggtgggggtggcggcgggacagccccggagaagccggacccggcgcagaagcccccgtactcgtacgtggcgctcatcgccatggcgatccgcgagagcgcggagaagaggctcacgctgtccggcatctaccagtacatcatcgcgaagttcccgttctacgagaagaataagaagggctggcaaaatagcatccgccacaacctcagcctcaacgagtgcttcatcaaggtgccgcgcgagggcggcggcgagcgcaagggcaactactggacgctggacccggcctgcgaagacatgttcgagaagggcaactaccggcgccgccgccgcatgaagaggcccttccggccgccgcccgcgcacttccagcccggcaaggggctcttcggggccggaggcgccgcaggcgggtgcggcgtggcgggcgccggggccgacggctacggctacctggcgccccccaagtacctgcagtctggcttcctcaacaactcgtggccgctaccgcagcctccctcacccatgccctatgcctcctgccagatggcggcagccgcagcggctgcagcagctgcggctgcagccgcgggccccggtagcctggcgcggccgctgtggtcaaggggctggcgggcccggccgcctcgtacgggccgtacacacgcgtgcagagcatggcgctgccccccggcgtagtgaactcgtacaatggcctgggaggcccgccggccgcacccccgcctccgccgcacccccacccgcatccgcacgcacaccatctgcacgcggccgccgcaccgccgcctgccccaccgcaccacggggccgccgcgccgccgccgggccagctcagccctgccagcccagccaccgccgcgcccccggcgcccgcgcccaccagtgcgccgggcctgcagttcgcttgtgcccggcagcccgagctcgccatgatgcattgctcttactgggaccacgacagcaagaccggcgcgctgcattcgcgcctcgatctctgagagcccaccgcatgccggtgcagacggatgcgaggatgcagggacgcgcgacgccggccccggtcgcagccgacgacgccgccgccagcctgacctcacaccctctgggcccgcctctggagccagcgcccagggtccctctgtgctttttcgctttcctaagctcctgtcgctcctctttgtcccctcagtttatgtcctcctgtgctcacctccctgacctctgtgaccttgcactcccctggcctgaagctgcctctctgcgcgctttctactgggctcgtctctttccggagccccagcgtctcctgcccaaattcaccgcggaaagggcccggggcggaggtgcgaccgggcgtcggcagcgcagacctcttggccttctctcacaggtcggtgcgctcgctctccgcgttccccgcccgactgccgtgcagtccatggctagacgcgccggacaggactgatggcgggaccgcgctgcccgagaaagggacggaccaatacgtgtgtttgctccgcgaaccctcttgaagctgttcagaagccgcttgccgcggggcccactaggcggggcgggggttgggacccagcgggagccggggcagcctggctccacggcctgtactcggtttacaccgcgggcgggcgcggagggaggctgcgtttcctccgctatcagtcccgtcgcttcgggcacctccgggccccggcggctggctaatgttttgtttgaaagatcggtggaactttttaagagagtatttaaaaaaaaaaaaaggaaaaaaaattcaccgggcaaccggggaagtattgtggccttggagtttgctaaatccaaatatgaaaatcaaaagctttagtattcctcatcttctcttctggaagatttgcgttagagtttttgttgggccttcaaaaagctgtgttcagagttaggagaatatatccaataaaagatggtttcgtctaccaattggggaagtttcaccctctccctatctgaagaaaaaaatcaaaaacaaatgtccccggatctttcgatgcaagtcctggaggcagggagatcactgcctgcctggcccacgctgctgggacggctcgtcctccctgctttttgtttttcaaacctcctgcttctcccaccttgggaaggagaaatgtgaaacccggcagcggccgacctaggcggtcttgtggcccggagccggcccggcccgaaaaccatagacctggttgtactgtagcttgttgtttgggggaccaaattttctagagagaactagagcacttttgttgtgtttttttgttttgtttttgttttttgccttgtcgattcccgaataaattttgtgttccttctttt

SEQ ID NO: 213938 - DNA, 1131 bp, Artificial Sequence
  derived and/or modified sequence
atgatggcatcatacccagagccagaggacgccgctggggccctgttggccccagagacggggcgcaccgtgaaagaacccgagggccccccccccagccccggcaagggagggggggggggaggaggcaccgcccccgagaaaccagacccagctcaaaagccaccttactcttatgttgctcttatagcgatggcgataagggaaagcgccgaaaagaggctgacactgagcggcatataccagtatatcatagcaaagttccctttctacgagaaaaataagaagggttggcaaaactccattcgccataatttatctctgaacgagtgcttcataaaggttcccagagagggcggcggggagcggaaagggaactactggacactggaccctgcctgcgaggacatgttcgaaaagggaaactaccgcaggagaaggcgcatgaaacgccccttccggcctcccccagctcattttcagcctggaaaggggttgttcggcgccgggggagctgctggtggttgtggcgtggcaggcgcaggagctgatgggtacgggtacctagcccctccaaaatacctgcagagcggatttcttaataactcttggccattgcctcagcccccttctccaatgccctatgcatcttgccaaatggctgctgcggctgctgccgctgcagccgccgccgctgcagcgggaccggggtcacccggagcggctgccgtggtgaaggggctagctgggcccgccgcctcatatggcccatacaccagggtgcagagtatggccctgcctcccggcgtagtcaacagctataacggcttaggcggaccaccagccgcgccgcccccccctccacatcctcacccccatcctcatgcacaccatcttcacgcagcagcagcccctcccccagcaccccctcaccacggggcagcagcccctccgcccggacagctgagcccagccagtccggcaactgctgctccccccgctcccgcacccacttcggctcccggcttgcagtttgcttgtgccaggcagccagaactggccatgatgcattgcagctactgggatcatgatagcaagacaggtgcactacatagccgtctggacctgtag

SEQ ID NO: 213939 - DNA, 810 bp, Artificial Sequence
  derived and/or modified sequence
atgatggcctcataccccgagcccgaagatgccgccggtgcactgctggcacccgaaactgggaggacagttaaggagcctgagggacccccacccagtcctggcaagggcggaggagggggcggaggcacagccccagagaaacctgaccccgcccagaaacccccttacagttacgtggccctgatcgccatggctatcagagagtccgcggagaagaggcttacactctccggcatttatcagtatattattgcaaaatttcccttttatgaaaaaaataaaaagggatggcagaatagtatcaggcataacctatccctgaatgaatgcttcatcaaggtcccacgcgagggggggggggagcgaaagggcaactattggactctggaccccgcctgcgaggatatgtttgaaaaaggcaattaccggaggaggcgtagaatgaaaaggccatttcgccctcctcccgcccatttccagcctggcaagggcctttttggcgccggaggcgcagcaggcggctgtggtgtggccggagcaggggccgacggatacggatatctggccccgccaaagtacctccagtcagggttcctcaacaattcttggcctttacctcaacctccgtctccgatgccgtacgcctcctgtcagatggccgcagccgctgccgcagccgccgccgccgccgccgccgctggtcccggtagcttagcccgccctctgtggagtagaggttggagagctaggcccccaaggacaggcaggacccacgcttgcagagcctggcggtgcccacctgcgtag

SEQ ID NO: 213940 - DNA, 1131 bp, Artificial Sequence
  derived and/or modified sequence
atgatggccagctacccagagccagaagatgctgctggggccctgctggcccctgagaccggccgcacagtgaaggagcctgagggccccccacccagccctgggaagggcggcggcggcggcggcggcacagcccctgagaagccagaccctgcccagaagccaccctacagctatgtggccctgattgccatggccatccgggagagcgctgagaagaggctgaccctgagcggcatctaccagtacatcatcgccaagttccccttctatgagaagaacaagaagggctggcagaacagcatccgccacaacctgagcctgaatgaatgcttcatcaaggtgccccgggagggcggcggggagaggaagggcaactactggaccctggaccctgcctgtgaggacatgtttgagaagggcaactacagaagaagaagaaggatgaagaggcccttccggcccccaccagcccacttccagcccgggaagggcctgtttggagctggaggagctgctgggggctgcggcgtggccggggccggggctgatggctacggctacctggccccacccaagtacctgcagagcggcttcctgaacaacagctggcccctgccccagccccccagccccatgccctatgccagctgccagatggctgctgctgctgctgctgctgctgctgctgctgctgctgctggccctggcagccctggagctgctgctgtggtgaagggcctggccggccctgctgccagctatggcccctacaccagggtgcagagcatggccctgcccccaggagtggtgaacagctacaacggcctgggcggccccccagctgcccctcctcctccaccccacccccacccccacccccacgcccaccacctgcatgctgctgctgcccctcctccagccccaccccaccacggggctgctgcccctcctcctggccagctgagccctgccagccctgccacagctgcccccccagccccagcccccaccagcgcccctggcctgcagtttgcctgtgcccggcagcctgagctggccatgatgcactgcagctactgggaccatgacagcaagacaggagccctgcacagccggctggacctgtag

SEQ ID NO: 213941 - DNA, 810 bp, Artificial Sequence
  derived and/or modified sequence
atgatggccagctacccagagccagaagatgctgctggggccctgctggcccctgagaccggccgcacagtgaaggagcctgagggccccccacccagccctgggaagggcggcggcggcggcggcggcacagcccctgagaagccagaccctgcccagaagccaccctacagctatgtggccctgattgccatggccatccgggagagcgctgagaagaggctgaccctgagcggcatctaccagtacatcatcgccaagttccccttctatgagaagaacaagaagggctggcagaacagcatccgccacaacctgagcctgaatgaatgcttcatcaaggtgccccgggagggcggcggggagaggaagggcaactactggaccctggaccctgcctgtgaggacatgtttgagaagggcaactacagaagaagaagaaggatgaagaggcccttccggcccccaccagcccacttccagcccgggaagggcctgtttggagctggaggagctgctgggggctgcggcgtggccggggccggggctgatggctacggctacctggccccacccaagtacctgcagagcggcttcctgaacaacagctggcccctgccccagccccccagccccatgccctatgccagctgccagatggctgctgctgctgctgctgctgctgctgctgctgctgctgctggccctggcagcctggcccggcccctgtggagccggggctggagggcccggccccccaggactggaagaactcatgcctgccgggcctggcgctgccccccagcctag

SEQ ID NO: 213942 - DNA, 1131 bp, Artificial Sequence
  derived and/or modified sequence
atgatggccagctaccccgagcccgaggacgccgccggcgccctgctggcccctgaaaccgggaggaccgtgaaggagcccgaaggcccacctcccagccctggcaagggcggtgggggcggaggaggtactgcacccgaaaagccggaccccgcccagaaacccccgtactcatatgtcgctctaattgccatggccattagggaatcagcagagaagcggctgacacttagcggtatctatcagtacatcattgcgaaattcccattttacgagaagaacaagaaggggtggcagaatagcatacgccataatcttagtcttaacgaatgctttattaaagtccctcgagagggcggtggcgaacgcaaaggcaattattggaccttagatccagcctgtgaagatatgttcgagaaagggaattataggcgccgaagaaggatgaaacggcctttccggccacctccagctcattttcagccagggaagggcctctttggggccggtggagccgctggaggatgcggcgtagccggtgcaggagcagatgggtacggctacctagctccacctaagtacttgcagtcaggcttccttaataattcttggccacttccccagccacccagcccaatgccctatgcctcatgccaaatggccgctgccgcagcggccgccgctgcagctgctgcggctgcaggtcccggctcacctggcgccgccgctgtggtaaagggcctcgcaggacccgccgcatcatacggaccatacacaagggtgcaatccatggccctcccccccggagtagtaaattcatataacggactgggaggtccacctgctgctcccccaccacctcctcacccacatcctcacccacacgctcatcatctgcacgcagctgctgctccaccccctgcccctccccatcatggagcagcggctcccccacccggccagctgagccctgcctctcccgcgacagccgccccccctgcccctgcgcctacgagcgcccctgggctccagtttgcctgtgctcgccagccagaactagctatgatgcactgttcctattgggatcacgactctaagaccggcgccctccatagccggctggatctgtag

SEQ ID NO: 213943 - DNA, 810 bp, Artificial Sequence
  derived and/or modified sequence
atgatggccagctaccccgagcccgaggacgccgccggcgccctgctggcccccgagactggcagaacagtaaaggagcctgagggcccacctcctagcccaggtaagggtgggggcgggggcggggggacagccccagaaaagcccgaccccgcccagaagcctccatatagttatgtggcgctgatcgctatggccatccgcgagagtgccgagaagagactcacactatctggtatctatcagtatattatcgctaaattccctttttatgagaaaaataaaaagggatggcagaactctattagacacaatctgtcacttaatgagtgcttcattaaagtgccaagggaggggggtggagaaaggaagggtaattactggactttagatccagcgtgcgaagatatgtttgagaagggaaattacagaaggcgccgcagaatgaagaggccatttcgacctccgccagcacacttccagccaggcaagggcctgttcggagctggtggcgccgcgggcgggtgcggcgtcgctggcgccggagccgacggctacggttacttagcccccccaaagtatcttcagagtggattcctcaataactcctggcctctgccccagccccccagccctatgccatatgcttcgtgccagatggctgccgcagcagcagcggccgctgctgcagccgctgcggccggtcccggttctctggcccgacccctgtggtccaggggatggagagctcggccccctagaactggccggactcatgcctgcagggcctggaggtgccccccagcttag

SEQ ID NO: 213944 - DNA, 1131 bp, Artificial Sequence
  derived and/or modified sequence
atgatggcctcctaccccgagccagaagacgcggcaggagcgctactcgcacccgaaactggaagaacagttaaggaacccgagggccctccacccagcccgggaaagggaggaggtgggggaggcggtacagccccagaaaaaccagatccagcacagaaacctccgtattcgtatgtggcactgattgctatggcaataagggaaagtgcagagaagcgcctgactttatcagggatatatcagtacataatcgcgaaatttcccttctacgagaagaataagaagggatggcagaatagcattagacacaatctcagcctgaacgaatgcttcattaaagtccccagagaaggaggcggagaaaggaaaggaaattactggacactggatccagcatgtgaagacatgttcgaaaagggtaattataggcgtagaaggagaatgaagcgccctttcagaccccctcctgcacacttccagcccggaaaggggctttttggcgcaggcggagccgcaggaggctgtggggtggccggagccggtgccgatggatacgggtacttagcacctcctaagtacctgcagagcggctttctgaataactcctggcctctgcctcagcctccgtccccaatgccttacgcctcatgccagatggccgctgccgctgcagcggctgcagctgcagctgcagcagctgggcctgggtcccccggtgcagccgctgtggtgaaaggcctcgctgggccagccgcttcatacgggccatacactcgcgttcagtcaatggcactgcctcctggcgtagtgaattcatacaacggcttgggcggaccacccgcagccccaccccctcccccacacccccatcctcatccacatgcgcaccatctacacgctgcggctgccccaccccctgcccctccgcaccatggcgctgccgctccacccccaggccagctaagtcccgctagtcccgctaccgcagctcccccagccccagccccaacgagtgcccctgggctgcagtttgcatgcgccaggcagccggagctggcaatgatgcattgctcatactgggaccacgactcaaagactggagcccttcatagtcgactggatctctag

SEQ ID NO: 213945 - DNA, 810 bp, Artificial Sequence
  derived and/or modified sequence
atgatggcctcttaccccgagcccgaggatgcagctggtgcactgttagcccctgagactggaaggacagtcaaagaacccgaaggcccacccccttctccagggaaggggggaggcggtggcggtggcacagctccagagaaaccagaccccgctcagaagcccccatactcttatgtagcactgattgcaatggcaattcgggagtccgcggaaaaacgtctaactctcagcgggatctatcagtatatcatagcaaaattccctttctatgagaaaaataaaaagggctggcaaaatagtatcaggcataatctatccctgaatgaatgttttataaaagtcccgagggaggggggaggggagaggaaggggaactattggaccctggacccggcatgtgaagacatgtttgaaaagggtaattataggcgtagaagaagaatgaagcggcctttcagacctcctcctgcacacttccagcccggtaaagggctgtttggcgctggcggtgcggcaggcggttgcggggtcgcaggggcaggcgcagacgggtacgggtatctcgccccacccaaatacctgcagtccgggtttctgaataactcatggccacttccccagccaccatctcccatgccctatgcgtcatgccagatggcagcagctgccgcagcagctgctgccgctgctgctgctgctggtcccggatcccttgctcgccctctgtggtccagaggttggagggcccgtccccctcgcacgggaagaacccacgcatgtcgagcctggcggtgtcccccagcctag

SEQ ID NO: 213946 - DNA, 1131 bp, Artificial Sequence
  derived and/or modified sequence
atgatggccagctaccccgagcccgaggacgccgccggcgccctgctggcccccgagaccggcagaaccgtgaaggagcccgagggccccccccccagccccggcaagggcggcggcggcggcggcggcaccgcccccgagaagcccgaccccgcccagaagcccccctacagctacgtggccctgatcgccatggccatcagagagagcgccgagaagagactgaccctgagcggcatctaccagtacatcatcgccaagttccccttctacgagaagaacaagaagggctggcagaacagcatcagacacaacctgagcctgaacgagtgcttcatcaaggtgcccagagagggcggcggcgagagaaagggcaactactggaccctggaccccgcctgcgaggacatgttcgagaagggcaactacagaagaagaagaagaatgaagagacccttcagacccccccccgcccacttccagcccggcaagggcctgttcggcgccggcggcgccgccggcggctgcggcgtggccggcgccggcgccgacggctacggctacctggccccccccaagtacctgcagagcggcttcctgaacaacagctggcccctgccccagccccccagccccatgccctacgccagctgccagatggccgccgccgccgccgccgccgccgccgccgccgccgccgccggccccggcagccccggcgccgccgccgtggtgaagggcctggccggccccgccgccagctacggcccctacaccagagtgcagagcatggccctgccccccggcgtggtgaacagctacaacggcctgggcggcccccccgccgccccccccccccccccccacccccacccccacccccacgcccaccacctgcacgccgccgccgcccccccccccgcccccccccaccacggcgccgccgcccccccccccggccagctgagccccgccagccccgccaccgccgccccccccgcccccgcccccaccagcgcccccggcctgcagttcgcctgcgccagacagcccgagctggccatgatgcactgcagctactgggaccacgacagcaagaccggcgccctgcacagcagactggacctgtag

SEQ ID NO: 213947 - DNA, 810 bp, Artificial Sequence
  derived and/or modified sequence
atgatggccagctaccccgagcccgaggacgccgccggcgccctgctggcccccgagaccggcagaaccgtgaaggagcccgagggccccccccccagccccggcaagggcggcggcggcggcggcggcaccgcccccgagaagcccgaccccgcccagaagcccccctacagctacgtggccctgatcgccatggccatcagagagagcgccgagaagagactgaccctgagcggcatctaccagtacatcatcgccaagttccccttctacgagaagaacaagaagggctggcagaacagcatcagacacaacctgagcctgaacgagtgcttcatcaaggtgcccagagagggcggcggcgagagaaagggcaactactggaccctggaccccgcctgcgaggacatgttcgagaagggcaactacagaagaagaagaagaatgaagagacccttcagacccccccccgcccacttccagcccggcaagggcctgttcggcgccggcggcgccgccggcggctgcggcgtggccggcgccggcgccgacggctacggctacctggccccccccaagtacctgcagagcggcttcctgaacaacagctggcccctgccccagccccccagccccatgccctacgccagctgccagatggccgccgccgccgccgccgccgccgccgccgccgccgccgccggccccggcagcctggccagacccctgtggagcagaggctggagagccagaccccccagaaccggcagaacccacgcctgcagagcctggagatgcccccccgcctag

SEQ ID NO: 213948 - protein, 3197 aa, Artificial Sequence
  derived and/or modified sequence
MEIRLEILTSTGIKQKKPWPRVSWLGKEKEAVFLLDDKFINEINLLSGKIKKKIPSLQPFLKDVIVLTTSSNDAWLAGVLTTGELFLWNKDQDCLKTIPITEKPKEMIKATVASSLRLYLYVSGNGKRIVLITPSGCIFLWEYLELKNILSSKSLSLAGRWSQVIPEEAVLLPSTEDKEAVVNAVFIKNELFGDCCLCSFTFYSGECLKLTFLAIRWHENVFTSVRSLPYHVHWAQQDCHLCSLIPKCESVKSRGALISAFSRDGLTLAVTLNQKDPKATQVLFINTLNFVTLCGSLKGCSNKSPVVPATLIRSYWVGDISWTHDSLFLACMLKRGSLVLLTCQGELLTLITFGCSIEFGPAEFIPLHPLITYRPQQFTFQDSNNSVDSSASDSDPMRQRFSIKAHSRLPYLVISDGYMVTTLRFLDSLSPSVHMRSLLLDSTQRLEKIYQSVILSKPKGKGLNLRSLNSLRSSLLEHQGNESSADFTVPKFLQAEETINENAADFQDFEAEETNEGRHFPDNLCPFWNKRDDVLCSSMKEGRLEFASMFDTIHAKDDSEETDRTITELHSIQKSLLAAWTIGISKTVTEKNLMLNYIVVCITHFFYILQFIKCPFPKLDLVLSKSSRHNAWILCIFQLFHQCLSIHYWDIRYKQDVGHLIKLTSNTVKLLLTQQQKGQLFSEKLLACFYLLKMVADNLNGVYILQPEVISASADGSKITAQDSLVVPIFQMFQDSGFQKNWSWNSFFKIHPQVVNPVQQPGHRLLILWRILYKKTLWYQAQLNRRVPEADSQLTEKMTHEASTVKSLLCHLQANLQSTGDCLNQTLELKSINGEECFLLGSYEKSVQLWKKALQEIEEKGGRRTYFLQIRYYLSLLYCHLYSYNLNDAQGLCDQLAREILRWSQLPVKENKDFSGAAKSHFECGMVGGVHPEAAVRVVQSMARFMAAYFTNQQLCILPPHHVNVLPPLHIKTEQSFRLIPLQHSKVASVVRDQNLSNVWTVEYALELLFIGGLVPEAVWLAYKLGDWKTSVSIGVAFQLFCKRDSNFMRSKKKSLNLPLRMTPAQIFQEKLQCVLGQPASLEAKNEMGSKYKQFTDPIEEEDANLLFGSVQEVLKASVMADADILSETFQLLIDSAKDFSKRLWGLVPFGLYLPAPPLYCPQPAILSEEDGDDLLLKAEKNNRQKVSGILQRVLLLFRAAQCSFPVAQWYILQLRWARKVMQKIRMKGSLPSLSPFPQSLLNYCKGGIAFFRPGAAGDHKLDEVSIRAIGCFRELCALCWMLHVRDKLSYSCRQYQKARENVKGEKDLEVEFDSCMIEHCLSAVEWAYRMLPFSRFFNMEELIQDIILSLIGELPPIRKVAEIFVKAFPYPEDVRVPLRDKYHSLHQRLRHCVVKGPQTEEMMSVVMHSIQKVRVKALKRVQRNIGSFEVNIWEPIEEEKPDEAPGVDRYSLGTSLSRSTLTELGDSVVHSDADTFSEALSVEEKSRINIYQRNAPNHMELTSIHKPTDKRKMCNQKENPTKKEDHEKLSQNTLPVIGVWEFERDDDEYIKFLDLFLSYILERDLPYSRDADIPFLTSFSGKLREHELNSLLFDVHTTLKRHQSKTKSQNVFRAGSCFVVAPESYESEKSSSLNDEYGMHLENQKLSSSVLVNQGIKPFLQYPSNEVNKNEGMSGLFGLKQRSIYKIQDDTREKCLIQRSSNHIFWTPKSIKTRRCIFKAIQCNDINPQEDLPLALNTFGSIGRLLEWMIRWSNRRLLCDSGITESSSEYSPVIRVKTSTAAILTSLWLLEQPYFATYKAKNAIIKMVENRDTGCQIGPNIERESKSDAGGSVAVATPGGTEERNGQNKSCQNILNRMPTEAKNPDIKEINDDIISITHNTKKEFIDIDENLLEVEAFTEEEMDMHISDYEEDIEESVGGFRSPSLAICMMTLPQQLEEEFTEEVQCQREEPLETIMEEKSTEQKGMIEAFSHPGHTTPQSMQVDTSSEISSAQISTYKEKSSSVPLLISNGVNVASQPPAPTPQKTQRNEFTAQLPDCSESVRQMLQDEMFKLVQLQQINFMSLMQIVGSSFANLPDTQQLVQQSQSVHLGESQESNLRGCGDVEDSNKNLKERFFIKPQSMGENAREPRKNSPHCHEGTIPSGQNSTGNVQNVPHGSIPLCQLNGQPRKKGPIPSSQNLPSTSFYPAPAGNTHLYLLSTPSVVQKAPRLIPHAKTFSPGDGFPLLQFKSKQEFQPLFLHTGSIPQVPFRPLPQPREAWGLSDSFQPALPQRAAQTTPASHLNVSQYNTEARKKEVEQKTWAETVITEIPNHVNLDQYVGQENLTPQQDSSVFIKPEKLFDVKPGTLEISPHHSFGLPLLYLPLKPPNMFPSTSRASITVPSTPIQPIAEERKYPRLSLLHSHLSPENRCKKTQLIPLENLIAFKQSQQKLTHNLFEQGDAGHLQLLKVKIEPPEVRQGKDSKKRQRRRAEKELQEKRCEKLRRKPNVTFRPENSIINNDDSEIIKKPKEQQEHCGSHPLDDFDVPFEMLQDDNTSAGLHFMASVKKKAIGSQDASTNTDPEHEPLTAPQLLVPDVYLNLKLSSEMSEKPWSPSIPHTVTNLELPVREEPSNDNVIKQQSDHLAVPSSAELHYMAASVTNAVPPHNFKSQGLPKPEFRFKGQSTKSDSAEDYLLWKRLQGVSAACPAPSSAAHQLEHLSAKLQKIDEQLLAIQNIAENIEQDFPKPEMLDLHCDKIGPVDHIEFSSGPEFKKTLASKTISISEEVRFLTHMDEEDQSDKKETSEPEFSITENYSGQKTCVFPTADSAVSLSSSSDQNTTSPGMNSSDELCESVSVHPLQMTGLTDIADIIDDLIIKDGVSSEELGLTEQAMGTSRIQHYSGRHSQRTDKERREIQAWMKRKRKERMAKYLNELAEKRGQEHDPFCPRSNPLYMTSREIRLRQKMKHEKDRLLLSEHYSRRISQAYGLMNELLSESVQLPTLPQKPLPNKPSPTQSSSCQHCPSPRGENQHGHSFLINRPGKVKYMSKPSYIHKRKSFGQPQGSPWPHGTATFTIQKKAGGAKAAVRKATQSPVTFQKGSNAPCHSLQHTKKHGSAGLAPQTKQVCVEYEREETVVSPWTIPSEIHKILHESHNSLLQDLSPTEEEEPEHPFGVGGVDSVSESTGSILSKLDWNAIEDMVASVEDQGLSVHWALDL

SEQ ID NO: 213949 - DNA, 11199 bp, Artificial Sequence
  derived and/or modified sequence
ggttctgagcaggcgccgtggcagcgcccgcgccccctgcccgccctccgccgtcgccaggacgcaggctcgcgtcagggctggcggtagggcccgcagctgtcggcctggcgtcttcaccccgcgcagtcggcctcgcctagccttctcgcgcctgactggccggaccctgcccctggcggagaatcttgggactgttttacttaattggtcattgatagcttaacaaacatggagataagattagaaatcttgacatcaacaggtattaagcagaaaaaaccatggccacgtgtctcctggttgggaaaggaaaaagaagccgtttttcttttggatgataaattcataaatgaaattaatttgctatcaggaaagataaagaagaaaattcctagtctgcagcctttcttgaaggatgttattgtcctaacaacatccagtaatgatgcctggctggctggggtactaactacaggagagcttttcctttggaacaaagatcaagattgtttgaaaactataccaataactgaaaagcctaaggaaatgatcaaagctacagtcgcaagctctttgagactgtacttgtatgtatctggaaatgggaaaagaattgtgctcataacaccttctggatgcatatttctttgggaatatttggaattaaagaatatcttatcttctaaaagcctttcattggcgggtcggtggtcccaggtcatacctgaagaagcagttctcttgccttccaccgaagataaagaagctgtagtgaatgctgtttttataaaaaatgagttatttggagactgctgcctgtgttcatttactttttattctggggaatgcctgaagttaacatttctagcaattcggtggcatgagaatgtatttacatctgtaagatcattgccataccatgttcattgggctcaacaagactgtcatctctgtagtttaattcctaaatgtgaatcagtaaagtcaagaggagctctaatttctgccttttcaagagatggccttaccctggcagtaactcttaatcagaaagaccccaaggcaactcaggtattatttataaacacactgaattttgttactctctgtggtagccttaaaggatgtagtaacaagagtcccgtggttccagctacacttattaggtcctactgggtaggtgatatcagctggacgcatgatagtctttttctggcttgtatgttaaaacgtggctctctggttttattgacctgccaaggtgaattgctaacattaattacatttggttgctctatagaatttggcccagcagaatttattcctcttcatccactaataacgtatagaccacagcagtttacgtttcaagattcaaataattctgttgattcatcagcttctgatagtgaccctatgagacagagattttctataaaagcacactcacggttaccctacctcgttatatctgatggatatatggtcacaacccttcgatttcttgatagcctatctccatcagtacacatgagatcacttctacttgattcaacccagaggcttgagaaaatatatcaaagtgtgatattgtctaagccaaaaggcaaaggactgaacttgcgatcactgaattccctaaggtctagcctgttagaacaccaaggaaatgaaagttcagccgatttcactgtccccaaattcttgcaggcagaagaaacaataaatgaaaatgcagcagattttcaggattttgaagcagaagaaactaacgaaggcagacactttccagacaacttatgtcctttttggaacaaaagagatgatgtgctgtgtagtagtatgaaggaaggaagattggaatttgcatctatgtttgatacgatacatgcaaaggatgatagtgaggagacagatagaaccattacagaactgcattctatccagaaaagtctacttgcagcgtggactataggaatttcaaaaactgtgacagaaaaaaatttaatgttaaattacatagtagtttgtatcactcattttttttacattcttcaatttataaaatgtccttttcctaaacttgatcttgttttaagcaaaagctcaagacataatgcatggatactttgtatctttcaactttttcatcagtgtttatcaatccattattgggatataagatacaaacaagatgtggggcatttgataaagctgacctcaaatactgtaaaacttttgctgactcagcaacaaaagggtcagttattctcagagaaacttttagcttgtttttatttactcaaaatggtagctgacaatttaaatggtgtatacattcttcaacctgaagttatttcagcatcagctgatggaagtaaaataacagctcaagactcattggtggtacctatttttcagatgtttcaagatagtggttttcagaaaaactggtcttggaactcatttttcaagattcatcctcaagtagtaaatcctgtgcaacagccaggacacagattgcttattctctggagaatactgtacaaaaaaactttatggtatcaagcacaattaaatcgaagagttcctgaagctgatagtcagttaactgaaaagatgacacatgaagcatctactgtcaagtccctgttatgtcatttgcaggctaacctacagagtactggagattgcttgaatcaaaccttagaacttaaatctatcaatggggaagaatgttttttattaggatcatatgaaaagtctgttcagctgtggaaaaaagctctacaagaaatcgaagagaaaggaggaagaaggacgtattttcttcagatacgctattatctttctctcttatactgccacctctatagctataatttaaatgatgctcaaggattgtgtgatcagctagcaagagaaatcctgagatggtcccaactacctgtaaaagaaaataaagatttttcaggtgctgcaaagtctcattttgagtgtggaatggtgggcggtgttcatcctgaggcagcagtgagagtcgtccagtccatggctcgtttcatggctgcctatttcaccaatcagcagctttgcattttgccccctcatcatgtgaatgttcttcccccacttcatattaaaacagagcagtcctttcgacttattcctctgcaacactctaaggtggccagtgttgttagagatcagaatctctctaatgtgtggacagttgaatatgcacttgaattactatttattggtggcctggttccagaggctgtgtggttggcatataaacttggagactggaagacgtctgtttcaattggtgtggctttccagctgttctgtaaacgtgatagcaatttcatgaggtccaagaaaaagagtctgaatctaccactccgtatgactccagcacagatttttcaggaaaaactgcagtgtgttttaggtcaaccagcctctttggaagcaaaaaatgaaatgggctcaaaatataaacagtttacagatcccattgaagaggaagatgcaaatctgctatttggttcagtacaagaagtactgaaagcatcagttatggccgatgcagatattctttcggagacatttcaacttctgatagactctgccaaggacttcagtaaaagactgtggggcttagtgccattcggcttgtatcttccagctcctccattgtactgtccccagccagctattcttagtgaagaagatggtgatgatcttcttttaaaagctgaaaaaaataatcgccagaaggtatctggaatccttcagcgtgttctcctgcttttccgggcggctcagtgttcttttcctgtagcacagtggtatatattgcagttgaggtgggcaagaaaagtcatgcagaagattcgaatgaaaggatcccttccttcactgagtccttttcctcagtcattacttaattactgtaaaggaggtatcgcattttttagacctggagcagctggagaccacaagcttgatgaagtttccattagagcaataggttgcttcagagaactttgtgctctgtgttggatgctgcatgtccgtgataagttatcctatagttgcaggcaatatcagaaagcaagagaaaatgtaaaaggagaaaaggaccttgaagtggagtttgattcttgtatgattgagcactgtcttagtgcagtggaatgggcttatagaatgctgcctttctctcggttttttaatatggaagaacttattcaggatataattttgagccttattggagaactgccaccaatcagaaaggtagcagaaattttcgtgaaagcatttccctatcctgaggacgtgagggttcctttaagagacaaatatcactctcttcaccagagactcagacactgtgttgtgaaaggaccccagactgaggaaatgatgtctgttgtcatgcattctatccagaaagtgagggtgaaagctctaaaacgtgtgcagagaaatataggctcttttgaagtgaatatatgggaaccaattgaagaagagaaaccagatgaggctccaggtgttgacagatattccctggggactagtttgagcagaagtacactcacagaactaggagattctgtggttcacagtgatgcagatacgttctctgaagctttgtcggttgaagaaaaaagtaggataaatatctatcaaagaaatgccccaaatcacatggaattaacatcaattcataagccaactgataaaaggaaaatgtgtaatcagaaagaaaatcctacaaagaaagaagatcatgaaaagttatcacaaaatacacttcctgtaataggtgtttgggaatttgaacgtgatgatgatgaatatattaaattccttgatctgtttttgagttacattcttgaaagagacctaccttattccagggatgctgacattccatttctaactagtttttctggaaagcttagagaacatgaacttaattctttactttttgatgtacatacaacattaaaacgacatcagagcaaaactaaaagccagaatgtgtttagagctggttcttgctttgttgttgctcctgagtcctatgaatcagaaaaatcatcctctttaaatgatgaatatggcatgcatttagaaaaccagaaactttcatcatcagtactggttaatcaagggatcaaaccttttttacaatatccttcgaatgaagtcaataagaatgaaggaatgagtggattatttggtttaaaacaaaggtcaatttacaaaatacaagatgacactagagagaaatgtctaatccagagatcatcaaaccacattttttggactcccaagtccattaaaactagaagatgtattttcaaagctattcagtgcaatgatattaaccctcaagaagatcttcctttagcactaaacacttttggcagtataggaagactgctggaatggatgataaggtggtctaatagaaggctactctgtgattctggtataactgagtcatcctctgagtacagtccagtaattcgtgtaaagacctctacagctgccattcttacatcattatggcttttggaacaaccctattttgctacatataaggcaaaaaatgccattattaagatggtagagaatcgtgacactgggtgtcagattggacccaatattgagagggagagcaaatcagatgctggcggttcagttgcagtagcaactccaggtggaactgaggaaagaaatggtcagaataaatcttgtcaaaatatcttgaatagaatgccaactgaagcaaaaaatcctgatataaaagaaatcaatgatgatattatttccatcactcataatactaaaaaagaatttatagatattgatgagaatcttttagaagtagaagcatttacagaagaggaaatggatatgcacatatcagactatgaagaagacattgaagaatctgttggaggtttcagaagtcccagtcttgccatttgcatgatgactttaccacagcagttagaagaagagttcacagaagaggttcagtgtcaaagggaagaaccactggagacaattatggaggaaaaatcgactgaacaaaaaggtatgatcgaagccttttcacatcctgggcataccactcctcaatcaatgcaagtagatacgagttcagaaatttctagtgcacagatttctacatataaagaaaaatcttcctcagttccacttctgatatcaaatggagtcaatgttgcttcacaaccacctgctccaacacctcagaagacccagagaaatgaattcacggctcagttaccagattgttcggagtccgttaggcagatgctgcaagatgaaatgtttaaattagttcagctgcaacagatcaacttcatgagcctaatgcaaatagtaggatcatcctttgctaatctcccagatacacaacaacttgtacagcagtctcagtctgtgcatttaggggaaagccaagaatcaaacctaagaggatgtggtgatgttgaagacagcaacaaaaatcttaaggagagattttttattaaaccacagtcaatgggagagaacgccagagagcctcgcaagaacagcccacactgccatgaaggaactatcccatctggtcaaaatagtactggaaacgtacagaatgttccacatgggagtattcctttatgtcaattaaatggccagccccggaaaaaaggaccaattccatcatctcaaaacttaccatccacttcgttttatccagctcctgctggaaatactcacctctaccttttgtccacaccttctgttgttcagaaggcacctagacttatcccacatgcaaaaacatttagtcctggtgatggctttcctttgcttcaatttaagtctaaacaagaattccagccccttttcttacatacaggaagtattccacaagttcccttcaggcctttgccacaaccaagagaggcttggggattatctgactccttccaacctgctctgccacagagagcagcacaaactactccagcatcccatttgaatgtaagccagtataacactgaagccagaaaaaaagaagttgagcagaagacgtgggcagaaactgtaattacagaaattcctaatcatgtgaacttggatcaatatgttggacaagaaaatttgacacctcaacaggactcttcagtgtttataaaaccagaaaaactatttgatgttaagccagggacccttgagatatctcctcaccattcctttggacttccgttactatacctgccacttaaacctcctaatatgtttccatcaacctcaagagcatctattacagttccctcaacacctatccaacctatagcagaagaaagaaaatacccaagattgtcattacttcattcacatttgtccccagaaaataggtgcaaaaaaacacaacttatcccacttgaaaacctcattgcgtttaaacaaagccaacagaaactaacacataatttatttgaacaaggtgatgctggacaccttcaacttctaaaggtcaaaatagaaccacctgaagtaagacaaggaaaggacagtaaaaaaaggcaaagaagaagagctgagaaagagctgcaagaaaaaagatgtgagaaactgaggagaaaaccaaatgtgacttttcgaccagagaattccataattaataatgatgattcagaaatcattaagaaacccaaggaacaacaagaacattgtggttcccatcctttggatgacttcgacgttccttttgaaatgctacaagatgataatacttcagctggattgcatttcatggcctctgtaaaaaagaaagctataggaagtcaagatgcaagtacaaatacagacccagaacatgagcctttgactgctcctcagctcttggtcccagatgtctatctaaatctgaagctttccagtgaaatgtcagagaaaccttggtcaccctcaatacctcatacagtaacaaacttggaattacctgtgagagaagagccttcaaatgataatgttatcaaacagcaaagcgatcatctagcagttccatcgtctgcagagttacattatatggcagcttcagttactaatgctgttcccccacataattttaagagtcaaggtctgccaaaaccagagttccgattcaaaggacagagcacaaagtcagactctgcagaagattatctattgtggaaacggctgcaaggtgtctctgcagcttgccctgcaccaagctctgcagctcaccaactagagcatctcagtgctaagcttcagaaaattgacgagcagttgctagcaatacagaacattgctgaaaacatagaacaggatttccccaagcctgaaatgctagatctacattgtgataagattggaccagtggatcacattgaattctcttctggccctgaattcaaaaaaacattagcttcaaaaaccattagcatttctgaagaagtgcgttttttgacccatatggatgaagaagatcaaagtgacaaaaaggagacttcagaacctgaattttcaataacagaaaattattctggtcagaaaacctgtgtgtttcctactgccgattcagctgtcagcctttccagttccagtgatcagaatactacttctcctggtatgaatagcagtgatgaattgtgtgagagtgtttcagtacatccgctccagatgactggattgactgatattgcagacattattgatgaccttataattaaagacggagtttccagtgaagaacttggcttaacagaacaagctatgggcacctccagaattcagcattattctggcagacattcacaaagaactgacaaggaaagaagagagattcaagcctggatgaaaagaaaacgaaaagaaagaatggcaaagtacttaaatgagctggcagaaaagagagggcaagaacatgatcctttctgtcccagaagcaatccactttacatgacttcaagggaaataaggctgagacaaaagatgaagcatgaaaaagacagattgctgctctctgaacactatagtcgtcgaatctcacaagcgtacggtctgatgaatgaactgttatctgagtcagtacagctaccaactctaccacagaaaccattgcctaacaaacccagccctactcagtcttccagttgtcaacactgcccttctccaagaggagagaatcaacatggtcacagttttctaataaatcgacctggaaaagtcaaatatatgtccaaaccgagttatatccataagaggaagtcttttgggcaacctcaaggctcaccttggccacatggaactgccactttcaccatacagaaaaaagctggtggagccaaagcagcagtaagaaaggctacgcagtctccagttaccttccaaaaaggctctaatgctccgtgtcatagtctgcagcatacaaaaaaacatggaagtgctgggcttgcacctcaaaccaagcaggtgtgtgtagagtatgaaagagaggagactgtggtgagtccctggacgataccttcagaaatccataagattcttcatgagagtcacaattcccttctacaagacttgtctccaactgaagaggaagagccagagcatccttttggggtgggcggtgtggacagcgtgtctgagagcactggcagcatcctcagcaagctggactggaatgccatcgaagacatggtggccagcgtggaggaccagggcctgtctgtccactgggccctggacctgtaagacctggatatcattgggtttccatgcacaggccagcacctcagtaatgtggttctgaaagattaacaggtttaagggacagaagcaatgaaagaagcaatgtgaattttccatttgctttcatattattacctggattagccattaccagaggaaaaataaacatttctcagtaactttgcctttatggggaaagggttgactattgatgtattatatgtttttgtatttgatgcatcattaggcataatttttaaaatgataagtacctttcaagccaagtttgcataacctactttcaataaaaaccctctatcttgcctcctcctttattaccctctgagttttgagaaacaaccatatacagatgaatctaataggaaaaaaaaaaatcttttcattgagaagaaaatcagtctcacctgagaactcaattatgaaccctattttaaaacacctatgcagggtttagcctaggagtgaaaagaaaaaccaactaccttttaccaaccctgaatctctaaataagcaaagtttcatggaggccaggagatcttctgtcttctgccctgtagcctgaagccttggaggaagaaacaggaatggatgctttgggcaggaaagtaagggaatatgactccggcctctagaaggctcatcttaaatttgtaagaaccatggtacagagacctgattagtttttggtattgtgctccaataatgtcatagttttaagagataatttttatgagaattgactaagaaccagtatccttcaactacttcatcaatgtttggtataatataaaagcacactatcatctgaaaaagctattaaatacccctctttttccaaatatctacctgtgtgaagccaggttttacaacatgtattgcagcaagttgaatgcagaagcaggtatggtaattcagctgccttctatcaagctaaacattaaagagatttgtagaactataaaacaatgctactctccttaccaaattgttttagaaaatagctttataggctaacattattgttaattgtcatttaattgttttgtcatttaaaatattttaaattgttttctgttagtttcttttttgtatattctatgggtattttattgatacatgatagttgtacatttttatggggtgcatgtgatattttgatatgtgcatacaatgtgtagcaatcaaatcagggtaattgggatattcatcacctcaaacatttatcatttatttgtgttggaaacattcaaaccttttcttctagctatttatccattgttggatacttatatcaattctatatcttagctgttgtgaatagagctgcaataaatgtaggagtgcagatatctcttt

SEQ ID NO: 213950 - DNA, 11062 bp, Artificial Sequence
  derived and/or modified sequence
gtgaatattatgcatcatttatattttattactattattgtttacagaatcttgggactgttttacttaattggtcattgatagcttaacaaacatggagataagattagaaatcttgacatcaacaggtattaagcagaaaaaaccatggccacgtgtctcctggttgggaaaggaaaaagaagccgtttttcttttggatgataaattcataaatgaaattaatttgctatcaggaaagataaagaagaaaattcctagtctgcagcctttcttgaaggatgttattgtcctaacaacatccagtaatgatgcctggctggctggggtactaactacaggagagcttttcctttggaacaaagatcaagattgtttgaaaactataccaataactgaaaagcctaaggaaatgatcaaagctacagtcgcaagctctttgagactgtacttgtatgtatctggaaatgggaaaagaattgtgctcataacaccttctggatgcatatttctttgggaatatttggaattaaagaatatcttatcttctaaaagcctttcattggcgggtcggtggtcccaggtcatacctgaagaagcagttctcttgccttccaccgaagataaagaagctgtagtgaatgctgtttttataaaaaatgagttatttggagactgctgcctgtgttcatttactttttattctggggaatgcctgaagttaacatttctagcaattcggtggcatgagaatgtatttacatctgtaagatcattgccataccatgttcattgggctcaacaagactgtcatctctgtagtttaattcctaaatgtgaatcagtaaagtcaagaggagctctaatttctgccttttcaagagatggccttaccctggcagtaactcttaatcagaaagaccccaaggcaactcaggtattatttataaacacactgaattttgttactctctgtggtagccttaaaggatgtagtaacaagagtcccgtggttccagctacacttattaggtcctactgggtaggtgatatcagctggacgcatgatagtctttttctggcttgtatgttaaaacgtggctctctggttttattgacctgccaaggtgaattgctaacattaattacatttggttgctctatagaatttggcccagcagaatttattcctcttcatccactaataacgtatagaccacagcagtttacgtttcaagattcaaataattctgttgattcatcagcttctgatagtgaccctatgagacagagattttctataaaagcacactcacggttaccctacctcgttatatctgatggatatatggtcacaacccttcgatttcttgatagcctatctccatcagtacacatgagatcacttctacttgattcaacccagaggcttgagaaaatatatcaaagtgtgatattgtctaagccaaaaggcaaaggactgaacttgcgatcactgaattccctaaggtctagcctgttagaacaccaaggaaatgaaagttcagccgatttcactgtccccaaattcttgcaggcagaagaaacaataaatgaaaatgcagcagattttcaggattttgaagcagaagaaactaacgaaggcagacactttccagacaacttatgtcctttttggaacaaaagagatgatgtgctgtgtagtagtatgaaggaaggaagattggaatttgcatctatgtttgatacgatacatgcaaaggatgatagtgaggagacagatagaaccattacagaactgcattctatccagaaaagtctacttgcagcgtggactataggaatttcaaaaactgtgacagaaaaaaatttaatgttaaattacatagtagtttgtatcactcattttttttacattcttcaatttataaaatgtccttttcctaaacttgatcttgttttaagcaaaagctcaagacataatgcatggatactttgtatctttcaactttttcatcagtgtttatcaatccattattgggatataagatacaaacaagatgtggggcatttgataaagctgacctcaaatactgtaaaacttttgctgactcagcaacaaaagggtcagttattctcagagaaacttttagcttgtttttatttactcaaaatggtagctgacaatttaaatggtgtatacattcttcaacctgaagttatttcagcatcagctgatggaagtaaaataacagctcaagactcattggtggtacctatttttcagatgtttcaagatagtggttttcagaaaaactggtcttggaactcatttttcaagattcatcctcaagtagtaaatcctgtgcaacagccaggacacagattgcttattctctggagaatactgtacaaaaaaactttatggtatcaagcacaattaaatcgaagagttcctgaagctgatagtcagttaactgaaaagatgacacatgaagcatctactgtcaagtccctgttatgtcatttgcaggctaacctacagagtactggagattgcttgaatcaaaccttagaacttaaatctatcaatggggaagaatgttttttattaggatcatatgaaaagtctgttcagctgtggaaaaaagctctacaagaaatcgaagagaaaggaggaagaaggacgtattttcttcagatacgctattatctttctctcttatactgccacctctatagctataatttaaatgatgctcaaggattgtgtgatcagctagcaagagaaatcctgagatggtcccaactacctgtaaaagaaaataaagatttttcaggtgctgcaaagtctcattttgagtgtggaatggtgggcggtgttcatcctgaggcagcagtgagagtcgtccagtccatggctcgtttcatggctgcctatttcaccaatcagcagctttgcattttgccccctcatcatgtgaatgttcttcccccacttcatattaaaacagagcagtcctttcgacttattcctctgcaacactctaaggtggccagtgttgttagagatcagaatctctctaatgtgtggacagttgaatatgcacttgaattactatttattggtggcctggttccagaggctgtgtggttggcatataaacttggagactggaagacgtctgtttcaattggtgtggctttccagctgttctgtaaacgtgatagcaatttcatgaggtccaagaaaaagagtctgaatctaccactccgtatgactccagcacagatttttcaggaaaaactgcagtgtgttttaggtcaaccagcctctttggaagcaaaaaatgaaatgggctcaaaatataaacagtttacagatcccattgaagaggaagatgcaaatctgctatttggttcagtacaagaagtactgaaagcatcagttatggccgatgcagatattctttcggagacatttcaacttctgatagactctgccaaggacttcagtaaaagactgtggggcttagtgccattcggcttgtatcttccagctcctccattgtactgtccccagccagctattcttagtgaagaagatggtgatgatcttcttttaaaagctgaaaaaaataatcgccagaaggtatctggaatccttcagcgtgttctcctgcttttccgggcggctcagtgttcttttcctgtagcacagtggtatatattgcagttgaggtgggcaagaaaagtcatgcagaagattcgaatgaaaggatcccttccttcactgagtccttttcctcagtcattacttaattactgtaaaggaggtatcgcattttttagacctggagcagctggagaccacaagcttgatgaagtttccattagagcaataggttgcttcagagaactttgtgctctgtgttggatgctgcatgtccgtgataagttatcctatagttgcaggcaatatcagaaagcaagagaaaatgtaaaaggagaaaaggaccttgaagtggagtttgattcttgtatgattgagcactgtcttagtgcagtggaatgggcttatagaatgctgcctttctctcggttttttaatatggaagaacttattcaggatataattttgagccttattggagaactgccaccaatcagaaaggtagcagaaattttcgtgaaagcatttccctatcctgaggacgtgagggttcctttaagagacaaatatcactctcttcaccagagactcagacactgtgttgtgaaaggaccccagactgaggaaatgatgtctgttgtcatgcattctatccagaaagtgagggtgaaagctctaaaacgtgtgcagagaaatataggctcttttgaagtgaatatatgggaaccaattgaagaagagaaaccagatgaggctccaggtgttgacagatattccctggggactagtttgagcagaagtacactcacagaactaggagattctgtggttcacagtgatgcagatacgttctctgaagctttgtcggttgaagaaaaaagtaggataaatatctatcaaagaaatgccccaaatcacatggaattaacatcaattcataagccaactgataaaaggaaaatgtgtaatcagaaagaaaatcctacaaagaaagaagatcatgaaaagttatcacaaaatacacttcctgtaataggtgtttgggaatttgaacgtgatgatgatgaatatattaaattccttgatctgtttttgagttacattcttgaaagagacctaccttattccagggatgctgacattccatttctaactagtttttctggaaagcttagagaacatgaacttaattctttactttttgatgtacatacaacattaaaacgacatcagagcaaaactaaaagccagaatgtgtttagagctggttcttgctttgttgttgctcctgagtcctatgaatcagaaaaatcatcctctttaaatgatgaatatggcatgcatttagaaaaccagaaactttcatcatcagtactggttaatcaagggatcaaaccttttttacaatatccttcgaatgaagtcaataagaatgaaggaatgagtggattatttggtttaaaacaaaggtcaatttacaaaatacaagatgacactagagagaaatgtctaatccagagatcatcaaaccacattttttggactcccaagtccattaaaactagaagatgtattttcaaagctattcagtgcaatgatattaaccctcaagaagatcttcctttagcactaaacacttttggcagtataggaagactgctggaatggatgataaggtggtctaatagaaggctactctgtgattctggtataactgagtcatcctctgagtacagtccagtaattcgtgtaaagacctctacagctgccattcttacatcattatggcttttggaacaaccctattttgctacatataaggcaaaaaatgccattattaagatggtagagaatcgtgacactgggtgtcagattggacccaatattgagagggagagcaaatcagatgctggcggttcagttgcagtagcaactccaggtggaactgaggaaagaaatggtcagaataaatcttgtcaaaatatcttgaatagaatgccaactgaagcaaaaaatcctgatataaaagaaatcaatgatgatattatttccatcactcataatactaaaaaagaatttatagatattgatgagaatcttttagaagtagaagcatttacagaagaggaaatggatatgcacatatcagactatgaagaagacattgaagaatctgttggaggtttcagaagtcccagtcttgccatttgcatgatgactttaccacagcagttagaagaagagttcacagaagaggttcagtgtcaaagggaagaaccactggagacaattatggaggaaaaatcgactgaacaaaaaggtatgatcgaagccttttcacatcctgggcataccactcctcaatcaatgcaagtagatacgagttcagaaatttctagtgcacagatttctacatataaagaaaaatcttcctcagttccacttctgatatcaaatggagtcaatgttgcttcacaaccacctgctccaacacctcagaagacccagagaaatgaattcacggctcagttaccagattgttcggagtccgttaggcagatgctgcaagatgaaatgtttaaattagttcagctgcaacagatcaacttcatgagcctaatgcaaatagtaggatcatcctttgctaatctcccagatacacaacaacttgtacagcagtctcagtctgtgcatttaggggaaagccaagaatcaaacctaagaggatgtggtgatgttgaagacagcaacaaaaatcttaaggagagattttttattaaaccacagtcaatgggagagaacgccagagagcctcgcaagaacagcccacactgccatgaaggaactatcccatctggtcaaaatagtactggaaacgtacagaatgttccacatgggagtattcctttatgtcaattaaatggccagccccggaaaaaaggaccaattccatcatctcaaaacttaccatccacttcgttttatccagctcctgctggaaatactcacctctaccttttgtccacaccttctgttgttcagaaggcacctagacttatcccacatgcaaaaacatttagtcctggtgatggctttcctttgcttcaatttaagtctaaacaagaattccagccccttttcttacatacaggaagtattccacaagttcccttcaggcctttgccacaaccaagagaggcttggggattatctgactccttccaacctgctctgccacagagagcagcacaaactactccagcatcccatttgaatgtaagccagtataacactgaagccagaaaaaaagaagttgagcagaagacgtgggcagaaactgtaattacagaaattcctaatcatgtgaacttggatcaatatgttggacaagaaaatttgacacctcaacaggactcttcagtgtttataaaaccagaaaaactatttgatgttaagccagggacccttgagatatctcctcaccattcctttggacttccgttactatacctgccacttaaacctcctaatatgtttccatcaacctcaagagcatctattacagttccctcaacacctatccaacctatagcagaagaaagaaaatacccaagattgtcattacttcattcacatttgtccccagaaaataggtgcaaaaaaacacaacttatcccacttgaaaacctcattgcgtttaaacaaagccaacagaaactaacacataatttatttgaacaaggtgatgctggacaccttcaacttctaaaggtcaaaatagaaccacctgaagtaagacaaggaaaggacagtaaaaaaaggcaaagaagaagagctgagaaagagctgcaagaaaaaagatgtgagaaactgaggagaaaaccaaatgtgacttttcgaccagagaattccataattaataatgatgattcagaaatcattaagaaacccaaggaacaacaagaacattgtggttcccatcctttggatgacttcgacgttccttttgaaatgctacaagatgataatacttcagctggattgcatttcatggcctctgtaaaaaagaaagctataggaagtcaagatgcaagtacaaatacagacccagaacatgagcctttgactgctcctcagctcttggtcccagatgtctatctaaatctgaagctttccagtgaaatgtcagagaaaccttggtcaccctcaatacctcatacagtaacaaacttggaattacctgtgagagaagagccttcaaatgataatgttatcaaacagcaaagcgatcatctagcagttccatcgtctgcagagttacattatatggcagcttcagttactaatgctgttcccccacataattttaagagtcaaggtctgccaaaaccagagttccgattcaaaggacagagcacaaagtcagactctgcagaagattatctattgtggaaacggctgcaaggtgtctctgcagcttgccctgcaccaagctctgcagctcaccaactagagcatctcagtgctaagcttcagaaaattgacgagcagttgctagcaatacagaacattgctgaaaacatagaacaggatttccccaagcctgaaatgctagatctacattgtgataagattggaccagtggatcacattgaattctcttctggccctgaattcaaaaaaacattagcttcaaaaaccattagcatttctgaagaagtgcgttttttgacccatatggatgaagaagatcaaagtgacaaaaaggagacttcagaacctgaattttcaataacagaaaattattctggtcagaaaacctgtgtgtttcctactgccgattcagctgtcagcctttccagttccagtgatcagaatactacttctcctggtatgaatagcagtgatgaattgtgtgagagtgtttcagtacatccgctccagatgactggattgactgatattgcagacattattgatgaccttataattaaagacggagtttccagtgaagaacttggcttaacagaacaagctatgggcacctccagaattcagcattattctggcagacattcacaaagaactgacaaggaaagaagagagattcaagcctggatgaaaagaaaacgaaaagaaagaatggcaaagtacttaaatgagctggcagaaaagagagggcaagaacatgatcctttctgtcccagaagcaatccactttacatgacttcaagggaaataaggctgagacaaaagatgaagcatgaaaaagacagattgctgctctctgaacactatagtcgtcgaatctcacaagcgtacggtctgatgaatgaactgttatctgagtcagtacagctaccaactctaccacagaaaccattgcctaacaaacccagccctactcagtcttccagttgtcaacactgcccttctccaagaggagagaatcaacatggtcacagttttctaataaatcgacctggaaaagtcaaatatatgtccaaaccgagttatatccataagaggaagtcttttgggcaacctcaaggctcaccttggccacatggaactgccactttcaccatacagaaaaaagctggtggagccaaagcagcagtaagaaaggctacgcagtctccagttaccttccaaaaaggctctaatgctccgtgtcatagtctgcagcatacaaaaaaacatggaagtgctgggcttgcacctcaaaccaagcaggtgtgtgtagagtatgaaagagaggagactgtggtgagtccctggacgataccttcagaaatccataagattcttcatgagagtcacaattcccttctacaagacttgtctccaactgaagaggaagagccagagcatccttttggggtgggcggtgtggacagcgtgtctgagagcactggcagcatcctcagcaagctggactggaatgccatcgaagacatggtggccagcgtggaggaccagggcctgtctgtccactgggccctggacctgtaagacctggatatcattgggtttccatgcacaggccagcacctcagtaatgtggttctgaaagattaacaggtttaagggacagaagcaatgaaagaagcaatgtgaattttccatttgctttcatattattacctggattagccattaccagaggaaaaataaacatttctcagtaactttgcctttatggggaaagggttgactattgatgtattatatgtttttgtatttgatgcatcattaggcataatttttaaaatgataagtacctttcaagccaagtttgcataacctactttcaataaaaaccctctatcttgcctcctcctttattaccctctgagttttgagaaacaaccatatacagatgaatctaataggaaaaaaaaaaatcttttcattgagaagaaaatcagtctcacctgagaactcaattatgaaccctattttaaaacacctatgcagggtttagcctaggagtgaaaagaaaaaccaactaccttttaccaaccctgaatctctaaataagcaaagtttcatggaggccaggagatcttctgtcttctgccctgtagcctgaagccttggaggaagaaacaggaatggatgctttgggcaggaaagtaagggaatatgactccggcctctagaaggctcatcttaaatttgtaagaaccatggtacagagacctgattagtttttggtattgtgctccaataatgtcatagttttaagagataatttttatgagaattgactaagaaccagtatccttcaactacttcatcaatgtttggtataatataaaagcacactatcatctgaaaaagctattaaatacccctctttttccaaatatctacctgtgtgaagccaggttttacaacatgtattgcagcaagttgaatgcagaagcaggtatggtaattcagctgccttctatcaagctaaacattaaagagatttgtagaactataaaacaatgctactctccttaccaaattgttttagaaaatagctttataggctaacattattgttaattgtcatttaattgttttgtcatttaaaatattttaaattgttttctgttagtttcttttttgtatattctatgggtattttattgatacatgatagttgtacatttttatggggtgcatgtgatattttgatatgtgcatacaatgtgtagcaatcaaatcagggtaattgggatattcatcacctcaaacatttatcatttatttgtgttggaaacattcaaaccttttcttctagctatttatccattgttggatacttatatcaattctatatcttagctgttgtgaatagagctgcaataaatgtaggagtgcagatatctcttt

SEQ ID NO: 213951 - DNA, 9594 bp, Artificial Sequence
  derived and/or modified sequence
atggagatcagactggagatcctgaccagcaccggcatcaagcagaagaagccctggcccagagtgagctggctgggcaaggagaaggaggccgtgttcctgctggacgacaagttcatcaacgagatcaacctgctgagcggcaagatcaagaagaagatccccagcctgcagcccttcctgaaggacgtgatcgtgctgaccaccagcagcaacgacgcctggctggccggcgtgctgaccaccggcgagctgttcctgtggaacaaggaccaggactgcctgaagaccatccccatcaccgagaagcccaaggagatgatcaaggccaccgtggccagcagcctgagactgtacctgtacgtgagcggcaacggcaagagaatcgtgctgatcacccccagcggctgcatcttcctgtgggagtacctggagctgaagaacatcctgagcagcaagagcctgagcctggccggcagatggagccaggtgatccccgaggaggccgtgctgctgcccagcaccgaggacaaggaggccgtggtgaacgccgtgttcatcaagaacgagctgttcggcgactgctgcctgtgcagcttcaccttctacagcggcgagtgcctgaagctgaccttcctggccatcagatggcacgagaacgtgttcaccagcgtgagaagcctgccctaccacgtgcactgggcccagcaggactgccacctgtgcagcctgatccccaagtgcgagagcgtgaagagcagaggcgccctgatcagcgccttcagcagagacggcctgaccctggccgtgaccctgaaccagaaggaccccaaggccacccaggtgctgttcatcaacaccctgaacttcgtgaccctgtgcggcagcctgaagggctgcagcaacaagagccccgtggtgcccgccaccctgatcagaagctactgggtgggcgacatcagctggacccacgacagcctgttcctggcctgcatgctgaagagaggcagcctggtgctgctgacctgccagggcgagctgctgaccctgatcaccttcggctgcagcatcgagttcggccccgccgagttcatccccctgcaccccctgatcacctacagaccccagcagttcaccttccaggacagcaacaacagcgtggacagcagcgccagcgacagcgaccccatgagacagagattcagcatcaaggcccacagcagactgccctacctggtgatcagcgacggctacatggtgaccaccctgagattcctggacagcctgagccccagcgtgcacatgagaagcctgctgctggacagcacccagagactggagaagatctaccagagcgtgatcctgagcaagcccaagggcaagggcctgaacctgagaagcctgaacagcctgagaagcagcctgctggagcaccagggcaacgagagcagcgccgacttcaccgtgcccaagttcctgcaggccgaggagaccatcaacgagaacgccgccgacttccaggacttcgaggccgaggagaccaacgagggcagacacttccccgacaacctgtgccccttctggaacaagagagacgacgtgctgtgcagcagcatgaaggagggcagactggagttcgccagcatgttcgacaccatccacgccaaggacgacagcgaggagaccgacagaaccatcaccgagctgcacagcatccagaagagcctgctggccgcctggaccatcggcatcagcaagaccgtgaccgagaagaacctgatgctgaactacatcgtggtgtgcatcacccacttcttctacatcctgcagttcatcaagtgccccttccccaagctggacctggtgctgagcaagagcagcagacacaacgcctggatcctgtgcatcttccagctgttccaccagtgcctgagcatccactactgggacatcagatacaagcaggacgtgggccacctgatcaagctgaccagcaacaccgtgaagctgctgctgacccagcagcagaagggccagctgttcagcgagaagctgctggcctgcttctacctgctgaagatggtggccgacaacctgaacggcgtgtacatcctgcagcccgaggtgatcagcgccagcgccgacggcagcaagatcaccgcccaggacagcctggtggtgcccatcttccagatgttccaggacagcggcttccagaagaactggagctggaacagcttcttcaagatccacccccaggtggtgaaccccgtgcagcagcccggccacagactgctgatcctgtggagaatcctgtacaagaagaccctgtggtaccaggcccagctgaacagaagagtgcccgaggccgacagccagctgaccgagaagatgacccacgaggccagcaccgtgaagagcctgctgtgccacctgcaggccaacctgcagagcaccggcgactgcctgaaccagaccctggagctgaagagcatcaacggcgaggagtgcttcctgctgggcagctacgagaagagcgtgcagctgtggaagaaggccctgcaggagatcgaggagaagggcggcagaagaacctacttcctgcagatcagatactacctgagcctgctgtactgccacctgtacagctacaacctgaacgacgcccagggcctgtgcgaccagctggccagagagatcctgagatggagccagctgcccgtgaaggagaacaaggacttcagcggcgccgccaagagccacttcgagtgcggcatggtgggcggcgtgcaccccgaggccgccgtgagagtggtgcagagcatggccagattcatggccgcctacttcaccaaccagcagctgtgcatcctgcccccccaccacgtgaacgtgctgccccccctgcacatcaagaccgagcagagcttcagactgatccccctgcagcacagcaaggtggccagcgtggtgagagaccagaacctgagcaacgtgtggaccgtggagtacgccctggagctgctgttcatcggcggcctggtgcccgaggccgtgtggctggcctacaagctgggcgactggaagaccagcgtgagcatcggcgtggccttccagctgttctgcaagagagacagcaacttcatgagaagcaagaagaagagcctgaacctgcccctgagaatgacccccgcccagatcttccaggagaagctgcagtgcgtgctgggccagcccgccagcctggaggccaagaacgagatgggcagcaagtacaagcagttcaccgaccccatcgaggaggaggacgccaacctgctgttcggcagcgtgcaggaggtgctgaaggccagcgtgatggccgacgccgacatcctgagcgagaccttccagctgctgatcgacagcgccaaggacttcagcaagagactgtggggcctggtgcccttcggcctgtacctgcccgccccccccctgtactgcccccagcccgccatcctgagcgaggaggacggcgacgacctgctgctgaaggccgagaagaacaacagacagaaggtgagcggcatcctgcagagagtgctgctgctgttcagagccgcccagtgcagcttccccgtggcccagtggtacatcctgcagctgagatgggccagaaaggtgatgcagaagatcagaatgaagggcagcctgcccagcctgagccccttcccccagagcctgctgaactactgcaagggcggcatcgccttcttcagacccggcgccgccggcgaccacaagctggacgaggtgagcatcagagccatcggctgcttcagagagctgtgcgccctgtgctggatgctgcacgtgagagacaagctgagctacagctgcagacagtaccagaaggccagagagaacgtgaagggcgagaaggacctggaggtggagttcgacagctgcatgatcgagcactgcctgagcgccgtggagtgggcctacagaatgctgcccttcagcagattcttcaacatggaggagctgatccaggacatcatcctgagcctgatcggcgagctgccccccatcagaaaggtggccgagatcttcgtgaaggccttcccctaccccgaggacgtgagagtgcccctgagagacaagtaccacagcctgcaccagagactgagacactgcgtggtgaagggcccccagaccgaggagatgatgagcgtggtgatgcacagcatccagaaggtgagagtgaaggccctgaagagagtgcagagaaacatcggcagcttcgaggtgaacatctgggagcccatcgaggaggagaagcccgacgaggcccccggcgtggacagatacagcctgggcaccagcctgagcagaagcaccctgaccgagctgggcgacagcgtggtgcacagcgacgccgacaccttcagcgaggccctgagcgtggaggagaagagcagaatcaacatctaccagagaaacgcccccaaccacatggagctgaccagcatccacaagcccaccgacaagagaaagatgtgcaaccagaaggagaaccccaccaagaaggaggaccacgagaagctgagccagaacaccctgcccgtgatcggcgtgtgggagttcgagagagacgacgacgagtacatcaagttcctggacctgttcctgagctacatcctggagagagacctgccctacagcagagacgccgacatccccttcctgaccagcttcagcggcaagctgagagagcacgagctgaacagcctgctgttcgacgtgcacaccaccctgaagagacaccagagcaagaccaagagccagaacgtgttcagagccggcagctgcttcgtggtggcccccgagagctacgagagcgagaagagcagcagcctgaacgacgagtacggcatgcacctggagaaccagaagctgagcagcagcgtgctggtgaaccagggcatcaagcccttcctgcagtaccccagcaacgaggtgaacaagaacgagggcatgagcggcctgttcggcctgaagcagagaagcatctacaagatccaggacgacaccagagagaagtgcctgatccagagaagcagcaaccacatcttctggacccccaagagcatcaagaccagaagatgcatcttcaaggccatccagtgcaacgacatcaacccccaggaggacctgcccctggccctgaacaccttcggcagcatcggcagactgctggagtggatgatcagatggagcaacagaagactgctgtgcgacagcggcatcaccgagagcagcagcgagtacagccccgtgatcagagtgaagaccagcaccgccgccatcctgaccagcctgtggctgctggagcagccctacttcgccacctacaaggccaagaacgccatcatcaagatggtggagaacagagacaccggctgccagatcggccccaacatcgagagagagagcaagagcgacgccggcggcagcgtggccgtggccacccccggcggcaccgaggagagaaacggccagaacaagagctgccagaacatcctgaacagaatgcccaccgaggccaagaaccccgacatcaaggagatcaacgacgacatcatcagcatcacccacaacaccaagaaggagttcatcgacatcgacgagaacctgctggaggtggaggccttcaccgaggaggagatggacatgcacatcagcgactacgaggaggacatcgaggagagcgtgggcggcttcagaagccccagcctggccatctgcatgatgaccctgccccagcagctggaggaggagttcaccgaggaggtgcagtgccagagagaggagcccctggagaccatcatggaggagaagagcaccgagcagaagggcatgatcgaggccttcagccaccccggccacaccaccccccagagcatgcaggtggacaccagcagcgagatcagcagcgcccagatcagcacctacaaggagaagagcagcagcgtgcccctgctgatcagcaacggcgtgaacgtggccagccagccccccgcccccaccccccagaagacccagagaaacgagttcaccgcccagctgcccgactgcagcgagagcgtgagacagatgctgcaggacgagatgttcaagctggtgcagctgcagcagatcaacttcatgagcctgatgcagatcgtgggcagcagcttcgccaacctgcccgacacccagcagctggtgcagcagagccagagcgtgcacctgggcgagagccaggagagcaacctgagaggctgcggcgacgtggaggacagcaacaagaacctgaaggagagattcttcatcaagccccagagcatgggcgagaacgccagagagcccagaaagaacagcccccactgccacgagggcaccatccccagcggccagaacagcaccggcaacgtgcagaacgtgccccacggcagcatccccctgtgccagctgaacggccagcccagaaagaagggccccatccccagcagccagaacctgcccagcaccagcttctaccccgcccccgccggcaacacccacctgtacctgctgagcacccccagcgtggtgcagaaggcccccagactgatcccccacgccaagaccttcagccccggcgacggcttccccctgctgcagttcaagagcaagcaggagttccagcccctgttcctgcacaccggcagcatcccccaggtgcccttcagacccctgccccagcccagagaggcctggggcctgagcgacagcttccagcccgccctgccccagagagccgcccagaccacccccgccagccacctgaacgtgagccagtacaacaccgaggccagaaagaaggaggtggagcagaagacctgggccgagaccgtgatcaccgagatccccaaccacgtgaacctggaccagtacgtgggccaggagaacctgaccccccagcaggacagcagcgtgttcatcaagcccgagaagctgttcgacgtgaagcccggcaccctggagatcagcccccaccacagcttcggcctgcccctgctgtacctgcccctgaagccccccaacatgttccccagcaccagcagagccagcatcaccgtgcccagcacccccatccagcccatcgccgaggagagaaagtaccccagactgagcctgctgcacagccacctgagccccgagaacagatgcaagaagacccagctgatccccctggagaacctgatcgccttcaagcagagccagcagaagctgacccacaacctgttcgagcagggcgacgccggccacctgcagctgctgaaggtgaagatcgagccccccgaggtgagacagggcaaggacagcaagaagagacagagaagaagagccgagaaggagctgcaggagaagagatgcgagaagctgagaagaaagcccaacgtgaccttcagacccgagaacagcatcatcaacaacgacgacagcgagatcatcaagaagcccaaggagcagcaggagcactgcggcagccaccccctggacgacttcgacgtgcccttcgagatgctgcaggacgacaacaccagcgccggcctgcacttcatggccagcgtgaagaagaaggccatcggcagccaggacgccagcaccaacaccgaccccgagcacgagcccctgaccgccccccagctgctggtgcccgacgtgtacctgaacctgaagctgagcagcgagatgagcgagaagccctggagccccagcatcccccacaccgtgaccaacctggagctgcccgtgagagaggagcccagcaacgacaacgtgatcaagcagcagagcgaccacctggccgtgcccagcagcgccgagctgcactacatggccgccagcgtgaccaacgccgtgcccccccacaacttcaagagccagggcctgcccaagcccgagttcagattcaagggccagagcaccaagagcgacagcgccgaggactacctgctgtggaagagactgcagggcgtgagcgccgcctgccccgcccccagcagcgccgcccaccagctggagcacctgagcgccaagctgcagaagatcgacgagcagctgctggccatccagaacatcgccgagaacatcgagcaggacttccccaagcccgagatgctggacctgcactgcgacaagatcggccccgtggaccacatcgagttcagcagcggccccgagttcaagaagaccctggccagcaagaccatcagcatcagcgaggaggtgagattcctgacccacatggacgaggaggaccagagcgacaagaaggagaccagcgagcccgagttcagcatcaccgagaactacagcggccagaagacctgcgtgttccccaccgccgacagcgccgtgagcctgagcagcagcagcgaccagaacaccaccagccccggcatgaacagcagcgacgagctgtgcgagagcgtgagcgtgcaccccctgcagatgaccggcctgaccgacatcgccgacatcatcgacgacctgatcatcaaggacggcgtgagcagcgaggagctgggcctgaccgagcaggccatgggcaccagcagaatccagcactacagcggcagacacagccagagaaccgacaaggagagaagagagatccaggcctggatgaagagaaagagaaaggagagaatggccaagtacctgaacgagctggccgagaagagaggccaggagcacgaccccttctgccccagaagcaaccccctgtacatgaccagcagagagatcagactgagacagaagatgaagcacgagaaggacagactgctgctgagcgagcactacagcagaagaatcagccaggcctacggcctgatgaacgagctgctgagcgagagcgtgcagctgcccaccctgccccagaagcccctgcccaacaagcccagccccacccagagcagcagctgccagcactgccccagccccagaggcgagaaccagcacggccacagcttcctgatcaacagacccggcaaggtgaagtacatgagcaagcccagctacatccacaagagaaagagcttcggccagccccagggcagcccctggccccacggcaccgccaccttcaccatccagaagaaggccggcggcgccaaggccgccgtgagaaaggccacccagagccccgtgaccttccagaagggcagcaacgccccctgccacagcctgcagcacaccaagaagcacggcagcgccggcctggccccccagaccaagcaggtgtgcgtggagtacgagagagaggagaccgtggtgagcccctggaccatccccagcgagatccacaagatcctgcacgagagccacaacagcctgctgcaggacctgagccccaccgaggaggaggagcccgagcaccccttcggcgtgggcggcgtggacagcgtgagcgagagcaccggcagcatcctgagcaagctggactggaacgccatcgaggacatggtggccagcgtggaggaccagggcctgagcgtgcactgggccctggacctgtag

SEQ ID NO: 213952 - DNA, 9594 bp, Artificial Sequence
  derived and/or modified sequence
atggaaatcagattagaaatcctgaccagcactggcatcaagcagaagaaaccctggccccgcgtcagctggttaggcaaggaaaaagaagccgttttcctactggatgacaagttcatcaacgagataaaccttttgtccggtaagattaaaaaaaagattccttcgctgcagcctttcctgaaggacgtcatcgtgttaacaacttcatccaatgacgcttggctggcaggagtactgaccaccggggaactgttcctgtggaataaagatcaggactgtctgaagactatccctattacagaaaaacctaaagagatgattaaggccacagtggcctcttctttacgactgtatctttatgtctcggggaacggtaaacggatagtcctaatcaccccgtctgggtgcatctttctctgggagtacctcgagctaaagaatatcctgtcctctaaatccctgtctctggcagggcggtggtctcaggttatccctgaagaggccgttctgctgccttcaactgaggataaggaagccgtggtcaatgccgtcttcattaaaaatgaactgtttggagactgctgcctgtgctcttttacgttctacagcggcgaatgtcttaaactgacattcttggcaatacgctggcatgagaacgtttttacatcagtgcggagcctgccatatcatgttcattgggcccagcaagactgccatctctgctctctgatccctaaatgtgagtcagtgaaatcccgtggagctctgatttccgcctttagtagagatgggctgaccctcgcagttactctgaatcagaaagacccgaaggccactcaggtgctgttcatcaacactctcaattttgtgacattgtgtggctcactgaaaggttgcagcaataagagtccagtagttcccgctaccctgatacgatcttactgggtgggagacataagttggacacacgacagcttattcctggcatgtatgctgaagcgtggtagtctcgtgctcctcacctgccagggagagcttctgaccctcattacattcgggtgcagcattgaattcggcccagccgagtttatccctttgcaccccctgatcacttaccggcctcagcaatttaccttccaagattcaaataactccgtggatagctccgcttcagactctgatcctatgaggcagcggttcagcatcaaggcccactctagattgccgtatctggtgataagtgatggatatatggttacgaccctccgctttctggactccctgtctccgtctgtccatatgcgtagtttgcttttagattccacgcagcgactagagaagatttaccaatccgtcatcctgagcaagcccaagggcaagggcttaaacctcaggagcctcaatagtttgcggagctctctgttagagcatcaaggaaacgaatcttcggctgatttcactgtgccaaagtttctgcaggctgaggagactattaacgagaatgctgccgatttccaggacttcgaagccgaggagacaaatgaggggcggcatttccctgacaatctttgccccttttggaacaagcgggatgatgtgttatgtagctccatgaaagagggccgcctagagtttgcaagcatgtttgatacaattcatgcaaaggatgactctgaggaaacggaccgcacgattactgagctgcacagcatccagaagagtctgctagctgcctggacgatcggcatatctaagacagtgaccgaaaagaacctaatgttaaattatattgtggtgtgcattacacattttttctatatcctgcagttcatcaaatgcccgtttcctaagctcgatctcgtactgtctaaaagcagtcgtcacaacgcttggatactttgcatttttcaactttttcatcagtgtctttccatccactactgggacataaggtacaaacaggatgttggtcacttaatcaaattgaccagtaataccgtgaagctgttgctgacacaacaacagaagggccaactctttagcgaaaagcttctggcatgtttttatcttttgaagatggtggccgacaacctcaacggagtatatatcttgcagccagaggtgatttcagccagtgcggacggatccaaaatcacagctcaggactcactcgtcgtgcccatcttccagatgttccaggactcaggtttccagaagaattggtcttggaattcattttttaaaatccacccccaggtcgtgaatccagtgcagcagccaggccaccggctcttaattttgtggaggatactctacaagaaaactctgtggtaccaggctcagctcaatcgaagggttcctgaagccgactcccagcttaccgagaaaatgacgcacgaagctagcacagtaaagtccctgctctgtcacctgcaagctaacctgcagtcaaccggagactgcctgaatcagacccttgaattgaagagcatcaacggcgaggaatgttttttactcgggtcatatgagaagtctgtgcaactgtggaaaaaagccctgcaggaaatcgaggaaaagggaggccggcggacatactttctgcagatcagatattacttatccctattgtattgtcacttgtacagctacaatctgaacgacgcacaaggcctttgtgatcagctggccagagagattctgagatggtcacagctgcccgtaaaagagaacaaagacttctctggcgccgctaagagccacttcgagtgtggaatggtgggaggggtgcatcccgaggccgcagtgcgggtggttcagtccatggcccgattcatggctgcttattttaccaaccagcagctttgtatactaccccctcaccacgtgaatgtgttgcctcctttacacattaaaactgaacagtcttttcgactgatccctctgcagcattcgaaagtggcaagcgtcgtccgggaccagaacctctccaatgtgtggaccgtggaatacgctcttgagctgctattcataggcggtcttgtcccagaagcagtctggcttgcgtataaactgggagactggaagacatccgtgtcaataggggttgcttttcagctgttttgtaagagagatagtaattttatgcggagcaaaaaaaagtccctgaatctgcccttacggatgactcctgcccagatcttccaggagaagctgcagtgcgttcttggtcagcccgcgagccttgaggcgaagaacgagatggggagcaagtataaacagttcaccgaccccatagaagaagaggatgccaacctgctttttgggtccgtgcaggaagtgcttaaagcctcggttatggcagatgctgatatcctgtccgagactttccagctactgatagacagtgctaaagatttctcaaagcggctgtgggggctggtgcctttcgggctatatctgcccgcacctcccctgtattgcccacagcccgcaattttaagcgaggaggacggagacgatctgctgctaaaggctgagaaaaacaatcggcaaaaggtgagcggaatcctgcagcgcgtactactgctgttccgggccgcacagtgcagcttcccagtggctcaatggtacattctacagctgcgctgggccagaaaagtaatgcagaagattcggatgaaggggagcctgcctagcctctcgccctttccccagtcgctgctcaactattgcaagggcgggatcgcattctttcggcctggcgccgcgggtgatcataagctggatgaagtcagtattcgggccatcggttgctttcgggaactttgtgcactatgttggatgctgcacgtacgagacaaattgtcatatagctgccggcagtatcagaaggcgcgagaaaacgtgaagggagagaaggatttggaggtggagttcgatagctgtatgatcgagcactgcttgtctgccgtggaatgggcttaccgaatgctacccttcagtaggttctttaacatggaagagctgatccaagacattatacttagcctgatcggtgagctgccccccattcgcaaggtcgcggaaattttcgttaaggcgttcccgtatcccgaagacgtgagagtgccgctgcgtgacaagtatcacagtcttcatcagcggctgaggcattgcgtggtgaaaggccctcaaacagaggaaatgatgtcagtggtaatgcactccatccaaaaagtcagagttaaagccctgaagcgagtgcaacggaatattgggtcatttgaagttaacatttgggagcccattgaggaagagaagcccgacgaagcccctggtgtggacaggtacagcctggggactagcctgtctcgaagcacactcactgaactgggtgatagcgtagtgcactccgatgccgatactttctccgaggccttgagtgttgaagagaaatcaagaatcaatatctaccaaaggaatgcacctaatcacatggagctgacgtctatacacaagccaaccgataagcgtaagatgtgtaatcagaaagagaatcccaccaagaaagaggatcacgaaaaactgtcacagaacacattacctgtaataggtgtgtgggaattcgagcgagatgatgatgagtacattaagttcctggacttattcctctcatacattttggaaagggatctgccatatagccgcgacgccgatattcccttccttaccagtttcagtggaaagctgagagaacatgaactgaactcactcctctttgacgtacacactacacttaagcgccatcagtccaaaaccaagtcccagaatgtcttccgtgccgggtcatgttttgtcgttgctcccgagagttacgagtccgaaaaatcttcctcattgaatgatgaatacgggatgcatctcgagaaccagaaactctcttcgagtgtgctcgttaaccaggggataaagccctttttgcagtacccttccaatgaagtgaataaaaacgaggggatgtcaggcctgttcggtttaaagcagaggagtatatacaaaatccaggatgataccagggaaaagtgtctaattcagagaagcagcaatcatatcttctggacacctaaatccattaagacaaggaggtgtatattcaaggctattcagtgtaacgatatcaatcctcaagaagacctgcctttggcgctgaacacttttggatccatcgggaggctgttggaatggatgatccggtggagtaaccgtcgactactttgtgactctggcattaccgaaagtagctcagagtattcacctgtcattcgcgtcaagacaagcacggccgcgatcctgacttccctgtggttattggagcaaccctattttgccacctataaggctaaaaacgccatcattaaaatggtcgaaaacagggacacggggtgtcagatcggtccgaacattgaacgggagagtaagtcggatgctgggggctccgtcgccgtggccacccctggtggcacagaggaacggaatgggcagaataagtcgtgtcagaacattttaaatcggatgccaacagaggcaaaaaatcccgatattaaagaaattaacgacgacataatatctatcacacacaacaccaaaaaggagtttatcgatatcgatgagaacctgttggaggtcgaagcctttacagaggaggaaatggacatgcatatcagtgactacgaggaagacattgaggagtccgtgggcggcttccgcagtcccagcctagccatctgtatgatgacacttccacaacagcttgaggaggaatttaccgaagaggtgcagtgccagagggaggaacccctcgaaaccatcatggaagaaaagagcacagaacagaaggggatgatagaagcatttagtcaccctggacacaccaccccccagagcatgcaggttgatacaagtagcgagatcagcagtgcacagatctccacttataaggaaaagtctagcagtgtgccactactcatcagcaacggagtcaacgtggcttcacagcctcccgcccctactcctcaaaaaacccagcgcaatgaattcactgcccagctgcccgattgttcagagtcagtacgtcagatgctgcaggacgagatgtttaagttggtacagctgcaacaaatcaattttatgtccttgatgcagattgttggtagcagcttcgctaatctgcccgacactcaacagctggtgcagcaatctcagtccgtccacctcggggagagtcaggaaagtaacctcagggggtgcggcgacgtggaagacagtaataagaatttgaaagaacgtttcttcatcaaaccccagagtatgggcgagaatgcacgcgagcctagaaagaatagtccccactgccatgaaggcacaatcccaagtggacagaattctactggaaacgtccagaacgttccccacggcagcatccccctttgccagctgaatggccagccccggaagaaggggccgattccttcctcacaaaacttacctagcacctccttctaccctgcaccagccggaaacacccatctgtacctcctttcgaccccgagcgtagtacagaaggcaccgagactgattccccacgctaagactttcagccctggcgacggctttccattactccaattcaaaagcaaacaggaattccagcccttgttcttgcacacgggctcaattccccaggtcccatttagaccactgccgcagcctagagaggcgtggggtctcagtgatagtttccagccagctctgccccagcgcgctgcccagaccactccagcaagccacctgaacgtgtcccaatataacacggaagcaaggaaaaaagaggtggagcaaaagacatgggcagaaaccgtgattaccgagatccctaaccacgtgaatctggaccaatacgttggccaggagaatttgactccccagcaagacagctccgtcttcatcaagccagaaaagctgtttgatgtgaaaccaggcacactagaaatctcccctcatcacagtttcgggttaccactcctgtacctgcccttgaagcctcctaatatgttccccagcacctccagagcttcaatcacagtcccctccaccccgattcaacccatagctgaagagagaaagtatccccgcctaagcctgcttcactcgcacctgtcaccagagaaccggtgtaagaaaacccaactgattcctctagaaaacttaatcgccttcaagcagagtcaacagaaactgacccacaatctcttcgagcagggagatgccggacacctacagctgctgaaggtgaaaatagaaccacctgaggtcagacagggaaaggactccaaaaagaggcagagacggagagccgagaaagaacttcaggagaagcgctgtgaaaagctgagaagaaagccgaatgttactttcagacccgagaacagcattatcaataacgacgacagcgaaatcatcaagaagccaaaggagcagcaagagcattgtggtagccatcccctggacgatttcgatgtgccatttgaaatgctacaggacgataatacatcagctggattacatttcatggcaagtgttaagaaaaaggcgatcggatcacaagatgcaagtacgaacacggaccctgagcacgagccactgaccgccccacaactcttggtgccagatgtatacctaaatctgaagctctcctccgagatgtctgaaaagccgtggtcacccagcataccccacactgttaccaatctggagttgccagtgagggaggagccgagcaacgacaacgttataaaacaacagtccgaccacctggcagttccttcgtcagccgaattgcactacatggccgccagcgtcacaaacgctgtccctccgcataactttaagtcgcagggactgccaaaacccgagttccggttcaaggggcaatccaccaagtcagattccgctgaagactatctattatggaaacgattgcaaggtgtgtccgccgcctgtccagcgccttccagcgccgcacaccagcttgaacacctcagcgcaaagctccagaagatcgacgaacagctgctagctatccagaatattgctgaaaatatcgaacaagattttcctaagcccgaaatgctagatctgcactgtgataagataggccccgtcgaccacatagaattctcttctggacccgagttcaaaaaaacactggccagcaagaccattagtatcagtgaagaagtccggttcctcacacatatggacgaggaggaccagagtgacaagaaagagaccagcgaaccagaattctcaatcactgagaattattctggacagaagacttgtgtttttccaacagcagatagtgctgtgagcttgagcagctccagtgatcagaacactacatcccctggcatgaattccagcgatgagttgtgtgaaagcgtttcggtgcacccgttgcagatgacaggactaacagacattgcggatatcattgatgatttgataattaaggacggcgtctcctctgaggaattgggtctgaccgaacaagctatggggaccagccggatccaacactactcagggcggcacagccagcggaccgataaagagaggcgggagattcaggcctggatgaaacgcaaacggaaagaacgtatggccaagtatttgaatgagctggctgaaaaaaggggccaggaacacgatcccttctgtccacgttctaacccattgtatatgacgtctagagagatccgattgagacagaaaatgaagcatgaaaaggaccgcctgctgctctcagagcactattcccgccgcattagtcaggcttacggacttatgaatgagttactgtccgagtctgtgcaattgcctacactcccgcagaaacccctgccaaataaaccgtcccctacacagtcttcaagttgtcagcactgtccctcacctaggggggagaatcagcacggccatagctttcttataaacagacctgggaaagtgaagtacatgtcaaagccctcttacattcataaaaggaagagcttcggccaaccccagggaagtccatggcctcacggaactgctacttttacaatccagaagaaggcaggaggggctaaagctgctgtgcggaaggctacccaaagccccgtgacatttcagaagggctctaatgccccttgtcactctctacagcacaccaagaagcatgggtctgccggccttgccccccagactaagcaagtatgcgtggagtatgagcgggaggaaactgtcgtgagcccatggaccatcccctccgaaatccacaagattctccatgagtcacataactcccttctgcaggacctctcccctactgaggaagaggagcccgaacatccttttggggtcggaggagtcgactctgtgagcgaaagtactggctctattctgtccaaacttgattggaacgccattgaagacatggtggcctccgtggaagaccagggattatcggtccactgggctctggacctctag

SEQ ID NO: 213953 - DNA, 9594 bp, Artificial Sequence
  derived and/or modified sequence
atggagatcaggttggaaattttgacttcgaccgggatcaagcagaagaagccctggccacgcgtgtcttggcttggtaaggaaaaggaggcagtgtttttactggatgacaagtttattaacgagattaacctactctcagggaaaattaagaagaaaatccctagtttgcagcctttcctgaaagacgtcattgtccttactacaagctcaaacgacgcttggctggccggagtgctcaccactggtgagctgttcctctggaacaaagatcaagattgcctgaagaccatacccatcactgagaagcccaaagaaatgatcaaagcgaccgtcgcatccagcctgaggctttacctgtatgtgtctggtaacggtaaacgtatcgtccttatcactccttctgggtgtatctttctctgggagtatctggagctgaagaacattttgtcctctaagagtttgtctttagcaggtcgctggagccaagtaatccccgaggaagccgttctgctcccttcaacagaagacaaagaagcagttgtaaatgcagtgtttatcaaaaacgaactatttggagattgttgcctgtgctctttcactttttactcaggtgaatgccttaaattgacatttctagccatccgctggcacgagaatgtgttcacaagcgtgcgttccctcccttaccacgtacattgggcacagcaggactgtcatctgtgtagcttaattcccaaatgcgaatccgtgaagtcacggggagccctgatctctgctttttctagggacgggctgactttagctgtgactctgaatcagaaggaccctaaggctacccaggttctgtttattaatacgctcaactttgttacattatgcgggagcctgaaaggctgttccaacaaatctccggtggtgccagctaccctgattaggagctattgggtcggcgatatctcgtggacccacgactcactgtttctagcttgtatgctaaagcgagggtcccttgttttactgacctgccagggggagctcctgaccctcataactttcgggtgctcgatcgagttcgggcccgctgaatttattccactgcaccccctgatcacttatagaccgcagcagttcacctttcaagactcgaacaactccgtcgattcttcagccagtgactctgatccaatgcgccagcgcttctcaataaaagctcatagtagactcccctatctagtaatatccgacggatatatggtgacaacgctgcggtttctcgattctctaagtccatctgtgcatatgcgctctctcctcctggactccactcagcggctggagaaaatttaccagtccgtcatcctatccaaacctaagggcaaaggactcaacctgcggagtctcaactcgctgaggagttccctactggaacatcagggaaatgaaagtagcgcagactttaccgttcccaagtttcttcaggcagaggagaccattaacgaaaacgccgctgatttccaggattttgaagcggaggaaaccaatgagggccgccactttcctgacaatctgtgccctttttggaacaagcgcgacgatgtcctgtgctcctccatgaaagaaggcaggctggagtttgcgagcatgtttgacaccatccacgcaaaagacgactccgaagagacggaccggacgatcacggaattgcactctatacagaaatctttactagccgcctggacaattggcatcagtaagacagtcacagaaaagaatttaatgctaaactacatcgttgtgtgtatcacccattttttttatattctgcagtttatcaaatgcccgttccccaagctggacctcgtgctgagtaaaagctcccgccataatgcttggatcttgtgcatttttcagctcttccaccagtgtcttagcatccactactgggatattcggtataaacaggacgttggccatcttataaagctaacgtctaatactgttaaattactacttacgcagcagcaaaagggtcagctgttttctgagaaattgctggcttgcttctacctgctcaagatggtggctgacaatcttaatggcgtgtacatcctgcaaccagaggttatctctgcctctgccgacgggagtaagatcacagcgcaggacagcctcgtggtgcctattttccagatgttccaagactctggctttcagaaaaactggagctggaacagcttcttcaagattcacccacaggtggttaaccccgttcagcagccgggtcacaggctgctgattctttggagaatactgtataaaaagacgttgtggtaccaggcccagctcaatcgaagagttcctgaggccgatagccagctaacagagaaaatgacccatgaagcgtccacggtcaaatccctgctgtgtcacctgcaggccaacctgcagtccacaggggattgcctcaaccaaacactcgaactgaagagcatcaacggagaagagtgtttccttcttggatcttacgaaaagagtgtgcagctttggaaaaaagccttacaggagattgaagaaaaaggggggagacggacctattttttgcaaatccgctactatctgagcttgctgtattgtcatctctacagctacaacttgaatgatgcacagggactgtgcgaccaactcgcgcgtgagattctgaggtggtcgcagcttccagtcaaagagaataaagatttttccggcgccgccaaatcacattttgagtgcgggatggttgggggtgtgcatccagaagccgccgtccgggtcgttcagtctatggctagattcatggccgcatactttacaaatcagcaactgtgcatcctccccccacaccatgtcaatgtcctacccccgctccacattaaaaccgaacagagtttcaggcttatccccttgcagcattcaaaagtggctagtgtggtcagagatcagaacttatccaatgtttggacagtggagtatgccctggagctgctattcataggcggcttggtgccagaagcagtgtggctggcttataagttaggcgattggaaaacaagcgtcagcatcggggttgctttccagctcttctgtaagcgggactcgaactttatgaggtctaagaagaaaagtttaaatctgcccctacggatgaccccagcccagattttccaggagaagcttcagtgcgtcctgggtcagcctgcctccctggaagctaagaatgagatgggatctaagtacaagcagttcacggaccctatcgaagaagaggatgcaaatctgctctttgggtcggtccaagaagtgctgaaggcctctgtcatggcagatgccgacatcttgtccgaaactttccagttactcattgactcagccaaggatttcagcaagcgtttgtggggtctcgtccctttcggtctctatttgccagccccccccctttactgcccccagcctgccattctgagtgaggaagacggcgatgatctgctcttgaaggctgaaaagaacaatcggcagaaggtgtctgggatcctgcagcgggtactgttgctctttagggccgctcaatgtagttttcccgtagcccagtggtatatcttgcagcttaggtgggccaggaaggttatgcagaagataaggatgaagggctccctcccaagtctgtcccctttccctcaatccctgttgaattattgcaaggggggaatcgcctttttccggccgggagctgcgggtgatcataagctcgatgaagtcagcatccgagcgatcggctgcttccgagagttgtgcgcactctgttggatgcttcatgtgagggataagctcagttattcctgtaggcagtaccagaaagccagggaaaacgtgaagggggagaaggaccttgaagtagagtttgacagctgcatgatcgagcattgtttgagcgctgtcgaatgggcctaccgaatgctccctttcagcagattcttcaacatggaggagttaattcaagacatcattctgtccttaatcggcgaactaccgcctattcgcaaggtggcagagatcttcgtgaaggcctttccctaccctgaagacgtccgcgtaccattgagagacaaataccactctctacaccagcggctgcgacactgcgtggtaaagggaccacaaacagaagaaatgatgtctgtcgtcatgcatagtattcaaaaagtccgggtgaaagccctgaaacgcgttcagcgaaatattggatcctttgaagtcaacatctgggaacctattgaggaggaaaaaccggacgaggccccaggagtcgatagatactccttgggaacatcgcttagcaggtcaaccctgacagagctgggtgacagtgtcgtccactctgacgccgacaccttcagcgaagccctcagtgtcgaagaaaaatctaggattaatatctaccagcggaatgccccgaaccatatggaactgacatctattcataaaccgacagacaaaagaaagatgtgcaatcagaaggagaatcccaccaagaaggaggatcatgaaaagctgtcacagaacactctcccagttattggcgtctgggagttcgaacgggacgatgacgagtatatcaaatttttggacttgttcctctcctatattctcgagcgcgatcttccttattctcgtgatgccgacatcccattcctgacgtctttctcaggaaagttgagagaacatgaactgaacagcctgctattcgacgtgcacacaaccctgaagcggcatcagtccaagacgaaaagccaaaacgtctttagagccggttcttgctttgtggttgcccctgagagctacgagtctgagaaatcctcctccctgaatgacgagtacggaatgcatcttgaaaaccagaaattgagtagcagcgttcttgtgaaccagggtataaaaccgtttttacaatatccatccaatgaagttaacaagaatgagggaatgtccggcctattcgggctcaaacagcgatctatttacaaaatacaggatgacacgagggagaaatgtctgatccagcggagctctaatcacattttttggacaccgaaaagtatcaagacccggcgctgcattttcaaggccatccaatgtaatgacataaatccacaggaggacctccctttggcactgaatacttttggtagcataggcaggcttctagaatggatgatcaggtggtccaaccggcgactcctttgcgactctggcatcaccgagtcttctagcgaatatagtccggtcattcgggttaagactagtactgcggccatcttgacatcactgtggttactcgaacagccatattttgctacttataaagccaaaaatgccatcataaagatggtggagaatcgggacacaggctgccagatagggcccaatatagaaagggaatcaaagagcgatgcgggcggcagcgtggcggtggcgaccccgggcggaaccgaagaacggaacgggcagaataaatcctgtcaaaatattcttaatcgaatgccgactgaggctaagaaccccgatattaaggagattaacgatgacattatctcaatcacccacaacacgaagaaagaatttatcgatattgacgagaacttattggaagtggaggctttcaccgaggaggagatggatatgcacatcagtgattacgaggaagacattgaggaatctgtgggggggttcagatcgcccagccttgctatctgcatgatgactctgccccaacagttggaagaagagttcacagaggaagtgcagtgccaaagggaagagccactggagactattatggaggaaaagagcactgaacagaaaggcatgattgaagctttttcgcacccaggccatactacccctcagtctatgcaggtcgataccagcagcgaaatatctagcgctcagatcagcacatataaagagaaatctagtagcgtcccactcctgatctccaatggagtgaacgtggcgagccagcctccagcacccaccccccagaaaacccagaggaatgagttcaccgcccaactgccagactgctcggagtccgtgagacagatgcttcaggatgagatgtttaaactggtgcaactgcagcaaattaatttcatgagcctgatgcagatcgtgggcagttccttcgctaaccttcctgacacccaacagttggttcaacagagccagagcgtgcatttgggggagagccaagaatctaacctgcggggctgcggggatgtggaggatagcaataaaaaccttaaagagcgattcttcatcaaaccccagtctatgggcgagaacgctagagagccccggaaaaacagccctcattgccatgagggtactattccctctggacaaaattccaccggcaatgtccagaacgtccctcacggatccatcccgctgtgccagctcaacggtcaaccacgcaagaagggtcctatccctagcagtcaaaatttaccgagcactagcttctatcctgcccctgctggcaacacccacctgtatctgttgagcactcccagtgtggtgcagaaagccccgcgactcatcccacatgccaagaccttctcccctggagacggcttcccgctgctccaatttaagtccaagcaggaatttcagcccctgttcctgcataccggttccatccctcaggtgccctttcgcccgctgccacagccgagagaggcctgggggctgagtgatagcttccagcccgcgctcccccagagagccgctcagacaacacccgccagccatctaaacgtgagtcaatataataccgaggcaagaaagaaggaagtcgaacagaaaacctgggctgagactgttataaccgagatcccaaatcatgtaaacttggatcagtatgtgggccaggagaatctgacaccgcagcaggactcctccgtgtttattaaacccgaaaagctgtttgacgtcaagcccggcacgctggagatctctccacaccacagttttggactcccccttctctatcttcctctcaagcctccgaatatgttcccttccacatccagagctagcattactgtccctagcactcccatccaacctattgccgaagagcgcaaatacccaaggctgtcacttctgcattcccacctgagtcccgaaaaccgatgtaaaaagacccagctgattccattggagaatctaatagcgtttaaacagagtcagcagaagctgacccacaacttgttcgagcagggtgatgccggacaccttcaactactcaaggtgaaaatcgaacccccggaagtgcgccaaggcaaagattcgaaaaaaagacagcgaagacgggctgagaaggagttgcaggagaaaagatgcgagaagctccgacgaaaacctaatgttacatttcgtccagaaaactcgattataaataacgacgattccgagattatcaaaaagcccaaggagcaacaggagcactgcggttcacatccactggacgatttcgatgtaccatttgaaatgttacaggatgacaacacaagtgccggtcttcattttatggcaagcgtcaagaagaaggccatcgggtcacaggatgcctcaaccaatacagacccagagcacgaaccgctcacagctcctcaacttcttgtgcctgatgtttacctcaacctcaaactgagtagtgagatgtccgagaagccctggagcccttctatcccacacacagtcacaaacctggagttgcccgtccgtgaagaaccctccaacgacaacgtgatcaagcagcagtctgatcaccttgcagtcccctcgagtgccgaactgcactatatggctgccagcgtcaccaacgcagttccaccacataactttaagtcacaagggctgccaaaaccggagtttcgatttaaggggcagtccaccaagtccgattcagccgaggactacttgctatggaaaaggctccaaggcgtcagcgcagcctgtcctgcgccctcttctgccgcacaccagctggagcacctgtcagctaagttgcagaaaatagacgaacaactcctggcaatccaaaatatcgctgaaaacatcgagcaggattttccaaaaccagagatgctggatcttcactgtgataagattggacctgtagaccatatagagtttagctctggaccagagttcaagaaaactttggcaagcaagacaatctccatcagcgaagaggtcagattcctgacccacatggacgaggaggatcagtccgataaaaaagaaaccagtgaaccggaattttctatcactgaaaattattccggccagaaaacctgcgttttccctacagccgactcggctgtgagccttagctctagctcagatcagaacactacctccccgggaatgaatagctccgatgaattgtgcgaatctgtgtctgttcaccctctccagatgacaggactaacagatatcgctgatataatcgatgacttgatcatcaaagacggagtgtcctccgaggaactgggcctgactgagcaggcaatgggcacatctcgcatacaacactatagcgggcggcattcacagaggacggataaggaaaggcgggaaattcaggcgtggatgaagcgcaagcgtaaggagaggatggctaaatacctgaatgaacttgccgagaagcgcggccaggaacacgatcctttctgccctcgttccaatcccctttacatgaccagccgggagatccggctacgccagaaaatgaagcatgaaaaggaccgcctgcttctcagcgagcactacagccgacgtataagtcaggcctacggtcttatgaacgagctcctgtctgaaagtgtgcagcttcccactctcccacagaagccactgccaaataaaccaagcccaactcagtccagctcctgccaacactgtcctagtcccaggggagagaatcagcacggccactcattcctgataaatcgacccgggaaagtgaagtacatgtctaaaccctcctacattcataaacgtaagagtttcgggcagccacaaggtagcccctggccccacggcactgcaacctttactatccagaaaaaagcaggaggtgcaaaggctgcagtgcgaaaggcaacccaaagccccgtgacatttcagaagggtagcaatgcaccttgccattccctgcagcacaccaagaaacacggttcagccggactggcgccccagaccaagcaggtgtgtgtagagtatgagagagaggagaccgtggtttccccctggactataccctccgagattcataagattcttcatgaaagtcacaactctcttcttcaggatctgagtccaacagaagaagaggagccggagcaccctttcggagtgggcggcgtggactccgtttcggagagcacagggagcattttgtccaagcttgattggaatgccattgaagacatggtcgcttcagtcgaggatcagggcctgagcgtccactgggctctggatctgtag

SEQ ID NO: 213954 - DNA, 9594 bp, Artificial Sequence
  derived and/or modified sequence
atggagatccggctggagatcctgaccagcacaggcatcaagcagaagaagccctggccccgggtgtcctggctgggcaaggagaaggaggccgtgttcctgctggatgacaagttcatcaatgagatcaacctgctgagcggcaagatcaagaagaagatccccagcctgcagcccttcctgaaggatgtgattgtgctgaccaccagcagcaatgatgcctggctggccggcgtgctgaccaccggggagctgttcctgtggaacaaggaccaggactgcctgaagaccatccccatcacagagaagcccaaggagatgatcaaggccaccgtggccagcagcctgcggctgtacctgtatgtgtctggaaatggcaagagaattgtgctgatcaccccatctggctgcatcttcctgtgggagtacctggagctgaagaacatcctgagcagcaagagcctgagcctggccggccgctggagccaggtgattcctgaggaggccgtgctgctgcccagcacagaggacaaggaggccgtggtgaatgctgtgttcatcaagaatgagctgtttggagactgctgcctgtgcagcttcaccttctacagcggggagtgcctgaagctgaccttcctggccatccgctggcatgaaaatgtgttcacctctgtgcgcagcctgccctaccacgtgcactgggcccagcaggactgccacctgtgcagcctcatccccaagtgtgagagcgtgaagagcagaggagccctgatcagcgccttcagcagagatggcctgaccctggccgtgaccctgaaccagaaggaccccaaggccacccaggtgctcttcatcaacaccctgaactttgtgaccctgtgtggcagcctgaagggctgcagcaacaagagccctgtggtgcctgccaccctcatccgcagctactgggtgggggacatctcctggacccatgacagcctcttcctggcctgcatgctgaagaggggcagcctggtgctgctgacctgccagggcgagctgctgaccctcatcaccttcggctgcagcattgaatttggacctgctgagttcatccccctgcaccccctcatcacctaccggccccagcagttcaccttccaggacagcaacaacagcgtggacagcagcgccagtgacagcgaccccatgaggcagcgcttcagcatcaaggcccacagccggctgccctacctggtgatcagtgatggctacatggtgaccaccctgcgcttcctggacagcctgagccccagcgtgcacatgaggagcctgctgctggacagcacccagaggctggagaagatctaccagagcgtcatcctgagcaagcccaagggcaagggcctgaacctgcggagcctgaacagcctgcggagcagcctgctggagcaccagggcaatgaaagcagcgctgacttcaccgtgcccaagttcctgcaggccgaggagaccatcaatgaaaatgctgctgacttccaggactttgaagctgaggagaccaatgaaggccgccacttcccagacaacctgtgccccttctggaacaagagagatgatgtgctgtgcagctccatgaaggagggccgcctggagtttgcctccatgtttgacaccatccacgccaaggatgattctgaggagacagacaggaccatcacagagctgcacagcatccagaagagcctgctggccgcctggaccatcggcatcagcaagacagtgacagagaagaacctgatgctgaactacatcgtggtgtgcatcacccacttcttctacatcctgcagttcatcaagtgccccttccccaagctggacctggtgctgagcaagagcagccgccacaatgcctggatcctgtgcatcttccagctgttccaccagtgcctgagcatccactactgggacatccgctacaagcaggatgtgggccacctgatcaagctgaccagcaacacagtgaagctgctgctgacccagcagcagaagggccagctgttcagcgagaagctgctggcctgcttctacctgctgaagatggtggccgacaacctgaatggagtgtacatcctgcagcctgaggtgatcagcgccagcgcagatggcagcaagatcacagcccaggacagcctggtggtgcccatcttccagatgttccaggacagcggcttccagaagaactggagctggaacagcttcttcaagatccacccccaggtggtgaaccctgtgcagcagcccggccaccggctgctgatcctgtggaggatcctgtacaagaagaccctgtggtaccaggcccagctgaacagaagagtgcctgaggccgacagccagctgacagagaagatgacccatgaggccagcacagtgaagagcctgctgtgccacctgcaggccaacctgcagagcactggagactgcctgaaccagaccctggagctgaagagcatcaatggagaggagtgcttcctgctgggcagctatgagaagtctgtgcagctgtggaagaaggccctgcaggagattgaggagaagggcggccgccgcacctacttcctgcagatccgctactacctgagcctgctgtactgccacctgtacagctacaacctgaatgatgcccagggcctgtgtgaccagctggcccgggagatcctgcgctggagccagctgcctgtgaaggagaacaaggacttctctggagctgccaagagccactttgaatgtggcatggtgggcggcgtgcaccctgaggccgctgtgcgggtggtgcagagcatggcccgcttcatggccgcctacttcaccaaccagcagctgtgcatcctgcccccccaccacgtgaatgtgctgccccccctgcacatcaagacagagcagagcttccgcctcatccccctgcagcacagcaaggtggcctctgtggtgcgggaccagaacctgagcaatgtgtggacagtggagtatgccctggagctgctcttcatcggcggcctggtgcctgaggccgtgtggctggcctacaagctgggggactggaagacctctgtgtccattggagtggccttccagctgttctgcaagagggacagcaacttcatgaggagcaagaagaagagcctgaacctgcccctgaggatgaccccagcccagatcttccaggagaagctgcagtgtgtgctgggccagcctgccagcctggaggccaagaatgagatgggcagcaagtacaagcagttcacagaccccatcgaggaggaggatgccaacctgctgtttggatctgtgcaggaggtgctgaaggcctctgtgatggctgatgctgacatcctgtctgagaccttccagctgctgattgacagcgccaaggacttcagcaagaggctgtggggcctggtgcccttcggcctgtacctgcctgccccacccctgtactgcccccagcctgccatcctgtctgaggaggatggagatgacctgctgctgaaggccgagaagaacaaccggcagaaggtgtctggcatcctgcagagggtgctgctgctcttccgggccgcccagtgcagcttccctgtggcccagtggtacatcctgcagctgcgctgggccaggaaggtgatgcagaagatccgcatgaagggcagcctgcccagcctgagccccttcccccagagcctgctgaactactgcaagggcggcatcgccttcttccggcctggagctgctggggaccacaagctggatgaggtgtccatccgggccatcggctgcttccgggagctgtgtgccctgtgctggatgctgcacgtgcgggacaagctgagctacagctgccggcagtaccagaaggccagagaaaatgtgaagggggagaaggacctggaggtggagtttgacagctgcatgattgagcactgcctgtctgctgtggagtgggcctacaggatgctgcccttcagccgcttcttcaacatggaggagctgatccaggacatcatcctgagcctcatcggggagctgccccccatcaggaaggtggccgagatctttgtgaaggccttcccctacccagaagatgtgcgggtgcccctgcgggacaagtaccacagcctgcaccagaggctgcggcactgtgtggtgaagggcccccagacagaggagatgatgtctgtggtgatgcacagcatccagaaggtgcgggtgaaggccctgaagagggtgcagaggaacatcggcagctttgaggtgaacatctgggagcccatcgaggaggagaagccagatgaggcccctggggtggaccgctacagcctgggcaccagcctgagccgcagcaccctgacagagctgggggacagcgtggtgcacagtgatgctgacaccttcagcgaggccctgtctgtggaggagaagagccgcatcaacatctaccagagaaatgcccccaaccacatggagctgaccagcatccacaagcccacagacaagaggaagatgtgcaaccagaaggagaaccccaccaagaaggaggaccacgagaagctgagccagaacaccctgcccgtcatcggcgtgtgggagtttgaaagagatgatgatgagtacatcaagttcctggacctcttcctgagctacatcctggagcgggacctgccctacagcagagatgctgacatccccttcctgaccagcttcagcggcaagctgcgggagcacgagctgaacagcctgctgtttgatgtgcacaccaccctgaagaggcaccagagcaagaccaagagccagaatgtgttccgggccggcagctgctttgtggtggcccctgagagctatgagagcgagaagagcagcagcctgaatgatgaatatggcatgcacctggagaaccagaagctgagcagctctgtgctggtgaaccagggcatcaagcccttcctgcagtaccccagcaatgaggtgaacaagaatgaaggcatgagcggcctgtttggcctgaagcagaggagcatctacaagatccaggatgacacccgggagaagtgcctgatccagaggagcagcaaccacatcttctggacccccaagagcatcaagacccggcgctgcatcttcaaggccatccagtgcaatgacatcaacccccaggaggacctgcccctggccctgaacaccttcggcagcatcggccgcctgctggagtggatgatccgctggagcaacagaaggctgctgtgtgacagcggcatcacagagagcagcagcgagtacagccctgtgatccgggtgaagaccagcacagctgccatcctgaccagcctgtggctgctggagcagccctactttgccacctacaaggccaagaatgccatcatcaagatggtggagaacagagacaccggctgccagatcggccccaacatcgagcgggagagcaagagtgatgctgggggctctgtggccgtggccaccccaggcggcacagaggagagaaatggccagaacaagagctgccagaacatcctgaacaggatgcccacagaggccaagaacccagacatcaaggagatcaatgatgacatcatcagcatcacccacaacaccaagaaggagttcattgatattgatgagaacctgctggaggtggaggccttcacagaggaggagatggacatgcacatcagtgactatgaagaagatattgaggagagcgtgggcggcttccgcagccccagcctggccatctgcatgatgaccctgccccagcagctggaggaggagttcacagaggaggtgcagtgccagcgggaggagcccctggagaccatcatggaggagaagagcacagagcagaagggcatgattgaggccttcagccaccctggccacaccaccccccagagcatgcaggtggacaccagcagcgagatcagcagcgcccagatcagcacctacaaggagaagagcagctctgtgcccctgctgatcagcaatggagtgaatgtggccagccagcccccagcccccaccccccagaagacccagagaaatgagttcaccgcccagctgcctgactgcagcgagagcgtgcggcagatgctgcaggatgagatgttcaagctggtgcagctgcagcagatcaacttcatgagcctgatgcagatcgtgggcagcagctttgccaacctgcctgacacccagcagctggtgcagcagagccagagcgtgcacctgggggagagccaggagagcaacctgcggggctgtggagatgtggaggacagcaacaagaacctgaaggagcgcttcttcatcaagccccagagcatgggagaaaatgcccgggagcccaggaagaacagcccccactgccacgagggcaccatccccagcggccagaacagcactggaaatgtgcagaatgtgccccacggcagcatccccctgtgccagctgaatggccagcccaggaagaagggccccatccccagcagccagaacctgcccagcaccagcttctacccagccccagctggcaacacccacctgtacctgctgagcacccccagcgtggtgcagaaggcccccaggctcatcccccacgccaagaccttcagccctggagatggcttccccctgctgcagttcaagagcaagcaggagttccagcccctcttcctgcacacaggcagcatcccccaggtgcccttccggcccctgccccagccccgggaggcctggggcctgagtgacagcttccagcctgccctgccccagagagctgcccagaccaccccagccagccacctgaatgtgtcccagtacaacacagaggccaggaagaaggaggtggagcagaagacctgggccgagaccgtcatcacagagatccccaaccacgtgaacctggaccagtatgtgggccaggagaacctgaccccccagcaggacagctctgtgttcatcaagccagagaagctgtttgatgtgaagccaggcaccctggagatcagcccccaccacagctttggcctgcccctgctgtacctgcccctgaagccacccaacatgttccccagcaccagccgggccagcatcaccgtgcccagcacccccatccagcccatcgccgaggagaggaagtacccccggctgagcctgctgcacagccacctgagcccagaaaatcgctgcaagaagacccagctgatccccctggagaacctgattgccttcaagcagagccagcagaagctgacccacaacctgtttgagcagggagatgctggccacctgcagctgctgaaggtgaagattgagcccccagaggtgcggcagggcaaggacagcaagaagaggcagaggcggcgggcagagaaggagctgcaggagaagagatgtgagaagctgcggaggaagcccaacgtgaccttccggccagaaaattccatcatcaacaatgatgacagcgagatcatcaagaagcccaaggagcagcaggagcactgcggcagccaccccctggatgactttgatgtgccctttgagatgctgcaggatgacaacaccagcgctggcctgcacttcatggcctctgtgaagaagaaggccatcggcagccaggatgccagcaccaacacagatcctgagcacgagcccctgacagccccccagctgctggtgcctgatgtgtacctgaacctgaagctgagcagcgagatgtctgagaagccctggagccccagcatcccccacacagtgaccaacctggagctgcctgtgcgggaggagcccagcaatgacaacgtcatcaagcagcagagcgaccacctggccgtgcccagcagcgctgagctgcactacatggccgcctctgtgaccaatgctgtgcccccccacaacttcaagagccagggcctgcccaagccagagttccgcttcaagggccagagcaccaagagtgacagcgctgaggactacctgctgtggaagaggctgcagggcgtgtctgctgcctgcccagcccccagcagcgctgcccaccagctggagcacctgagcgccaagctgcagaagattgatgagcagctgctggccatccagaacattgctgaaaatattgagcaggacttccccaagccagagatgctggacctgcactgtgacaagattggccctgtggaccacatcgagttcagcagcggccctgagttcaagaagaccctggccagcaagaccatcagcatcagcgaggaggtgcgcttcctgacccacatggatgaggaggaccagagcgacaagaaggagaccagcgagcctgagttcagcatcacagagaactacagcggccagaagacctgtgtgttccccacagctgacagcgctgtgtccctgagcagcagcagtgaccagaacaccaccagccctggcatgaacagcagtgatgagctgtgtgagagcgtgtctgtgcaccccctgcagatgacaggcctgacagacattgctgacatcattgatgacctgatcatcaaggatggagtgtcctctgaggagctgggcctgacagagcaggccatgggcaccagccgcatccagcactacagcggccgccacagccagaggacagacaaggagcggcgggagatccaggcctggatgaagaggaagaggaaggagaggatggccaagtacctgaatgagctggccgagaagaggggccaggagcatgaccccttctgccccaggagcaaccccctgtacatgaccagccgggagatccggctgcggcagaagatgaagcatgagaaggaccggctgctgctgtctgagcactacagccgccgcatcagccaggcctacggcctgatgaatgagctgctgtctgagagcgtgcagctgcccaccctgccccagaagcccctgcccaacaagcccagccccacccagagcagcagctgccagcactgccccagccccagaggagagaaccagcacggccacagcttcctgatcaacagacctgggaaggtgaagtacatgagcaagcccagctacatccacaagaggaagagctttggccagccccagggcagcccctggccccatggaacagccaccttcaccatccagaagaaggccggcggggccaaggctgctgtgaggaaggccacccagagccctgtgaccttccagaagggcagcaatgccccctgccacagcctgcagcacaccaagaagcacggcagcgctggcctggccccccagaccaagcaggtgtgtgtggagtatgaaagagaggagaccgtggtgagcccctggaccatccccagcgagatccacaagatcctgcacgagagccacaacagcctgctgcaggacctgagccccacagaggaggaggagcctgagcacccctttggagtgggcggcgtggacagcgtgtctgagagcacaggcagcatcctgagcaagctggactggaatgccatcgaggacatggtggcctctgtggaggaccagggcctgtctgtgcactgggccctggacctgtag

SEQ ID NO: 213955 - DNA, 9594 bp, Artificial Sequence
  derived and/or modified sequence
atggagatccggctggagatcctgaccagcaccggcatcaagcagaaaaagccttggccccgcgtgtcctggctgggcaaagagaaagaggccgtgtttctcctggacgacaagttcatcaacgaaatcaacctgttgagcggtaaaattaagaaaaagattccatcattgcaacctttccttaaagacgtcattgtgcttaccactagctcaaacgacgcctggcttgccggagtgttaaccactggtgagttatttctctggaataaggaccaggactgtcttaagaccataccgattaccgagaaacccaaagaaatgataaaggcgactgtagcctcctctttaaggttatacctttacgtgtccggcaacgggaaacgcatagtgctaataacaccctctggatgcattttcctgtgggagtatcttgagctcaagaatattctatccagcaagagtctgtctctggcaggtaggtggtcccaggtcattcctgaagaagcagtgctgttaccttccacagaagacaaggaagccgtggtgaacgccgtttttatcaaaaatgagctcttcggagattgttgcctatgcagcttcactttctactcaggcgaatgcttaaaactgaccttcttggctatccggtggcatgagaatgttttcactagcgtgcgcagcttaccctaccatgttcactgggcccagcaggactgccatctttgttcacttatccctaagtgtgaaagcgtgaaatcaagaggcgcactgatatctgccttcagtcgggatggcctgactctggctgtcactttgaaccagaaagatcctaaggctacccaggttctgtttattaacactctgaatttcgtgactttgtgcgggagcctgaagggatgttccaataagtcccccgtggtgccagcgaccttaattcggtcatactgggttggagatattagctggactcatgactctctttttctggcgtgcatgctgaagaggggatctttggtactgctcacatgccagggtgagcttttgacactgatcacatttgggtgctctatagaatttggtcctgccgaatttatcccactgcaccctttgatcacataccgcccacaacaatttacgttccaagactcaaataatagtgtcgattcctctgctagtgattctgatccgatgcgtcagaggttttccattaaagcccatagtagacttccttatctcgtgatatcagacgggtacatggtcactaccttgcgcttcttggacagcttgtcaccaagtgtacacatgcgctctctgcttctagacagcacacagaggttggaaaaaatataccagagcgtgatcctgtcaaagcccaagggaaagggattgaacctgaggagcctgaatagcctacggtcttctcttctagagcaccaggggaacgaaagcagcgctgactttaccgtgcctaaattcctgcaggccgaggagacaataaacgagaatgctgcggacttccaagacttcgaggctgaagagaccaacgagggcaggcacttcccagataacctatgcccgttttggaacaagcgggatgacgtactgtgttcaagcatgaaggagggccgtctggagtttgcctctatgttcgatactattcatgcaaaggacgactccgaagagaccgaccggaccatcaccgaactgcactccatacagaagtccctattagccgcatggaccatcggcattagcaaaaccgtgactgaaaaaaatcttatgctgaactatatagtcgtttgtatcacccacttcttctatatccttcaatttattaagtgcccatttcccaagctcgacctggtgctgagcaagtcgtcacggcacaatgcttggatcctatgcattttccagttgtttcatcaatgtctttctatccactattgggatatccggtataaacaggatgtggggcacctgattaagctgacttccaatacagtgaagctgctgttgactcagcagcaaaaaggccagcttttctctgagaaactcctggcctgtttctatctattgaaaatggtggccgataatttgaacggcgtgtacatcctccagccagaagtaatctctgcaagtgccgacgggtctaagattacagcccaggactccctggtcgtacccatattccaaatgtttcaggacagtggattccagaaaaactggagctggaacagtttcttcaagatccacccccaggtggtgaacccagtccagcagcctggtcacagactccttatcctttggcgtatcttgtacaaaaagaccctatggtaccaggcccagttgaaccgccgggtacctgaggctgattcacagctgacagagaagatgacccacgaggctagtactgtcaagtcactgctgtgtcacctccaagccaatctccagagtacaggggattgcttgaatcagactttagaactgaagagcattaacggagaagaatgttttctgctcggatcatacgagaagtccgttcaactatggaaaaaggctctccaggagatcgaagagaaaggcggaaggagaacctatttcttgcagattagatattacctatctcttctgtattgtcatctgtatagctacaatctcaatgatgcgcaagggctgtgtgaccagcttgcccgcgagatcctgaggtggtcacaactgccagtcaaggagaataaagatttttctggagctgctaagagccacttcgagtgcggtatggtgggaggagtgcatccggaggcagccgtccgcgtagtccagtccatggccaggttcatggccgcatatttcacgaaccaacagctctgtatactgccaccccatcatgtcaacgtgttgcctcctcttcacatcaagaccgaacagagtttccggttgattcctctgcaacattccaaagttgcatcagtggtgagagaccagaacctcagcaatgtctggaccgtagaatatgccctcgagctgctctttatcggcgggttggtgcccgaggcagtctggttagcctataagttgggcgattggaagacctctgtgagcataggggtcgcctttcagctgttctgcaaaagggacagcaatttcatgaggtctaagaagaagagtttgaacctgccgctgaggatgaccccagcacagatttttcaggaaaaactccagtgtgtactggggcagccagctagcctggaggccaaaaatgagatggggagcaagtataagcagtttactgatcccatcgaggaggaggatgctaatttactcttcgggagcgttcaggaagtcctgaaggcgagcgttatggctgacgcagatattctgagtgaaacctttcaactgttgattgactccgcaaaagatttctccaagcggttatgggggctcgtgccttttggcctctacttacctgctcctcccctgtactgtcctcaaccagcgatactgtctgaagaagacggcgatgacttactgctgaaagccgagaagaacaataggcagaaggtctcaggcatcctccagcgtgtgcttttgttgtttcgtgccgcacaatgctcttttcctgtcgcacagtggtacattctgcaactgcgctgggcacggaaagtgatgcagaagatcaggatgaaagggtcactgccatcactgtctccttttccgcagtccctgctcaactactgcaaagggggaattgctttttttcgaccaggagctgcgggggaccataaattagacgaagtttctatccgggctataggctgcttccgcgagctgtgcgctctttgttggatgctccatgttcgagacaagctttcctacagctgcagacaatatcagaaggctcgtgaaaacgtaaagggtgagaaagatctggaggtggagttcgactcctgcatgatcgaacactgcctctctgccgtcgaatgggcttatcggatgctgccctttagccgcttcttcaacatggaagaactcatccaggatataatcttgagcctgatcggcgagctgcccccaatccgtaaggttgccgaaattttcgtgaaagcttttccatatcccgaggacgttcgcgttccactgcgtgataagtatcatagcctacatcagcgcttgcgacattgtgtcgtcaaaggaccacagactgaggaaatgatgtctgttgtcatgcactcaattcagaaagtccgcgtgaaggccctgaagcgtgtccaacgcaacatcggtagcttcgaggttaatatctgggagcctatcgaggaggaaaaacccgatgaggcaccaggagtcgataggtacagtctggggacgagtctgtctcggagtacattgacggaattgggggattctgtagtacacagcgatgctgacacattctccgaagctctcagtgtcgaagagaagagtaggatcaacatttaccaacggaatgcacccaaccatatggaactaacaagcattcacaagcccacagacaaaaggaaaatgtgcaatcagaaggaaaatccaactaaaaaggaggatcacgagaaattgtcacaaaacactctgcctgttattggggtatgggagttcgagcgcgacgatgacgaatacataaaatttctagatcttttcctgtcttatattctggaacgggatttaccctattccagggacgcagacatcccgtttctgacaagtttctcaggaaaactccgagagcatgaactgaatagtctgctgttcgacgttcatactaccttgaagagacaccaaagcaagacgaagtcccaaaatgtgttccgggccggctcctgctttgtggtcgcacccgaaagctatgaatcagagaaaagtagctcgctcaacgacgagtacggaatgcacctagaaaatcaaaagctgtcatcctccgtgctagtcaatcagggcataaaacctttccttcaatatccctccaacgaagtgaataaaaacgaaggcatgtctgggctttttgggttgaaacagaggtccatctacaagatacaggatgacacgcgtgaaaagtgtctaattcagcgcagttctaaccacatattctggacacctaagtctatcaagactcgcaggtgcattttcaaggcgatccagtgtaacgatataaacccgcaagaagatcttcctctggctctgaacacctttggttcaattggtcggctgctcgagtggatgattaggtggagtaacaggcggctactgtgcgactccggcattaccgagtcctcctctgagtacagtccagtgatcagggtgaagacctctactgcagccatcctgacctcattatggctgctcgagcagccctattttgccacatacaaggctaagaacgccattataaagatggttgaaaacagggataccggttgccaaattggacccaacatcgagcgtgaaagtaagagcgatgctggagggtccgtcgccgtggcaactcccggcggcactgaggaacgaaacgggcagaacaaaagctgtcaaaacatactaaatcgtatgcctaccgaagccaagaatcctgatatcaaagaaatcaacgacgatatcattagtatcactcataatacaaaaaaagagttcatcgatattgacgaaaatcttctagaagtagaggcatttacggaagaggagatggacatgcatatcagcgactacgaggaagacatcgaggaatcagtgggcggcttccggtcacccagcttggccatctgcatgatgacactaccccaacagctggaagaggaatttactgaggaggtgcagtgtcagcgggaagagcctctagaaaccattatggaagagaagagtaccgagcagaaaggcatgatcgaggctttctctcatcccgggcacacgacgccacagtctatgcaagttgacacttcgtccgaaattagtagcgctcagatttcaacatacaaggagaaatcaagctcggtgccacttctcattagcaacggtgtgaacgtggcttctcaacccccagcacccaccccacagaagacccagcgaaatgaattcaccgcacaactgcctgactgctcagaatcagtgcggcagatgctgcaggacgaaatgtttaagctggtgcaactgcagcaaattaacttcatgagtttaatgcagattgtgggctcgagttttgccaaccttcctgatacacaacaactggtccagcagagccaatctgttcatctcggagagtcacaggaaagtaatctccgggggtgcggagatgtcgaagattccaacaaaaacctgaaggagcgcttctttattaaaccacagtctatgggcgagaatgctcgggagcccagaaaaaacagtccccactgtcacgaaggaacaatcccaagcgggcagaactctactggaaatgtgcagaatgtgccacacggaagcatccctctttgtcaactgaatggccagccgcggaaaaaagggccgatccccagttcccagaatttgcccagcacttccttttaccctgcacctgcaggcaatacgcacctatatttactgagtaccccatctgtggtccagaaagccccacgactgattccccacgctaagactttcagtcccggcgatggtttcccattgctccaattcaaatcaaagcaagaatttcaacctcttttcctgcacacgggctccatcccccaggtgcctttcaggcctctgcctcagccacgggaggcatggggcctctcagactcatttcagccagccttgccccagagagcagcccagactacccccgccagtcaccttaacgtctcacaatacaacaccgaggctcgcaaaaaagaggtcgagcagaaaacttgggctgagactgtgataactgagattcctaatcatgtcaatctcgaccagtacgtaggccaagagaatctcactccccagcaggatagctccgttttcatcaagcccgaaaagttattcgacgtgaaaccgggcaccctggagattagtccccaccattctttcggcttgccactgctgtatttgcctctgaagcccccaaacatgtttcccagtacatcccgggcttctattaccgtgccatccacacccatccagcctatagccgaggaacggaagtacccaagactgagcctcttacattctcacctctcccccgagaacagatgcaaaaagacccagttgattcctctggagaaccttattgcgttcaaacaaagtcaacagaagttgacacacaatttgtttgagcagggcgacgctggacatctacagctgctgaaggtgaagatcgaacctcccgaagtgagacagggaaaggacagcaagaagcgccagcggaggagggccgaaaaggagttgcaggaaaaacgatgtgaaaaactgcggcgcaagccaaacgtgacttttagacccgaaaactctatcataaacaatgatgatagcgagatcattaagaaacccaaagagcagcaggaacattgtggaagccaccctctggatgacttcgacgtaccgtttgaaatgctgcaagatgacaacacttctgcaggacttcatttcatggcttctgtgaagaagaaggcaatcgggagtcaagacgcctcgacaaacactgaccccgaacacgagcctcttacagcaccccagctgctggtccccgacgtctatcttaacctcaaactgagctccgagatgtcagagaaaccctggagcccaagcatcccccacacagtaactaacctggaactgcctgtgagagaggagccgtccaacgataacgtgatcaagcaacagtctgaccacctggcagtgccctcatctgccgaactgcattacatggcagcctctgtgaccaatgccgtccccccacacaatttcaagtcccaaggcttaccaaaaccagaattccgattcaaaggacagtctactaagtccgattcagccgaggactatctgctgtggaagaggctccagggggttagtgcggcctgcccagctccatcctctgccgcacatcagctggaacacctgtccgcgaaattgcaaaagatcgatgaacagctgctagccatacagaatatcgccgagaacatcgaacaagatttcccaaaacccgagatgctggatcttcactgcgacaagattggacctgtggatcatatcgaattctcaagcggcccagaatttaaaaaaaccctggctagtaagactatcagcatcagcgaagaagtgcgattcttgactcacatggatgaagaagaccagagtgacaaaaaggagacaagcgaaccagagtttagcatcactgagaattactctggccagaagacatgtgtctttccgacggctgattccgcagtttcattgtcatcctcttccgatcagaataccacgagccccggaatgaattcatctgacgaactctgcgagagcgtgtctgtgcaccctctgcagatgacagggctgacagacatcgcagacataatcgatgacctgattatcaaggacggggtgagtagtgaagagcttggcctcactgaacaggccatgggaacgtcacgaatccagcactacagcgggcgtcatagccagagaacggacaaggaaagacgcgagattcaggcatggatgaagaggaagaggaaagagcgcatggccaagtatttgaatgagctggctgaaaagagaggccaagaacacgatccattctgtccacgtagtaatccactgtatatgacttctcgagaaatcagactgcgccagaagatgaagcatgagaaggatcggctcttactgtcagaacattactcaaggagaatcagtcaagcgtatggactcatgaatgagctcctgtctgagtcagtccagctgcctacactcccccagaagcctcttcccaacaaaccgagccccactcagtcatcatcatgccaacattgcccttctccaaggggcgagaatcaacatggccactcctttcttataaatcggccgggaaaagtcaagtatatgtccaaacccagttacatccacaaacggaagtcttttggtcagccacagggaagcccgtggcctcacgggaccgccacgttcacaattcaaaagaaagccggcggcgccaaagcagccgtgaggaaggccacccaaagtcccgtcacatttcagaagggcagtaatgctccctgccattccctgcagcatacaaaaaaacacggctccgccgggcttgcaccacaaaccaagcaggtgtgcgtggaatatgaacgagaggagacggtcgtctcgccgtggacgattccttccgaaatccataaaatattacacgagagtcataacagtctactgcaggatctttctccaactgaagaagaggagcctgaacatccgtttggagtaggaggtgtcgattctgtcagtgagtctactggctcgatactgtccaagctggactggaatgccatcgaagacatggtggccagcgtggaggatcaaggcttgagcgttcattgggccttggacctgtag

SEQ ID NO: 213956 - DNA, 9594 bp, Artificial Sequence
  derived and/or modified sequence
atggagatccggctggagatcctgaccagcaccggcatcaagcagaaaaaaccctggcctagagtcagttggctcggaaaagagaaggaggccgtttttctactcgatgacaagttcatcaacgaaatcaatctcctctccggtaaaattaagaagaagattcccagcctgcagccgttcctcaaagatgtcatcgtgcttacgacttcgtctaacgacgcctggcttgctggtgtcctgaccaccggcgagctatttctgtggaacaaagatcaggattgtctcaagaccatccccatcaccgagaagccaaaggagatgatcaaagccactgtagcatcctctctcaggctgtacctgtacgtgtctggtaatggtaaaaggatcgtgcttatcaccccttccggctgtatttttttgtgggagtacctcgagctgaaaaacatcttgtctagcaaatctttgtcattggcgggtagatggagccaggtcatccccgaagaggccgtcctattgccatcaaccgaagataaagaggctgtcgtgaatgctgtgttcatcaaaaatgagttattcggagactgctgtttgtgttccttcacattctactcaggggaatgcctgaagctcacattcctggctatcagatggcacgagaacgtttttacaagcgttagaagcttgccttatcatgtgcactgggcacagcaagactgtcatctgtgctccctgatccctaagtgtgaatccgtcaaaagtaggggggctctcataagtgccttttcccgagacggtctgaccctagcagtcaccctgaatcagaaggatcccaaggccacccaggtgttattcatcaatactctgaatttcgtgacactttgcggctctttaaaaggctgttcaaataagagccctgttgtgcccgctacccttattcgcagttattgggtcggcgacatcagctggacgcatgattcattatttttggcatgcatgcttaagagaggttccctggttctcttgacttgtcagggagagttgctgaccctaataacatttggatgtagtattgagtttggaccagcagagtttatacccttgcatcccctgattacgtaccgccctcagcagttcactttccaggattctaacaacagcgtggattcttccgcctctgatagcgaccccatgagacagcggttcagtattaaggcccactcgcggcttccctacttggtaatctccgacgggtacatggtgactaccctgcgatttctagattctcttagccccagtgtgcacatgaggtccctgcttctcgactccactcagcggttggagaaaatctaccagtctgtgatactgtccaaacccaaaggtaaagggttgaacctgcgaagccttaacagcctgcgcagctcactgctcgagcaccaaggtaacgaaagctcagccgacttcacagttccgaaattcctccaggcagaggaaacgattaatgagaacgcagcagacttccaggactttgaagcggaagagactaacgagggcagacatttcccggataacctgtgccccttttggaataaacgggatgatgtcctttgtagctctatgaaagaggggaggctcgaattcgcatcaatgttcgatacgatacatgccaaggatgactccgaggaaacagatcggactatcaccgagctgcacagcattcaaaagtcccttctagctgcgtggactattgggatttccaaaactgtcacagaaaaaaaccttatgctgaactacatcgttgtttgcatcacgcatttcttctacatattgcagtttatcaagtgtccattccctaagctggacctggttctgagtaagtcttcgagacacaatgcctggatcctgtgcatttttcagctcttccaccagtgcctgtctattcattactgggacattcgctataaacaagatgtaggacacctaattaagctgaccagtaatacggtaaagctgctcctaactcagcaacaaaaagggcagcttttctcagaaaaactccttgcctgtttctacctgctgaagatggtagccgataaccttaacggtgtgtatatcctgcagcctgaggtgattagtgcaagtgctgatgggagcaaaattactgctcaggactctctagtggtgccaatttttcaaatgttccaggattctgggttccaaaagaattggtcctggaactcctttttcaagatccatccccaggtggtgaatcccgtgcagcagcccggccaccggctactgattctgtggagaatcctgtataagaaaacactgtggtaccaggcacaactgaaccggagggtccccgaggcggactcccagctgactgaaaagatgacgcatgaggcctcaactgtgaaatccctgctgtgtcacttgcaggccaatctgcagtcaacaggagactgcctgaatcaaactctcgagcttaagagtattaatggcgaggagtgcttccttctggggtcttacgaaaaatctgtacaactgtggaagaaagcactacaggagatcgaagaaaagggagggagaaggacatactttctacagatccgctattacctaagcttgttgtactgccatttatatagctacaacctgaatgatgcccaggggctgtgtgatcagttggctagagaaattttgagatggtcacaattgcctgtgaaagaaaacaaggatttcagtggggccgctaaaagtcatttcgaatgtggcatggtgggcggggtgcatccggaggcagcagtaagggtggtgcagagcatggcccgcttcatggccgcctatttcacaaaccagcaactgtgtatactgccgccacatcatgtgaacgtgttacctccactgcatataaagactgaacagtcgttccgattaattcctctgcaacatagtaaagtggcctccgtagtaagggaccaaaacctctccaatgtctggactgtggagtatgccctcgagttactgtttattggggggctggtccccgaggcggtatggctagcgtataagctgggcgattggaaaacttcagtttcgattggcgttgcctttcagctcttctgcaagcgcgacagcaacttcatgcgatctaaaaagaaaagcctcaatcttccacttaggatgaccccagctcagatcttccaggagaagcttcagtgcgtcctagggcaacccgccagtctggaagcaaaaaacgagatgggatctaagtacaaacaatttaccgatccaatcgaagaagaggatgctaacctgttatttggatctgttcaggaggtgttaaaagcctctgtaatggccgatgctgacatcctcagcgagacattccaacttctgattgactcagctaaggactttagcaaacgcctgtggggactagtccctttcggattatacctcccagccccgcccctttactgtccacagccagctatcctctctgaggaagatggggacgatttattactgaaggctgaaaagaataaccgtcagaaagtgagcggcatcctgcagcgggtgctgctgctgttccgtgccgcccaatgttctttcccagttgcccaatggtatatccttcagctgcgttgggcgcggaaggtgatgcaaaaaattcgcatgaagggctcactgccaagtctaagtccctttccccaatctctgctcaactactgcaaggggggcattgccttttttcggccaggggcggcgggtgatcacaagctcgatgaggtaagcattcgagccattggctgctttcgcgagctgtgtgctttgtgctggatgctgcacgtgcgtgataagctctcttatagctgtcgccaatatcagaaggcacgagaaaatgtgaagggagaaaaggacttggaagtggaattcgactcctgcatgatagaacactgtctgagcgcagtcgaatgggcctaccgaatgctgcccttctcccgtttcttcaatatggaagagctgattcaggatatcattcttagtttgattggagagttaccccctatccgcaaggtcgctgagatctttgtgaaagcattcccttaccccgaagacgtccgagttccacttagagacaaataccactccctgcatcagagattgaggcactgcgtggtgaaaggaccgcaaacagaggaaatgatgagcgtggtcatgcattctattcaaaaggttagagtcaaagccctcaaacgcgtgcagaggaatatcggcagcttcgaggtaaacatttgggagcctatcgaagaggaaaaaccagacgaggcccctggagttgatagatattccctgggcacatctttgtcccgttccacattaacagagttaggcgacagtgtggtgcattcagacgccgacactttcagtgaagcattgtctgtggaggagaagagcagaatcaatatatatcagcggaacgccccaaaccacatggaactcacgtcaattcacaagcccacagataagcggaagatgtgcaaccagaaggaaaatcccacaaagaaagaagaccacgagaagcttagccaaaacacactgcctgtcatcggtgtctgggagttcgaacgcgacgatgatgagtatatcaagtttctcgacctgttcttgagttatattctggagagggatttgccatattccagagacgccgacattccattcctgacaagttttagcgggaaactccgggaacacgaacttaacagtctgcttttcgatgtccacacaaccctaaagcggcatcagagcaagaccaaatcacaaaacgtgttccgggccggatcttgcttcgtggtggctcctgagtcgtacgagagcgagaaatctagttctttgaacgacgaatatggtatgcatttggaaaaccagaaactcagtagttctgttctcgtcaatcagggcataaaaccttttctccagtatccatcaaacgaggtaaacaagaacgagggcatgagtggcctttttgggctcaagcagagatccatatataagatccaggatgacacccgggaaaaatgcttaatacagaggagtagtaatcacatattttggacgcctaaatctataaaaacacgccggtgtatcttcaaggccatccagtgcaatgacatcaatccacaggaggatttgcctctggccttaaacacctttggttcgattggaagactgctggagtggatgattcgctggtcgaatcgccggctgctgtgtgacagcggtataacagagtcatctagtgagtactcgcctgtcataagggtgaagacctccacagctgccatccttacctccctgtggctcctggaacagccatattttgcgacatacaaggcaaagaatgcaatcatcaaaatggtggagaacagagacaccggctgccagattgggccaaacattgagcgtgaatctaaaagcgatgctggtggttcggtcgcagtcgccactccaggaggcactgaggagcgaaatgggcagaacaagtcctgccagaatatccttaatagaatgcctaccgaagcaaaaaatccggatatcaaagagattaacgatgacatcatttccatcactcacaatactaaaaaagaatttatcgatattgatgagaacctcttagaagtcgaggcttttacagaggaagaaatggacatgcatataagcgattatgaagaagacatcgaagagtcagtggggggctttagaagcccgtcgttggccatctgcatgatgactcttccccagcagctggaagaagagttcacagaggaagtgcagtgccagcgcgaggagccccttgagaccattatggaggagaaaagcacagaacagaaaggtatgatcgaagctttctcccatccaggccacacaactccgcagagcatgcaggttgacactagttctgaaataagttcggcgcaaatatccacctataaggagaaatcttccagcgtgcctctcctgatttcaaatggagtgaacgtggcaagtcagcctccagcccctactccacagaagacacaaaggaacgagtttactgcccagctcccggactgtagcgagtcagtgaggcagatgctgcaagatgagatgtttaagctggtccagctgcagcagattaacttcatgagcctcatgcaaatcgtgggctcctcattcgccaaccttccggacacccagcagttagtgcagcagtctcaaagtgttcacttaggggaatcacaggagagcaacctgaggggttgtggcgatgttgaggactcaaataagaacctgaaggagagattttttattaaaccccaaagcatgggggaaaatgcacgtgaacctcgtaaaaacagtcctcattgtcacgaggggactattccgagcggccagaattccaccggtaacgttcagaatgtgccacatggctctatccctttgtgccaactgaatggtcagcctcgcaagaagggcccaatccctagttcacagaatttgccttctacaagcttctatcctgctcctgccggcaacacccacctgtacctgcttagcacaccgagcgtggtccagaaggcccccaggctcatcccccatgccaaaaccttttcaccgggtgacggcttccccttgctccagttcaagagcaagcaggaatttcaaccattgtttttgcacaccggatcgattcctcaggtgcccttcaggcccctgcctcagcccagggaagcatggggcctctcagattcgtttcaaccagcattaccgcagagggcagctcagaccactccagcatctcatctgaacgtcagccagtataataccgaggcgagaaaaaaggaagtggaacagaagacctgggcagagacagtcattaccgagattcccaaccatgtgaacctggaccagtatgtgggccaggagaacctcactccacaacaagacagctcggtgtttatcaagcccgagaaattgttcgacgtgaagccaggcacgctggaaatcagcccccatcactcttttggacttcctttactctaccttcctttaaagccccccaatatgtttccctccaccagtagggccagcattactgtcccatccacccccatccaacccatcgcagaagagagaaagtaccccagactatcactgctgcattctcatctctctcccgagaaccgctgcaagaagactcagctcattccattagagaaccttatcgccttcaagcagagccaacagaaactgacccataatctgtttgaacaaggcgacgcaggccatctgcagctgttgaaggtgaaaattgaacccccagaggtgcgccaaggcaaggattctaagaaaagacagcgccggcgggccgaaaaagaactgcaggagaaacggtgcgagaaactgaggcgcaaaccgaacgtcacatttcgaccggaaaacagcatcatcaacaatgatgattcggagatcatcaaaaaaccaaaggaacagcaggagcattgtggatctcacccacttgatgacttcgacgtccccttcgaaatgctccaagatgacaatacttctgcaggactgcacttcatggcatctgtgaagaagaaggcgatcggatcccaggatgccagtaccaatacggacccagaacacgagcctttgacggccccccagctcctggtgcctgacgtttatttgaacctcaagctgtctagtgagatgtctgagaagccatggtctccttcaataccacataccgtgaccaacctagaactgccagtcagagaggagccaagcaacgacaatgtgatcaagcagcagagcgaccatttagctgtcccctcaagtgccgaattacactacatggctgcatctgtgaccaacgccgtacctcctcataattttaaatctcagggcctgccaaaaccggagtttagatttaagggacagtccacaaagtctgattcggcagaagactacttactctggaaaagactgcagggtgtgtcggccgcctgccccgcccccagctcggcagctcaccagctggagcatttgtccgcgaaactgcaaaaaatagacgaacaactcctagccatccaaaacattgctgagaatattgagcaagacttcccaaagcccgagatgctagatttgcactgcgataaaattggccccgtggaccatattgagtttagctccggacctgagttcaagaagactcttgccagcaagaccatctcgatcagcgaggaggtgagattcctaacccatatggacgaagaggaccaaagcgacaagaaagaaacaagcgagccagagttttcaattacggagaactatagcggtcagaagacatgcgtttttcccacagctgattctgcggtctcacttagtagcagctccgaccagaatactacgtcccccggtatgaacagctccgacgagctgtgtgagagtgttagcgtgcatccactgcagatgactggtctgaccgacattgccgatattatagacgatttgattattaaggatggggtgagctccgaggaactgggactcactgagcaggccatggggacatccaggatacagcactatagcggcaggcactcccaacgcaccgataaagagcggcgggagatccaggcctggatgaaacgcaagcgcaaggagcgcatggctaagtacctgaacgaactggcagagaaacggggtcaggagcacgatccgttttgtccaaggtccaatcccctttatatgacatctagagagatccgcctgcggcagaagatgaaacacgaaaaagatcgacttcttctgtcagaacactactccagacgtatcagtcaagcgtatgggcttatgaacgagctgctgagtgagtccgtacagctaccgacgttgcctcagaaaccactaccaaacaaacctagccctacacagtcgagctcttgccaacattgtccatccccgcggggcgagaaccagcacggtcactccttcctaatcaatcgccctggcaaagtcaagtatatgtctaagcccagctacatccacaagaggaaatccttcggacaaccacagggctctccttggccccatggtacagcaacatttaccatccagaagaaggcagggggagcaaaggctgctgtccgcaaggcaacccaatctccggtcacattccagaaaggtagtaacgcgccttgtcacagccttcagcataccaagaagcacggaagcgcgggtctggccccccaaacaaaacaggtatgcgtggagtacgagcgggaggaaaccgtggtaagcccctggacaatccccagtgagatccataagattctgcatgaatcacataactccttgctgcaagacttgtctcccaccgaagaagaagagccagaacacccattcggtgtcggcggggtggactcggtgagcgagagcaccggctccatcctctcaaagctggactggaacgcaatagaggatatggtcgccagtgtggaagaccagggattgtccgtccactgggccttagacctgtag

SEQ ID NO: 213957 - DNA, 9593 bp, Artificial Sequence
  derived and/or modified sequence
atggagatccggttagagattctgacttctacgggcattaagcaaaagaaaccttggcctagagtaagctggttggggaaggaaaaagaagccgtgttccttctcgatgacaagttcatcaatgagattaatttactttcaggtaaaatcaagaagaaaattccgtcgctacagccatttctgaaggacgtcatcgtcctgacgactagcagcaatgatgcctggctggctggagtgctcacgactggtgaactatttctctggaataaggatcaggactgccttaaaacaatcccaatcaccgagaagcctaaggaaatgataaaagcaactgtggctagttctctgcgactctatctgtacgtaagcggaaacggtaagcggatcgtcctcatcacaccaagtggatgcatcttcttatgggagtatctggagttgaaaaatattctgtccagcaagagtttaagcctggcgggtcgatggagtcaggtaatcccagaggaagctgtcctcctcccctccaccgaggataaggaagctgtggtcaatgcagtgttcattaagaacgagctctttggagactgctgtttgtgttcttttaccttctatagtggcgagtgtctgaaactgacatttctggctatccgatggcatgagaatgtgttcaccagtgtcagaagcctcccttaccatgtgcactgggctcagcaggactgccatctgtgcagtcttattccaaaatgcgaaagcgtcaagagcaggggcgcattaatctcggccttttccagagatggcctaactttggccgtgactctgaaccagaaagatcctaaggctacccaggtgctgttcatcaacaccctaaacttcgtgacactgtgcgggtcactcaagggatgttctaataagtcaccggtggttcctgctacactgattcggtcttactgggtgggcgacatatcctggacccacgactcactgtttcttgcctgcatgctgaagcgcggtagtcttgtcctactaacctgccagggcgaattgctgaccctcatcacctttggctgcagtattgagttcgggccagctgaattcattcctctgcaccccctgatcacctatcggcctcagcaattcacctttcaggattctaataattccgttgattcctccgcctcagatagtgaccctatgcggcagagattctccattaaagctcattctcgcctgccctatctcgtgatttcagacggctatatggtaaccaccctgcgattcctggatagcctctcaccatccgtgcacatgcgaagtctgttactggacagtacccagcgattggaaaagatctaccaatccgttatactgtcaaaacctaagggaaaggggcttaatcttcggtcactcaactccctgcggtcgagccttctggagcaccagggaaacgagagctcagccgatttcacagtaccaaagttcctgcaagcggaggagaccataaacgagaacgcagctgatttccaagattttgaagccgaggagaccaacgagggcaggcacttccctgataacctgtgcccattttggaacaagagagacgacgtgctctgtagctctatgaaagagggcagattggagttcgccagcatgttcgacactatacacgccaaggacgacagcgaagaaaccgaccgtactatcaccgaactgcactcaattcagaagtccctactagcggcttggacgattggcatcagcaagactgtaactgaaaagaaccttatgctgaattatatagtggtgtgtattacccactttttctacatcctgcagttcattaagtgcccgttcccgaagctggatctggtgctatcaaagtcgagtcgccacaacgcctggatactttgcatttttcaactcttccaccagtgtctaagtatccactattgggatattcggtacaaacaggacgtgggccatctgattaagcttaccagcaatacagtgaaattattgcttactcaacagcagaaaggccagctgttttccgagaagctccttgcgtgcttctatctactgaagatggtggccgataatcttaatggcgtgtacatcctccagcccgaggtcatcagcgcttcagcggacggaagcaagattacagcccaggattccctggtcgtaccaattttccagatgtttcaggacagcgggttccagaaaaactggtcctggaattcatttttcaagatacacccccaagttgtgaatcccgtgcaacagcctggtcaccgcctcctcatcttgtggcgcatactttacaaaaagaccctgtggtaccaggcccagctcaaccgaagggtccctgaggccgattctcaattgactgagaagatgacacatgaggcctcgactgtgaaatctttattgtgtcatctgcaagcgaatctccagagtaccggggactgcctgaatcaaactctcgagctgaagtccattaacggcgaggagtgttttctcctgggtagttacgagaagtccgtgcagctgtggaaaaaggccctccaggaaatcgaggagaaggggggaaggaggacttacttcttacagatacggtattatctgagtttgctgtactgtcatctgtactcgtacaatctgaacgacgcccaaggcctgtgtgatcagctcgctcgcgagattctccgctggagccagctgcccgtgaaagaaaacaaggactttagcggcgctgcaaagagccactttgagtgtggaatggtgggaggtgtgcatccggaggccgctgtgcgagtagtgcagagcatggccaggttcatggcggcttattttacgaaccagcagctgtgcattctgccaccacaccacgttaacgtgctccccccacttcatataaagactgagcagagcttccgtctcatccctcttcagcatagcaaagtcgcctcagtagtcagggaccagaacctctctaacgtgtggacagtcgaatatgcactggaactgctgtttatcggcggactcgttcccgaagccgtgtggctcgcttacaagctcggtgattggaaaacgtctgtgtccattggagtggcctttcaattattctgcaagcgggacagcaactttatgcgaagcaagaagaagtctctcaatctaccacttaggatgacaccggcacagatcttccaggagaagctgcagtgcgtgttaggccaaccagcctcccttgaagcgaagaatgagatggggagtaagtacaagcaatttactgatccaattgaggaggaggatgcaaatctgctgttcggatcggtgcaggaggtcctgaaggcttctgtgatggctgacgccgacatcttgtcggagacttttcaactcttgatcgactccgccaaggattttagcaagcgcttgtgggggctcgtgccctttggcttataccttcctgctcccccactttactgcccccagccagcgatcctgtctgaagaagatggagacgatctcctcctgaaggctgaaaaaaacaatcgacagaaggtgtcggggatacttcagagggtgctccttctgttccgggcagcccagtgttctttcccggtggcccagtggtatatcttacagctacgctgggccagaaaggtaatgcagaagatccgaatgaagggttcactgccatcactgagtccatttccacaatcactcttgaactactgtaaaggcggtatcgcattcttccgccctggcgcagctggcgaccacaaactggatgaagtctccatccgtgccattggctgcttcagggaactatgtgccctgtgctggatgctccatgtgagggacaagttgagttactcgtgcaggcagtaccagaaagccagagaaaacgttaaaggcgagaaggacctggaggtggaatttgactcatgtatgatcgagcactgcttgtccgctgtggagtgggcataccggatgctcccattttcccgattctttaacatggaggagctgatccaggatatcatcctgagcctcatcggcgaacttcctcccatccggaaggtcgcagaaatttttgtgaaggccttcccatatcccgaagacgtcagggtccccctgagggacaagtatcatagcctccaccaacggttaagacattgcgtcgtgaagggcccacaaacagaggagatgatgtccgtagtgatgcacagcatccaaaaagtccgcgtgaaggccctcaaaagggttcaaagaaatattggctcctttgaggtgaacatctgggagccaatcgaagaagaaaagcccgacgaggccccaggggtggatagatattctttaggtacaagtctctcaagatcaacgctcacagagctgggggactcagtggttcatagtgacgctgatacattcagcgaggcgttatcggtggaggagaaatcacggatcaatatatatcaacgaaacgcacccaatcacatggaattaacctcgattcacaagcctacagataagagaaagatgtgcaaccaaaaggagaaccccacaaaaaaagaagaccacgagaagttatctcaaaataccctccctgtcataggcgtgtgggagtttgagagagacgacgacgaatacatcaaatttctggatctctttcttagctatatactggagagagacctgccttactctagggacgcagacatcccctttcttacaagcttcagcgggaagttacgcgaacacgaactgaattccctcttgtttgacgttcacacaaccttgaaaaggcaccagtctaaaaccaagtcacagaatgtgtttcgggcaggttcctgcttcgtggtagcccctgaatcctacgagtcggaaaaatccagtagcctgaacgacgagtacgggatgcatctcgagaatcagaagttatcctcctctgtactcgtcaatcagggtataaaacctttccttcaatatccgtctaacgaagttaacaaaaacgagggcatgagcggcttgttcggacttaaacaacgcagtatttacaaaatccaggatgacacacgcgagaaatgtctgatccagcggtccagtaaccacatattttggacacctaagagtatcaagactcgcagatgcatcttcaaggccatccagtgtaatgatatcaatccccaggaggacctgcctcttgctctcaataccttcggaagtattggcagactgctcgaatggatgattcggtggtccaacagacggctgctgtgtgactccggcattactgagtcttcatcagaatacagccccgttatccgggtcaaaaccagcacagctgccattctgacatctttgtggctactcgagcaaccctacttcgctacatataaagcaaagaatgccattatcaagatggtggaaaacagagatactgggtgccaaattggcccaaacatcgagagggaatctaagagcgatgccggagggagtgtagctgtggccactccgggaggcacagaggagagaaatgggcagaataagtcttgccaaaacattctgaatcggatgccaaccgaagctaagaacccagatattaaggagattaacgacgacatcatctcgattacacataataccaaaaaggaatttatcgacatcgacgagaatctactcgaggtggaggcctttactgaagaggaaatggacatgcatatctctgactacgaggaggatatcgaggagagtgtaggtggatttagatcgccaagtctcgccatttgtatgatgactcttccacagcagctggaggaagaattcacggaggaagtgcaatgccaacgtgaagaaccgcttgaaacaatcatggaggaaaagtcaaccgagcaaaagggtatgattgaagccttcagtcatccagggcataccacacctcagtctatgcaggtggacacctccagcgagatctcttcagcccagatcagcacatacaaggagaagagttcctccgtgcccctgctgatcagcaatggcgtcaatgtcgcatctcaaccgccagcacctaccccacagaagactcagaggaacgagttcacagcccagctgccagattgtagcgagagtgtgcgacagatgcttcaggacgaaatgtttaaactggtgcagctacaacagattaattttatgtctttgatgcagattgtcgggagcagcttcgcaaatttgcccgatacgcagcaattagtgcaacagtcccagagtgtccacctgggcgagtcccaggagtcaaatctgcgtggatgtggcgacgtcgaagactcaaacaaaaacctcaaagagagatttttcataaagccacagagcatgggtgaaaatgccagggagcccagaaaaaatagcccgcattgccacgaaggtaccatcccaagcggtcagaacagtacgggcaatgtgcagaacgtgccccacggatctatccctttgtgccaactgaatggtcagcccaggaaaaagggcccaatcccttcctcacagaacctgccaagcacaagcttctatccagctccggcagggaacactcatctctacctgctctctactcctagtgtggtgcagaaggcgccaagactcattccacacgctaaaaccttctcccccggtgatggttttcctttgctacagtttaaaagtaagcaggagtttcagcccctgtttctgcatacgggtagcattcctcaggtgccttttcgaccactaccgcagccaagagaagcctggggattatcagattccttccagcctgccctgccccaaagagcagcacagacaacacctgccagtcatctgaacgtgagccagtacaacacagaggccagaaagaaagaagttgagcagaaaacgtgggctgaaacagtaattactgagattcctaaccatgtgaacctggaccaatatgtcggccaagaaaacctcaccccccagcaggatagctccgtcttcatcaagcccgaaaaactgttcgacgtaaaacctggcacccttgaaatttcgcctcatcattcttttggtctccccctgctgtacttgcccctaaagcctcccaacatgttcccctcaacttcgcgggcaagtatcaccgtaccaagcacgcccattcagcccatagccgaagagagaaagtatccacgactgtcactgctgcattcccacctgtcacccgaaaaccggtgtaaaaagacccagctaatacctctcgagaatctgattgctttcaaacaatcccagcagaaattgacgcacaatctcttcgagcagggcgatgccggtcacctccaactgctgaaggtgaaaattgagcctcctgaagtcagacaagggaaagatagtaaaaagagacagcggaggcgggcagagaaagaactgcaggaaaagcgctgtgaaaagctgcgaaggaaacccaacgtgacctttcgtcccgaaaattctattataaacaacgacgacagcgagatcataaaaaaacccaaagagcagcaggagcattgcggatctcatcccctggacgatttcgacgtgccctttgagatgctgcaggatgataacacaagtgcagggctgcattttatggcctccgtaaaaaaaaaggcaataggctcgcaggacgcctctaccaacaccgatcccgaacacgagcccctgacagcccctcaattgctcgtccccgatgtttatctcaatttaaagctgagctccgagatgtccgagaaaccgtggagcccttcaattccccataccgtgaccaaccttgagctgcctgtgcgagaggaaccctcaaatgacaacgtgatcaaacagcaatctgatcacttggcagtcccgagtagcgcagaactccattatatggctgctagcgttaccaatgctgttccgccacacaatttcaagagtcagggcctacctaaacccgagttcagatttaaggggcaatccacaaaatctgattccgcggaagattatctcctttggaagaggctccagggagttagtgcagcttgccctgcgcctagctccgccgctcatcagctcgaacacttgtccgctaaattgcagaaaattgatgaacaactcctcgcgattcaaaacatcgcagaaaatatagaacaggatttcccaaagccggagatgttggaccttcactgcgataagattggacccgtggaccacattgaattttcaagtggcccagagttcaaaaagactcttgcttctaagacaatctctatcagtgaggaggtccggttcctgacccatatggatgaggaagaccaaagcgataagaaggaaaccagtgaacccgaatttagcatcaccgagaattattccggccaaaagacctgcgtgtttcctaccgcagactcagcagtcagcctgagtagcagctcggatcaaaacactacatctcccggaatgaattccagcgacgagctctgtgaaagtgtttcagtgcaccctctccagatgaccggtctgactgacattgcggatatcatcgatgatctcatcatcaaagatggggtgtccagcgaggagcttggacttactgaacaagccatgggcactagcagaatccagcactactccgggaggcacagtcaacgcacggacaaagaaaggcgagagatccaggcttggatgaaacggaaacggaaagaacgaatggccaagtatctgaatgagctcgcagagaaacgtggacaggaacatgaccccttttgtcctagaagtaacccactgtacatgacgagccgggaaattaggctccgacagaagatgaaacacgaaaaggacagactccttcttagtgagcactactcacgccgtatatctcaagcatacggcctgatgaatgaacttctttcggaaagcgtgcaactccctacgcttccccagaaaccactcccaaataagccgtcccccacacagtcctcatcatgccagcactgcccatccccacgcggagaaaatcagcatggacacagtttcttgataaaccggcctgggaaggtaaagtacatgtctaaaccttcctatatacataaacgcaagagcttcggacagccccagggatctccatggccacacgggacggccacatttacaatccagaagaaggccggtggggctaaagctgccgttaggaaggcgacgcagtctccagttacctttcagaaaggcagtaacgctccatgccactcactgcaacacacaaagaagcacgggagcgccggactcgcaccccagacaaagcaggtgtgtgtggaatatgagagagaggaaaccgttgttagtccttggaccatccctagcgagatccacaagatccttcacgaatcgcataactccctattacaggatctgagcccgaccgaagaagaggagcccgaacacccctttggcgttggaggagtggattctgtctcggagagcacgggctctattctttctaaactcgactggaatgccatcgaggatatggtggccagcgtagaggatcaaggactgagcgttcattgggcgctcgatctcta

SEQ ID NO: 213958 - DNA, 9593 bp, Artificial Sequence
  derived and/or modified sequence
atggaaatcagactggagatactgactagcaccggcataaagcagaagaaaccgtggcctagagtgagttggctgggcaaggaaaaagaggccgtcttcctcttagatgacaagtttattaacgagatcaacctgcttagcggcaagattaaaaagaaaatcccgtctcttcagccgttcctgaaagatgtaatcgtgcttacaaccagttctaacgacgcctggctcgcaggtgttctgaccaccggtgagttgtttctgtggaataaggatcaagactgcttgaagacgatccctatcaccgagaaaccgaaggagatgatcaaagccacagtagcttcgtcactgcggctttatctgtacgttagcggaaacggcaagcgcatcgtgctcattaccccttccggatgtatctttctttgggagtacctggaattaaagaatattctgtcctcaaaatcgctgagcttagctggcagatggagccaggtaatcccagaagaagccgtgttattgccctcaactgaggacaaggaagccgttgttaacgccgtctttatcaaaaacgaactttttggtgattgttgtctatgcagcttcacattctactccggagagtgcctaaagttaacattcctggccattaggtggcatgagaatgtattcactagtgtgagatcgttgccttaccatgtccactgggcccagcaagactgccacctatgcagtttaattcctaagtgtgagtccgtgaagtctcgaggcgctctcattagcgccttcagtagagacgggcttacgctggcggtgacccttaaccagaaggatcccaaagcgacgcaggtgttgttcattaacaccttaaacttcgtcacactgtgcggaagtctcaaagggtgctcgaacaaaagccctgtggttcctgcaactctcatccgctcatactgggtcggggatatctcatggacgcacgattctttgttcctggcgtgtatgctgaaacgcggatctttagtgctattaacctgccagggtgagctgctgaccttgatcacttttggctgctccatcgaatttgggcctgctgagtttattcctctccatcctttaattacctatcgtccccagcagttcacattccaggactccaacaactcagtggacagttctgcttccgactctgatcccatgaggcagagattttccatcaaggcacatagccgcctcccatacctggtgatcagcgacggatacatggtgaccacgctgcgattccttgactcactatcaccgtccgtccatatgaggagcttacttcttgactcgacccagcggctggagaaaatttaccagtctgtgatactgtctaaaccaaaaggcaaaggcctcaatctgcgaagcctgaatagcctgcgaagctccttgcttgagcaccagggcaacgagagcagtgctgattttaccgtgcccaagtttctccaggccgaagaaacaattaacgaaaacgccgctgattttcaggatttcgaggccgaggagacgaacgaagggagacattttccagataatctttgccctttttggaataaaagagatgacgtcttgtgcagctccatgaaagagggaaggttggagttcgcatccatgttcgataccatccacgccaaggacgactccgaagaaaccgaccgcactatcacggaactgcactcaattcagaagtcccttctcgccgcatggacaataggcatctccaaaactgtgactgagaaaaaccttatgctgaattacatcgtcgtttgcatcacacactttttctacatcctgcagttcattaagtgcccattccctaaactagatttggttctgtctaaatcttctaggcacaacgcatggatcctctgtatctttcagttgtttcaccaatgcctctcaatccactactgggacattcgatacaagcaggatgtggggcacctgattaagttgacctctaatacagtaaaacttctcctcacccaacaacagaaagggcagcttttttccgaaaaactcctggcctgcttctacctccttaagatggttgcagacaatctcaatggcgtctacatcctccagcctgaggtgatcagtgcttcagcagacggttcgaagattaccgctcaggatagtctggttgtcccgatatttcaaatgttccaggacagtggcttccagaagaactggtcatggaactctttctttaagatacatcctcaggtggtaaatcctgtacagcaacctggacatagactactgattctgtggaggattctgtataaaaagaccctctggtaccaagcacagttgaataggcgcgttcccgaagccgatagtcagctaaccgagaaaatgacacacgaggcctcgactgtgaagtctcttctttgccaccttcaggctaaccttcaaagtaccggggattgtctgaatcagaccttggagctgaaaagcattaatggcgaggagtgcttcctgctggggtcctacgaaaaatccgtacagctctggaagaaagcactgcaggaaatagaggagaaaggcggacggaggacctactttctccaaatcagatattacctgagcctgctgtactgtcacctgtatagctacaatctgaatgacgcccagggcttgtgcgatcaactcgcgcgagagattctgcgctggagccagttacctgtgaaggagaacaaagattttagcggagcggcaaaatcacattttgagtgtggcatggtcgggggagtgcatcctgaggccgctgtgagggtggttcaaagcatggccagattcatggccgcatattttactaaccagcagctgtgcatcctgcctccacatcacgtgaacgtcctccctccactccatattaagacggaacagtcatttcggctgatccccctccagcacagtaaggtcgccagcgttgttcgggaccagaatctgagtaatgtctggacagttgagtacgccttggagctcctattcatcggcggactggtgccagaagccgtctggctagcttataagctcggtgactggaaaacctccgtgtctatcggcgtcgctttccagttgttctgtaaacgtgactccaactttatgcgatccaagaagaaatcattgaatctccctctcagaatgacaccggctcagatttttcaggagaagttgcagtgcgttctgggtcagcctgcaagtctggaagcgaagaacgaaatgggctccaaatataaacagttcaccgatcctatcgaggaggaggatgccaacctgctgtttggctcggtgcaggaggtactgaaggcatctgtgatggccgatgccgacatcctctcagagacttttcagctgctgattgactcagcaaaggacttcagcaagaggttgtggggccttgtgccttttggcctgtacttgcccgctcctcctctgtactgccctcagccggcaatattgagcgaagaagatggcgatgacttattactcaaagcagaaaaaaacaataggcagaaggttagtgggatcctccagcgggttctcctcctgttccgtgcggctcagtgttcctttccagttgcgcaatggtacatactgcagctccgctgggcacggaaagttatgcagaagatccgcatgaaaggatctttaccatcactgagcccgtttccacaatcattattgaactactgcaagggaggaatcgcttttttccgccctggagccgctggggaccataagctggatgaagtcagcatccgagcaattgggtgcttcagggagctgtgtgcactctgctggatgctgcacgtgagagacaaactctcctattcctgccgacagtatcagaaagcacgtgagaacgtgaaaggggaaaaggatctggaagtggagtttgattcctgcatgatcgagcattgcctgagtgctgtggaatgggcttatcggatgttgcctttttcaagattcttcaatatggaagagcttatacaggatatcatccttagccttattggcgaacttccccctatccgtaaggtagcagagatatttgtgaaagccttcccttatccagaggatgttcgggtacccctgagagataagtaccattcgctgcaccagagactgagacactgcgtggtgaaaggccctcagacagaagaaatgatgtctgtggtaatgcatagtatacaaaaggtgagggtgaaggcactgaagagagtgcagcgcaacatcgggtcttttgaggtgaacatttgggagcctattgaagaggaaaagccagatgaggccccaggggtagacaggtatagtctgggcaccagtcttagtaggtcaactctgactgagttgggagattcagtcgtgcactcggatgccgacactttttccgaagctctatctgtcgaagagaagagtaggattaatatttaccaaagaaacgcacccaaccatatggaattgacgtcaattcacaagcccactgataaacgtaagatgtgcaatcagaaagaaaacccaacaaagaaggaagatcacgagaagctgtctcagaataccctccctgtaattggtgtgtgggagtttgaacgcgatgacgatgagtatataaagtttctggacctgttcctctcatacatcttggaacgagatctcccatacagtagggacgctgacatcccatttctgacctcatttagcggaaaattgagggagcacgagctgaatagccttttgttcgatgttcacactacacttaagcgccatcagtccaagacaaaatcccagaatgttttcagagctgggtcttgctttgttgtggctccagaatcatatgagagcgagaagtcttccagccttaatgatgaatatggaatgcacctggagaatcagaaattatcgtcatccgtgttggtaaaccaggggattaaaccatttttgcaatacccttccaatgaagtgaacaaaaatgagggtatgagcggattgtttggtctcaaacagaggtctatctacaagattcaggacgacaccagggaaaaatgtctgattcagcgctcatccaaccacatcttctggacaccaaagtccattaagaccaggaggtgcatcttcaaagcaatccagtgcaacgacatcaacccacaagaggacttgcccctggccctcaacacttttggtagtattggcaggttactggaatggatgattaggtggagcaaccggagactactgtgtgacagtggcatcacggagagctcatcagaatactctccagtgatacgtgtcaaaacttccacagccgctattctgacaagcctgtggctcctcgagcagccctacttcgcaacctataaggcaaagaacgctatcatcaaaatggtggaaaaccgagatactggctgccagatcggaccgaacatagaacgggaatctaaatcagacgccggaggctctgtggccgtcgcaaccccgggagggaccgaagagagaaatgggcagaacaagagctgccagaacatcctgaaccgaatgccaacagaggccaaaaatcccgatattaaagagataaatgacgacatcatctcgattactcacaacactaaaaaggagttcatcgatattgatgaaaacctgctggaagttgaagcttttacagaggaagaaatggatatgcacatctctgattacgaggaggacattgaggagagcgttggcggtttccgaagcccgagtctagcaatatgtatgatgacactgccccagcagctggaagaggagtttacagaggaggtgcagtgccagcgggaggaacctctggagaccattatggaagaaaaatcgaccgaacagaaagggatgatcgaagcctttagccaccctggccacaccacccctcagagtatgcaagtggatacttccagcgagatatcaagtgcccagatatccacatacaaagagaagtccagctcggtgccactgctgatatcgaacggcgttaatgtggcttcgcagcctcccgctcccactcctcagaagacgcagagaaatgagtttaccgctcagctgcccgactgctcagagtcagtcagacagatgcttcaagatgagatgttcaagttagtgcagcttcagcagattaattttatgtccctcatgcagatcgtggggtcaagcttcgctaatcttcctgacacacagcagctcgttcagcaaagccaatcagtgcacttgggcgagtctcaagaatcaaatcttagaggctgtggggatgtggaagatagtaacaaaaacctgaaggagaggttctttatcaagccccagtcaatgggagagaatgccagggagcctagaaaaaacagccctcactgccatgagggcacaatcccctctgggcagaattccacaggtaacgtgcagaatgtgccacatgggtccattccactgtgccagctgaatggacaaccacggaagaaaggaccaattccatcgtcccaaaatctgcctagcaccagcttttatcccgctccagcagggaatacacacttgtaccttctgagtacaccatccgtagtacagaaggccccaagacttatccctcatgccaagaccttttccccaggggatggttttccactgctgcaattcaaatcaaaacaggagttccagcctctgtttctccatacaggaagcattccgcaagtgccgttcaggcccctaccccagcctcgggaggcgtggggcctcagcgactcctttcagcctgctttacctcagcgagccgctcagaccacgccggcttcacacctcaacgtgtctcagtataacacagaagcaagaaaaaaggaggtcgaacagaagacgtgggcagagacagtaattacggagattcctaaccacgtcaacctggatcagtacgtcgggcaagagaacctcaccccccagcaggacagtagtgtgttcatcaaaccagaaaaactgttcgacgtcaagccaggaacgctggagatctctccccaccatagctttgggcttcctctgctctaccttcctctcaaacccccaaacatgtttccctccacctctagggcgtcaatcaccgtgccttccactcccatccagcctatagctgaagagcggaagtatcccagactgtctctcctccattctcatttaagcccagaaaaccggtgtaagaaaacacagctcatcccattagagaacttgatcgcattcaagcagtcgcagcagaagcttacccacaatctgttcgaacagggcgacgcgggacatctgcaattgttaaaggtcaagattgaacccccagaggtccgacagggcaaagatagcaaaaagcgtcagcggaggagagccgagaaggagctgcaggagaagcgctgcgaaaaattaagacgcaagcccaatgtgacttttaggccggaaaattctatcattaacaatgatgactcagagataataaagaagcctaaggagcagcaagagcactgtgggtctcatcctctggacgattttgacgtgccctttgagatgcttcaggatgataatacttcagcaggactacacttcatggcgtcagtcaagaaaaaggcaatagggtcgcaggatgcctcaactaacaccgatcccgagcacgaaccactgaccgcaccgcagctactggtccctgatgtctatctgaacctgaaactgagtagcgagatgtcagaaaaaccatggtcaccatccataccacacactgtaacaaacctggagctcccagttcgggaggagccttcaaacgataatgtaatcaagcagcagtcggaccaccttgccgtgcccagttcggccgaactccactatatggctgccagcgtcaccaatgccgtgcctccacataacttcaaaagccaaggcctgccaaagcctgagtttcggtttaaaggtcagtcgacaaagtccgattctgctgaagattatctgttatggaagagactacagggcgtctccgctgcctgccctgcccctagtagcgccgctcatcagctggaacacctgtcagcgaaactgcaaaaaatcgacgaacagctcttggctattcagaacatcgccgagaatattgaacaggactttcctaagccagagatgctggatttgcattgcgataagattggtccagtggatcacatagagttttcctctggaccagagttcaagaagacgctggcaagtaagacaatttcgatttctgaagaagtccggttcctgacccacatggacgaggaggatcagtccgacaagaaagagacatcagaacccgagtttagtattactgagaactattctggtcaaaaaacatgtgtttttccgacagcggactccgctgtgtccctgagctcgtctagcgatcaaaatacaacttctcctggcatgaattcctccgatgaactgtgtgagagtgtgtcagtgcatccgttgcagatgacagggctaaccgacatcgcagacatcatagacgacctgatcatcaaggacggtgtgtcatccgaggagcttggtcttaccgaacaggcaatgggcacctccaggatccagcattattccggaaggcatagtcagcgcaccgacaaagaaagaagggaaattcaagcttggatgaaaagaaagcgcaaagaaagaatggctaagtatttaaacgagctagctgaaaaacgtggccaggagcatgatcctttttgcccacgctcgaaccccctttacatgacttcgcgagaaatccggctacgccagaagatgaaacacgagaaagaccgattgctgctgtcagaacactactcaaggagaatttcacaggcctatggcctgatgaacgagttactttcagaaagcgtgcagctgcctacactcccacagaaacccctgccgaataagccatcccccacgcagagcagctcctgtcaacactgcccatcacccagaggagagaatcaacatggacacagctttctgatcaaccgtcctgggaaggtcaaatacatgagcaaacccagctatattcataaacggaaaagctttggacagccccaggggagcccttggccgcatggtaccgcgacatttaccatccagaaaaaggctggcggagcgaaggccgcagtcaggaaggcaacccagtccccggtcacttttcaaaagggctctaacgctccatgccatagcctgcagcacactaaaaaacacggctctgccggtttagccccacagaccaagcaggtgtgcgtggaatacgagagggaagagaccgtagtctcaccatggaccatccctagcgagatccataaaatcctgcacgagagccacaattccctcttgcaagatctgagcccaacagaggaagaggagcccgaacatcccttcggggtcggtggcgttgacagcgtgagcgagtctacaggatcgatcctcagtaagctggattggaatgctatcgaggatatggtggcatctgtcgaagaccagggactgagtgttcactgggccctcgatcttta

SEQ ID NO: 213959 - protein, 396 aa, Artificial Sequence
  derived and/or modified sequence
MAMIELGFGRQNFHPLKRKSSLLLKLIAVVFAVLLFCEFLIYYLAIFQCNWPEVKTTASDGEQTTREPVLKAMFLADTHLLGEFLGHWLDKLRREWQMERAFQTALWLLQPEVVFILGDIFDEGKWSTPEAWADDVERFQKMFRHPSHVQLKVVAGNHDIGFHYEMNTYKVERFEKVFSSERLFSWKGINFVMVNSVALNGDGCGICSETEAELIEVSHRLNCSREARGSSRCGPGPLLPTSAPVLLQHYPLYRRSDANCSGEDAAPAEERDIPFKENYDVLSREASQKLLWWLQPRLVLSGHTHSACEVHHGGRVPELSVPSFSWRNRNNPSFIMGSITPTDYTLSKCYLPREDVVLIIYCGVVGFLVVLTLTHFGLLASPFLSGLNLLGKRKTR

SEQ ID NO: 213960 - protein, 243 aa, Artificial Sequence
  derived and/or modified sequence
MERAFQTALWLLQPEVVFILGDIFDEGKWSTPEAWADDVERFQKMFRHPSHVQLKVVAGNHDIGFHYEMNTYKVERFEKVFSSERLFSWKGINFVMVNSVALNGDGCGICSETEAELIEVSHRLNCSREARGSSRCGPGPLLPTSAPVLLQHYPLYRRSDANCSGEDAAPAEERDIPFKENYDVLSREASQKLLWWLQPRLVLSGHTHSACEVHHGGRVPELSVPSFSWRNRNNPSFIMGTDA

SEQ ID NO: 213961 - DNA, 1191 bp, Artificial Sequence
  derived and/or modified sequence
atggcgatgatcgaattgggatttggacggcagaatttccatcccctaaaacgcaaatctagcctgctgctgaagctcatagctgtggtgttcgcagtgctgcttttttgcgagtttttgatttattacctcgctattttccagtgcaattggcccgaggtcaaaaccaccgctagcgatggtgagcagactacccgggaaccagtgttgaaagcaatgttcctagcagatacgcacctgcttggtgagtttttagggcattggttagacaaactgagacgagagtggcagatggaaagagctttccagactgccttgtggctactccagccagaggtggtgtttatcctaggtgacatcttcgatgaaggtaaatggtccacaccggaggcatgggccgatgacgtagaaaggtttcagaagatgttcagacacccatcccatgttcagctgaaggtcgtagccgggaaccacgatataggattccactatgaaatgaacacatataaagtggagagatttgagaaagttttctccagcgagaggctgtttagctggaagggcatcaatttcgtgatggttaacagtgtggctttaaatggggatggatgtgggatttgcagcgagaccgaggcagagctaatagaagtgagccatcgtctgaattgtagccgcgaagcacgtggatcctcccgatgtggcccgggtccactccttcccactagtgccccagtactcttacagcactaccctctgtaccgtaggtctgacgcgaattgcagtggcgaagatgcggccccagccgaggaaagggacatcccatttaaggagaactacgatgtcttgagccgggaggccagtcagaagctcctctggtggctgcagccccggctggttctctccgggcatactcacagtgcttgcgaagtgcatcacgggggccgtgtaccagaattaagtgtgcccagtttctcttggcgcaacagaaacaaccctagtttcatcatgggatccatcaccccgaccgactacaccctcagtaaatgttacctgcccagggaagacgttgtcctgataatttactgcggggtggtgggttttttggtcgtgttgacattgacccatttcggattgttagccagtccttttctgtccggcctcaatctgctagggaagcgcaaaactaggtag

SEQ ID NO: 213962 - DNA, 1191 bp, Artificial Sequence
  derived and/or modified sequence
atggcaatgatagagctgggtttcgggcggcagaattttcatcctctgaagaggaagtcatccctcctgctcaagcttatcgcagtggtctttgccgtactgctcttctgcgaattcttaatctactacttggccatcttccaatgcaattggcccgaggtcaagaccactgcttccgacggggagcaaacgaccagggaacccgtcttaaaagccatgttcttggccgacactcatctcctgggcgagtttttgggacactggcttgacaaacttcgcagggagtggcaaatggagagagccttccagacagctctgtggctgttgcagcccgaggtggtgtttattctgggggatatctttgatgaaggaaagtggtcaacacctgaggcctgggctgacgatgtagaaagattccagaaaatgtttcgccatcccagccatgtgcagctgaaggtggttgctggcaatcatgacatcggattccattatgaaatgaacacctacaaggtggagaggttcgagaaggtgttctcttcggagcgattattctcgtggaagggcataaacttcgtcatggttaatagtgtggctctcaatggcgacggttgtgggatatgtagtgagacagaagcggagctgattgaagtcagtcaccgattgaattgcagtcgcgaggcacgaggtagctcccgctgcggccctggccctttactacccacctccgctcctgtcctcctgcaacattaccccctgtacagacggagcgatgcgaactgtagcggtgaagacgctgcccccgctgaggagagagatatcccatttaaggagaactacgacgttctgtcaagggaagctagccagaagctgctgtggtggctgcagccaaggcttgtgttaagcgggcacacgcactctgcatgtgaagttcaccacggcggacgggtccctgaactgtccgttccctctttttcttggagaaaccggaataatccaagttttatcatggggagcattactccgacagattataccctgtccaaatgttacttaccccgtgaggacgtcgttctgatcatttattgtggcgtagtgggatttcttgttgtgctaacattgacacacttcgggcttttagcctctcccttcctttcgggcttaaacttgctgggcaaacgaaagactcgctag

SEQ ID NO: 213963 - DNA, 1191 bp, Artificial Sequence
  derived and/or modified sequence
atggccatgattgagctgggcttcggccggcagaacttccaccccctgaagaggaagagcagcctgctgctgaagctgattgctgtggtgtttgctgtgctgctcttctgtgagttcctgatctactacctggccatcttccagtgcaactggccagaggtgaagaccacagccagtgatggagagcagaccacccgggagcctgtgctgaaggccatgttcctggccgacacccacctgctgggggagttcctgggccactggctggacaagctgcggcgggagtggcagatggagcgggccttccagacagccctgtggctgctgcagcctgaggtggtgttcatcctgggggacatctttgatgagggcaagtggagcaccccagaggcctgggcagatgatgtggagcgcttccagaagatgttccgccaccccagccacgtgcagctgaaggtggtggccggcaaccacgacatcggcttccactatgagatgaacacctacaaggtggagagatttgagaaggtgttcagcagcgagcggctcttctcctggaagggcatcaactttgtgatggtgaacagcgtggccctgaatggagatggctgcggcatctgcagcgagacagaggccgagctgattgaggtgagccaccggctgaactgcagccgggaggcccggggcagcagccgctgtggccctggccccctgctgcccaccagcgcccctgtgctgctgcagcactaccccctgtaccgccgcagtgatgccaactgcagcggagaagatgctgccccagctgaggagcgggacatccccttcaaggaaaattatgatgtgctgagccgggaggccagccagaagctgctgtggtggctgcagccccggctggtgctgagcggccacacccacagcgcctgtgaggtgcaccacggcggccgggtgcctgagctgtctgtgcccagcttctcctggaggaacagaaacaaccccagcttcatcatgggcagcatcacccccacagactacaccctgagcaagtgctacctgccccgggaggatgtggtgctgatcatctactgcggcgtggtgggcttcctggtggtgctgaccctgacccacttcggcctgctggccagccccttcctgagcggcctgaacctgctgggcaagaggaagaccaggtag

SEQ ID NO: 213964 - DNA, 2366 bp, Artificial Sequence
  derived and/or modified sequence
ccctaacgacagctcgcccgtgcttcgccctcgcagctctcctgtgtccccaaaatgcctttcccgcgtcccccgcccttcagcggtgactgcccaggggactctgtaacgcgacactcagactgccgagcctgccaggcacttcgcggagggcgctaggggccgggacgcggccgccgagcgtaggttccggcctttactccgagttgcgcacggagccccagctgcggttgtccgctctggggatcacaggccgcggagacccgggagccacccgccgggccccttcagacgacccgcttccgcaaaccggccgtgggactccggcgccgggcggacgaagcggctccgggaagactcggtcttccccgcccgcctgaggtcgccggggcggggcttcagtgacaggcccgcgcgctaccgcggaaacaggaagttggctgggtgcgcgccggctccggctgcagttcccgggtccctcggccaccgaagccaccctgccctggtgaaagggctcccgcaccgcccggtgctccccatctgcctggcgttgtgcgcagagctggaaagcatggctgttataaatgaattctgattttggggagcagatgccaacttagagcctcgtaccaatctctctgtctttaaaagatgaggtgacttggtgattttcctggaaaattataggtgcccagctaagacctgaatgccatcaccctccccagggctctgcagttttctcgtggtgaacccttgatggatttgttgttgcttgagaaatggcgatgatcgaattggggtttggaagacagaattttcatccattaaagaggaagagttcattgctgttgaaactcatagctgttgtctttgctgtgcttctattttgtgaatttttaatctattacttagcgatctttcagtgtaattggcctgaagtgaaaaccacagcctctgatggtgaacagaccacacgtgagcctgtgctcaaagccatgtttttggctgacacccatttgcttggggaattcctaggccactggctggacaaattacgaagggaatggcagatggagagagcgttccagacagctctgtggttgctgcagccggaagtcgtcttcatcctgggggatatctttgatgaagggaagtggagcacccctgaggcctgggcggatgatgtggagcggtttcagaaaatgttcagacacccaagtcatgtacagctgaaggtagttgctggaaaccatgacattggcttccattatgagatgaacacatacaaagtagaacgctttgagaaagtgttcagctctgaaagactgttttcttggaaaggcattaactttgtgatggtcaacagcgtggcgctgaacggggatggctgtggcatctgctctgaaacagaagcagagctcattgaagtttctcacagactgaactgctcccgagaggcacgtggctccagccggtgtggacctgggcctctgctgcccacgtctgcccctgtcctcctgcagcattatcctctgtatcggagaagtgatgctaactgttctggggaagacgctgctcctgcagaggaaagggacatcccatttaaggagaactatgacgtgctttcacgggaggcatcacaaaagctgctgtggtggctccagccgcgcctggttctcagtggccacacgcacagcgcctgcgaggtgcaccacgggggccgagtccccgagctcagcgtcccatctttcagttggaggaacagaaacaaccccagtttcatcatgggtagcatcacgcccacagactacaccctctccaagtgctacctcccacgtgaggatgtggttttgatcatctactgtggagtggtgggcttccttgtggtcctcacactcactcactttgggcttctagcctcaccttttctttctggtttgaacttgctcggaaagcgtaagacaagatgaagagcaggcgccattataaatatcaaagcccaagaaatggaactttgggcagagatcatgttagaatcaagtggatgatgagaccaattacaggccgtctctctgcacagcacagaaattctcaatcactgaaatgagtaactgcaaaataaatagttgattgtactgttctcatgctataaaagtggacaggtactctacaacaaatctgttttctcatttttatcaaatatatgtatcatcaaaggttgcatctgtacagtatgtaaatgctattaatgtcgtcactcacatgcacgacagtccttgttcccccaggaagggcctggtggccccagcacacacttgggattatgtgtatacataaataaatattgggctgtttccctcttcctg

SEQ ID NO: 213965 - DNA, 1910 bp, Artificial Sequence
  derived and/or modified sequence
accgaagccaccctgccctggtgaaagggctcccgcaccgcccggtgctccccatctgcctggcgttgtgcgcagagctggaaagcatggctgttataaatgaattctgattttggggagcagatgccaacttagagcctcgtaccaatctctctgtctttaaaagatgaggtgacttggtgattttcctggaaaattatagcgatctttcagtgtaattggcctgaagtgaaaaccacagcctctgatggtgaacagaccacacgtgagcctgtgctcaaagccatgtttttggctgacacccatttgcttggggaattcctaggccactggctggacaaattacgaagagatggagttttgctgtgttgcccatgctggttttgaactcctggcctcaagtgatcctccctccttggcctcccaaagcattgaaattacagggaatggcagatggagagagcgttccagacagctctgtggttgctgcagccggaagtcgtcttcatcctgggggatatctttgatgaagggaagtggagcacccctgaggcctgggcggatgatgtggagcggtttcagaaaatgttcagacacccaagtcatgtacagctgaaggtagttgctggaaaccatgacattggcttccattatgagatgaacacatacaaagtagaacgctttgagaaagtgttcagctctgaaagactgttttcttggaaaggcattaactttgtgatggtcaacagcgtggcgctgaacggggatggctgtggcatctgctctgaaacagaagcagagctcattgaagtttctcacagactgaactgctcccgagaggcacgtggctccagccggtgtggacctgggcctctgctgcccacgtctgcccctgtcctcctgcagcattatcctctgtatcggagaagtgatgctaactgttctggggaagacgctgctcctgcagaggaaagggacatcccatttaaggagaactatgacgtgctttcacgggaggcatcacaaaagctgctgtggtggctccagccgcgcctggttctcagtggccacacgcacagcgcctgcgaggtgcaccacgggggccgagtccccgagctcagcgtcccatctttcagttggaggaacagaaacaaccccagtttcatcatgggaacagatgcttagttgagcatcaaggggcaggaagacacctttccctccttgttcctcgctgaccgatgaccctggaactccacggtgcctctctgaatctctgttatggatcccccactatatttgatgggaacccagtgagccaggggccagttttgacagggtagcatcacgcccacagactacaccctctccaagtgctacctcccacgtgaggatgtggttttgatcatctactgtggagtggtgggcttccttgtggtcctcacactcactcactttgggcttctagcctcaccttttctttctggtttgaacttgctcggaaagcgtaagacaagatgaagagcaggcgccattataaatatcaaagcccaagaaatggaactttgggcagagatcatgttagaatcaagtggatgatgagaccaattacaggccgtctctctgcacagcacagaaattctcaatcactgaaatgagtaactgcaaaataaatagttgattgtactgttctcatgctataaaagtggacaggtactctacaacaaatctgttttctcatttttatcaaatatatgtatcatcaaaggttgcatctgtacagtatgtaaatgctattaatgtcgtcactcacatgcacgacagtccttgttcccccaggaagggcctggtggccccagcacacacttgggattatgtgtatacataaataaatattgggctgtttccctctt

SEQ ID NO: 213966 - DNA, 4236 bp, Artificial Sequence
  derived and/or modified sequence
aagcaagtgcataataaatattatagttatcctgattgtctcctttattcatcacacacttcctaagcacatctctggagggcactttccaaggctccgggggaggagaggaaagaggcgcagccaggcctggtgggtcccggaggggcagcgcggcgcgggaggggaacggggaggcacggcctggctgccaccgcgcgcggaacccgggagcggctccggggctgtcagctgcccgcctggctcctccaaggcctggagctcggacgcgggctctgggggcttctggggcgcggaagcgggctcgcggggagcagtggccgcccccggccgccgcggtggctgtgctcagaagccggccctggcgtcaggaggccgggcgcgcggcgcggggcgcgagttcccctgcccgcctgtgcgccccgcaacgggcctttcctgggccctaacgacagctcgcccgtgcttcgccctcgcagctctcctgtgtccccaaaatgcctttcccgcgtcccccgcccttcagcggtgactgcccaggggactctgtaacgcgacactcagactgccgagcctgccaggcacttcgcggagggcgctaggggccgggacgcggccgccgagcgtaggttccggcctttactccgagttgcgcacggagccccagctgcggttgtccgctctggggatcacaggccgcggagacccgggagccacccgccgggccccttcagacgacccgcttccgcaaaccggccgtgggactccggcgccgggcggacgaagcggctccgggaagactcggtcttccccgcccgcctgaggtcgccggggcggggcttcagtgacaggcccgcgcgctaccgcggaaacaggaagttggctgggtgcgcgccggctccggctgcagttcccgggtccctcggccaccgaagccaccctgccctggtgaaagggctcccgcaccgcccggtgctccccatctgcctggcgttgtgcgcagagctggaaagcatggctgttataaatgaattctgattttggggagcagatgccaacttagagcctcgtaccaatctctctgtctttaaaagatgaggtgacttggtgattttcctggaaaattataggtgcccagctaagacctgaatgccatcaccctccccagggctctgcagttttctcgtggtgaacccttgatggatttgttgttgcttgagaaatggcgatgatcgaattggggtttggaagacagaattttcatccattaaagaggaagagttcattgctgttgaaactcatagctgttgtctttgctgtgcttctattttgtgaatttttaatctattacttagcgatctttcagtgtaattggcctgaagtgaaaaccacagcctctgatggtgaacagaccacacgtgagcctgtgctcaaagccatgtttttggctgacacccatttgcttggggaattcctaggccactggctggacaaattacgaagggaatggcagatggagagagcgttccagacagctctgtggttgctgcagccggaagtcgtcttcatcctgggggatatctttgatgaagggaagtggagcacccctgaggcctgggcggatgatgtggagcggtttcagaaaatgttcagacacccaagtcatgtacagctgaaggtagttgctggaaaccatgacattggcttccattatgagatgaacacatacaaagtagaacgctttgagaaagtgttcagctctgaaagactgttttcttggaaaggcattaactttgtgatggtcaacagcgtggcgctgaacggggatggctgtggcatctgctctgaaacagaagcagagctcattgaagtttctcacagactgaactgctcccgagaggcacgtggctccagccggtgtggacctgggcctctgctgcccacgtctgcccctgtcctcctgcagcattatcctctgtatcggagaagtgatgctaactgttctggggaagacgctgctcctgcagaggaaagggacatcccatttaaggagaactatgacgtgctttcacgggaggcatcacaaaagctgctgtggtggctccagccgcgcctggttctcagtggccacacgcacagcgcctgcgaggtgcaccacgggggccgagtccccgagctcagcgtcccatctttcagttggaggaacagaaacaaccccagtttcatcatgggtagcatcacgcccacagactacaccctctccaagtgctacctcccacgtgaggatgtggttttgatcatctactgtggagtggtgggcttccttgtggtcctcacactcactcactttgggcttctagcctcaccttttctttctggtttgaacttgctcggaaagcgtaagacaagatgaagagcaggcgccattataaatatcaaagcccaagaaatggaactttgggcagagatcatgttagaatcaagtggatgatgagaccaattacaggccgtctctctgcacagcacagaaattctcaatcactgaaatgagtaactgcaaaataaatagttgattgtactgttctcatgctataaaagtggacaggtactctacaacaaatctgttttctcatttttatcaaatatatgtatcatcaaaggttgcatctgtacagtatgtaaatgctattaatgtcgtcactcacatgcacgacagtccttgttcccccaggaagggcctggtggccccagcacacacttgggattatgtgtatacataaataaatattgggctgtttccctcttcctgtgaagtggttctcaaattcctatgtactgtaaagctgtacccttaaaagtacagatgtggccgggcacagtggctcacacctgtaatcccagcactttgggaggctgaggcgggtggatcacttgaggtcaggagttcaagaccagcctggccaacatggtgaaacctcgtctccgctagaaatacaaaaattagccaagcatggtagcaagtgcctataataccagctgaggctgaggcaggagaatcccttgagcccgggaggcggaggttgcagtgagccaagatcatgccactgcactccagcctgggcaacagagtgagactccgtctcaaaaaatatatttaaaaaaaaaaaagtacagatgtgatgtgcagaacatattgttttcgtagatttttatacttgatcaattaatggaatcagatttttagataagtgtaattttctctataggagaccacgttgctacatctgttaatgcctgtcagtgatcaaaagaaacttaaaaagtggaatgggatatggcttttggtacctgaaaataaatgctttaataattgtaagccagataaaagttattctttttgttttttttcttaacagtctggctgttgtttgaattaaactcttaaacaggatgtttagttagagggtaattgttgagtaatgatgcatacaacagcatacttccctttcttgctgggggtgcagcttttcagttttcttgttttactttgacagtgcaaggggaactgaaaataatttccattgtattatttatcttagttcagctgagggctttatgagacagtggatggggaggcagtaagacggtgatgagataaaatgtgtgtgttgcactgactgtctataaagttatcctttcttcatgaaaaagtagcatttaaatctggatgagtttataaaggattacaaaatgctgatttatagagtaaactttaaaatattaaagactaaagactaaaagaagagtaataatgaagtaatgtaggctgtcacttctctagatttgtattgttgaaaatttaactttggacatctttatagattattattttagacctacaaaaactaccctcaactctgtggctacagctagaatatgaagcatcattgctacaccagttcttactttctagatattgttggtgtgtcataatgtttgaggctgtatttgtaagtcttgcaagtgtgagaaagagccgtatcttttgactttatacttcagattaaggttttgtaatgtttcttcttcaaaaggcaagtgaagctgtcatcctcattctcctaggccagacacaaacattgacacgtcaaggttttttttttttttttttttggcctgagtctcactttgatgtccaggctggagtgcgatggcacgacctcggctcactgcaat

SEQ ID NO: 213967 - DNA, 1191 bp, Artificial Sequence
  derived and/or modified sequence
atggccatgatcgagctgggcttcggccggcagaacttccaccccttaaaaaggaaaagttcactcctcctgaagctgatcgccgtagtttttgctgtgctgctgttctgcgaatttctcatctactacttggccatttttcagtgcaattggcctgaagtgaagactacagctagcgacggcgaacagactacccgggagccagtacttaaggccatgtttctggctgatacccacctgcttggagagtttctaggccattggctggacaagctgaggcgggagtggcagatggagagagctttccagacggccctctggcttttacagcccgaagtagtttttatcttaggggacatttttgatgaagggaagtggtcaacacctgaagcttgggcagatgacgtagagaggtttcagaagatgttccgccaccccagtcacgtgcagctcaaagttgtggccggtaatcacgatattggattccattacgagatgaacacctacaaagtggagcgcttcgagaaggtgttttcatccgagcgcctgttttcctggaagggcatcaacttcgtcatggtgaacagcgtggccttgaatggcgacggttgcggcatttgctccgagaccgaggccgagttgatagaagtttcacatcgactgaactgttcccgggaggctcggggctccagtaggtgcgggccagggcccctgctccccaccagcgcccctgtcctactccagcactatcccctttatcgtcgcagcgacgctaactgcagcggcgaagacgctgcccccgccgaagagcgagatatcccgttcaaagaaaactatgatgtgttatcccgggaggccagccagaagttgctgtggtggctccagcctcgtctagtattaagcggtcacacacatagcgcttgtgaggtgcatcacggagggagagtaccagaactttctgtcccatcattttcttggagaaaccggaataaccctagtttcattatgggctcaattacccctacggattacaccttgagtaagtgttatctcccgcgcgaagatgtcgtgctgatcatttattgcggggtggtcggctttcttgtggtgctgactctcacccattttggtctcctagctagcccctttctctccgggctgaatctgctgggaaagaggaaaacgagatag

SEQ ID NO: 213968 - DNA, 1191 bp, Artificial Sequence
  derived and/or modified sequence
atggccatgatcgagctgggcttcggccggcagaacttccaccccctcaaacggaagtccagtctgctcctgaaactgatagctgtggtgttcgctgtgctgctgttctgcgaattcctgatttactacctcgctatttttcagtgcaattggccagaggtaaaaacgactgccagtgacggagaacagacaactcgcgagccagtcctgaaggccatgtttctggcggatacccatctgttgggcgagttcctgggccattggctggacaaattgcgtagagagtggcagatggagcgcgcttttcagactgccctttggttgctacagccggaggtggttttcattcttggcgatatctttgatgaaggtaaatggtccaccccagaagcctgggccgacgatgttgaaagattccagaaaatgttccgccacccatcgcacgtgcagctcaaggtggtggccggcaatcacgacatcggatttcactacgaaatgaacacgtacaaggtggagcgttttgagaaagtgttttcttccgaaaggctgttctcatggaaaggaattaatttcgtaatggtgaattctgtcgccctcaatggagatggatgtggtatttgcagcgagaccgaagccgagcttattgaggtttcccacaggttgaattgttctagggaagcacgaggatcatccaggtgcggacctggccccctcttgccaacatcagcgccagtccttctccagcactaccctctctaccgccgaagtgacgcaaactgttccggggaagatgcagctcccgctgaagaacgggacatacccttcaaagaaaactatgatgtgctaagtcgcgaggcatcacaaaaactcctttggtggctacagcctcgcctcgttctgagcggtcacacccattccgcgtgcgaggtgcaccacggtgggcgcgtcccggagttgagcgttcctagtttctcatggaggaacagaaacaacccatcatttatcatgggcagtataacacccacagattatactctcagcaagtgctatctccctcgggaggacgtcgtgctgattatctactgcggcgtggttggctttttagtcgtcctgacacttacccatttcgggttgctggcctctccttttctctccggcttgaacctgctgggcaagcgcaagacacgttag

SEQ ID NO: 213969 - DNA, 1191 bp, Artificial Sequence
  derived and/or modified sequence
atggccatgatagagctaggctttggtcgccaaaactttcaccccctgaagagaaaatccagcttgctgctgaagctcattgcagtcgtgtttgccgttctgcttttttgcgaatttctgatctactacttggccatctttcaatgcaactggccggaggtgaaaacgactgcctcagacggcgagcagacaacccgtgagccggtgctgaaggccatgtttttagcggatacacatttgctgggggagttcctgggccactggctcgacaaactgcggagagaatggcaaatggagcgagccttccagaccgccctgtggctgctgcagcctgaagtggtgttcattctgggtgacatttttgacgagggcaaatggagcacccccgaggcctgggcagatgatgtggaacgctttcagaaaatgttcagacacccttcgcacgtgcagctgaaagtcgtcgccggtaaccatgatattgggtttcactacgaaatgaatacttataaagtcgaacggttcgaaaaagtattttcttctgaaagactcttctcctggaaaggaatcaacttcgtcatggttaatagcgtcgccctcaacggggacggctgcggcatttgtagcgagacagaagcagagttaatcgaggttagtcatcgcctcaattgcagccgagaggcgaggggcagttctcggtgcggtcctggacctctgttgcccaccagcgccccagtgttgctgcagcactaccctctgtatcgcaggagcgacgccaactgctctggcgaagatgccgctccagccgaggagagagatatcccattcaaggagaattacgacgtcctgagcagagaagcttcccagaagctgctgtggtggctgcagcccagactggtactttctggccacacgcatagtgcatgcgaagtccatcatggaggtagggttcccgaactgtctgtgcctagtttctcatggcggaataggaataacccgtcatttattatgggcagtatcacccccacagactataccctgtcaaaatgttatttacctagggaggacgttgtccttatcatctactgcggtgtggtggggttcctggtcgttctgacactgacccatttcggactattggccagcccattcctgagcgggttaaatctacttgggaagcgaaaaacacggtag

SEQ ID NO: 213970 - DNA, 1191 bp, Artificial Sequence
  derived and/or modified sequence
atggccatgatcgagctcggtttcgggcgtcagaatttccacccactgaaaagaaagagcagtctactgctgaagctgattgctgtcgttttcgcggtgctgcttttttgtgagttccttatttattatttggctatatttcagtgtaattggcctgaagtgaagacaaccgcaagcgacggtgagcagacgacccgagagccagtcctgaaggccatgttcttggcggacacacacttactgggcgaattcttaggccactggctcgataagctgagaagagagtggcaaatggaacgagctttccagacagctctctggctgctacaaccggaggtagtgtttattctgggagatatatttgacgagggaaagtggagtacccccgaagcctgggccgatgacgttgaacggttccagaaaatgttcagacacccatcacacgtccaactcaaagtcgtggccggtaaccatgacattggcttccactatgagatgaatacctacaaagttgaacgattcgaaaaggtcttctcttctgagagactgttctcatggaaaggtataaattttgttatggtaaactcagtcgccttgaacggggatggctgcggtatatgttccgagacagaagccgagctgattgaagtctctcatagactgaattgcagccgggaggccagggggtcaagccgatgcggcccaggcccactcctacccacatctgccccagtgttgttgcaacactatcccctgtatagaagatccgacgctaattgtagcggtgaggacgcagcacctgccgaggaacgggatatccccttcaaggagaactatgacgtcttatccagggaagcaagccaaaagctgctctggtggttgcaaccgagactcgtgctgtcaggccacacccatagcgcgtgcgaggtgcaccatggtggcagagtgcccgaactatcagtgccatcctttagctggcgcaacaggaacaacccttccttcattatggggtccattacaccgacggactatacactgtctaaatgctatctgccacgcgaggacgtggtattgatcatctactgcggcgtcgttggtttccttgtcgtcctgacccttacccatttcgggttacttgcctccccctttctgtcaggccttaatcttctgggaaaacgaaaaacgcggtag

SEQ ID NO: 213971 - DNA, 1191 bp, Artificial Sequence
  derived and/or modified sequence
atggccatgatcgagctgggcttcggcagacagaacttccaccccctgaagagaaagagcagcctgctgctgaagctgatcgccgtggtgttcgccgtgctgctgttctgcgagttcctgatctactacctggccatcttccagtgcaactggcccgaggtgaagaccaccgccagcgacggcgagcagaccaccagagagcccgtgctgaaggccatgttcctggccgacacccacctgctgggcgagttcctgggccactggctggacaagctgagaagagagtggcagatggagagagccttccagaccgccctgtggctgctgcagcccgaggtggtgttcatcctgggcgacatcttcgacgagggcaagtggagcacccccgaggcctgggccgacgacgtggagagattccagaagatgttcagacaccccagccacgtgcagctgaaggtggtggccggcaaccacgacatcggcttccactacgagatgaacacctacaaggtggagagattcgagaaggtgttcagcagcgagagactgttcagctggaagggcatcaacttcgtgatggtgaacagcgtggccctgaacggcgacggctgcggcatctgcagcgagaccgaggccgagctgatcgaggtgagccacagactgaactgcagcagagaggccagaggcagcagcagatgcggccccggccccctgctgcccaccagcgcccccgtgctgctgcagcactaccccctgtacagaagaagcgacgccaactgcagcggcgaggacgccgcccccgccgaggagagagacatccccttcaaggagaactacgacgtgctgagcagagaggccagccagaagctgctgtggtggctgcagcccagactggtgctgagcggccacacccacagcgcctgcgaggtgcaccacggcggcagagtgcccgagctgagcgtgcccagcttcagctggagaaacagaaacaaccccagcttcatcatgggcagcatcacccccaccgactacaccctgagcaagtgctacctgcccagagaggacgtggtgctgatcatctactgcggcgtggtgggcttcctggtggtgctgaccctgacccacttcggcctgctggccagccccttcctgagcggcctgaacctgctgggcaagagaaagaccagatag

SEQ ID NO: 213972 - protein, 354 aa, Artificial Sequence
  derived and/or modified sequence
MAESPTEEAATAGAGAAGPGASSVAGVVGVSGSGGGFGPPFLPDVWAAAAAAGGAGGPGSGLAPLPGLPPSAAAHGAALLSHWDPTLSSDWDGERTAPQCLLRIKRDIMSIYKEPPPGMFVVPDTVDMTKIHALITGPFDTPYEGGFFLFVFRCPPDYPIHPPRVKLMTTGNNTVRFNPNFYRNGKVCLSILGTWTGPAWSPAQSISSVLISIQSLMTENPYHNEPGFEQERHPGDSKNYNECIRHETIRVAVCDMMEGKCPCPEPLRGVMEKSFLEYYDFYEVACKDRLHLQGQTMQDPFGEKRGHFDYQSLLMRLGLIRQKVLERLHNENAEMDSDSSSSGTETDLHGSLRV

SEQ ID NO: 213973 - protein, 287 aa, Artificial Sequence
  derived and/or modified sequence
MCGRRRRQRAALLSHWDPTLSSDWDGERTAPQCLLRIKRDIMSIYKEPPPGMFVVPDTVDMTKIHALITGPFDTPYEGGFFLFVFRCPPDYPIHPPRVKLMTTGNNTVRFNPNFYRNGKVCLSILGTWTGPAWSPAQSISSVLISIQSLMTENPYHNEPGFEQERHPGDSKNYNECIRHETIRVAVCDMMEGKCPCPEPLRGVMEKSFLEYYDFYEVACKDRLHLQGQTMQDPFGEKRGHFDYQSLLMRLGLIRQKVLERLHNENAEMDSDSSSSGTETDLHGSLRV

SEQ ID NO: 213974 - DNA, 1065 bp, Artificial Sequence
  derived and/or modified sequence
atggccgagagccccaccgaggaggccgccaccgccggcgccggcgccgccggccccggcgccagcagcgtggccggcgtggtgggcgtgagcggcagcggcggcggcttcggcccccccttcctgcccgacgtgtgggccgccgccgccgccgccggcggcgccggcggccccggcagcggcctggcccccctgcccggcctgccccccagcgccgccgcccacggcgccgccctgctgagccactgggaccccaccctgagcagcgactgggacggcgagagaaccgccccccagtgcctgctgagaatcaagagagacatcatgagcatctacaaggagcccccccccggcatgttcgtggtgcccgacaccgtggacatgaccaagatccacgccctgatcaccggccccttcgacaccccctacgagggcggcttcttcctgttcgtgttcagatgcccccccgactaccccatccacccccccagagtgaagctgatgaccaccggcaacaacaccgtgagattcaaccccaacttctacagaaacggcaaggtgtgcctgagcatcctgggcacctggaccggccccgcctggagccccgcccagagcatcagcagcgtgctgatcagcatccagagcctgatgaccgagaacccctaccacaacgagcccggcttcgagcaggagagacaccccggcgacagcaagaactacaacgagtgcatcagacacgagaccatcagagtggccgtgtgcgacatgatggagggcaagtgcccctgccccgagcccctgagaggcgtgatggagaagagcttcctggagtactacgacttctacgaggtggcctgcaaggacagactgcacctgcagggccagaccatgcaggaccccttcggcgagaagagaggccacttcgactaccagagcctgctgatgagactgggcctgatcagacagaaggtgctggagagactgcacaacgagaacgccgagatggacagcgacagcagcagcagcggcaccgagaccgacctgcacggcagcctgagagtgtag

SEQ ID NO: 213975 - DNA, 864 bp, Artificial Sequence
  derived and/or modified sequence
atgtgcggcagaagaagaagacagagagccgccctgctgagccactgggaccccaccctgagcagcgactgggacggcgagagaaccgccccccagtgcctgctgagaatcaagagagacatcatgagcatctacaaggagcccccccccggcatgttcgtggtgcccgacaccgtggacatgaccaagatccacgccctgatcaccggccccttcgacaccccctacgagggcggcttcttcctgttcgtgttcagatgcccccccgactaccccatccacccccccagagtgaagctgatgaccaccggcaacaacaccgtgagattcaaccccaacttctacagaaacggcaaggtgtgcctgagcatcctgggcacctggaccggccccgcctggagccccgcccagagcatcagcagcgtgctgatcagcatccagagcctgatgaccgagaacccctaccacaacgagcccggcttcgagcaggagagacaccccggcgacagcaagaactacaacgagtgcatcagacacgagaccatcagagtggccgtgtgcgacatgatggagggcaagtgcccctgccccgagcccctgagaggcgtgatggagaagagcttcctggagtactacgacttctacgaggtggcctgcaaggacagactgcacctgcagggccagaccatgcaggaccccttcggcgagaagagaggccacttcgactaccagagcctgctgatgagactgggcctgatcagacagaaggtgctggagagactgcacaacgagaacgccgagatggacagcgacagcagcagcagcggcaccgagaccgacctgcacggcagcctgagagtgtag

SEQ ID NO: 213976 - DNA, 1065 bp, Artificial Sequence
  derived and/or modified sequence
atggcagagtctccaaccgaggaagcggctaccgctggggcaggcgcagccggacctggggccagctccgtggccggcgtcgtgggggtatcggggagcggggggggattcggccctccgttcctgcctgatgtgtgggcggcagccgcagccgcaggaggtgcaggtggcccaggctctggcctcgctcctctacccgggctccctccttctgcagcagcccatggggcagcccttctttcccattgggatccgaccctgagctccgattgggatggagagcggaccgcccctcagtgtttgcttaggattaaaagagacatcatgagtatttacaaggagccacctcctgggatgtttgttgtaccagacactgtggatatgaccaagatacatgccctaataactggccccttcgacaccccatacgagggcggctttttcctgttcgtcttccgctgtccccccgactatccaatccatccacctagggtgaaactaatgacgaccggcaataacacagtgcgatttaatccaaatttttacaggaatggcaaggtgtgcctgtcaatcctcggaacctggacagggcccgcctggtcaccagcacagtcgattagcagtgtgttgatctctattcagagtctaatgactgagaatccataccacaatgagcctggcttcgaacaagagcgccacccaggagatagcaagaattacaacgaatgtattagacatgaaacaattagagtggccgtgtgcgatatgatggaggggaagtgcccatgccccgagcccttacggggagtgatggagaaaagcttcctcgaatattatgacttttatgaagtagcctgtaaggataggctgcacctacagggccaaaccatgcaagacccctttggggagaagcggggtcatttcgactatcaaagcctcctaatgcgcctggggcttatcaggcagaaggtgctggaaaggctacacaacgaaaacgcggagatggactctgatagtagtagctccggtacagagaccgacctgcatgggtccctgagagtctag

SEQ ID NO: 213977 - DNA, 3122 bp, Artificial Sequence
  derived and/or modified sequence
agcaccgtctgggctgtggaagcggagggggtggggacactctggcccggttctcggtggtgcgggagcgggcgggagcagcggccgctctggtcggcggacgtgctgccgagtagtcccggaagcgaagcagcgatggcggagagtccgactgaggaggcggcaacggcgggcgccggggcggcgggccccggggcgagcagcgttgctggtgttgttggcgttagcggcagcggcggcgggttcgggccgcctttcctgccggatgtgtgggcggcggcggcggcagcgggcggggccgggggcccggggagcggcctggctccgctgcccgggctcccgccctcagccgctgcccacggggccgcgctgcttagccactgggaccccacgctcagctccgactgggacggcgagcgcaccgcgccgcagtgtctactccggatcaagcgggatatcatgtccatttataaggagcctcctccaggaatgttcgttgtacctgatactgttgacatgactaagattcatgcattgatcacaggcccatttgacactccttatgaagggggtttcttcctgttcgtgtttcggtgtccgcccgactatcccatccacccacctcgggtcaaactgatgacaacgggcaataacacagtgaggtttaaccccaacttctaccgcaatgggaaagtctgcttgagtattctaggtacatggactggacctgcctggagcccagcccagagcatctcctcagtgctcatctctatccagtccctgatgactgagaacccctatcacaatgagcccggctttgaacaggagagacatccaggagacagcaaaaactataatgaatgtatccggcacgagaccatcagagttgcagtctgtgacatgatggaaggaaagtgtccctgtcctgaacccctacgaggggtgatggagaagtcctttctggagtattacgacttctacgaggtggcctgcaaagatcgcctgcaccttcaaggccaaactatgcaggacccttttggagagaagcggggccactttgactaccagtccctcttgatgcgcctgggactgatacgtcagaaagtgctggagaggctccataatgagaatgcagaaatggactctgatagcagttcatctgggacagagacagaccttcatgggagcctgagggtttagaccctgctcccatctccccttcccccactcaagagtcccagcagaatcccttccccccaccccagggatggagaggcactgtgtatctccctccagactcgaagtcatcctgcaagatggcaagaaccaagcaagctccgatcccagggtgtgggagtgggggcctgttcccggtctgacctccttggcactggagcatctggggcttcgttcatccattcatcccgtatcaggggccaaggtacctttacaggagcacctagagcgagggcctttggcaaaaacaaaacaaccaacacacctctccacagggccagctccttagggataagtggaagatggaaattgcaattccaagagggagtgtgcccaaatgatttatggggatacctggaagggagcttggggtgggggctgtctgtgacacttaagcagtctgggtggttgtctatttgtctgtcttcagtcttgaagcagggcttcccaatgcccttttcctccctgccttccttcccccattatttcccacaggccagcataattttgtttttcctaatttatagtcactgttctagacagaccaaagagaaggaacagtggtggagtctaggctgctgatcagtaagctttacctagcacctgagcacctttctcccctcccctctttcctcacccttttctagatgtaagacagaaagtaaatgtgactgggacttaaccaaggtcttggtaaagcctgcatggcaccgtaagaagctgaaaatactgtttgttcccgcaatcactgatttgaaaagttcccaacacaggcagctgctgtgtatatgggattagagccactacatagaatagtctcttacagattttcataaatactagtcacaataagggtatttttcttgggggtggagtaagggggagactgatgctagtccttgttgtattttgttgggctgtccttgtgtattttcaccccagcctgtagtcctcctcacttcaaccccagggatttttggggagcaagggtagccaatggcagagggggttggggctgggactctggaggctcctccccttctttctcttccttccgcctcccccgtgcccccagctgctcttgtcactgtctctgatgggtatttgcctggctttgttgcttctctatctgtatttagctgcagtgatcctttagctggttggctcagaaaaaaaaaaatgtgctttaggtgccctgtaatcctgggcatcaagggaatccatccttcccctttttgatatgttctccccgtacttccagatttattgttatggctcccagtgggtattggcgattcttgtgatgcagggcctcagtcagtgtccagccatgcataagggagaggatagtgtgtacctgccctgccctctgctatgaaggtctctgccttgtggatcatgggactccccttggaggatctgtgcaaaggggggctgggcacaaaggagaatgtcctatttgggagggcaggaagcaaaggaactggacagggattggtgggcttggggaacggaagtttatcttggatacccttgaagaggctgggtctcttcacatgaagatcgaaaagggaccctgcttccaatttccctcttccattcctcgagctactccagggcttagaagaatgctcttggtctgtgggtccagtgttgtctgtcatccatttaagtgttcccactttcaagtgacaatcctctccttggccctgccatagggcagagcatgtctggcatagcagcctgacttttatgccctaatcttgagttgaggaaatatatgcacaggagtcaaagagatgtctttatatctgactgtatataaatgaagtttttttgttttttttgttttcctttttggtgcaataaagtttgttttggcagaa

SEQ ID NO: 213978 - DNA, 864 bp, Artificial Sequence
  derived and/or modified sequence
atgtgtggacgcaggagaaggcaaagagcagccctgctttcgcactgggatcccactctgagttctgactgggatggggagcgaacagctcctcagtgcctgctgagaattaagagggacatcatgtccatttacaaggagcccccccctggcatgttcgtagtcccagacaccgtggacatgactaaaatacatgcactgatcaccggcccttttgatactccatatgaaggcgggtttttcttattcgtatttaggtgtcctccagactatcctatccaccctccccgggttaaacttatgactacagggaacaataccgtgaggtttaaccctaatttttacaggaatggtaaagtgtgcctctcgatccttggcacttggacaggacctgcatggagcccagcccagagtatctcatccgttctgatatcgatccaaagtcttatgactgagaacccatatcacaacgaacccggattcgagcaggaacggcacccaggagactctaagaactataatgaatgtataagacacgaaactattagggtggcagtctgcgacatgatggagggtaaatgtccctgtcctgagcccctgcggggagtgatggagaaaagcttcttagagtactacgatttttatgaggtcgcatgtaaggaccggctccacctacaggggcagaccatgcaggatccttttggcgagaagcgaggccactttgactaccagagtctgttgatgcgactcgggttgatcagacagaaagtgctggaaaggctgcataatgagaacgcggaaatggatagcgattcctcaagcagtggtacagagaccgatttgcatgggtccctcagggtgtag

SEQ ID NO: 213979 - DNA, 1065 bp, Artificial Sequence
  derived and/or modified sequence
atggccgagagccccacagaggaggccgccacagctggggccggggctgctggccctggggccagctctgtggccggcgtggtgggcgtgtctggcagcggcggcggctttggaccacccttcctgcctgatgtgtgggccgctgctgctgctgctgggggcgccggcggccctggcagcggcctggcccccctgcccggcctgcccccatctgctgctgcccatggagctgccctgctgagccactgggaccccaccctgagcagtgactgggatggagagaggacagccccccagtgcctgctgcgcatcaagagggacatcatgagcatctacaaggagcccccacctggcatgtttgtggtgcctgacacagtggacatgaccaagatccacgccctgatcaccggcccctttgacaccccctatgaaggaggcttcttcctgtttgtgttccgctgccccccagactaccccatccaccccccccgggtgaagctgatgaccaccggcaacaacacagtgcgcttcaaccccaacttctacagaaatggcaaggtgtgcctgagcatcctgggcacctggacaggccctgcctggagccctgcccagagcatcagctctgtgctgatcagcatccagagcctgatgacagagaacccctaccacaatgagcccggctttgagcaggagcggcaccctggggacagcaagaactacaatgaatgcatcagacatgagaccatccgggtggccgtgtgtgacatgatggagggcaagtgcccctgcccagagcccctgcggggcgtgatggagaagagcttcctggagtactatgacttctatgaggtggcctgcaaggaccggctgcacctgcagggccagaccatgcaggacccctttggagagaagaggggccactttgactaccagagcctgctgatgaggctgggcctcatccggcagaaggtgctggagcggctgcacaatgaaaatgctgagatggacagcgacagcagcagcagcggcacagaaacagacctgcacggcagcctgcgggtgtag

SEQ ID NO: 213980 - DNA, 864 bp, Artificial Sequence
  derived and/or modified sequence
atgtgtggcagaagaagacggcagagagctgccctgctgagccactgggaccccaccctgagcagtgactgggatggagagaggacagccccccagtgcctgctgcgcatcaagagggacatcatgagcatctacaaggagcccccacctggcatgtttgtggtgcctgacacagtggacatgaccaagatccacgccctgatcaccggcccctttgacaccccctatgagggcggcttcttcctgtttgtgttccgctgccccccagactaccccatccaccccccccgggtgaagctgatgaccactggaaacaacacagtgcgcttcaaccccaacttctacagaaatggcaaggtgtgcctgagcatcctgggcacctggacaggccctgcctggagccctgcccagagcatcagctctgtgctgatcagcatccagagcctgatgacagagaacccctaccacaatgaacctggctttgagcaggagcggcaccctggggacagcaagaactacaatgaatgcatcagacatgagaccatccgggtggccgtgtgtgacatgatggagggcaaatgtccctgcccagagcccctgcggggcgtgatggagaagagcttcctggagtactatgacttctatgaggtggcctgcaaggaccggctgcacctgcagggccagaccatgcaggacccctttggagagaagaggggccactttgactaccagagcctgctgatgaggctgggcctcatccggcagaaggtgctggagcggctgcacaatgaaaatgctgagatggacagcgacagcagcagcagcggcacagaaacagacctgcacggcagcctgcgggtgtag

SEQ ID NO: 213981 - DNA, 1065 bp, Artificial Sequence
  derived and/or modified sequence
atggccgagagccccaccgaggaggccgccaccgccggcgccggcgctgcggggcccggggcgagctccgtggctggcgtcgtgggagtgtcaggctctggcggcggttttggccctcctttcctccctgacgtctgggctgcagccgctgccgcggggggcgcgggggggccaggttccggtctggcccctctccccggactgccgcccagcgcggcggcacatggcgcagccctgctgagtcactgggatccaactctatcaagcgattgggacggggagcgtaccgcccctcagtgtttgcttagaatcaaacgtgatatcatgtcaatctacaaagagccgccaccaggcatgttcgttgtccccgacacagtggacatgacaaagatccacgccctgattacagggcctttcgataccccctacgaagggggttttttcctatttgtgtttcgctgcccccccgactacccgatccacccgccccgggtgaaactcatgaccaccggcaacaacacagtaagattcaacccaaacttctatcgtaacgggaaggtctgcctgtctatcctgggcacgtggaccggccccgcctggagcccagcccaaagcatttctagtgttctgatcagcattcagtctcttatgacagagaacccataccataatgaaccagggttcgagcaggagcgccaccccggcgatagtaagaactacaatgagtgtatcagacacgagaccatccgcgtcgccgtctgtgacatgatggaaggaaagtgtccctgtccggaacctttgcgtggtgtgatggagaaaagctttctggagtactatgacttttatgaggtggcctgcaaggaccggttacacttgcaaggtcaaacaatgcaggaccccttcggggaaaagaggggccactttgattaccaatctctactaatgcgactgggcctaattcgacagaaggtcttagagaggcttcacaatgaaaatgcagagatggacagcgattcttccagttctggcactgagacggatcttcatgggtcactgagagtttag

SEQ ID NO: 213982 - DNA, 864 bp, Artificial Sequence
  derived and/or modified sequence
atgtgcggccggcggcggcggcagcgggccgccctgctgagccactgggatccaaccctatccagcgattgggacggggaacgcacggcccctcaatgcctgctgcgcatcaaaagggatattatgtcaatctataaggagcccccaccgggtatgtttgttgtgccagataccgtggacatgacaaagatccacgcgttgattaccggcccattcgataccccctacgaagggggattcttcctctttgtcttccgttgtcctccggactaccccatacacccaccacgggtaaagctgatgacaaccgggaacaataccgtgagatttaaccctaacttctatcgaaatggaaaagtctgtctgtccatactcggcacatggacaggtcccgcctggagtcctgcccagtcaatctcatccgtactgatcagtattcagtcattaatgactgagaacccatatcataatgaaccaggttttgagcaagaacggcatccgggcgactcaaagaactataacgagtgcatccgccatgaaaccatccgtgttgctgtctgcgatatgatggagggaaagtgtccatgcccggaacccctgaggggcgttatggagaaatctttcctggagtattacgacttttacgaagttgcctgcaaagataggttacacttacagggtcaaacaatgcaggacccgtttggggaaaagcggggtcacttcgattaccagagtcttctaatgcgactgggactgatccgccagaaggttcttgagcgactgcataacgaaaatgctgaaatggacagcgattcaagctcctccggcactgaaacggaccttcatggaagccttcgcgtatag

SEQ ID NO: 213983 - DNA, 1484 bp, Artificial Sequence
  derived and/or modified sequence
actctggcccggttctcggtggtgcgggagcgggcgggagcagcggccgctctggtcggcggacgtgctgccgagtagtcccggaagcgaagcagcgatggcggagagtccgactgaggaggcggcaacggcgggcgccggggcggcgggccccggggcgagcagcgttgctggtgttgttggcgttagcggcagcggcggcgggttcgggccgcctttcctgccggatgtgtgggcggcggcggcggcagcgggccgcgctgcttagccactgggaccccacgctcagctccgactgggacggcgagcgcaccgcgccgcagtgtctactccggatcaagcgggatatcatgtccatttataaggagcctcctccaggaatgttcgttgtacctgatactgttgacatgactaagattcatgcattgatcacaggcccatttgacactccttatgaagggggtttcttcctgttcgtgtttcggtgtccgcccgactatcccatccacccacctcgggtcaaactgatgacaacgggcaataacacagtgaggtttaaccccaacttctaccgcaatgggaaagtctgcttgagtattctaggtacatggactggacctgcctggagcccagcccagagcatctcctcagtgctcatctctatccagtccctgatgactgagaacccctatcacaatgagcccggctttgaacaggagagacatccaggagacagcaaaaactataatgaatgtatccggcacgagaccatcagagttgcagtctgtgacatgatggaaggaaagtgtccctgtcctgaacccctacgaggggtgatggagaagtcctttctggagtattacgacttctacgaggtggcctgcaaagatcgcctgcaccttcaaggccaaactatgcaggacccttttggagagaagcggggccactttgactaccagtccctcttgatgcgcctgggactgatacgtcagaaagtgctggagaggctccataatgagaatgcagaaatggactctgatagcagttcatctgggacagagacagaccttcatgggagcctgagggtttagaccctgctcccatctccccttcccccactcaagagtcccagcagaatcccttccccccaccccagggatggagaggcactgtgtatctccctccagactcgaagtcatcctgcaagatggcaagaaccaagcaagctccgatcccagggtgtgggagtgggggcctgttcccggtctgacctccttggcactggagcatctggggcttcgttcatccattcatcccgtatcaggggccaaggtacctttacaggagcacctagagcgagggcctttggcaaaaacaaaacaaccaacacacctctccacagggccagctccttagggataagtggaagatggaaattgcaattccaagagggagtgtgcccaaatgatttatggggatacctg

SEQ ID NO: 213984 - DNA, 1065 bp, Artificial Sequence
  derived and/or modified sequence
atggctgaaagtccaactgaggaggccgcaacagcaggtgccggtgcggctggtccaggagcaagttctgtagctggtgtagtaggggtgtcggggtcgggcggtggatttggccctccgtttttgccagacgtttgggccgctgccgcagcagccggtggcgctggagggcctggtagcggtctcgctccactgcccggacttcccccttccgctgccgcacacggcgctgctctcctgtcccattgggatcccactctgtcatccgattgggatggagagcggacagccccacagtgcctactgaggattaagcgggacattatgtcaatttacaaagagcctcctcccggaatgtttgtggtgcccgacaccgtagacatgaccaagattcatgccctgattacagggccattcgacacaccttatgagggcggattctttctgtttgtgttccggtgcccaccagactaccctatccatccccctcgagtgaaactaatgaccacagggaataatacagtcaggttcaatcctaacttttaccgaaatggcaaggtttgtcttagcattctggggacatggaccggccctgcatggtctcctgctcagtctatatcaagcgtgttgatctcaatccaatctttaatgaccgaaaatccgtatcacaatgaaccaggcttcgagcaggagcgacatcctggagactccaaaaattacaacgagtgcatcaggcacgaaaccattagggtagcagtctgtgacatgatggagggaaagtgcccttgccccgaacctttacgaggcgtcatggaaaagtctttcttggagtactatgatttctacgaggtggcctgtaaggataggcttcatctgcaagggcagaccatgcaggatcccttcggggagaaaagggggcacttcgactaccagtctttgttgatgcggctgggtttgatccgacagaaagtgctggagcgtctgcataatgagaatgctgagatggactctgacagctcctctagtgggacagaaaccgaccttcatggaagcctgagggtatag

SEQ ID NO: 213985 - DNA, 864 bp, Artificial Sequence
  derived and/or modified sequence
atgtgtggccgacgtaggaggcagagagccgctctcctatcccattgggacccaacgttgtcgagcgactgggatggtgaaaggaccgccccacagtgcctcttaagaatcaagcgtgatatcatgtccatttacaaggagcctccccctggaatgtttgttgtgcctgacacggttgatatgactaaaatacatgccctgatcacagggccttttgatactccgtacgaaggtggattcttcctctttgtttttcgttgccccccagattaccccattcaccctcccagggtgaagttgatgactacagggaacaatacagtgcgttttaatcctaatttctaccggaacggaaaggtgtgtctcagcatccttggtacctggactggaccagcatggtcaccagcccagtccataagtagtgtcctgatttctattcagagcctcatgacagagaacccttaccataatgagcctggcttcgagcaggaaagacatcctggagacagcaaaaactacaacgagtgcatcagacacgagacaataagagtagctgtgtgcgacatgatggaaggaaaatgcccctgcccagagccgctccgtggtgtcatggagaagtcattcctggagtactacgacttctatgaggtcgcatgcaaagatcggttacatcttcagggccagaccatgcaggaccccttcggcgagaagagaggccattttgactaccagagccttctgatgagactgggtttaataaggcagaaagtcctggagcggctccataacgagaacgctgagatggattcggactcctcaagcagcggaacggagaccgatctccacggcagtctgcgagtttag

SEQ ID NO: 213986 - protein, 139 aa, Artificial Sequence
  derived and/or modified sequence
MRAGRGATPARELFRDAAFPAADSSLFCDLSTPLAQFREDITWRRPQEICATPRLFPDDPREGQVKQGLLGDCWFLCACAALQKSRHLLDQVSCPVQLPADWTCKVQPVWLEFPCLPISCRLRVSSDTSPDSATWGSWK

SEQ ID NO: 213987 - protein, 138 aa, Artificial Sequence
  derived and/or modified sequence
MRAGRGATPARELFRDAAFPAADSSLFCDLSTPLAQFREDITWRRPQVPEGGRSQDAPPLLLQEPLLSCVPHRYAQEVSRLCLLPAGTYKVVPSTYLPDTEGAFTVTIATRIDRPSIHSQEMLGQFLQEVSIMAVMKT

SEQ ID NO: 213988 - protein, 672 aa, Artificial Sequence
  derived and/or modified sequence
MRAGRGATPARELFRDAAFPAADSSLFCDLSTPLAQFREDITWRRPQEICATPRLFPDDPREGQVKQGLLGDCWFLCACAALQKSRHLLDQVIPPGQPSWADQEYRGSFTCRIWQFGRWVEVTTDDRLPCLAGRLCFSRCQREDVFWLPLLEKVYAKVHGSYEHLWAGQVADALVDLTGGLAERWNLKGVAGSGGQQDRPGRWEHRTCRQLLHLKDQCLISCCVLSPRAGARELGEFHAFIVSDLRELQGQAGQCILLLRIQNPWGRRCWQGLWREGGEGWSQVDAAVASELLSQLQEGEFWVEEEEFLREFDELTVGYPVTEAGHLQSLYTERLLCHTRALPGAWVKGQSAGGCRNNSGFPSNPKFWLRVSEPSEVYIAVLQRSRLHAADWAGRARALVGDSHTSWSPASIPGKHYQAVGLHLWKVEKRRVNLPRVLSMPPVAGTACHAYDREVHLRCELSPGYYLAVPSTFLKDAPGEFLLRVFSTGRVSLSAIRAVAKNTTPGAALPAGEWGTVQLRGSWRVGQTAGGSRNFASYPTNPCFPFSVPEGPGPRCVRITLHQHCRPSDTEFHPIGFHIFQVPEGGRSQDAPPLLLQEPLLSCVPHRYAQEVSRLCLLPAGTYKVVPSTYLPDTEGAFTVTIATRIDRPSIHSQEMLGQFLQEVSIMAVMKT

SEQ ID NO: 213989 - DNA, 2019 bp, Artificial Sequence
  derived and/or modified sequence
atgcgcgctggacggggcgccacccctgcgagagaactgttcagagatgctgccttcccagcggcagattcaagtctcttttgtgacctgtctactcctctcgctcagtttcgggaagacatcacatggaggcggccccaggaaatttgtgccacccctaggttattcccagacgaccctagagagggccaggttaagcaagggctgctcggcgactgttggttcctgtgcgcctgcgccgccctgcaaaaatctcgtcatctgctggaccaagttatacctcccggccagccttcttgggcagatcaggaatacagggggtcatttacctgcagaatatggcaatttggccgctgggtcgaggtgacaacagacgaccgccttccttgtttagctgggaggctgtgcttctccaggtgtcaaagggaagatgttttctggctacccttgctagaaaaagtgtacgctaaggtgcatggctcctacgagcatctgtgggctggacaagtcgctgacgctcttgtggacctgacaggagggctggccgagaggtggaacttaaaaggagtggctggctctggcggacagcaggaccgcccgggtaggtgggagcaccggacctgtcgtcagctgttgcacctaaaggaccagtgtctgatttcttgttgtgtcttgagccctcgcgcgggggcccgcgagctgggcgaatttcacgcttttatcgtctcggatctacgggaactccaaggacaggcaggccagtgtatacttctcctccgaatccagaatccatgggggcgcaggtgctggcaagggttgtggcgtgaaggaggagagggttggtcacaggttgatgcagccgtcgcttcagagctcctttcacagctccaggaaggcgagttttgggtcgaggaagaggaattcctccgggagttcgatgaactgaccgtgggttaccccgtcacggaagccggtcatctgcagagcttgtatacagaacggttgctgtgccatacaagagcgctgcccggagcgtgggtgaaagggcagtctgctggagggtgtcggaacaactccggcttccctagtaaccccaaattttggttacgggtcagcgagccatctgaagtgtacattgcagttttgcagcgcagcagactgcatgccgccgactgggcaggaagagcaagggccctggtgggcgatagccacacgtcctggtctcctgcttctattcctggcaaacattaccaggcagttggcttgcatctatggaaagtcgagaagcggcgcgttaacctgcctcgagtactcagtatgccgccggtggccggaacagcttgccacgcatacgaccgcgaggttcatcttcggtgtgagttgagcccaggttactatctcgctgtcccctcaaccttcttaaaagatgccccaggggagtttctgttgcgggtgtttagcacaggcagggtgagcttgtcagctatacgggccgtggcaaagaacaccactccaggagccgccctgccggccggcgagtggggtactgtacagctaaggggatcttggagagttggacagactgcaggaggctcgcgtaattttgcgtcctaccccactaacccatgctttcccttctccgtacctgagggaccaggccctcggtgtgtcagaattaccttgcatcagcactgccgcccaagtgacaccgaatttcatcccattggcttccatatcttccaggtacccgaaggcgggagatcccaggacgccccccccctgctccttcaggagccactgctttcctgtgtaccacatcgatacgcccaagaggtgtctcgcctatgcctgttgccagccggcacctacaaggtggtaccctccacatatttacccgacaccgagggcgccttcaccgttaccattgctaccaggattgacaggcccagtatacactctcaggagatgctgggccagtttttgcaggaagtctctataatggctgtaatgaaaacatag

SEQ ID NO: 213990 - DNA, 2019 bp, Artificial Sequence
  derived and/or modified sequence
atgagagctggccgcggggccaccccagcccgggagctgttcagagatgctgccttccctgctgctgacagcagcctcttctgtgacctgagcacccccctggcccagttccgggaggacatcacctggaggcggccccaggagatctgtgccacccccaggctcttcccagatgacccccgggagggccaggtgaagcagggcctgctgggggactgctggttcctgtgtgcctgtgccgccctgcagaagagccgccacctgctggaccaggtgatccccccaggccagcccagctgggccgaccaggagtaccggggcagcttcacctgccgcatctggcagtttggccgctgggtggaggtgaccacagatgaccggctgccctgcctggccggccgcctgtgcttcagccgctgccagagagaagatgtgttctggctgcccctgctggagaaggtgtatgccaaggtgcacggcagctatgagcacctgtgggccggccaggtggctgatgccctggtggacctgaccggcggcctggccgagcgctggaacctgaagggcgtggccggcagcggcggccagcaggaccggcccggccgctgggagcacaggacctgccggcagctgctgcacctgaaggaccagtgcctgatcagctgctgcgtgctgagccccagggctggggcccgggagctgggggagttccacgccttcatcgtgtctgacctgcgggagctgcagggccaggccggccagtgcatcctgctgctgcgcatccagaacccctggggccgccgctgctggcagggcctgtggagggagggcggggagggctggagccaggtggatgctgctgtggccagcgagctgctgagccagctgcaggagggggagttctgggtggaggaggaggagttcctgcgggagtttgatgagctgactgtgggctaccctgtgacagaggccggccacctgcagagcctgtacacagagcggctgctgtgccacacccgggccctgcccggggcctgggtgaagggccagagcgctgggggctgcaggaacaacagcggcttccccagcaaccccaagttctggctgcgggtgtctgagcccagcgaggtgtacatcgctgtgctgcagaggagccggctgcatgctgctgactgggccggccgggcccgggccctggtgggggacagccacacctcctggagccctgccagcatccctgggaagcactaccaggccgtgggcctgcacctgtggaaggtggagaagagaagagtgaacctgccccgggtgctgtccatgcctcctgtggccggcacagcctgccacgcctatgaccgggaggtgcacctgcgctgtgagctgagccctggctactacctggccgtgcccagcaccttcctgaaggatgcccctggagagttcctgctgcgggtcttcagcacaggccgggtgtccctgagcgccatccgggctgtggccaagaacaccaccccaggagctgccctgcctgctggggagtggggcaccgtgcagctgcggggctcctggagggtgggccagacagctgggggcagcaggaactttgccagctaccccaccaacccctgcttccccttctctgtgcctgagggccctggcccccgctgtgtgcgcatcaccctgcaccagcactgccggcccagcgacacagagttccaccccatcggcttccacatcttccaggtgcctgagggcggccgcagccaggatgccccacccctgctgctgcaggagcccctgctgagctgtgtgccccacagatatgcccaggaggtgtcccggctgtgcctgctgcctgctggcacctacaaggtggtgcccagcacctacctgcctgacacagagggcgccttcaccgtgaccatcgccaccagaattgaccggcccagcatccacagccaggagatgctgggccagttcctgcaggaggtgtccatcatggctgtgatgaagacctag

SEQ ID NO: 213991 - DNA, 2019 bp, Artificial Sequence
  derived and/or modified sequence
atgcgggccggccggggcgccacccccgcccgggagctgttccgggacgcagcatttcctgccgcagattcatccctgttttgtgatctctccacacctttagctcagtttagagaagacattacttggcgccgcccgcaggagatctgcgcaacacctcgcctttttccagatgacccccgagaggggcaggtgaagcagggactgctcggcgactgctggttcctgtgtgcttgtgctgccctccagaaaagtcgccacctccttgaccaagtgattcctcccggccagccctcatgggccgaccaggaatacagggggtcttttacttgccgcatttggcagtttgggcgctgggtggaagtgactacagacgacagactcccctgccttgcggggcggctgtgcttctcccggtgtcagagagaagatgtcttttggttaccactgctggagaaagtgtacgctaaggtccacggaagttacgagcatctgtgggctggccaggtcgccgacgccctggtcgacttgaccggcggacttgccgaacggtggaatctgaagggagtggccggctctggaggccagcaggataggcccgggaggtgggagcacagaacttgtaggcagctcctccatctcaaggaccagtgtttgattagctgttgtgtgctttccccacgagctggggctagggagctgggggagttccacgcttttattgtttctgacctgagagaactccagggacaggctgggcagtgcatcctattactccgcattcagaacccctggggtagaagatgctggcaggggctctggcgggagggcggggaaggttggtctcaagtcgatgccgccgttgcttccgaattgctgagccagctgcaagagggtgaattctgggtcgaggaagaagagtttctcagagagttcgatgagctgaccgtaggatatcccgtgaccgaggccggccacttgcaatctctatatacagagaggcttctctgccataccagagccctgccgggggcttgggttaaaggccagtcagcgggtggctgcaggaacaactctgggtttccatcaaaccccaagttctggctgcgtgtttccgagccgtctgaggtctatatagcggttctgcaacgttcccggctacatgcagccgactgggccggccgggcacgggctctcgtgggcgattcccatacatcctggtctcccgcatccattccaggaaagcattaccaggccgttggtctgcatctttggaaagtcgagaaacgcagggtgaacctaccacgcgtgctgtcaatgcctccagttgctggtacagcctgtcacgcttacgatagggaggttcacctacgctgcgaactgtcacctggatattatctcgcagtgcctagcaccttcttaaaagacgcacctggagaatttttgctcagggttttctccacaggacgggtctctctgtctgcaattcgcgcagttgcgaagaacactacccccggtgctgcattgcctgccggcgagtggggcaccgtgcagctgcgaggctcatggagagtgggacaaacagctgggggcagccgcaacttcgcgtcttaccctacgaacccatgctttccattcagcgtgccggagggaccgggaccgagatgcgtgaggattaccctacaccagcattgccggccctctgacaccgaatttcacccgataggcttccacatcttccaggtgcctgagggtggcagaagccaggatgcccccccactgctgttgcaggagccactgctctcttgcgtcccacatcgctacgcccaagaggtgtccaggctctgtctgttgccagcaggaacatataaggtcgtaccttctacttacttgcccgatactgagggagcgtttacagtgacaatagcaacacgaatagataggccttccattcactctcaggaaatgctcgggcagttcctgcaagaggtctctatcatggcagtgatgaaaacctag

SEQ ID NO: 213992 - DNA, 2019 bp, Artificial Sequence
  derived and/or modified sequence
atgagggctggaagaggcgctactcctgcgagggagctgtttagagatgcagcctttcccgcagcagactcctctctgttctgtgatctgtccacccccctcgcacagtttagagaggatattacctggcgtcggccacaggaaatttgtgcaacccccagactcttcccagatgatcctagggaaggccaagtcaagcagggcttattgggcgactgctggttcctttgtgcttgcgctgctctgcagaagtcgagacacttgctggatcaagttatccctccaggtcagcccagttgggcagatcaggagtaccgagggagctttacatgcagaatctggcagtttggccgatgggtggaagtcactaccgacgaccgcctcccttgtctggcgggaagattgtgttttagcagatgccagcgagaagacgtgttttggcttcccctcctggagaaagtgtatgccaaagttcacggatcatacgagcacctgtgggccggacaagtggccgatgctttggttgatctgaccggtggactcgctgagcggtggaacctcaagggcgtggccggttccggaggccagcaggacagaccagggaggtgggagcatcgcacttgccgccaacttctccacctgaaagatcagtgtcttatcagttgttgcgtgctatctccaagagcaggtgctagagaactgggagaatttcatgccttcatcgtctcagatctcagagaactccaggggcaagccggacagtgtattctgctgctgaggattcagaacccatgggggaggcgttgttggcaagggctttggagagagggcggtgaggggtggagccaagttgacgctgctgtggcatccgagctcttgtctcaactgcaggaaggtgagttttgggttgaagaagaggaattcctgagggaatttgatgagctgactgttggctacccagtgactgaggcaggtcatcttcaaagcctgtacaccgaacggctgttgtgccatacccgtgcgcttcccggagcctgggtgaaggggcagtctgccggaggctgtcgcaataacagcggctttccctctaatcctaaattttggctgagggtcagcgaaccaagtgaggtctatattgccgtcttgcagcggtcccggctgcacgcagctgactgggccggaagagccagggcattggtgggggatagccatacttcatggtctccagcatcaattccgggtaagcattaccaggcagtgggcctgcacttgtggaaagtcgaaaagagacgcgtcaacctcccaagagtgttgagcatgcctcccgtggctggcaccgcttgccatgcctacgaccgtgaggtgcacttgcgatgcgagctgagccccggatattacctggcagtacctagcacctttttgaaagatgccccaggagaattcctgctgagggtgtttagtaccggtagagtttccctgagcgccatccgcgcagtggctaaaaataccactcctggggctgcactgcctgcgggtgagtggggcacagtgcagctccggggttcttggagggttggccaaactgccggaggatcacgcaatttcgcatcttaccccacaaatccttgtttccccttctcagtgcctgagggaccaggaccacgctgcgtccgcataaccctgcatcagcactgcaggccttcggacacggagtttcatcctatcggattccacatattccaagtacctgagggaggccgttctcaagacgctccccctctgctgctgcaggaacccttgttatcctgtgtgccccatcggtatgcccaggaggtgtccagactgtgcctgctgcccgctggtacatacaaagtggtacctagcacttatttaccggacaccgagggagcctttacagtcaccatagcaacacggatcgacaggccctctattcattcccaggagatgctggggcaatttttgcaagaagtcagcataatggccgttatgaagacttag

SEQ ID NO: 213993 - DNA, 2644 bp, Artificial Sequence
  derived and/or modified sequence
cgcctggttaccaatgggagactagcgggccggcgtactggcctggtccagcacctgcggggccctcgggcttggagggctgggccgggcggggaacgggcggggcgggccggaggcggcggcggctgactcgccttctctccggggctgcgaccccgaggcaaccggctgcagatgggagcccgcggagccgaggatgcgggcgggccggggcgcgacgccggcgagggagctgttccgggacgccgccttccccgccgcggactcctcgctcttctgcgacttgtctacgccgctggcccagttccgcgaggacatcacgtggaggcggccccaggagatttgtgccacaccccggctgtttccagatgacccacgggaagggcaggtgaagcaggggctgctgggggattgctggttcctgtgtgcctgcgccgcgctgcagaagagcaggcacctcctggaccaggtcattcctccgggacagccgagctgggccgaccaggagtaccggggctccttcacctgtcgcatttggcagtttggacgctgggtggaggtgaccacagatgaccgcctgccgtgccttgcagggagactctgtttctcccgctgccagagggaggatgtgttctggctccccttactggaaaaggtctacgccaaggtccatgggtcctacgagcacctgtgggccgggcaggtggcggatgccctggtggacctgaccggcggcctggcagaaagatggaacctgaagggcgtagcaggaagcggaggccagcaggacaggccaggccgctgggagcacaggacttgtcggcagctgctccacctgaaggaccagtgtctgatcagctgctgcgtgctcagccccagagcaggtgcccgggagctgggggagttccatgccttcattgtctcggacctgcgggagctccagggtcaggcgggccagtgcatcctgctgctgcggatccagaacccctggggccggcggtgctggcaggggctctggagagaggggggtgaagggtggagccaggtagatgcagcggtagcatctgagctcctgtcccagctccaggaaggggagttctgggtggaggaggaggagttcctcagggagtttgacgagctcaccgttggctacccggtcacggaggccggccacctgcagagcctctacacagagaggctgctctgccatacgcgggcgctgcctggggcctgggtcaagggccagtcagcaggaggctgccggaacaacagcggctttcccagcaaccccaaattctggctgcgggtctcagaaccgagtgaggtgtacattgccgtcctgcagagatccaggctgcacgcggcggactgggcaggccgggcccgggcactggtgggtgacagtcatacttcgtggagcccagcgagcatcccgggcaagcactaccaggctgtgggtctgcacctctggaaggtagagaagcggcgggtcaatctgcctagggtcctgtccatgccccccgtggctggcaccgcgtgccatgcatacgaccgggaggtccacctgcgttgtgagctctcaccgggctactacctggctgtccccagcaccttcctgaaggacgcgccaggggagttcctgctccgagtcttctctaccgggcgagtctcccttagcgccatcagggcagtggccaagaacaccacccccggggcagccctgcctgcgggggagtgggggaccgtgcagctacggggttcttggagagtcggccagacggcggggggcagcaggaactttgcctcataccccaccaacccctgcttccccttctcggtccccgagggccctggcccccgctgcgtccgcatcactctgcatcagcactgccggcccagtgacaccgagttccaccccatcggcttccatatcttccaggtcccagagggtggaaggagccaggacgcacccccactgctgctgcaggagccgctgctgagctgcgtgccacatcgctacgcccaggaggtgagccggctctgcctcctgcctgcgggcacctacaaggttgtgccctccacctacctgccggacacagagggggccttcacagtgaccatcgcaaccaggattgacaggccatccattcacagccaggagatgctgggccagttcctccaagaggtctccatcatggcagtgatgaaaacctaacagggtggccccctgtgccagctcaggtgactggagcccgagggcctgacaggttcccagcagctgggccggccagccttgcactgtgggggctggtcctgagtcttggcctgcctcccagccctgccaggaggctgcggcctaggggtccacgggaagcctccgtcaggagagacgcagccctgggggccagctggtgctgcaaggaagggtgggaagcttgctggcttctgttgcgccactgagacggcagagaccccaggatcccagagcttcccaggatccctcccagatcctctgctgactccatatggaggcctcacacccagagggtagggcagcagatcttctttataactatttattgttcgaatcacttttaggatgtaactttataaataaacatgagcgctgatgatttgcagatca

SEQ ID NO: 213994 - DNA, 2019 bp, Artificial Sequence
  derived and/or modified sequence
atgagagccggcagaggcgccacccccgccagagagctgttcagagacgccgccttccccgccgccgacagcagcctgttctgcgacctgagcacccccctggcccagttcagagaggacatcacctggagaagaccccaggagatctgcgccacccccagactgttccccgacgaccccagagagggccaggtgaagcagggcctgctgggcgactgctggttcctgtgcgcctgcgccgccctgcagaagagcagacacctgctggaccaggtgatcccccccggccagcccagctgggccgaccaggagtacagaggcagcttcacctgcagaatctggcagttcggcagatgggtggaggtgaccaccgacgacagactgccctgcctggccggcagactgtgcttcagcagatgccagagagaggacgtgttctggctgcccctgctggagaaggtgtacgccaaggtgcacggcagctacgagcacctgtgggccggccaggtggccgacgccctggtggacctgaccggcggcctggccgagagatggaacctgaagggcgtggccggcagcggcggccagcaggacagacccggcagatgggagcacagaacctgcagacagctgctgcacctgaaggaccagtgcctgatcagctgctgcgtgctgagccccagagccggcgccagagagctgggcgagttccacgccttcatcgtgagcgacctgagagagctgcagggccaggccggccagtgcatcctgctgctgagaatccagaacccctggggcagaagatgctggcagggcctgtggagagagggcggcgagggctggagccaggtggacgccgccgtggccagcgagctgctgagccagctgcaggagggcgagttctgggtggaggaggaggagttcctgagagagttcgacgagctgaccgtgggctaccccgtgaccgaggccggccacctgcagagcctgtacaccgagagactgctgtgccacaccagagccctgcccggcgcctgggtgaagggccagagcgccggcggctgcagaaacaacagcggcttccccagcaaccccaagttctggctgagagtgagcgagcccagcgaggtgtacatcgccgtgctgcagagaagcagactgcacgccgccgactgggccggcagagccagagccctggtgggcgacagccacaccagctggagccccgccagcatccccggcaagcactaccaggccgtgggcctgcacctgtggaaggtggagaagagaagagtgaacctgcccagagtgctgagcatgccccccgtggccggcaccgcctgccacgcctacgacagagaggtgcacctgagatgcgagctgagccccggctactacctggccgtgcccagcaccttcctgaaggacgcccccggcgagttcctgctgagagtgttcagcaccggcagagtgagcctgagcgccatcagagccgtggccaagaacaccacccccggcgccgccctgcccgccggcgagtggggcaccgtgcagctgagaggcagctggagagtgggccagaccgccggcggcagcagaaacttcgccagctaccccaccaacccctgcttccccttcagcgtgcccgagggccccggccccagatgcgtgagaatcaccctgcaccagcactgcagacccagcgacaccgagttccaccccatcggcttccacatcttccaggtgcccgagggcggcagaagccaggacgccccccccctgctgctgcaggagcccctgctgagctgcgtgccccacagatacgcccaggaggtgagcagactgtgcctgctgcccgccggcacctacaaggtggtgcccagcacctacctgcccgacaccgagggcgccttcaccgtgaccatcgccaccagaatcgacagacccagcatccacagccaggagatgctgggccagttcctgcaggaggtgagcatcatggccgtgatgaagacctag

SEQ ID NO: 213995 - protein, 517 aa, Artificial Sequence
  derived and/or modified sequence
MRAGRGATPARELFRDAAFPAADSSLFCDLSTPLAQFREDITWRRPQEICATPRLFPDDPREGQVKQGLLGDCWFLCACAALQKSRHLLDQVIPPGQPSWADQEYRGSFTCRIWQFGRWVEVTTDDRLPCLAGRLCFSRCQREDVFWLPLLEKVYAKVHGSYEHLWAGQVADALVDLTGGLAERWNLKGVAGSGGQQDRPGRWEHRTCRQLLHLKDQCLISCCVLSPRAGARELGEFHAFIVSDLRELQGQAGQCILLLRIQNPWGRRCWQGLWREGGEGWSQVDAAVASELLSQLQEGEFWVEEEEFLREFDELTVGYPVTEAGHLQSLYTERLLCHTRALPGAWVKGQSAGGCRNNSGFPSNPKFWLRVSEPSEVYIAVLQRSRLHAADWAGRARALVGDSHTSWSPASIPGKHYQAVGLHLWKVPEGGRSQDAPPLLLQEPLLSCVPHRYAQEVSRLCLLPAGTYKVVPSTYLPDTEGAFTVTIATRIDRPSIHSQEMLGQFLQEVSIMAVMKT

SEQ ID NO: 213996 - protein, 444 aa, Artificial Sequence
  derived and/or modified sequence
MRAGRGATPARELFRDAAFPAADSSLFCDLSTPLAQFREDITWRRPQEICATPRLFPDDPREGQVKQGLLGDCWFLCACAALQKSRHLLDQVIPPGQPSWADQEYRGSFTCRIWQFGRWVEVTTDDRLPCLAGRLCFSRCQREDVFWLPLLEKVYAKVHGSYEHLWAGQVADALVDLTGGLAERWNLKGVAGSGGQQDRPGRWEHRTCRQLLHLKDQCLISCCVLSPRAGARELGEFHAFIVSDLRELQGQAGQCILLLRIQNPWGRRCWQGLWREGGEGWSQVDAAVASELLSQLQEGEFWVEEEEFLREFDELTVGYPVTEAGHLQSLYTERLLCHTRALPGAWVKGQSAGGCRNNSGFPSNPKFWLRVSEPSEVYIAVLQRSRLHAADWAGRARALVGDSHTSWSPASIPGKHYQAVGLHLWKGVTLGTTLFPVPSWMWPT

SEQ ID NO: 213997 - DNA, 420 bp, Artificial Sequence
  derived and/or modified sequence
atgagggcgggacggggcgcaacgccagctagagaactgtttcgcgacgcagccttccccgcggcagactcatcgctattctgcgatctaagcacacccctggcgcagttcagggaggacattacatggaggaggccccaagaaatctgtgccacgcctaggctgttccccgacgatcctcgagaaggtcaggtaaagcagggactgctaggcgattgttggttcttatgtgcatgcgcagccctccagaagagtcggcacctgttggatcaggtctcatgtccagtgcagctccccgcagattggacgtgtaaggtccaaccagtttggctagagttcccctgcttacccatcagctgtaggttgcgcgtctcttcagatacaagcccggattctgccacctggggaagttggaaatag

SEQ ID NO: 213998 - DNA, 417 bp, Artificial Sequence
  derived and/or modified sequence
atgcgcgcgggccgcggagcaactccagcccgcgagctgtttcgcgatgctgcctttccagccgcagattcaagcctattttgtgatctcagcacccctttagcacaatttcgcgaagatataacttggagaagaccgcaggtgcctgaaggcgggaggtcgcaggatgcgcctcctctactgctacaggagcctctgctctcttgcgtccctcatcggtatgcccaggaagtcagccgtctgtgcttgctcccagctggtacctacaaggtcgtcccctccacatacttgcctgacaccgagggcgcctttactgtaaccatcgccacccgcattgaccgacccagtatccattcacaagagatgcttggacagtttcttcaagaggtctccattatggccgtcatgaaaacctag

SEQ ID NO: 213999 - DNA, 1554 bp, Artificial Sequence
  derived and/or modified sequence
atgcgcgcaggtaggggggcaactccagctagagagctgtttagggatgctgctttcccagccgccgattccagtcttttctgtgacctatccacgcctttggcccagttccgggaagacattacttggagacgcccacaagaaatttgcgctacgcctcggctatttcccgatgatccaagagaggggcaggtaaagcagggattgctcggggactgttggtttctatgcgcttgcgcagcgctgcagaaaagccgccacctgctggaccaagttatcccccccggccagccaagttgggcagaccaggaataccgcgggtcttttacttgtaggatctggcaattcggtaggtgggttgaagtgacaacagatgaccggctgccgtgtttggctggacgactgtgttttagcaggtgccagcgagaggacgtgttctggcttcctcttctggaaaaagtatacgcaaaggtgcatggaagttacgaacatttgtgggctgggcaagttgctgacgctctcgtggatcttaccggaggtctggctgaacggtggaaccttaagggcgtcgccggctctgggggacagcaggacaggccaggtcggtgggagcaccggacatgccgccagctccttcaccttaaggaccaatgcctcatcagctgttgcgtgctgtcaccccgcgctggtgcaagagaattgggtgagttccacgcttttattgtaagtgacttgcgcgagctccaaggtcaagccggacaatgcattcttctcctgcgcatccaaaatccgtggggccgccggtgctggcaaggactgtggcgagaagggggagaagggtggtctcaggtcgacgctgctgtagctagcgagctcctcagccaattgcaggagggagaattctgggtggaagaagaagaattcctgcgagagttcgacgagctcactgttgggtacccagtaaccgaggcaggacacctgcagagcctctatacagagcggcttctctgccacacccgcgcgctccctggagcctgggtcaaggggcagagcgcaggaggatgtcgtaataatagcgggtttcctagtaatcctaagttttggcttcgggtgtcagaaccatccgaagtgtacatcgccgtcctgcagaggtctcgcctacacgccgccgattgggcaggacgtgcgcgggcccttgtcggggattcacacacctcctggtctccggcatccataccgggtaagcactatcaggcagtgggtctgcatctctggaaggtccccgaagggggtagaagccaagacgccccacccctcctgctgcaggaacccctgctgagctgtgtgccacatcgctacgctcaggaggtttcgcggctgtgtctgttgcccgccggaacatacaaagtggtgcccagtacctacctcccagatacagaaggggctttcactgtgacaattgccacaagaatagatcgacctagtatacattcccaggagatgttggggcagtttctgcaagaagtgtcgatcatggccgtcatgaagacgtag

SEQ ID NO: 214000 - DNA, 1335 bp, Artificial Sequence
  derived and/or modified sequence
atgagagccggcaggggagccactccagcaagagagctcttccgcgacgccgcatttccagcggcggacagctcccttttctgtgatctgtccacaccgttagcacagttccgggaggatatcacttggaggaggcctcaggaaatctgtgcgacccctcgcttgtttcctgatgacccccgtgaggggcaggtgaagcagggcctgctgggggattgttggtttttgtgcgcctgcgccgctcttcagaaaagtcgccacctcttagaccaagtcatcccgcctggacaacctagttgggctgaccaggagtatcggggttccttcacatgtcgcatctggcagtttgggcggtgggtggaggttaccactgatgaccgtctaccttgtttggccggccgcctgtgtttcagcagatgtcagagggaagatgttttttggctgcccctgcttgaaaaagtctacgcaaaggtacatggttcctacgagcacctgtgggcaggccaggtggctgatgcattggtagacttaacgggaggcctcgctgaacgatggaatctgaagggcgtggccggaagcggcggccaacaggacaggcccggtcgttgggaacaccgaacatgtcggcagctgctgcatctgaaggatcagtgccttatctcgtgctgtgttttgtcacctagggccggcgccagagagctcggggaatttcatgcattcatcgtctcggatttgcgggaactgcaaggacaagcagggcaatgcattctcctgcttaggattcagaatccttggggtaggcgttgctggcagggattgtggcgagaaggtggcgaaggctggtcacaggtggatgccgccgtggcttccgagctgctgtcccagctgcaagaaggagagttctgggtcgaggaagaagagtttttgagggaattcgacgagctgaccgtgggctatccagttaccgaagctggccacctacagtccctgtacactgagcggctgctgtgccatacgcgtgctctccctggagcatgggtgaagggtcagtctgccgggggatgtagaaataactcagggttcccttctaatcctaagttctggttgcgagtgtcagaaccgtccgaggtgtatatcgctgtgttgcaacgctcaagactgcacgccgcagactgggctgggagggcccgcgccctagtaggcgatagtcacacctcatggtcccctgctagcatccccggcaagcattatcaagccgtggggctgcacctgtggaagggcgtgaccctggggactaccttgttccctgtgccgagctggatgtggcctacctag

SEQ ID NO: 214001 - DNA, 420 bp, Artificial Sequence
  derived and/or modified sequence
atgagagctggccgcggggccaccccagcccgggagctgttcagagatgctgccttccctgctgctgacagcagcctcttctgtgacctgagcacccccctggcccagttccgggaggacatcacctggaggcggccccaggagatctgtgccacccccaggctcttcccagatgacccccgggagggccaggtgaagcagggcctgctgggggactgctggttcctgtgtgcctgtgccgccctgcagaagagccgccacctgctggaccaggtgtcctgccctgtgcagctgcctgctgactggacctgcaaggtgcagcctgtgtggctggagttcccctgcctgcccatcagctgccgcctgcgggtgtccagtgacaccagcccagacagcgccacctggggctcctggaagtag

SEQ ID NO: 214002 - DNA, 417 bp, Artificial Sequence
  derived and/or modified sequence
atgagagctggccgcggggccaccccagcccgggagctgttcagagatgctgccttccctgctgctgacagcagcctcttctgtgacctgagcacccccctggcccagttccgggaggacatcacctggaggcggccccaggtgcctgagggcggccgcagccaggatgccccacccctgctgctgcaggagcccctgctgagctgtgtgccccacagatatgcccaggaggtgtcccggctgtgcctgctgcctgctggcacctacaaggtggtgcccagcacctacctgcctgacacagagggcgccttcaccgtgaccatcgccaccagaattgaccggcccagcatccacagccaggagatgctgggccagttcctgcaggaggtgtccatcatggctgtgatgaagacctag

SEQ ID NO: 214003 - DNA, 1554 bp, Artificial Sequence
  derived and/or modified sequence
atgagagctggccgcggggccaccccagcccgggagctgttcagagatgctgccttccctgctgctgacagcagcctcttctgtgacctgagcacccccctggcccagttccgggaggacatcacctggaggcggccccaggagatctgtgccacccccaggctcttcccagatgacccccgggagggccaggtgaagcagggcctgctgggggactgctggttcctgtgtgcctgtgccgccctgcagaagagccgccacctgctggaccaggtgatccccccaggccagcccagctgggccgaccaggagtaccggggcagcttcacctgccgcatctggcagtttggccgctgggtggaggtgaccacagatgaccggctgccctgcctggccggccgcctgtgcttcagccgctgccagagagaagatgtgttctggctgcccctgctggagaaggtgtatgccaaggtgcacggcagctatgagcacctgtgggccggccaggtggctgatgccctggtggacctgaccggcggcctggccgagcgctggaacctgaagggcgtggccggcagcggcggccagcaggaccggcccggccgctgggagcacaggacctgccggcagctgctgcacctgaaggaccagtgcctgatcagctgctgcgtgctgagccccagggctggggcccgggagctgggggagttccacgccttcatcgtgtctgacctgcgggagctgcagggccaggccggccagtgcatcctgctgctgcgcatccagaacccctggggccgccgctgctggcagggcctgtggagggagggcggggagggctggagccaggtggatgctgctgtggccagcgagctgctgagccagctgcaggagggggagttctgggtggaggaggaggagttcctgcgggagtttgatgagctgactgtgggctaccctgtgacagaggccggccacctgcagagcctgtacacagagcggctgctgtgccacacccgggccctgcccggggcctgggtgaagggccagagcgctgggggctgcaggaacaacagcggcttccccagcaaccccaagttctggctgcgggtgtctgagcccagcgaggtgtacatcgctgtgctgcagaggagccggctgcatgctgctgactgggccggccgggcccgggccctggtgggggacagccacacctcctggagccctgccagcatccctgggaagcactaccaggccgtgggcctgcacctgtggaaggtgcctgagggcggccgcagccaggatgccccacccctgctgctgcaggagcccctgctgagctgtgtgccccacagatatgcccaggaggtgtcccggctgtgcctgctgcctgctggcacctacaaggtggtgcccagcacctacctgcctgacacagaaggagccttcaccgtgaccatcgccaccagaattgaccggcccagcatccacagccaggagatgctgggccagttcctgcaggaggtgtccatcatggctgtgatgaagacctag

SEQ ID NO: 214004 - DNA, 1335 bp, Artificial Sequence
  derived and/or modified sequence
atgagagctggccgcggggccaccccagcccgggagctgttcagagatgctgccttccctgctgctgacagcagcctcttctgtgacctgagcacccccctggcccagttccgggaggacatcacctggaggcggccccaggagatctgtgccacccccaggctcttcccagatgacccccgggagggccaggtgaagcagggcctgctgggggactgctggttcctgtgtgcctgtgccgccctgcagaagagccgccacctgctggaccaggtgatccccccaggccagcccagctgggccgaccaggagtaccggggcagcttcacctgccgcatctggcagtttggccgctgggtggaggtgaccacagatgaccggctgccctgcctggccggccgcctgtgcttcagccgctgccagagagaagatgtgttctggctgcccctgctggagaaggtgtatgccaaggtgcacggcagctatgagcacctgtgggccggccaggtggctgatgccctggtggacctgaccggcggcctggccgagcgctggaacctgaagggcgtggccggcagcggcggccagcaggaccggcccggccgctgggagcacaggacctgccggcagctgctgcacctgaaggaccagtgcctgatcagctgctgcgtgctgagccccagggctggggcccgggagctgggggagttccacgccttcatcgtgtctgacctgcgggagctgcagggccaggccggccagtgcatcctgctgctgcgcatccagaacccctggggccgccgctgctggcagggcctgtggagggagggcggggagggctggagccaggtggatgctgctgtggccagcgagctgctgagccagctgcaggagggggagttctgggtggaggaggaggagttcctgcgggagtttgatgagctgactgtgggctaccctgtgacagaggccggccacctgcagagcctgtacacagagcggctgctgtgccacacccgggccctgcccggggcctgggtgaagggccagagcgctgggggctgcaggaacaacagcggcttccccagcaaccccaagttctggctgcgggtgtctgagcccagcgaggtgtacatcgctgtgctgcagaggagccggctgcatgctgctgactgggccggccgggcccgggccctggtgggggacagccacacctcctggagccctgccagcatccctgggaagcactaccaggccgtgggcctgcacctgtggaagggcgtgaccctgggcaccaccctcttccctgtgcccagctggatgtggcccacctag

SEQ ID NO: 214005 - DNA, 420 bp, Artificial Sequence
  derived and/or modified sequence
atgcgggccggccggggcgccacccccgcccgggagctgttccgggatgctgccttccccgctgccgactccagcttattctgcgacctgagtacacctctggcgcagtttcgcgaggacatcacctggcggaggccacaggagatttgcgctaccccccggctgtttccggacgatcccagggaaggccaggtgaagcagggacttctgggtgactgttggttcctctgtgcttgcgcagccctacaaaagtcacggcaccttctcgatcaggtctcctgtccagtgcagctgcctgcagactggacttgcaaggttcagcctgtctggcttgaatttccttgcttacccattagctgcaggcttcgcgtgtctagtgacacctcgccggattctgctacttgggggtcctggaagtag

SEQ ID NO: 214006 - DNA, 417 bp, Artificial Sequence
  derived and/or modified sequence
atgcgggccggccggggcgccacccccgcccgggagctgttccgggacgccgcttttccagccgccgacagcagcctgttttgtgacctgtcaacccctctggcccagttccgcgaggacattacatggcgacggcctcaagtcccggaaggcgggcgctcccaggatgcgcctccccttctgcttcaggaacccctgctgtcatgcgtgccacatcgttacgcccaagaggtcagcagattgtgcctgctgccagctggcacctacaaagttgttccgagcacttatctccctgatactgagggggcctttactgtcacaatcgccactcggatagacagaccctcgatacactcccaggaaatgctcggacagttcctgcaggaggtctccattatggctgtgatgaagacctag

SEQ ID NO: 214007 - DNA, 1554 bp, Artificial Sequence
  derived and/or modified sequence
atgcgggccggccggggcgccacccccgcccgggagctgttccgggatgccgcctttcccgctgccgattcttctctgttttgcgacctgtctacccccctagcacaattccgtgaagatatcacctggcgcaggccgcaagaaatttgtgccacgccgcggctgttcccagacgaccctcgagagggccaggtgaagcagggtctacttggagactgctggttcctgtgtgcctgtgccgccctacagaaatctcggcacctcttagatcaagtcattccacccggacaacctagctgggccgaccaggaatatcgaggctcctttacctgtcgcatctggcagttcggacgctgggtggaggttactacagatgaccggctgccatgtttggcaggacggctctgcttttcaaggtgccagagggaagacgtgttctggctcccgttgctggagaaggtgtacgccaaagtgcacggaagctacgagcacctttgggccgggcaggtagcagacgcactggtcgacctgacgggcgggctggccgaaaggtggaatctgaagggagtcgcgggctcaggaggacagcaggacagaccagggagatgggaacacagaacatgcaggcagctgcttcatctgaaagaccaatgtcttatctcctgttgtgtcttaagtccgagggcgggtgcccgcgagcttggcgagtttcacgcattcatcgtatccgatcttagggagttgcaggggcaagccgggcagtgtatacttttgttgagaatccaaaatccctgggggaggcggtgctggcaaggactttggagggaaggcggcgaagggtggtcacaggtggatgcagccgtggcatccgagctgctgtcgcagttacaggaaggagagttctgggttgaggaagaggagttcctgcgcgagtttgacgaactgacagtggggtaccctgtcaccgaagcaggacatctgcagtccctttacacagagcgactgctgtgccatacccgagctcttccaggcgcctgggtgaagggacaatcggcgggcggttgccgcaacaactctgggttcccttcaaatcctaaattctggttgcgggtgtcggagcccagcgaggtttacatcgcagtgctacagagatcccggctgcacgctgctgattgggcaggtagggcgcgggctttagtcggtgactcccatacctcctggtctccagctagtataccgggaaaacattaccaggccgtgggcctccatctctggaaggtgcctgagggagggagatcacaagatgctcctcccctgttacttcaggagcccctgttaagctgtgtgcctcaccgttacgctcaagaagtgtcaagactctgcctgctacctgctgggacatataaggtggtcccatctacttacctgccagacactgagggggcgtttacagtaactattgcaacaagaattgataggccatctatacattctcaggagatgctgggacagtttttgcaggaagtgtcaatcatggccgtgatgaaaacctag

SEQ ID NO: 214008 - DNA, 1335 bp, Artificial Sequence
  derived and/or modified sequence
atgcgggccggccggggcgccacccccgcccgggagctgttccgggacgccgcttttccggcagctgactcatctctattttgtgatctgagcacccccctggcccaatttagggaggatattacctggcggcggccacaggagatctgcgcaacgccacggttattccctgatgatcctagagaaggccaggtgaagcagggcttacttggcgactgttggtttttgtgcgcatgtgcagctctccagaagagccgacatctgcttgatcaggtgattccgcctggacagcctagttgggctgatcaggagtatcgaggttccttcacgtgtaggatctggcagttcgggcgctgggtcgaagtcactactgatgatcgccttccctgcttggccggccgactgtgctttagccgatgccagagagaggacgtgttttggctgcctcttctcgaaaaagtgtatgcgaaggtccacggctcttacgaacacctctgggccggacaggtggctgacgctttggtcgatttgacaggtgggctggccgagaggtggaacctgaagggagtggccggcagcggtgggcagcaagatcgacctggcagatgggagcaccgcacatgtcgccagctgctgcacctgaaagatcagtgcctaattagctgctgcgtactgagccctcgggccggagctcgcgaactgggggagttccatgctttcattgtgtctgacttaagggaacttcagggacaggcaggtcagtgcatcctactgctccgtatccagaacccctggggccgccgttgttggcagggcctgtggcgggagggcggggaggggtggagccaggttgatgctgccgtcgcctctgagttgttgtcccagctccaggaaggagaattctgggttgaggaggaagagtttcttagggagtttgatgaactgactgtaggctaccccgttaccgaagccggacaccttcagtccctttacaccgagagattgttgtgccatactcgtgcgcttccaggtgcatgggtgaagggccagagtgccggcggttgtaggaacaattccggatttccatccaaccccaagttttggctcagggtttcagagccaagcgaggtgtacattgcagtactgcaacggagtagactacatgctgctgattgggcaggtagggccagagccctggtaggagacagtcatacaagctggtcacccgcctctatccctgggaaacattaccaggcagtgggcctgcacctctggaagggcgttaccctaggcacaaccctgttccccgtcccatcttggatgtggcctacctag

SEQ ID NO: 214009 - DNA, 420 bp, Artificial Sequence
  derived and/or modified sequence
atgagagccggaaggggagcaacacctgccagggaactgtttagggatgccgctttccccgcagcagattcaagcctgttttgtgatctgagcacgcctttggcccagttcagagaggatattacctggcgcaggcctcaggaaatctgcgccactcctcgcctgtttcccgatgatccacgtgaaggtcaggttaagcaaggtctattgggcgattgttggttcctgtgtgcttgcgccgctctgcagaagtcccgtcatctcctggatcaggtctcctgtcctgtgcagctccccgctgactggacctgcaaagtgcaacccgtgtggcttgagtttccatgtctgcccatttcttgtagattgcgagtctcttctgacacttctcctgactctgcaacatggggctcttggaagtag

SEQ ID NO: 214010 - DNA, 417 bp, Artificial Sequence
  derived and/or modified sequence
atgcgggctggcagaggggctactcctgctcgggagctgttcagagacgctgctttccctgctgccgattcctcgctgttttgcgacctgtcaacaccactagcccagtttcgggaagacataacctggcgcagacctcaagtgcctgaaggcggtagatcacaggacgctccaccactgctgctgcaagaacccctgctgagctgcgttccgcaccggtacgcgcaggaagtttcccggctgtgcctccttcccgctgggacatacaaagtcgtgccttctacatatctccctgatacagaaggagcgtttacagttacgatcgccacccggatcgacaggcccagtatccacagccaagaaatgctgggacaatttttacaggaggtgagcattatggcagtcatgaaaacatag

SEQ ID NO: 214011 - DNA, 1554 bp, Artificial Sequence
  derived and/or modified sequence
atgcgggcaggccgaggcgcaacacctgctagggagctgtttcgggatgctgcttttcctgccgcagactcttcactgttttgtgatctgtctacgccattagctcagtttcgagaagacatcacgtggcggaggcctcaggagatttgtgccacccctcgtctgtttccggacgacccaagggagggccaggtcaagcagggactgctgggagactgctggtttctgtgcgcatgcgctgcccttcagaagtcccggcacctgttggatcaggtgataccgcctggccagccgtcttgggccgatcaggagtataggggaagcttcacttgccgtatttggcagttcggaagatgggtggaggtgactacagatgatcgcctcccgtgcctcgccggaaggctctgctttagtagatgccagcgcgaggatgtgttttggctgcctttgcttgagaaggtgtacgcaaaagtgcacggcagttacgagcacctgtgggccggtcaggtggccgacgctctggtcgacttgactggaggcttggcggaacgatggaacctcaagggagttgccggtagcggaggacagcaggatcgccctggacgatgggaacataggacctgccggcagcttctgcacttaaaagatcagtgcttgattagttgttgcgtactgtccccgagggcaggcgctagagagctgggcgagtttcatgcattcattgtaagcgatcttagggaactgcaggggcaggctggccagtgtattctgcttcttaggatacagaatccgtggggacgacgatgctggcaaggtctgtggagagagggcggagagggctggtcgcaagttgacgctgcggtagcatccgaattactgagccagctgcaagaaggcgaattttgggtggaagaagaggaattcctacgagagtttgacgagctcacagtcggctacccagttaccgaagccggtcacctgcagtcactctataccgaaaggctcctgtgccatactcgcgctctacccggtgcatgggtaaaaggacagagtgctggcggttgccggaacaacagtggtttcccatccaatcctaagttctggctgagggtcagcgaacccagtgaggtttacattgctgtgttgcagcggagccgcttacatgcagcagattgggcagggcgagccagggctcttgttggtgactctcacaccagttggtcccccgcttccatcccaggcaaacactaccaggcggtcggtctccacctgtggaaagtgcccgaggggggacggagccaggacgctccaccactcctgctgcaagaacccctattgagctgtgtgcctcacagatacgcccaggaagtctcaagactctgcctgctgccggcagggacttacaaggtggtcccttccacttatctgcccgatactgagggcgctttcactgtgacgatagcaacacgaattgacagaccatcgatccactctcaggaaatgctcggccagtttttgcaggaggtatccatcatggcggtgatgaagacctag

SEQ ID NO: 214012 - DNA, 1335 bp, Artificial Sequence
  derived and/or modified sequence
atgcgggctggcaggggcgctacaccagccagagagctgtttagagatgctgcattcccagcagcagacagttcacttttctgtgatctgagtacccctctcgctcagttccgtgaggatataacttggcgacgcccacaggagatctgtgcaactcccagactgttcccagacgacccacgggaaggacaggtcaagcaaggactgctgggagattgctggttcctctgtgcctgcgctgctctgcagaaatccagacatctgctcgaccaggtgattccccctggtcaaccgtcctgggcagatcaggagtacagggggagcttcacctgtcgcatctggcagtttggccgttgggtggaagtgactacagatgatagattgccttgcctagccggacgcttatgtttctcccgctgccagagggaggatgtgttttggttacccctccttgaaaaagtgtacgctaaggtccacgggagctacgaacatctgtgggccggacaagttgcggatgccttagtggacctaacgggtggactggccgaaaggtggaatctaaaaggcgtggctggatctggaggccagcaagacagacctggtcggtgggaacaccgcacttgcaggcagcttcttcacctgaaagaccagtgcttgatctcttgttgtgtgctgtccccccgtgctggcgcaagggaactcggagagttccatgcctttatcgtcagtgatctgcgtgagctgcagggacaagctggacagtgtattttgctgctcagaattcaaaatccctggggtcgcagatgctggcagggactgtggcgggaaggtggcgaaggctggtcacaggtggacgccgcagtcgccagcgaactcctgtctcagctgcaggagggcgagttttgggtggaggaagaagagtttcttcgtgaattcgatgagctaactgtaggctaccccgtaacagaggccggacacctccagtctctatatactgaaagactgctatgtcataccagggctctccccggtgcatgggtcaaaggacagagcgccggtgggtgccgcaataattcagggtttccatcgaatcctaaattttggctcagagtctcagagccctccgaggtatacattgccgtgttacagagatcccgtctgcacgcagccgattgggccggacgcgcacgagccctcgttggggactcccacacctcatggagccctgcatctatacccggaaaacactatcaggctgtgggcttgcatctgtggaaaggcgtgacactcggcacaaccctttttccggtgcctagctggatgtggcccacatag

SEQ ID NO: 214013 - DNA, 1267 bp, Artificial Sequence
  derived and/or modified sequence
gcggggccctcgggcttggagggctgggccgggcggggaacgggcggggcgggccggaggcggcggcggctgactcgccttctctccggggctgcgaccccgaggcaaccggctgcagatgggagcccgcggagccgaggatgcgggcgggccggggcgcgacgccggcgagggagctgttccgggacgccgccttccccgccgcggactcctcgctcttctgcgacttgtctacgccgctggcccagttccgcgaggacatcacgtggaggcggccccaggagatttgtgccacaccccggctgtttccagatgacccacgggaagggcaggtgaagcaggggctgctgggggattgctggttcctgtgtgcctgcgccgcgctgcagaagagcaggcacctcctggaccaggtctcttgccctgtgcagcttcctgcagactggacttgcaaagtccagcctgtatggctggagttcccatgcctgccaatctcctgtcgactgcgagtcagctccgatacttcaccagattcagccacctgggggagctggaagtgaatctcatcttagctgagccttctgatgagactgcagccccagctgacacctggattgcagactcatgaaagacctgaaactctaccaacagccacctgggggagctggaagtgaatctcctcgtagctgagccttctgatgagactgcagccccggctgacacctggattgcagactcatgaaagacctgaaactctaccaacagccacctgggggagctggaagtgaatctcctcgtagctgagccttctgatgagactgcagccccggctgacacctggattgcagactcatgaaagaccctgagcagaggacccagtttggcagagcccgaattcctgacccacaggaactgggagataaaactctgtggttttaatcttctcattttagaggtaatttttttgtgtagcaataggtagctgacaatgcacagctaaaataatagataattaaccctaatgctagtttcattcatccatcagggtttgcaaagtagtgatattctacttctgtcttccttcattatttattagcagaaatgtatctataaaaagaagtgttccttcattaactctttggtcatgttgaggtacagtttgcataggaaaggcagggcaaatgcttgattctttcccttcctttcctcatttataaaataatgaactgttttcctggcatctttcaacaatgactaatgagttttt

SEQ ID NO: 214014 - DNA, 862 bp, Artificial Sequence
  derived and/or modified sequence
ccgaggcaaccggctgcagatgggagcccgcggagccgaggatgcgggcgggccggggcgcgacgccggcgagggagctgttccgggacgccgccttccccgccgcggactcctcgctcttctgcgacttgtctacgccgctggcccagttccgcgaggacatcacgtggaggcggccccaggtcccagagggtggaaggagccaggacgcacccccactgctgctgcaggagccgctgctgagctgcgtgccacatcgctacgcccaggaggtgagccggctctgcctcctgcctgcgggcacctacaaggttgtgccctccacctacctgccggacacagagggggccttcacagtgaccatcgcaaccaggattgacaggccatccattcacagccaggagatgctgggccagttcctccaagaggtctccatcatggcagtgatgaaaacctaacagggtggccccctgtgccagctcaggtgactggagcccgagggcctgacaggttcccagcagctgggccggccagccttgcactgtgggggctggtcctgagtcttggcctgcctcccagccctgccaggaggctgcggcctaggggtccacgggaagcctccgtcaggagagacgcagccctgggggccagctggtgctgcaaggaagggtgggaagcttgctggcttctgttgcgccactgagacggcagagaccccaggatcccagagcttcccaggatccctcccagatcctctgctgactccatatggaggcctcacacccagagggtagggcagcagatcttctttataactatttattgttcgaatcacttttaggatgtaactttataaataaac

SEQ ID NO: 214015 - DNA, 1999 bp, Artificial Sequence
  derived and/or modified sequence
ccgaggcaaccggctgcagatgggagcccgcggagccgaggatgcgggcgggccggggcgcgacgccggcgagggagctgttccgggacgccgccttccccgccgcggactcctcgctcttctgcgacttgtctacgccgctggcccagttccgcgaggacatcacgtggaggcggccccaggagatttgtgccacaccccggctgtttccagatgacccacgggaagggcaggtgaagcaggggctgctgggggattgctggttcctgtgtgcctgcgccgcgctgcagaagagcaggcacctcctggaccaggtcattcctccgggacagccgagctgggccgaccaggagtaccggggctccttcacctgtcgcatttggcagtttggacgctgggtggaggtgaccacagatgaccgcctgccgtgccttgcagggagactctgtttctcccgctgccagagggaggatgtgttctggctccccttactggaaaaggtctacgccaaggtccatgggtcctacgagcacctgtgggccgggcaggtggcggatgccctggtggacctgaccggcggcctggcagaaagatggaacctgaagggcgtagcaggaagcggaggccagcaggacaggccaggccgctgggagcacaggacttgtcggcagctgctccacctgaaggaccagtgtctgatcagctgctgcgtgctcagccccagagcaggtgcccgggagctgggggagttccatgccttcattgtctcggacctgcgggagctccagggtcaggcgggccagtgcatcctgctgctgcggatccagaacccctggggccggcggtgctggcaggggctctggagagaggggggtgaagggtggagccaggtagatgcagcggtagcatctgagctcctgtcccagctccaggaaggggagttctgggtggaggaggaggagttcctcagggagtttgacgagctcaccgttggctacccggtcacggaggccggccacctgcagagcctctacacagagaggctgctctgccatacgcgggcgctgcctggggcctgggtcaagggccagtcagcaggaggctgccggaacaacagcggctttcccagcaaccccaaattctggctgcgggtctcagaaccgagtgaggtgtacattgccgtcctgcagagatccaggctgcacgcggcggactgggcaggccgggcccgggcactggtgggtgacagtcatacttcgtggagcccagcgagcatcccgggcaagcactaccaggctgtgggtctgcacctctggaaggtcccagagggtggaaggagccaggacgcacccccactgctgctgcaggagccgctgctgagctgcgtgccacatcgctacgcccaggaggtgagccggctctgcctcctgcctgcgggcacctacaaggttgtgccctccacctacctgccggacacagagggggccttcacagtgaccatcgcaaccaggattgacaggccatccattcacagccaggagatgctgggccagttcctccaagaggtctccatcatggcagtgatgaaaacctaacagggtggccccctgtgccagctcaggtgactggagcccgagggcctgacaggttcccagcagctgggccggccagccttgcactgtgggggctggtcctgagtcttggcctgcctcccagccctgccaggaggctgcggcctaggggtccacgggaagcctccgtcaggagagacgcagccctgggggccagctggtgctgcaaggaagggtgggaagcttgctggcttctgttgcgccactgagacggcagagaccccaggatcccagagcttcccaggatccctcccagatcctctgctgactccatatggaggcctcacacccagagggtagggcagcagatcttctttataactatttattgttcgaatcacttttaggatgtaactttataaataaac

SEQ ID NO: 214016 - DNA, 1512 bp, Artificial Sequence
  derived and/or modified sequence
gactagcgggccggcgtactggcctggtccagcacctgcggggccctcgggcttggagggctgggccgggcggggaacgggcggggcgggccggaggcggcggcggctgactcgccttctctccggggctgcgaccccgaggcaaccggctgcagatgggagcccgcggagccgaggatgcgggcgggccggggcgcgacgccggcgagggagctgttccgggacgccgccttccccgccgcggactcctcgctcttctgcgacttgtctacgccgctggcccagttccgcgaggacatcacgtggaggcggccccaggagatttgtgccacaccccggctgtttccagatgacccacgggaagggcaggtgaagcaggggctgctgggggattgctggttcctgtgtgcctgcgccgcgctgcagaagagcaggcacctcctggaccaggtcattcctccgggacagccgagctgggccgaccaggagtaccggggctccttcacctgtcgcatttggcagtttggacgctgggtggaggtgaccacagatgaccgcctgccgtgccttgcagggagactctgtttctcccgctgccagagggaggatgtgttctggctccccttactggaaaaggtctacgccaaggtccatgggtcctacgagcacctgtgggccgggcaggtggcggatgccctggtggacctgaccggcggcctggcagaaagatggaacctgaagggcgtagcaggaagcggaggccagcaggacaggccaggccgctgggagcacaggacttgtcggcagctgctccacctgaaggaccagtgtctgatcagctgctgcgtgctcagccccagagcaggtgcccgggagctgggggagttccatgccttcattgtctcggacctgcgggagctccagggtcaggcgggccagtgcatcctgctgctgcggatccagaacccctggggccggcggtgctggcaggggctctggagagaggggggtgaagggtggagccaggtagatgcagcggtagcatctgagctcctgtcccagctccaggaaggggagttctgggtggaggaggaggagttcctcagggagtttgacgagctcaccgttggctacccggtcacggaggccggccacctgcagagcctctacacagagaggctgctctgccatacgcgggcgctgcctggggcctgggtcaagggccagtcagcaggaggctgccggaacaacagcggctttcccagcaaccccaaattctggctgcgggtctcagaaccgagtgaggtgtacattgccgtcctgcagagatccaggctgcacgcggcggactgggcaggccgggcccgggcactggtgggtgacagtcatacttcgtggagcccagcgagcatcccgggcaagcactaccaggctgtgggtctgcacctctggaagggtgtgacacttggcaccacactgttccctgtcccttcatggatgtggcccacatga

SEQ ID NO: 214017 - DNA, 420 bp, Artificial Sequence
  derived and/or modified sequence
atgagagccggcagaggcgccacccccgccagagagctgttcagagacgccgccttccccgccgccgacagcagcctgttctgcgacctgagcacccccctggcccagttcagagaggacatcacctggagaagaccccaggagatctgcgccacccccagactgttccccgacgaccccagagagggccaggtgaagcagggcctgctgggcgactgctggttcctgtgcgcctgcgccgccctgcagaagagcagacacctgctggaccaggtgagctgccccgtgcagctgcccgccgactggacctgcaaggtgcagcccgtgtggctggagttcccctgcctgcccatcagctgcagactgagagtgagcagcgacaccagccccgacagcgccacctggggcagctggaagtag

SEQ ID NO: 214018 - DNA, 417 bp, Artificial Sequence
  derived and/or modified sequence
atgagagccggcagaggcgccacccccgccagagagctgttcagagacgccgccttccccgccgccgacagcagcctgttctgcgacctgagcacccccctggcccagttcagagaggacatcacctggagaagaccccaggtgcccgagggcggcagaagccaggacgccccccccctgctgctgcaggagcccctgctgagctgcgtgccccacagatacgcccaggaggtgagcagactgtgcctgctgcccgccggcacctacaaggtggtgcccagcacctacctgcccgacaccgagggcgccttcaccgtgaccatcgccaccagaatcgacagacccagcatccacagccaggagatgctgggccagttcctgcaggaggtgagcatcatggccgtgatgaagacctag

SEQ ID NO: 214019 - DNA, 1554 bp, Artificial Sequence
  derived and/or modified sequence
atgagagccggcagaggcgccacccccgccagagagctgttcagagacgccgccttccccgccgccgacagcagcctgttctgcgacctgagcacccccctggcccagttcagagaggacatcacctggagaagaccccaggagatctgcgccacccccagactgttccccgacgaccccagagagggccaggtgaagcagggcctgctgggcgactgctggttcctgtgcgcctgcgccgccctgcagaagagcagacacctgctggaccaggtgatcccccccggccagcccagctgggccgaccaggagtacagaggcagcttcacctgcagaatctggcagttcggcagatgggtggaggtgaccaccgacgacagactgccctgcctggccggcagactgtgcttcagcagatgccagagagaggacgtgttctggctgcccctgctggagaaggtgtacgccaaggtgcacggcagctacgagcacctgtgggccggccaggtggccgacgccctggtggacctgaccggcggcctggccgagagatggaacctgaagggcgtggccggcagcggcggccagcaggacagacccggcagatgggagcacagaacctgcagacagctgctgcacctgaaggaccagtgcctgatcagctgctgcgtgctgagccccagagccggcgccagagagctgggcgagttccacgccttcatcgtgagcgacctgagagagctgcagggccaggccggccagtgcatcctgctgctgagaatccagaacccctggggcagaagatgctggcagggcctgtggagagagggcggcgagggctggagccaggtggacgccgccgtggccagcgagctgctgagccagctgcaggagggcgagttctgggtggaggaggaggagttcctgagagagttcgacgagctgaccgtgggctaccccgtgaccgaggccggccacctgcagagcctgtacaccgagagactgctgtgccacaccagagccctgcccggcgcctgggtgaagggccagagcgccggcggctgcagaaacaacagcggcttccccagcaaccccaagttctggctgagagtgagcgagcccagcgaggtgtacatcgccgtgctgcagagaagcagactgcacgccgccgactgggccggcagagccagagccctggtgggcgacagccacaccagctggagccccgccagcatccccggcaagcactaccaggccgtgggcctgcacctgtggaaggtgcccgagggcggcagaagccaggacgccccccccctgctgctgcaggagcccctgctgagctgcgtgccccacagatacgcccaggaggtgagcagactgtgcctgctgcccgccggcacctacaaggtggtgcccagcacctacctgcccgacaccgagggcgccttcaccgtgaccatcgccaccagaatcgacagacccagcatccacagccaggagatgctgggccagttcctgcaggaggtgagcatcatggccgtgatgaagacctag

SEQ ID NO: 214020 - DNA, 1335 bp, Artificial Sequence
  derived and/or modified sequence
atgagagccggcagaggcgccacccccgccagagagctgttcagagacgccgccttccccgccgccgacagcagcctgttctgcgacctgagcacccccctggcccagttcagagaggacatcacctggagaagaccccaggagatctgcgccacccccagactgttccccgacgaccccagagagggccaggtgaagcagggcctgctgggcgactgctggttcctgtgcgcctgcgccgccctgcagaagagcagacacctgctggaccaggtgatcccccccggccagcccagctgggccgaccaggagtacagaggcagcttcacctgcagaatctggcagttcggcagatgggtggaggtgaccaccgacgacagactgccctgcctggccggcagactgtgcttcagcagatgccagagagaggacgtgttctggctgcccctgctggagaaggtgtacgccaaggtgcacggcagctacgagcacctgtgggccggccaggtggccgacgccctggtggacctgaccggcggcctggccgagagatggaacctgaagggcgtggccggcagcggcggccagcaggacagacccggcagatgggagcacagaacctgcagacagctgctgcacctgaaggaccagtgcctgatcagctgctgcgtgctgagccccagagccggcgccagagagctgggcgagttccacgccttcatcgtgagcgacctgagagagctgcagggccaggccggccagtgcatcctgctgctgagaatccagaacccctggggcagaagatgctggcagggcctgtggagagagggcggcgagggctggagccaggtggacgccgccgtggccagcgagctgctgagccagctgcaggagggcgagttctgggtggaggaggaggagttcctgagagagttcgacgagctgaccgtgggctaccccgtgaccgaggccggccacctgcagagcctgtacaccgagagactgctgtgccacaccagagccctgcccggcgcctgggtgaagggccagagcgccggcggctgcagaaacaacagcggcttccccagcaaccccaagttctggctgagagtgagcgagcccagcgaggtgtacatcgccgtgctgcagagaagcagactgcacgccgccgactgggccggcagagccagagccctggtgggcgacagccacaccagctggagccccgccagcatccccggcaagcactaccaggccgtgggcctgcacctgtggaagggcgtgaccctgggcaccaccctgttccccgtgcccagctggatgtggcccacctag

SEQ ID NO: 214021 - protein, 733 aa, Artificial Sequence
  derived and/or modified sequence
MWSWKCLLFWAVLVTATLCTARPSPTLPEQDALPSSEDDDDDDDSSSEEKETDNTKPNRMPVAPYWTSPEKMEKKLHAVPAAKTVKFKCPSSGTPNPTLRWLKNGKEFKPDHRIGGYKVRYATWSIIMDSVVPSDKGNYTCIVENEYGSINHTYQLDVVERSPHRPILQAGLPANKTVALGSNVEFMCKVYSDPQPHIQWLKHIEVNGSKIGPDNLPYVQILKTAGVNTTDKEMEVLHLRNVSFEDAGEYTCLAGNSIGLSHHSAWLTVLEALEERPAVMTSPLYLEIIIYCTGAFLISCMVGSVIVYKMKSGTKKSDFHSQMAVHKLAKSIPLRRQVTVSADSSASMNSGVLLVRPSRLSSSGTPMLAGVSEYELPEDPRWELPRDRLVLGKPLGEGCFGQVVLAEAIGLDKDKPNRVTKVAVKMLKSDATEKDLSDLISEMEMMKMIGKHKNIINLLGACTQDGPLYVIVEYASKGNLREYLQARRPPGLEYCYNPSHNPEEQLSSKDLVSCAYQVARGMEYLASKKCIHRDLAARNVLVTEDNVMKIADFGLARDIHHIDYYKKTTNGRLPVKWMAPEALFDRIYTHQSDVWSFGVLLWEIFTLGGSPYPGVPVEELFKLLKEGHRMDKPSNCTNELYMMMRDCWHAVPSQRPTFKQLVEDLDRIVALTSNQEYLDLSMPLDQYSPSFPDTRSSTCSSGEDSVFSHEPLPEEPCLPRHPAQLANGGLKRR

SEQ ID NO: 214022 - protein, 142 aa, Artificial Sequence
  derived and/or modified sequence
MWSWKCLLFWAVLVTATLCTARPSPTLPEQDALPSSEDDDDDDDSSSEEKETDNTKPNRMPVAPYWTSPEKMEKKLHAVPAAKTVKFKCPSSGTPNPTLRWLKNGKEFKPDHRIGGYKVRYATWSIIMDSVVPSDKGNYTCI

SEQ ID NO: 214023 - DNA, 2202 bp, Artificial Sequence
  derived and/or modified sequence
atgtggagctggaaatgcttattgttctgggcagtgctggtgacagcaaccctgtgcacagcccggccgtccccaacgctgccagagcaggatgctctgccaagctccgaggatgacgacgatgacgacgattcttcttccgaagagaaagagactgacaatacaaagcctaaccgcatgccggtcgccccctattggacttcccctgagaaaatggaaaagaagctacacgctgtgcccgccgcaaaaaccgtgaaatttaagtgtcccagttccggtacgcccaatcccaccctgagatggttaaaaaacgggaaggagtttaaacccgatcaccgaatcggagggtacaaggtaaggtatgctacctggtctattattatggacagtgtagtaccctccgataaaggcaattacacatgcattgtggaaaatgaatatgggagcatcaaccatacataccagttggatgtggtggagagaagccctcaccgcccaatactgcaagctggcttgccagctaataaaacggtggcgctggggtccaacgtagaattcatgtgtaaggtctacagtgacccccaacctcatattcagtggctcaagcacattgaagttaatggcagtaagattggacccgataacctgccttatgtgcaaattctaaaaacagctggcgtcaatacgactgacaaagagatggaagtgctccatctcagaaatgtgtcctttgaagacgctggggaatacacttgcttagctggcaactcgatcggattgtcccaccacagtgcctggctcactgttcttgaggcactcgaagaacgacccgcagtgatgacatcaccactgtatctcgagataatcatttattgcacaggcgcgttcctgatctcttgcatggttggcagtgttatagtgtacaaaatgaagagcggaactaagaaatcagattttcatagtcaaatggctgtgcacaagctcgccaaaagcattccccttcggagacaagtcaccgtttcagccgacagttctgcgtcaatgaatagtggagttctcctggtgcgtccatctcggctttcgtcaagcggcacacctatgctggctggggtatctgaatatgaacttccagaagatccacgctgggagctgccccgggaccggctggttctaggtaaacctttgggtgagggctgcttcgggcaggtggttttggccgaagccatcggactcgataaagataaaccaaacagagtgactaaggttgcagtgaaaatgctaaagtcagacgccacggagaaagatctaagtgacttgatctccgaaatggaaatgatgaaaatgatcgggaagcacaagaacattatcaatcttcttggcgcctgtacccaagatggtccactgtatgtcatcgtcgagtatgcgagcaagggaaacctgcgtgagtatctgcaagccagaaggccccctgggttggaatactgctataatccaagccacaaccctgaagagcagctgagctcgaaggacctcgtgtcttgtgcctatcaagttgcgagagggatggaatacctggcatctaagaagtgcatccatagggatcttgcagcccgaaacgtgttggtaactgaagacaacgtgatgaagattgcagactttggactcgccagagacatccaccatattgactattataagaaaacaacaaatggcagactccccgtgaagtggatggccccagaggcgctgttcgaccggatctatacccatcagtcagacgtctggagttttggagtgctgttatgggagatattcacactggggggaagtccatatcctggtgttcctgtcgaagagttgtttaaactgctgaaggaaggccatagaatggacaaaccttccaattgtacaaacgagctctatatgatgatgagagattgctggcacgccgtaccatcgcagcggccaactttcaaacagctcgtggaggacctcgatcgaattgtggccctgacatctaatcaagaatacctcgatttgtcaatgccactagaccaatatagcccgtcttttcctgatacaagatcttcaacctgttcaagtggcgaggattccgtcttcagtcatgaacctttacctgaggaaccttgcctccctcgtcatccagcacagctggcgaatggcggtcttaaacggcgttag

SEQ ID NO: 214024 - DNA, 429 bp, Artificial Sequence
  derived and/or modified sequence
atgtggagctggaagtgtttgcttttttgggccgtactggtcactgccaccctgtgtactgctcggccttcacctacacttccagaacaggatgccctgccaagcagcgaggacgacgatgacgatgacgatagctcctcagaagagaaagaaaccgataataccaagccaaacaggatgcctgtggccccctattggacaagcccagaaaagatggaaaaaaagctgcatgctgtgcctgccgctaaaaccgtcaaatttaagtgccccagttctggaacccccaatccgaccctgagatggctcaaaaacggcaaagaatttaagccagatcataggattggaggatacaaggtgcggtatgctacttggtccatcattatggacagtgtcgtaccctctgacaagggcaattatacctgcatctag

SEQ ID NO: 214025 - DNA, 2202 bp, Artificial Sequence
  derived and/or modified sequence
atgtggagctggaagtgcctgctcttctgggccgtgctggtgacagccaccctgtgcacagcccggcccagccccaccctgcctgagcaggatgccctgcccagcagtgaagatgatgatgatgatgatgacagcagcagcgaggagaaggagacagacaacaccaagcccaacaggatgcctgtggccccctactggaccagccctgagaagatggagaagaagctgcatgctgtgcctgctgccaagacagtgaagttcaagtgccccagcagcggcacccccaaccccaccctgcgctggctgaagaatggcaaggagttcaagccagaccaccgcatcggcggctacaaggtgcgctatgccacctggagcatcatcatggacagcgtggtgcccagcgacaagggcaactacacctgcatcgtggagaatgaatatggcagcatcaaccacacctaccagctggatgtggtggagaggagcccccaccggcccatcctgcaggccggcctgcctgccaacaagacagtggccctgggcagcaatgtggagttcatgtgcaaggtgtacagcgacccccagccccacatccagtggctgaagcacatcgaggtgaatggcagcaagattggaccagacaacctgccctacgtgcagatcctgaagacagctggggtgaacaccacagacaaggagatggaggtgctgcacctgagaaatgtgtcctttgaagatgctggggagtacacctgcctggccggcaacagcatcggcctgagccaccacagcgcctggctgactgtgctggaggccctggaggagaggcctgctgtgatgaccagccccctgtacctggagatcatcatctactgcacaggagccttcctgatcagctgcatggtgggcagcgtcatcgtgtacaagatgaagagcggcaccaagaagagtgacttccacagccagatggctgtgcacaagctggccaagagcatccccctgcggcggcaggtgacagtgtctgctgacagcagcgcctccatgaacagcggcgtgctgctggtgcggcccagccggctgagcagcagcggcacccccatgctggccggcgtgtctgaatatgagctgcctgaggacccccgctgggagctgccccgggaccggctggtgctgggcaagcccctgggggagggctgcttcggccaggtggtgctggccgaggccatcggcctggacaaggacaagcccaacagagtgaccaaggtggccgtgaagatgctgaagagtgatgccacagagaaggacctgagtgacctgatcagcgagatggagatgatgaagatgattggcaagcacaagaacatcatcaacctgctgggcgcctgcacccaggacggccccctgtatgtgattgtggagtatgccagcaaaggaaacctgcgggagtacctgcaggcccggcggcccccaggcctggagtactgctacaaccccagccacaaccctgaggagcagctgagcagcaaggacctggtgtcctgtgcctaccaggtggcccggggcatggagtacctggccagcaagaagtgcatccaccgggacctggccgccagaaatgtgctggtgacagaggacaacgtgatgaagattgctgactttggcctggcccgggacatccaccacatcgactactacaagaagaccaccaacggccgcctgcctgtgaagtggatggcccctgaggccctgtttgaccgcatctacacccaccagagtgatgtgtggagctttggagtgctgctgtgggagatcttcaccctgggcggcagcccctacccaggagtgcctgtggaggagctgttcaagctgctgaaggagggccacaggatggacaagcccagcaactgcaccaatgagctgtacatgatgatgagggactgctggcatgctgtgcccagccagaggcccaccttcaagcagctggtggaggacctggaccgcatcgtggccctgaccagcaaccaggagtacctggacctgtccatgcccctggaccagtacagccccagcttcccagacaccaggagcagcacctgcagcagtggagaagattctgtgttcagccatgagcccctgcctgaggagccctgcctgcccaggcacccagcccagctggccaatggaggcctgaagagaagatag

SEQ ID NO: 214026 - DNA, 429 bp, Artificial Sequence
  derived and/or modified sequence
atgtggagctggaagtgcctgctcttctgggccgtgctggtgacagccaccctgtgcacagcccggcccagccccaccctgcctgagcaggatgccctgcccagcagtgaagatgatgatgatgatgatgacagcagcagcgaggagaaggagacagacaacaccaagcccaacaggatgcctgtggccccctactggaccagccctgagaagatggagaagaagctgcatgctgtgcctgctgccaagacagtgaagttcaagtgccccagcagcggcacccccaaccccaccctgcgctggctgaagaatggcaaggagttcaagccagaccaccgcatcggcggctacaaggtgcgctatgccacctggagcatcatcatggacagcgtggtgcccagcgacaagggcaactacacctgcatctag

SEQ ID NO: 214027 - DNA, 2202 bp, Artificial Sequence
  derived and/or modified sequence
atgtggagctggaagtgcctgctgttctgggccgtgctggtgaccgccactctgtgcacagcacgaccgtctcctaccttgccagagcaggacgctctgccctcctcagaagatgatgatgacgacgatgattcaagctccgaagagaaggaaacagacaatactaagccgaaccgaatgccagtcgctccttactggacaagccctgagaaaatggagaagaaacttcacgcagtgcccgccgctaaaacagtgaaattcaaatgcccctcatcaggcaccccaaaccctaccctcagatggctcaagaacggcaaggaattcaagccagatcatcggatcgggggctataaggtacgctatgcaacatggtcgattattatggattctgtggttcccagtgataaggggaactacacttgtattgtggagaacgagtacggatcgattaatcacacctatcaactcgacgtcgtagagagatctccgcacaggccgatcctgcaagcaggacttcccgcaaacaaaactgtggctctgggcagcaacgtggaatttatgtgcaaggtctattcagatccacagccacatatacagtggttgaagcatatcgaggtgaatggcagcaagatcggtcctgataatctaccgtatgtccaaatattaaagacagccggggtcaacacaacagataaggaaatggaagtcctccacctacggaacgtgtctttcgaggacgccggtgaatatacgtgcttagccggaaacagcatcgggcttagtcaccattctgcctggctaacagtgctggaagcccttgaggagcggcctgctgtgatgacttcacctctctacttggagatcatcatttactgcaccggagcatttctgatctcgtgcatggtgggcagcgtcattgtgtataagatgaaatccggcaccaaaaagtccgattttcatagccagatggcagtccacaaattggcgaaatctattccacttcgtagacaagtcactgtgtctgccgactcctcagcgtcaatgaatagtggtgtgctactggtacgccccagccgcttatcctctagcggaactcccatgctggccggggtgagtgagtatgagctgcccgaggatcctcggtgggaactgccaagagacaggcttgtgctgggcaaaccactcggagaagggtgttttggacaggtagtgctggccgaggccattggtctcgataaagataagccaaatcgcgtgactaaggttgccgtgaaaatgctgaagtcagacgccacagaaaaagatctgtccgacttaatctcagagatggagatgatgaagatgatcggtaagcataaaaacattatcaatctgttgggggcctgcactcaggatgggcccctttatgtgatagtcgagtatgcatccaagggaaacctcagagaatacttgcaggcgagacgacctccaggcctggaatactgctataatccatcacataaccccgaggaacagctctcttctaaggacctggtctcttgtgcctatcaagtggcgagaggaatggagtacctggcatctaagaagtgcattcatcgcgatctggctgcccgcaacgtgctcgtgactgaagacaatgtgatgaagatcgcagatttcggtctcgcacgtgatatccaccacatcgactattacaagaaaacaaccaatggccgattacctgtgaaatggatggcgccggaagctctctttgatcgaatctacacccatcagtcggacgtgtggagcttcggcgtgctactttgggagatatttaccttaggggggagcccgtatcctggtgtgccagtcgaggaactctttaaacttttgaaagaaggacacagaatggacaagccgtccaattgcacaaacgaactatacatgatgatgcgcgactgctggcacgccgtgccctctcaacgacctaccttcaaacagttggtggaagatctggaccgcattgttgctcttacttctaatcaggaatatcttgacctgagcatgcctctggatcaatactcgccttcatttccagacacaaggtcctctacgtgttccagcggcgaggatagcgtgttcagccacgagccccttcctgaagagccctgccttccccgccatcctgcacagctggctaatggagggctgaaaagaaggtag

SEQ ID NO: 214028 - DNA, 429 bp, Artificial Sequence
  derived and/or modified sequence
atgtggagctggaagtgcctgctgttctgggccgtgctggtgaccgccactctgtgcacagcgagaccaagcccaacccttccagaacaagacgctctgcctagttccgaggacgatgacgacgacgacgacagtagttctgaggaaaaagagaccgacaacacaaagcctaaccgcatgccagtcgctccttattggaccagtcctgagaagatggagaagaaacttcatgcagtgccagccgcgaaaacagttaagttcaagtgccccagctccggcacccccaatcctactttgagatggcttaagaatggcaaagaattcaagcccgatcacagaatcggggggtataaagtacgctatgctacgtggtctattataatggactcggtagttccatcggataagggcaactacacttgcatctag

SEQ ID NO: 214029 - DNA, 2202 bp, Artificial Sequence
  derived and/or modified sequence
atgtggtcttggaagtgcctgctgttctgggccgtactggtcaccgcaaccctgtgcacagcacgcccatcgcccaccctgcccgagcaggacgccctcccttcctcagaagacgatgatgacgacgatgatagttcaagcgaagagaaagaaacagacaacactaaaccgaatcggatgcctgtggccccatattggactagccccgagaagatggagaaaaagctgcacgctgttcccgctgccaaaacagtgaaattcaaatgtccgtcaagcgggacgccaaatcctaccctgagatggctgaagaacggcaaggaattcaaaccagatcaccgtatcggtggatacaaagtccgctacgccacttggagcattataatggacagtgtagtcccaagcgataaaggaaattacacatgcatagtcgaaaatgagtatggttccattaaccacacctatcagctcgatgtcgtggaacgctctccgcatcgtccgatcttacaggcgggtctgccggcaaataagacagttgccttagggtctaatgtggagttcatgtgtaaggtctactccgacccacagcctcacatacagtggctgaaacacatcgaagtgaacgggagtaagattgggcctgataatctaccttacgttcaaatacttaagactgctggcgtaaacaccaccgataaggagatggaggtgttgcacctgaggaatgtgtccttcgaggatgcaggtgagtacacatgcctggccggaaatagcataggtctctctcatcatagcgcctggctcaccgtgttggaggcccttgaagagaggccagccgttatgactagtcccctgtacctggaaattatcatttattgcaccggcgcattcctgatttcttgcatggttggctccgtgatcgtctataagatgaagagtgggacaaaaaagtccgattttcattctcagatggctgtccacaagttggctaagagtattcctttgaggcggcaggtcactgtaagcgcggattcctcggcctccatgaatagtggcgtacttctcgtgagaccctcccgactttcatccagtggtaccccaatgttagccggtgtctccgagtacgaactgccagaggatccccgttgggagctaccacgagatcgcctcgttctagggaaacccctgggcgagggctgctttggccaggtggtactggctgaagccatcggcctggataaagacaagcctaatagggtcacaaaagtagcggttaaaatgttgaaatctgatgccactgagaaggatttgtccgatctgatctctgaaatggagatgatgaagatgatcggcaagcacaaaaatattatcaatttgctaggagcatgcacacaagatggacctctctacgttattgtggaatacgccagtaagggtaatctaagggagtatttacaagcacgtaggccacccggactcgagtactgctacaatccatcccataatccagaagagcagctgagtagcaaagatctggtcagctgcgcctaccaagtggcccgtggcatggagtacttggccagtaaaaagtgcatccaccgcgatctcgccgctaggaacgttctggtgacagaggacaacgtgatgaagattgctgactttggactggctagagatatccaccacatcgactactataagaagactactaacggacgtttgcctgtgaaatggatggccccagaagctctctttgatcggatttacacacaccagtccgatgtctggtctttcggtgtcctcctgtgggagatctttacacttgggggaagtccatatcccggagtacccgtggaggagctatttaagctgttaaaggaagggcaccggatggacaagccatcaaactgtaccaacgaactgtacatgatgatgagagattgctggcatgcagtgccatcgcagaggccaaccttcaagcagcttgtcgaggacttggaccgcatcgtggctcttacatcaaaccaggagtatctcgatctgagtatgcctttggaccagtactcaccttcgtttcccgacacaagatctagtacttgttcctccggggaggacagcgtgttttcccatgaacctctgccagaggagccatgtctccctcgccacccagcgcagctggctaacgggggtctgaaacggaggtag

SEQ ID NO: 214030 - DNA, 429 bp, Artificial Sequence
  derived and/or modified sequence
atgtggagctggaaatgtctgttattctgggccgtgctggttaccgccaccttatgtacagcccgaccatcccccacgctgccagaacaagacgctctgccttccagcgaagacgacgacgatgatgatgattccagttcagaggaaaaggaaaccgataacactaagcccaatagaatgcctgttgccccatactggacaagcccagaaaagatggagaaaaaactccacgcagtgccagcagccaagaccgtcaaattcaagtgtccatcttcaggaactcccaacccgacccttagatggctgaagaacggaaaggaattcaagccggaccaccggataggaggctataaagtcaggtacgctacgtggagcatcataatggacagtgtagtcccatccgacaaaggtaattacacctgcatttag

SEQ ID NO: 214031 - DNA, 2202 bp, Artificial Sequence
  derived and/or modified sequence
atgtggagctggaagtgcctgctgttctgggccgtgctggtgaccgccaccctgtgcaccgccagacccagccccaccctgcccgagcaggacgccctgcccagcagcgaggacgacgacgacgacgacgacagcagcagcgaggagaaggagaccgacaacaccaagcccaacagaatgcccgtggccccctactggaccagccccgagaagatggagaagaagctgcacgccgtgcccgccgccaagaccgtgaagttcaagtgccccagcagcggcacccccaaccccaccctgagatggctgaagaacggcaaggagttcaagcccgaccacagaatcggcggctacaaggtgagatacgccacctggagcatcatcatggacagcgtggtgcccagcgacaagggcaactacacctgcatcgtggagaacgagtacggcagcatcaaccacacctaccagctggacgtggtggagagaagcccccacagacccatcctgcaggccggcctgcccgccaacaagaccgtggccctgggcagcaacgtggagttcatgtgcaaggtgtacagcgacccccagccccacatccagtggctgaagcacatcgaggtgaacggcagcaagatcggccccgacaacctgccctacgtgcagatcctgaagaccgccggcgtgaacaccaccgacaaggagatggaggtgctgcacctgagaaacgtgagcttcgaggacgccggcgagtacacctgcctggccggcaacagcatcggcctgagccaccacagcgcctggctgaccgtgctggaggccctggaggagagacccgccgtgatgaccagccccctgtacctggagatcatcatctactgcaccggcgccttcctgatcagctgcatggtgggcagcgtgatcgtgtacaagatgaagagcggcaccaagaagagcgacttccacagccagatggccgtgcacaagctggccaagagcatccccctgagaagacaggtgaccgtgagcgccgacagcagcgccagcatgaacagcggcgtgctgctggtgagacccagcagactgagcagcagcggcacccccatgctggccggcgtgagcgagtacgagctgcccgaggaccccagatgggagctgcccagagacagactggtgctgggcaagcccctgggcgagggctgcttcggccaggtggtgctggccgaggccatcggcctggacaaggacaagcccaacagagtgaccaaggtggccgtgaagatgctgaagagcgacgccaccgagaaggacctgagcgacctgatcagcgagatggagatgatgaagatgatcggcaagcacaagaacatcatcaacctgctgggcgcctgcacccaggacggccccctgtacgtgatcgtggagtacgccagcaagggcaacctgagagagtacctgcaggccagaagaccccccggcctggagtactgctacaaccccagccacaaccccgaggagcagctgagcagcaaggacctggtgagctgcgcctaccaggtggccagaggcatggagtacctggccagcaagaagtgcatccacagagacctggccgccagaaacgtgctggtgaccgaggacaacgtgatgaagatcgccgacttcggcctggccagagacatccaccacatcgactactacaagaagaccaccaacggcagactgcccgtgaagtggatggcccccgaggccctgttcgacagaatctacacccaccagagcgacgtgtggagcttcggcgtgctgctgtgggagatcttcaccctgggcggcagcccctaccccggcgtgcccgtggaggagctgttcaagctgctgaaggagggccacagaatggacaagcccagcaactgcaccaacgagctgtacatgatgatgagagactgctggcacgccgtgcccagccagagacccaccttcaagcagctggtggaggacctggacagaatcgtggccctgaccagcaaccaggagtacctggacctgagcatgcccctggaccagtacagccccagcttccccgacaccagaagcagcacctgcagcagcggcgaggacagcgtgttcagccacgagcccctgcccgaggagccctgcctgcccagacaccccgcccagctggccaacggcggcctgaagagaagatag

SEQ ID NO: 214032 - DNA, 429 bp, Artificial Sequence
  derived and/or modified sequence
atgtggagctggaagtgcctgctgttctgggccgtgctggtgaccgccaccctgtgcaccgccagacccagccccaccctgcccgagcaggacgccctgcccagcagcgaggacgacgacgacgacgacgacagcagcagcgaggagaaggagaccgacaacaccaagcccaacagaatgcccgtggccccctactggaccagccccgagaagatggagaagaagctgcacgccgtgcccgccgccaagaccgtgaagttcaagtgccccagcagcggcacccccaaccccaccctgagatggctgaagaacggcaaggagttcaagcccgaccacagaatcggcggctacaaggtgagatacgccacctggagcatcatcatggacagcgtggtgcccagcgacaagggcaactacacctgcatctag

SEQ ID NO: 214033 - protein, 733 aa, Artificial Sequence
  derived and/or modified sequence
MWSWKCLLFWAVLVTATLCTARPSPTLPEQDALPSSEDDDDDDDSSSEEKETDNTKPNPVAPYWTSPEKMEKKLHAVPAAKTVKFKCPSSGTPNPTLRWLKNGKEFKPDHRIGGYKVRYATWSIIMDSVVPSDKGNYTCIVENEYGSINHTYQLDVVERSPHRPILQAGLPANKTVALGSNVEFMCKVYSDPQPHIQWLKHIEVNGSKIGPDNLPYVQILKHSGINSSDAEVLTLFNVTEAQSGEYVCKVSNYIGEANQSAWLTVTRPVAKALEERPAVMTSPLYLEIIIYCTGAFLISCMVGSVIVYKMKSGTKKSDFHSQMAVHKLAKSIPLRRQVTVSADSSASMNSGVLLVRPSRLSSSGTPMLAGVSEYELPEDPRWELPRDRLVLGKPLGEGCFGQVVLAEAIGLDKDKPNRVTKVAVKMLKSDATEKDLSDLISEMEMMKMIGKHKNIINLLGACTQDGPLYVIVEYASKGNLREYLQARRPPGLEYCYNPSHNPEEQLSSKDLVSCAYQVARGMEYLASKKCIHRDLAARNVLVTEDNVMKIADFGLARDIHHIDYYKKTTNGRLPVKWMAPEALFDRIYTHQSDVWSFGVLLWEIFTLGGSPYPGVPVEELFKLLKEGHRMDKPSNCTNELYMMMRDCWHAVPSQRPTFKQLVEDLDRIVALTSNQEYLDLSMPLDQYSPSFPDTRSSTCSSGEDSVFSHEPLPEEPCLPRHPAQLANGGLKRR

SEQ ID NO: 214034 - protein, 55 aa, Artificial Sequence
  derived and/or modified sequence
MWSWKCLLFWAVLVTATLCTARPSPTLPEQDALPSSEDDDDDDDSSSEEKETDNT

SEQ ID NO: 214035 - protein, 145 aa, Artificial Sequence
  derived and/or modified sequence
MWSWKCLLFWAVLVTATLCTARPSPTLPEQDALPSSEDDDDDDDSSSEEKETDNTKPNPVAPYWTSPEKMEKKLHAVPAAKTVKFKCPSSGTPNPTLRWLKNGKEFKPDHRIGGYKVRYATWSIIMDSVVPSDKGNYTCIVENEY

SEQ ID NO: 214036 - protein, 85 aa, Artificial Sequence
  derived and/or modified sequence
MWSWKCLLFWAVLVTATLCTARPSPTLPEQDALPSSEDDDDDDDSSSEEKETDNTKPNPVAPYWTSPEKMEKKLHAVPAAKTVKF

SEQ ID NO: 214037 - DNA, 168 bp, Artificial Sequence
  derived and/or modified sequence
atgtggagctggaagtgcctgctgttttgggctgtgttggtcacggccactctctgtaccgcacgaccctcgcctacacttcccgagcaagacgcccttccttcatccgaggacgacgacgacgatgatgatagcagctccgaggagaaagaaactgataatacctag

SEQ ID NO: 214038 - DNA, 438 bp, Artificial Sequence
  derived and/or modified sequence
atgtggtcctggaagtgtttactcttttgggcagtactggtgacagccaccctatgtactgcccggccatcccccaccctcccagagcaggacgccctcccttcctctgaggacgacgacgatgacgatgatagcagcagtgaggaaaaagaaacggacaatacaaaaccgaatccagtggcgccgtattggacaagccctgagaagatggagaaaaaactgcacgcagtgccagcggccaagaccgtgaagttcaagtgtccaagcagtggcacccctaaccccaccctccgatggctgaagaacgggaaagagttcaagcctgaccacagaataggtggttataaagtgagatacgctacctggagcatcattatggattctgtggtgccttctgataaaggaaattatacatgtatcgttgaaaatgagtactag

SEQ ID NO: 214039 - DNA, 258 bp, Artificial Sequence
  derived and/or modified sequence
atgtggtcctggaagtgtctgttgttctgggcggtgttagtgaccgctacattgtgtacagcacgcccatctcctactctgccagagcaagatgcactgccgtcatctgaggatgatgacgacgacgacgactcgagtagcgaagaaaaggaaactgataatacgaagccaaatcctgtcgccccatattggacctccccagagaagatggagaagaaactgcatgccgtccccgccgcaaagaccgtaaagttctag

SEQ ID NO: 214040 - DNA, 168 bp, Artificial Sequence
  derived and/or modified sequence
atgtggagctggaagtgcctgctcttctgggccgtgctggtgacagccaccctgtgcacagcccggcccagccccaccctgcctgagcaggatgccctgcccagcagtgaagatgatgatgatgatgatgacagcagcagcgaggagaaggagacagacaacacctag

SEQ ID NO: 214041 - DNA, 438 bp, Artificial Sequence
  derived and/or modified sequence
atgtggagctggaagtgcctgctcttctgggccgtgctggtgacagccaccctgtgcacagcccggcccagccccaccctgcctgagcaggatgccctgcccagcagtgaagatgatgatgatgatgatgacagcagcagcgaggagaaggagacagacaacaccaagcccaaccctgtggccccctactggaccagccctgagaagatggagaagaagctgcatgctgtgcctgctgccaagacagtgaagttcaagtgccccagcagcggcacccccaaccccaccctgcgctggctgaagaatggcaaggagttcaagccagaccaccgcatcggcggctacaaggtgcgctatgccacctggagcatcatcatggacagcgtggtgcccagcgacaagggcaactacacctgcatcgtggagaatgagtactag

SEQ ID NO: 214042 - DNA, 258 bp, Artificial Sequence
  derived and/or modified sequence
atgtggagctggaagtgcctgctcttctgggccgtgctggtgacagccaccctgtgcacagcccggcccagccccaccctgcctgagcaggatgccctgcccagcagtgaagatgatgatgatgatgatgacagcagcagcgaggagaaggagacagacaacaccaagcccaaccctgtggccccctactggaccagccctgagaagatggagaagaagctgcatgctgtgcctgctgccaagacagtgaagttctag

SEQ ID NO: 214043 - DNA, 168 bp, Artificial Sequence
  derived and/or modified sequence
atgtggagctggaagtgcctgctgttctgggccgtgctggtgaccgctaccctttgcacggctcgaccctcccctacattgccagaacaggacgctctgccgagctccgaggatgatgacgatgatgacgattcaagcagtgaggaaaaagaaacagataatacctag

SEQ ID NO: 214044 - DNA, 438 bp, Artificial Sequence
  derived and/or modified sequence
atgtggagctggaagtgcctgctgttctgggccgtgctggtgaccgcgacactgtgtactgcgaggccttcaccaaccctaccggaacaggacgcgctacctagctccgaggacgatgatgacgacgatgattcaagcagcgaggaaaaagaaactgataacacaaagcccaacccagttgccccctattggactagtccagagaaaatggagaagaaactgcacgctgttccagccgcaaagaccgtgaagttcaagtgccccagttcagggacaccaaacccaaccctgagatggctgaagaacggaaaggaattcaagcctgaccaccgaattggaggttacaaagtccggtacgctacgtggtctataatcatggattccgtcgtgcccagtgacaagggcaactacacttgcatagtcgagaacgaatactag

SEQ ID NO: 214045 - DNA, 258 bp, Artificial Sequence
  derived and/or modified sequence
atgtggagctggaagtgcctgctgttctgggccgtgctggtgaccgctactctctgcaccgcccgcccatctcctaccctacccgaacaggacgccctgccttcctcagaagatgacgacgacgacgatgattccagctcggaggagaaagaaacggataacaccaagcctaacccagtggcaccttactggacttctccagaaaaaatggagaagaaattgcacgctgtccctgcggctaaaactgtgaaattctag

SEQ ID NO: 214046 - DNA, 168 bp, Artificial Sequence
  derived and/or modified sequence
atgtggtcctggaagtgtctgctcttttgggcagtactggtaacggccaccctgtgtaccgctaggcctagcccaaccctgccggagcaagacgcactgccgtcatccgaggatgacgacgacgacgacgacagctccagtgaggagaaagaaaccgacaatacctag

SEQ ID NO: 214047 - DNA, 438 bp, Artificial Sequence
  derived and/or modified sequence
atgtggagttggaagtgcctgctgttctgggccgttcttgtcacagctacactgtgtaccgccagaccctcccccactctccctgaacaggatgccttgccttctagcgaagatgatgatgatgacgatgatagtagttctgaggagaaagaaacagacaataccaagccaaatcctgtggctccttactggacctcccctgagaagatggagaaaaagctgcatgcagttccagcggcaaaaacggtgaaatttaaatgtccatcatccgggacgcccaatccgacccttcgatggctcaaaaatggcaaggaattcaagccagatcaccgaatcggaggatacaaagtgagatacgctacctggtcaatcatcatggactctgttgtgccgagcgacaagggcaattacacctgcatcgtcgagaacgaatactag

SEQ ID NO: 214048 - DNA, 258 bp, Artificial Sequence
  derived and/or modified sequence
atgtggtcctggaagtgtctcctcttttgggccgtgctggttacagcaacgctgtgcacagcacgcccttctcccactcttccagagcaggacgctctgcccagctccgaagacgatgatgatgatgatgacagtagctcagaagagaaagaaaccgacaacacaaagccgaaccctgtggcaccttattggaccagccctgagaaaatggaaaaaaaactgcatgccgtgcccgcagccaaaaccgtcaagttctag

SEQ ID NO: 214049 - DNA, 168 bp, Artificial Sequence
  derived and/or modified sequence
atgtggagctggaagtgcctgctgttctgggccgtgctggtgaccgccaccctgtgcaccgccagacccagccccaccctgcccgagcaggacgccctgcccagcagcgaggacgacgacgacgacgacgacagcagcagcgaggagaaggagaccgacaacacctag

SEQ ID NO: 214050 - DNA, 438 bp, Artificial Sequence
  derived and/or modified sequence
atgtggagctggaagtgcctgctgttctgggccgtgctggtgaccgccaccctgtgcaccgccagacccagccccaccctgcccgagcaggacgccctgcccagcagcgaggacgacgacgacgacgacgacagcagcagcgaggagaaggagaccgacaacaccaagcccaaccccgtggccccctactggaccagccccgagaagatggagaagaagctgcacgccgtgcccgccgccaagaccgtgaagttcaagtgccccagcagcggcacccccaaccccaccctgagatggctgaagaacggcaaggagttcaagcccgaccacagaatcggcggctacaaggtgagatacgccacctggagcatcatcatggacagcgtggtgcccagcgacaagggcaactacacctgcatcgtggagaacgagtactag

SEQ ID NO: 214051 - DNA, 258 bp, Artificial Sequence
  derived and/or modified sequence
atgtggagctggaagtgcctgctgttctgggccgtgctggtgaccgccaccctgtgcaccgccagacccagccccaccctgcccgagcaggacgccctgcccagcagcgaggacgacgacgacgacgacgacagcagcagcgaggagaaggagaccgacaacaccaagcccaaccccgtggccccctactggaccagccccgagaagatggagaagaagctgcacgccgtgcccgccgccaagaccgtgaagttctag

SEQ ID NO: 214052 - protein, 662 aa, Artificial Sequence
  derived and/or modified sequence
MWSWKCLLFWAVLVTATLCTARPSPTLPEQAQPWGAPVEVESFLVHPGDLLQLRCRLRDDVQSINWLRDGVQLAESNRTRITGEEVEVQDSVPADSGLYACVTSSPSGSDTTYFSVNVSDALPSSEDDDDDDDSSSEEKETDNTKPNRMPVAPYWTSPEKMEKKLHAVPAAKTVKFKCPSSGTPNPTLRWLKNGKEFKPDHRIGGYKVRYATWSIIMDSVVPSDKGNYTCIVENEYGSINHTYQLDVVERSPHRPILQAGLPANKTVALGSNVEFMCKVYSDPQPHIQWLKHIEVNGSKIGPDNLPYVQILKTAGVNTTDKEMEVLHLRNVSFEDAGEYTCLAGNSIGLSHHSAWLTVLEALEERPAVMTSPLYLEIIIYCTGAFLISCMVGSVIVYKMKSGTKKSDFHSQMAVHKLAKSIPLRRQVTVSADSSASMNSGVLLVRPSRLSSSGTPMLAGVSEYELPEDPRWELPRDRLVLGKPLGEGCFGQVVLAEAIGLDKDKPNRVTKVAVKMLKSDATEKDLSDLISEMEMMKMIGKHKNIINLLGACTQDGPLYVIVEYASKGNLREYLQARRPPGLEYCYNPSHNPEEQLSSKDLVSCAYQVARGMEYLASKKVWNLKAPLVHTPRPGSQECPGDRGQCDEDSRLWPRTGHSPHRLL

SEQ ID NO: 214053 - protein, 107 aa, Artificial Sequence
  derived and/or modified sequence
MWSWKCLLFWAVLVTATLCTARPSPTLPEQAQPWGAPVEVESFLVHPGDLLQLRCRLRDDVQSINWLRDGVQLAESNRTRITGEEVEVQDSVPADSGLYACVTSSPS

SEQ ID NO: 214054 - protein, 822 aa, Artificial Sequence [sequence omitted]

SEQ ID NO: 214055 - protein, 358 aa, Artificial Sequence
  derived and/or modified sequence
MGFNLTLAKLPNNELHGQESHNSGNRSDGPGKNTTLHNEFDTIVLPVLYLIIFVASILLNGLAVWIFFHIRNKTSFIFYLKNIVVADLIMTLTFPFRIVHDAGFGPWYFKFILCRYTSVLFYANMYTSIVFLGLISIDRYLKVVKPFGDSRMYSITFTKVLSVCVWVIMAVLSLPNIILTNGQPTEDNIHDCSKLKSPLGVKWHTAVTYVNSCLFVAVLVILIGCYIAISRYIHKSSRQFISQSSRKRKHNQSIRVVVAVFFTCFLPYHLCRIPFTFSHLDRLLDESAQKILYYCKEITLFLSACNVCLDPIIYFFMCRSFSRRLFKKSNIRTRSESIRSLQSVRRSEVRIYYDYTDV

SEQ ID NO: 214056 - DNA, 1608 bp, Artificial Sequence
  derived and/or modified sequence
agccctctgtgtttccttcaggtgaatcaccatctgattcctgcaggttcaggaaatactcttccccagtcgacaaatctcacctactcttagttatgagtcatttacattagcaagagagcaagttgttccagtagtcgcctggcaggagaatttgaaagggtgccccaaaggacaatctctaaaggggtaagggagatacctaccttgtctggtaggggagatgtttcgttttcatgctttaccagaaaatccacttccctgccgaccttagtttcaaagcttattcttaattagagacaagaaacctgtttcaacttgaagacaccgtatgaggtgaatggacagccagccaccacaatgaaagaaatcaaaccaggaataacctatgctgaacccacgcctcaatcgtccccaagtgtttcctgacacgcatctttgcttacagtgcatcacaactgaagaatggggttcaacttgacgcttgcaaaattaccaaataacgagctgcacggccaagagagtcacaattcaggcaacaggagcgacgggccaggaaagaacaccacccttcacaatgaatttgacacaattgtcttgccggtgctttatctcattatatttgtggcaagcatcttgctgaatggtttagcagtgtggatcttcttccacattaggaataaaaccagcttcatattctatctcaaaaacatagtggttgcagacctcataatgacgctgacatttccatttcgaatagtccatgatgcaggatttggaccttggtacttcaagtttattctctgcagatacacttcagttttgttttatgcaaacatgtatacttccatcgtgttccttgggctgataagcattgatcgctatctgaaggtggtcaagccatttggggactctcggatgtacagcataaccttcacgaaggttttatctgtttgtgtttgggtgatcatggctgttttgtctttgccaaacatcatcctaacaaatggtcagccaacagaggacaatatccatgactgctcaaaacttaaaagtcctttgggggtcaaatggcatacggcagtcacctatgtgaacagctgcttgtttgtggccgtgctggtgattctgatcggatgttacatagccatatccaggtacatccacaaatccagcaggcaattcataagtcagtcaagccgaaagcgaaaacataaccagagcatcagggttgttgtggctgtgttttttacctgctttctaccatatcacttgtgcagaattccttttacttttagtcacttagacaggcttttagatgaatctgcacaaaaaatcctatattactgcaaagaaattacacttttcttgtctgcgtgtaatgtttgcctggatccaataatttactttttcatgtgtaggtcattttcaagaaggctgttcaaaaaatcaaatatcagaaccaggagtgaaagcatcagatcactgcaaagtgtgagaagatcggaagttcgcatatattatgattacactgatgtgtaggccttttattgtttgttggaatcgatatgtacaaagtgtaaataaatgtttcttttcattatcctt

SEQ ID NO: 214057 - DNA, 1077 bp, Artificial Sequence
  derived and/or modified sequence
atgggctttaacctcacacttgctaaactcccgaataatgaactccacggccaagagagccacaactccgggaatcggtccgacggccccggcaagaataccacactccacaatgagttcgacactatcgttctgcctgttctgtacctcattatttttgttgcatctattctcttgaacggcctggcagtgtggatcttcttccacatccggaataagacatcttttattttttatttaaaaaacatagtggtagcagatcttataatgacgctcaccttccctttccgtatcgtgcatgatgccgggttcggaccatggtactttaagttcatcctgtgtcggtacacctcagtgctgttttacgctaacatgtacacaagcatagtcttcctcggattgatctcgattgataggtaccttaaagtggtcaaacctttcggagattccaggatgtactctatcacgtttactaaggtcctgagcgtctgtgtctgggttatcatggctgtccttagcctacccaacattattctcactaatggccagccaacagaggataatatccacgactgctccaagctgaaatcacctttaggcgtgaagtggcacacagctgtgacttacgtgaactcttgcctgtttgtggccgttcttgtgatccttatcggatgttacatcgccatttctcgctatatacacaaaagtagtaggcagttcatatcacagtcttcccggaagcggaaacacaaccagagcatccgcgtggtggttgcggtgttctttacttgctttctgccataccacctgtgcagaattccttttacattttctcacctggaccgactcctcgacgagtcagcccagaagattctttactactgtaaagagattactttatttctgtcagcgtgcaatgtatgcctggatccaatcatctatttcttcatgtgtcgctccttcagtcgaagactgttcaagaagagcaatatacgcacacgctctgagagcatccgaagcttgcagtccgtgaggagatctgaggtacggatatactacgactacaccgacgtgtag

SEQ ID NO: 214058 - DNA, 1077 bp, Artificial Sequence
  derived and/or modified sequence
atgggcttcaacctgaccctggccaagctgcccaacaatgagctgcacggccaggagagccacaacagcggcaacagaagtgatggccctgggaagaacaccaccctgcacaatgaatttgacaccatcgtgctgcctgtgctgtacctgatcatctttgtggccagcatcctgctgaatggcctggccgtgtggatcttcttccacatccggaacaagaccagcttcatcttctacctgaagaacatcgtggtggccgacctgatcatgaccctgaccttccccttccgcatcgtgcatgatgctggcttcggcccctggtacttcaagttcatcctgtgccgctacacctctgtgctcttctacgccaacatgtacaccagcatcgtgttcctgggcctcatcagcattgaccgctacctgaaggtggtgaagccctttggagacagcaggatgtacagcatcaccttcaccaaggtgctgtctgtgtgtgtgtgggtgatcatggctgtgctgagcctgcccaacatcatcctgaccaacggccagcccacagaggacaacatccatgactgcagcaagctgaagagccccctgggcgtgaagtggcacacagctgtgacctacgtgaacagctgcctgtttgtggccgtgctggtgatcctgattggctgctacatcgccatcagccgctacatccacaagagcagccggcagttcatcagccagagcagcaggaagaggaagcacaaccagagcatccgggtggtggtggccgtgttcttcacctgcttcctgccctaccacctgtgccgcatccccttcaccttcagccacctggaccggctgctggatgaaagtgcccagaagatcctgtactactgcaaggagatcaccctcttcctgagcgcctgcaatgtgtgcctggaccccatcatctacttcttcatgtgccgctccttcagcagaagactcttcaagaagagcaacatccgcaccaggtctgagagcatccgcagcctgcagagcgtgagaagaagtgaggtgcgcatctactatgactacacagatgtgtag

SEQ ID NO: 214059 - DNA, 1077 bp, Artificial Sequence
  derived and/or modified sequence
atgggcttcaacctgaccctggccaagctgcccaacaacgagctgcacggacaggagtcccacaacagtgggaatagatcagatggcccgggcaagaacaccaccctccataatgagttcgacaccatcgtgcttccagtcttgtacctgatcatctttgtggcctctattctcctgaatggattggcagtgtggattttttttcacattcgtaataaaacctcatttatcttctatttaaaaaacatcgtggtggcggatttaattatgacgctgacttttcctttcaggattgtacacgacgctggtttcgggccgtggtatttcaagtttattttgtgccggtacaccagtgtactgttctacgctaatatgtacacctctattgtgttcctgggcctgatttccattgatcggtacctgaaggtcgtaaagccctttggtgactcccggatgtattccattactttcaccaaggttctgagcgtgtgtgtctgggtaattatggccgtgctttccttacccaatattattctgacaaacgggcaacccacagaggacaacattcacgattgctcaaaactgaagtctcccctcggcgtcaagtggcacacagcagtcacctacgtaaactcatgtctattcgtagccgtgctcgtgatactgattgggtgctatattgccatttctagatacattcacaagtcaagcagacagtttatctcccagtcctcccgaaagagaaagcataatcagtcaattcgggtggtggtagctgttttcttcacatgctttctcccctatcacctttgtagaattccattcactttctcacacttggaccgcctcctagacgagagcgcccagaagatactgtattactgtaaagagattactctattcctgtcagcctgcaatgtctgcctggacccaattatatactttttcatgtgcaggagtttctctcgccgtctattcaagaaatctaatatacggacgcggtccgagtctatccgcagccttcagtctgtgagacggtccgaggttcggatctactacgactatacggacgtttag

SEQ ID NO: 214060 - DNA, 1077 bp, Artificial Sequence
  derived and/or modified sequence
atgggtttcaaccttaccctggcaaagctccctaacaacgaactgcatgggcaagagagccacaatagcgggaatcggagcgacggcccaggcaaaaatacaacactgcataacgagttcgataccatcgtgctcccagtgctgtacctgattatattcgtggcttcaatcctcttaaatggacttgcagtttggattttcttccatatccggaataagactagcttcatattttacctgaagaacatcgtggtggctgacctgattatgacactcaccttcccgtttcgaattgtgcacgacgccggatttggcccttggtatttcaagtttattctttgccggtatacctccgtccttttttacgcgaatatgtatacgtcgatcgtgtttctcggcctcatttcaatcgaccggtatttgaaagttgtgaagccattcggtgattctagaatgtatagcattacatttacaaaggtgctgtctgtgtgcgtgtgggtgattatggcggtactgtccctgcccaacatcattctgaccaatgggcaaccaacagaagataacattcacgattgtagcaagctgaagtcccccctcggtgtgaagtggcacactgctgtaacttatgtgaacagctgtctgtttgtagcggtgctcgttatattaatcggctgctatattgcaattagtcgttacatccataagtcctcacggcagttcatatcccaatcaagtcggaaacgtaagcacaatcaatctataagagtggtcgtggctgtgttttttacctgcttcttgccctaccatctgtgccgaataccttttacgtttagccacctcgatcgacttctggacgaaagcgcccagaagatcctgtattattgtaaagagatcaccctgtttctgtccgcctgtaatgtctgtctggatcccattatttacttttttatgtgccgcagctttagccggaggctgtttaagaaatcaaacattaggacccgatcggagagcattcggtctctgcagtctgtgcggaggtccgaggtgcgaatctactacgattatacagatgtgtag

SEQ ID NO: 214061 - DNA, 1077 bp, Artificial Sequence
  derived and/or modified sequence
atgggcttcaacctgaccctggccaagctgcccaacaacgagctgcacggccaggagagccacaacagcggcaacagaagcgacggccccggcaagaacaccaccctgcacaacgagttcgacaccatcgtgctgcccgtgctgtacctgatcatcttcgtggccagcatcctgctgaacggcctggccgtgtggatcttcttccacatcagaaacaagaccagcttcatcttctacctgaagaacatcgtggtggccgacctgatcatgaccctgaccttccccttcagaatcgtgcacgacgccggcttcggcccctggtacttcaagttcatcctgtgcagatacaccagcgtgctgttctacgccaacatgtacaccagcatcgtgttcctgggcctgatcagcatcgacagatacctgaaggtggtgaagcccttcggcgacagcagaatgtacagcatcaccttcaccaaggtgctgagcgtgtgcgtgtgggtgatcatggccgtgctgagcctgcccaacatcatcctgaccaacggccagcccaccgaggacaacatccacgactgcagcaagctgaagagccccctgggcgtgaagtggcacaccgccgtgacctacgtgaacagctgcctgttcgtggccgtgctggtgatcctgatcggctgctacatcgccatcagcagatacatccacaagagcagcagacagttcatcagccagagcagcagaaagagaaagcacaaccagagcatcagagtggtggtggccgtgttcttcacctgcttcctgccctaccacctgtgcagaatccccttcaccttcagccacctggacagactgctggacgagagcgcccagaagatcctgtactactgcaaggagatcaccctgttcctgagcgcctgcaacgtgtgcctggaccccatcatctacttcttcatgtgcagaagcttcagcagaagactgttcaagaagagcaacatcagaaccagaagcgagagcatcagaagcctgcagagcgtgagaagaagcgaggtgagaatctactacgactacaccgacgtgtag

SEQ ID NO: 214062 - protein, 312 aa, Artificial Sequence
  derived and/or modified sequence
MPSAIEAIYIILIAGELTIGIWGNGFIVLVNCIDWLKRRDISLIDIILISLAISRICLLCVISLDGFFMLLFPGTYGNSVLVSIVNVVWTFANNSSLWFTSCLSIFYLLKIANISHPFFFWLKLKINKVMLAILLGSFLISLIISVPKNDDMWYHLFKVSHEENITWKFKVSKIPGTFKQLTLNLGVMVPFILCLISFFLLLFSLVRHTKQIRLHATGFRDPSTEAHMRAIKAVIIFLLLLIVYYPVFLVMTSSALIPQGKLVLMIGDIVTVIFPSSHSFILIMGNSKLREAFLKMLRFVKCFLRRRKPFVP

SEQ ID NO: 214063 - DNA, 939 bp, Artificial Sequence
  derived and/or modified sequence
atgcccagcgccatcgaggccatctacatcatcctgatcgccggcgagctgaccatcggcatctggggcaacggcttcatcgtgctggtgaactgcatcgactggctgaagagaagagacatcagcctgatcgacatcatcctgatcagcctggccatcagcagaatctgcctgctgtgcgtgatcagcctggacggcttcttcatgctgctgttccccggcacctacggcaacagcgtgctggtgagcatcgtgaacgtggtgtggaccttcgccaacaacagcagcctgtggttcaccagctgcctgagcatcttctacctgctgaagatcgccaacatcagccaccccttcttcttctggctgaagctgaagatcaacaaggtgatgctggccatcctgctgggcagcttcctgatcagcctgatcatcagcgtgcccaagaacgacgacatgtggtaccacctgttcaaggtgagccacgaggagaacatcacctggaagttcaaggtgagcaagatccccggcaccttcaagcagctgaccctgaacctgggcgtgatggtgcccttcatcctgtgcctgatcagcttcttcctgctgctgttcagcctggtgagacacaccaagcagatcagactgcacgccaccggcttcagagaccccagcaccgaggcccacatgagagccatcaaggccgtgatcatcttcctgctgctgctgatcgtgtactaccccgtgttcctggtgatgaccagcagcgccctgatcccccagggcaagctggtgctgatgatcggcgacatcgtgaccgtgatcttccccagcagccacagcttcatcctgatcatgggcaacagcaagctgagagaggccttcctgaagatgctgagattcgtgaagtgcttcctgagaagaagaaagcccttcgtgccctag

SEQ ID NO: 214064 - DNA, 939 bp, Artificial Sequence
  derived and/or modified sequence
atgccgtcagcaatcgaggctatctacatcatcctgatcgctggcgaactgacaataggtatttgggggaacggatttattgtgcttgtgaactgtatagattggctgaaacgtagggacatcagcctgatcgacataattctgatctcactagctatctcaaggatctgtctattatgcgtgattagtctggatggattttttatgttactgttcccgggcacgtacgggaattcagtgttagtgagcattgtgaacgtggtgtggaccttcgctaataatagctccctgtggtttacctcgtgtctaagtatattctatctgctgaagatcgccaatattagtcaccctttcttcttctggttaaagctgaagatcaataaggtgatgctggccatcctcctgggctccttcctcatatcattgatcatttctgtccccaagaacgacgacatgtggtatcatctgttcaaggtcagccatgaggagaatattacgtggaagtttaaagtcagcaaaatccctggcacattcaagcagctgactcttaatctgggagtcatggtgccttttatactttgcttgataagcttcttcctgttactcttctctttagtccgccacactaaacaaatccggttacatgccaccgggttccgagatccatctaccgaagcccacatgagagccatcaaagctgttatcatcttcctcctgttgctcattgtatactaccctgtctttcttgtgatgaccagtagcgccctgattccacaggggaagctcgtcctgatgattggcgacatcgttacagttatcttcccaagcagccactcgttcatccttattatggggaatagcaaactgcgagaagcctttttgaagatgctgaggttcgttaaatgctttctgcgacgaaggaagccttttgttccttag

SEQ ID NO: 214065 - DNA, 939 bp, Artificial Sequence
  derived and/or modified sequence
atgcccagcgccatcgaggccatctacatcatcctgattgctggggagctgaccatcggcatctggggcaatggcttcatcgtgctggtgaactgcatcgactggctgaagaggcgggacatcagcctgattgacatcatcctgatcagcctggccatcagccgcatctgcctgctgtgtgtgatcagcctggatggcttcttcatgctgctcttccctggcacctacggcaacagcgtgctggtgtccatcgtgaatgtggtgtggacctttgccaacaacagcagcctgtggttcaccagctgcctgagcatcttctacctgctgaagatcgccaacatcagccaccccttcttcttctggctgaagctgaagatcaacaaggtgatgctggccatcctgctgggcagcttcctgatcagcctcatcatctctgtgcccaagaatgatgacatgtggtaccacctgttcaaggtgtcccatgaggagaacatcacctggaagttcaaggtgtccaagatccctggcaccttcaagcagctgaccctgaacctgggcgtgatggtgcccttcatcctgtgcctgatctccttcttcctgctgctcttcagcctggtgcgccacaccaagcagatccggctgcacgccaccggcttccgggaccccagcacagaggcccacatgagggccatcaaggctgtgatcatcttcctgctgctgctgattgtgtactaccctgtgttcctggtgatgaccagcagcgccctgatcccccagggcaagctggtgctgatgattggagacatcgtgaccgtcatcttccccagcagccacagcttcatcctgatcatgggcaacagcaagctgcgggaggccttcctgaagatgctgcgctttgtgaagtgcttcctgcggcggaggaagccctttgtgccctag

SEQ ID NO: 214066 - DNA, 939 bp, Artificial Sequence
  derived and/or modified sequence
atgcccagcgccatcgaggccatctacatcatcctgatcgccggcgagctcaccatcggcatatggggaaatggattcatcgtgctagtaaattgcattgactggctcaagcgccgcgatatttcactaattgatattatcctaatttcactggctatctcacgaatatgcttattgtgcgtaatctcactagacggattcttcatgctgcttttccccggaacctacggtaattctgtgttggtgagcatcgtgaatgtggtgtggacctttgctaataactcttccctctggtttacaagttgtttgtctatattctatctgctcaagatcgcgaatatcagtcatccattcttcttctggttgaagctgaagattaacaaggtgatgctggccatcctcctgggtagcttcttaatctctctcatcattagtgtgcctaagaacgatgatatgtggtaccacctgtttaaggtgtctcatgaggaaaatatcacttggaaattcaaggtgagtaaaatacccggaacctttaaacagcttaccctgaatctgggcgtcatggtgccgtttatcctctgtctgataagcttcttcctcctgctgtttagcctcgtgaggcacaccaagcagatcaggctccacgcgaccgggttccgggatccctcgacagaggctcatatgagggcgataaaagctgtgataatctttctattgcttctcatagtctattaccccgtattcctggtgatgaccagctcggccttaatcccccagggtaagctcgttcttatgattggagatatcgtcacagtcatttttccttcctcccactccttcatcctgattatgggcaatagcaaattacgtgaggcatttcttaaaatgctccgattcgtaaaatgttttctccgtcgccgcaaaccctttgtcccttag

SEQ ID NO: 214067 - DNA, 939 bp, Artificial Sequence
  derived and/or modified sequence
atgccatctgccatcgaagctatctatattattctgatcgcaggtgagcttaccattggaatctgggggaacgggttcatcgtgctcgtgaactgtatagactggttgaagagaagagatatttctctgatagatatcattttaatctcactggcgatctccagaatatgtctcctgtgtgtcatctcactagacggattttttatgcttctctttcctggcacctatggcaattctgtcctagtttccatcgtgaacgtggtgtggacattcgcaaataactctagcctctggttcaccagctgtctctctatattttatctgctgaaaatcgcgaatatttcccacccattctttttctggctgaagctcaaaataaacaaggtgatgctcgccatcctcctgggttcatttctcataagtctgattatctcagtaccaaagaatgatgacatgtggtaccacctcttcaaagtgtcccacgaggaaaatattacctggaaatttaaagtatcgaagatcccaggtaccttcaagcagctcactctgaacctgggcgttatggttccctttattctgtgtctcatttcttttttcctgcttctttttagcctcgtgcggcacaccaaacagatccggctgcatgcaacaggcttccgtgacccgagcaccgaggcccacatgcgggcaatcaaggccgtcatcatttttctcctactgcttatagtttactaccctgtcttcttggtgatgacaagtagtgccttgattccacaggggaaactcgtcctgatgataggcgatatcgtgaccgttattttccccagttctcactcttttatcttgattatgggcaactctaaactgcgggaggcttttttaaagatgctcagatttgtgaaatgctttttgcgacggcgaaagccgttcgtgccttag

SEQ ID NO: 214068 - DNA, 1075 bp, Artificial Sequence
  derived and/or modified sequence
gtctaagaggcagacagatacattgttcttcactggtcagctgaaagtcaattcatcatcagtgatattcaaaaatcacaagtctttgctggcatgccaagtgcaatagaggcaatatatattattttaattgctggtgaattgaccatagggatttggggaaatggattcattgtactagttaactgcattgactggctcaaaagaagagatatttccttgattgacatcatcctgatcagcttggccatctccagaatctgtctgctgtgtgtaatatcattagatggcttctttatgctgctctttccaggtacatatggcaatagcgtgctagtaagcattgtgaatgttgtctggacatttgccaataattcaagtctctggtttacttcttgcctcagtatcttctatttactcaagatagccaatatatcgcacccatttttcttctggctgaagctaaagatcaacaaggtcatgcttgcgattcttctggggtcctttcttatctctttaattattagtgttccaaagaatgatgatatgtggtatcaccttttcaaagtcagtcatgaagaaaacattacttggaaattcaaagtgagtaaaattccaggtactttcaaacagttaaccctgaacctgggggtgatggttccctttatcctttgcctgatctcatttttcttgttacttttctccctagttagacacaccaagcagattcgactgcatgctacagggttcagagaccccagtacagaggcccacatgagggccataaaggcagtgatcatctttctgctcctcctcatcgtgtactacccagtctttcttgttatgacctctagcgctctgattcctcagggaaaattagtgttgatgattggtgacatagtaactgtcattttcccatcaagccattcattcattctaattatgggaaatagcaagttgagggaagcttttctgaagatgttaagatttgtgaagtgtttccttagaagaagaaagccttttgttccatagagacccctaaagagtatcctgactacaaggatgaaagaaatca

SEQ ID NO: 214069 - protein, 303 aa, Artificial Sequence
  derived and/or modified sequence
MESALPSIFTLVIIAEFIIGNLSNGFIVLINCIDWVSKRELSSVDKLLIILAISRIGLIWEILVSWFLALHYLAIFVSGTGLRIMIFSWIVSNHFNLWLATIFSIFYLLKIASFSSPAFLYLKWRVNKVILMILLGTLVFLFLNLIQINMHIKDWLDRYERNTTWNFSMSDFETFSVSVKFTMTMFSLTPFTVAFISFLLLIFSLQKHLQKMQLNYKGHRDPRTKVHTNALKIVISFLLFYASFFLCVLISWISELYQNTVIYMLCETIGVFSPSSHSFLLILGNAKLRQAFLLVAAKVWAKR

SEQ ID NO: 214070 - DNA, 912 bp, Artificial Sequence
  derived and/or modified sequence
atggagagcgccctgcccagcatcttcaccctggtgatcatcgccgagttcatcatcggcaacctgagcaacggcttcatcgtgctgatcaactgcatcgactgggtgagcaagagagagctgagcagcgtggacaagctgctgatcatcctggccatcagcagaatcggcctgatctgggagatcctggtgagctggttcctggccctgcactacctggccatcttcgtgagcggcaccggcctgagaatcatgatcttcagctggatcgtgagcaaccacttcaacctgtggctggccaccatcttcagcatcttctacctgctgaagatcgccagcttcagcagccccgccttcctgtacctgaagtggagagtgaacaaggtgatcctgatgatcctgctgggcaccctggtgttcctgttcctgaacctgatccagatcaacatgcacatcaaggactggctggacagatacgagagaaacaccacctggaacttcagcatgagcgacttcgagaccttcagcgtgagcgtgaagttcaccatgaccatgttcagcctgacccccttcaccgtggccttcatcagcttcctgctgctgatcttcagcctgcagaagcacctgcagaagatgcagctgaactacaagggccacagagaccccagaaccaaggtgcacaccaacgccctgaagatcgtgatcagcttcctgctgttctacgccagcttcttcctgtgcgtgctgatcagctggatcagcgagctgtaccagaacaccgtgatctacatgctgtgcgagaccatcggcgtgttcagccccagcagccacagcttcctgctgatcctgggcaacgccaagctgagacaggccttcctgctggtggccgccaaggtgtgggccaagagatag

SEQ ID NO: 214071 - DNA, 912 bp, Artificial Sequence
  derived and/or modified sequence
atggagagcgccctcccgtccattttcaccctcgtgattatcgctgaattcatcattggcaacctgtctaacggctttatcgtgctgatcaattgtattgactgggtgtcaaaacgggagctgtcaagcgtggataagctcctcattatcctcgctatctcgcgtatcggcttgatatgggaaatcctggtgtcctggttccttgctctgcactatctcgcgatattcgtctctggtacgggccttcggattatgatcttcagctggattgtgtctaaccacttcaatttgtggctcgctactatattcagtatattctacttacttaagattgcatccttctcttcaccagccttcctctacctgaagtggagggtgaataaggttatcttgatgatcctcctggggactctggtgttcctgttcctgaatctcatccagatcaatatgcacattaaggactggctggatcgctacgaacggaacaccacctggaatttttctatgtctgatttcgaaactttctccgtgagtgttaagttcactatgaccatgttcagcctaacaccatttaccgtggctttcatcagttttctgctgctgatatttagcttgcagaaacaccttcagaagatgcagctcaattacaaaggccatcgcgatcctcgcactaaggtgcacacaaatgcccttaagatagttatctctttcctcctgttttacgcgtccttcttcctgtgtgtcctgatttcctggatttcggagctttaccagaataccgttatctatatgctctgtgagacaatcggagtgttttccccatcttcccactccttcctccttatcctgggtaatgctaagttgcgacaggcgttcctattagtcgctgcgaaagtctgggctaaacgctag

SEQ ID NO: 214072 - DNA, 912 bp, Artificial Sequence
  derived and/or modified sequence
atggagagcgccctgcccagcatcttcaccctggtgatcatcgccgagttcatcatcggcaacctgagcaatggcttcatcgtgctgatcaactgcatcgactgggtgtccaagcgggagctgagctctgtggacaagctgctgatcatcctggccatcagccgcatcggcctcatctgggagatcctggtgtcctggttcctggccctgcactacctggccatctttgtgtctggcaccggcctgcgcatcatgatcttctcctggatcgtgagcaaccacttcaacctgtggctggccaccatcttcagcatcttctacctgctgaagatcgccagcttcagcagccctgccttcctgtacctgaagtggagggtgaacaaggtgatcctgatgatcctgctgggcaccctggtgttcctgttcctgaacctgatccagatcaacatgcacatcaaggactggctggacagatatgaaagaaacaccacctggaacttctccatgtctgactttgagaccttctctgtgtctgtgaagttcaccatgaccatgttcagcctgacccccttcaccgtggccttcatctccttcctgctgctgatcttcagcctgcagaagcacctgcagaagatgcagctgaactacaagggccaccgggaccccaggaccaaggtgcacaccaatgccctgaagatcgtcatctccttcctgctcttctacgccagcttcttcctgtgtgtgctgatctcctggatcagcgagctgtaccagaacacagtcatctacatgctgtgtgagaccatcggggtcttcagccccagcagccacagcttcctgctgatcctgggcaatgccaagctgcggcaggccttcctgctggtggccgccaaggtgtgggccaagaggtag

SEQ ID NO: 214073 - DNA, 912 bp, Artificial Sequence
  derived and/or modified sequence
atggagagcgccctgcccagcatcttcaccctggtgatcatcgccgagtttatcatagggaatctttcaaacggcttcattgtccttatcaactgcatcgattgggtgtcaaaacgggagctctcaagcgtggacaaactcctcattattctggctatcagccgaattggactaatctgggaaatcttggtgtcctggtttcttgcgcttcattatctggctatctttgtttcaggaacaggacttagaattatgattttctcatggatagtatccaaccacttcaatctctggctggccacaatcttctctatcttttacttgctgaaaatcgccagcttctcctctcccgcgttcctgtacttaaaatggagagtgaataaggtcatattaatgatcttgctgggcacgctggtgtttctgtttttgaatttgatacagatcaacatgcacatcaaggactggctcgaccgctacgagcggaacaccacgtggaatttcagcatgagtgacttcgagacattttccgtgagcgtgaagtttactatgaccatgttttcgcttaccccatttaccgtagctttcatcagcttcctgcttctaatcttcagccttcagaagcacctgcagaaaatgcagctcaattacaaagggcacagggatcctagaaccaaggtgcataccaacgctctgaagattgtaatcagctttctgctattctatgcttccttcttcctgtgtgtattaatttcgtggatctccgagctttatcagaatacggtgatctatatgctttgtgagacaatcggcgtgttttctcccagctcccacagcttcttattgatactaggcaatgcaaaactgagacaggcattcttactcgtcgccgccaaggtatgggccaagagatag

SEQ ID NO: 214074 - DNA, 912 bp, Artificial Sequence
  derived and/or modified sequence
atggagtctgccctgccatccatatttaccctggtgatcattgctgaattcatcatcggaaacctttccaatggatttattgtgctgatcaattgcatcgattgggtcagcaagcgtgagttgagttctgtcgataagctgctgatcatattggctataagccgtatcgggctgatctgggagatccttgtctcgtggttcctcgctctgcactacctagctattttcgtctccgggactggactgcgcattatgattttcagctggattgtttctaaccacttcaatctgtggctcgcaaccattttctcaatcttctaccttttgaaaatagcttccttttccagccccgcttttttataccttaagtggcgagtgaataaggtgatcctgatgattttgctgggtacgctggtattcctgttcctgaacctcattcaaattaatatgcacattaaggattggttagataggtatgagcggaatactacctggaattttagtatgtctgattttgaaactttttctgttagtgtaaagttcacaatgactatgttctcactgacgccctttaccgtcgccttcatttccttcctgctgctcattttcagtttacagaagcacctccagaaaatgcaactgaattataaagggcatcgagatccacggacaaaggtccacactaatgccctgaagattgtgatcagctttttacttttttatgcttcctttttcctctgcgtgctgataagttggatcagtgagctgtaccagaacacggtgatctacatgttatgcgaaacaatcggtgtcttcagcccatcttcccactccttccttcttattttgggcaatgcgaagctgaggcaggccttcctcctagtggctgccaaggtttgggctaagcggtag

SEQ ID NO: 214075 - DNA, 1637 bp, Artificial Sequence
  derived and/or modified sequence
tctgcccatggtgaagacataaatatcttagctagggctcagcagagaaattgaagaaaaataaagatatcaccagaacagttatgtgaagatcgatcagcaaactttagagatttctgctttgacgttgagccaacaatgaaagaaggagcagaaaaaggagaaggaagaagaactccactggacactcaaggatgtgaatagcattttagatcagtgaataaccagcagtgacattagacattgaactttctctgttctgacatggaaagtgccctgccgagtatcttcactcttgtaataattgcagaattcataattgggaatttgagcaatggatttatagtactgatcaactgcattgactgggtcagtaaaagagagctgtcctcagtcgataaactcctcattatcttggcaatctccagaattgggctgatctgggaaatattagtaagttggtttttagctctgcattatctagccatatttgtgtctggaacaggattaagaattatgatttttagctggatagtttctaatcacttcaatctctggcttgctacaatcttcagcatcttttatttgctcaaaatagcgagtttctctagccctgcttttctctatttgaagtggagagtaaacaaagtgattctgatgatactgctaggaaccttggtcttcttatttttaaatctgatacaaataaacatgcatataaaagactggctggaccgatatgaaagaaacacaacttggaatttcagtatgagtgactttgaaacattttcagtgtcggtcaaattcactatgactatgttcagtctaacaccatttactgtggccttcatctcttttctcctgttaattttctccctgcagaaacatctccagaaaatgcaactcaattacaaaggacacagagaccccaggaccaaggtccatacaaatgccttgaaaattgtgatctcattccttttattctatgctagtttctttctatgtgttctcatatcatggatttctgagctgtatcagaacacagtgatctacatgctttgtgagacgattggagtcttctctccttcaagccactcctttcttctgattctaggaaacgctaagttaagacaggcctttcttttggtggcagctaaggtatgggctaaacgatgagaaactcacaatttcataagccattcagaccacagattattgaatattgcagacagaaacaggagtctacaaggagtttaaaagatattttatgcttcccctggtttcttttattgtgaaggtcactgtaaatgttttaaattcttctctataatagcatcttacctaagaatattatgtatttatgacatgtatttctacattattaggaatttgaaacttatttgaggaaattattggcagattctattgtaaattaaaaacatatactacagcatacttagatgttaattgtaaatctacaatcttttgtttggcaatggctcttcaattctaaatcattcattgagatgggtgatttaggtaattattttattatctcaagtactcctatttaaatggtgagctacagataattagaacagttatttggaatagaattagggaagtttggacttgcc

SEQ ID NO: 214076 - protein, 307 aa, Artificial Sequence
  derived and/or modified sequence
MLRVVEGIFIFVVVSESVFGVLGNGFIGLVNCIDCAKNKLSTIGFILTGLAISRIFLIWIIITDGFIQIFSPNIYASGNLIEYISYFWVIGNQSSMWFATSLSIFYFLKIANFSNYIFLWLKSRTNMVLPFMIVFLLISSLLNFAYIAKILNDYKTKNDTVWDLNMYKSEYFIKQILLNLGVIFFFTLSLITCIFLIISLWRHNRQMQSNVTGLRDSNTEAHVKAMKVLISFIILFILYFIGMAIEISCFTVRENKLLLMFGMTTTAIYPWGHSFILILGNSKLKQASLRVLQQLKCCEKRKNLRVT

SEQ ID NO: 214077 - DNA, 924 bp, Artificial Sequence
  derived and/or modified sequence
atgctgagagtggtggagggcatcttcatcttcgtggtggtgagcgagagcgtgttcggcgtgctgggcaacggcttcatcggcctggtgaactgcatcgactgcgccaagaacaagctgagcaccatcggcttcatcctgaccggcctggccatcagcagaatcttcctgatctggatcatcatcaccgacggcttcatccagatcttcagccccaacatctacgccagcggcaacctgatcgagtacatcagctacttctgggtgatcggcaaccagagcagcatgtggttcgccaccagcctgagcatcttctacttcctgaagatcgccaacttcagcaactacatcttcctgtggctgaagagcagaaccaacatggtgctgcccttcatgatcgtgttcctgctgatcagcagcctgctgaacttcgcctacatcgccaagatcctgaacgactacaagaccaagaacgacaccgtgtgggacctgaacatgtacaagagcgagtacttcatcaagcagatcctgctgaacctgggcgtgatcttcttcttcaccctgagcctgatcacctgcatcttcctgatcatcagcctgtggagacacaacagacagatgcagagcaacgtgaccggcctgagagacagcaacaccgaggcccacgtgaaggccatgaaggtgctgatcagcttcatcatcctgttcatcctgtacttcatcggcatggccatcgagatcagctgcttcaccgtgagagagaacaagctgctgctgatgttcggcatgaccaccaccgccatctacccctggggccacagcttcatcctgatcctgggcaacagcaagctgaagcaggccagcctgagagtgctgcagcagctgaagtgctgcgagaagagaaagaacctgagagtgacctag

SEQ ID NO: 214078 - DNA, 924 bp, Artificial Sequence
  derived and/or modified sequence
atgctgcgcgtcgtggagggaatttttattttcgtcgtagtgtcagaatccgtttttggagtgcttggcaacgggtttattggcctggtgaactgcatcgactgcgctaaaaataagttgtccactattggcttcattttgacaggtctggccataagtaggatatttctgatttggatcattatcacagatggctttatccaaatattttcccccaacatctatgcttcaggcaatttaatagagtacatcagctatttttgggtgatagggaatcaaagtagtatgtggttcgcaacgtccttgagcattttttacttcctcaagatagccaattttagcaactatatcttcctctggctgaagagcaggactaacatggtcctgcctttcatgatcgtgtttctccttatcagtagtctcctgaatttcgcttatatagcaaaaatcctcaatgattacaagacaaagaatgacactgtttgggatttgaacatgtataaaagcgagtatttcatcaagcaaattctgctgaatctcggagtcatttttttcttcacattgtctttgattacgtgtatctttctgattattagtctgtggcggcacaatagacagatgcagagtaacgtgacgggactgagggattccaacaccgaggctcacgtaaaggccatgaaagtcttgatttcctttattatcctctttattttatacttcattggaatggctatcgagatatcttgctttactgttcgggaaaacaaacttttgctcatgtttgggatgactaccacggcaatctatccctggggccatagctttattctgatcctgggcaacagcaaactgaagcaggcaagtctacgggtactacaacaactgaaatgctgtgaaaaacgcaagaacctacgggtcacttag

SEQ ID NO: 214079 - DNA, 924 bp, Artificial Sequence
  derived and/or modified sequence
atgctgcgggtggtggagggcatcttcatctttgtggtggtgtctgagagcgtgtttggagtgctgggcaatggcttcatcggcctggtgaactgcatcgactgtgccaagaacaagctgagcaccatcggcttcatcctgaccggcctggccatcagccgcatcttcctgatctggatcatcatcacagatggcttcatccagatcttcagccccaacatctatgccagcggcaacctgattgagtacatctcctacttctgggtgattggcaaccagagctccatgtggtttgccaccagcctgagcatcttctacttcctgaagatcgccaacttcagcaactacatcttcctgtggctgaagagcaggaccaacatggtgctgcccttcatgattgtgttcctgctgatcagcagcctgctgaactttgcctacatcgccaagatcctgaatgactacaagaccaagaatgacacagtgtgggacctgaacatgtacaagtctgagtacttcatcaagcagatcctgctgaacctgggcgtcatcttcttcttcaccctgagcctcatcacctgcatcttcctgatcatcagcctgtggaggcacaaccggcagatgcagagcaatgtgacaggcctgcgggacagcaacacagaggcccacgtgaaggccatgaaggtgctgatctccttcatcatcctcttcatcctgtacttcatcggcatggccatcgagatcagctgcttcaccgtgcgggagaacaagctgctgctgatgtttggcatgaccaccacagccatctacccctggggccacagcttcatcctgatcctgggcaacagcaagctgaagcaggccagcctgcgggtgctgcagcagctgaagtgctgtgagaagaggaagaacctgcgggtgacctag

SEQ ID NO: 214080 - DNA, 924 bp, Artificial Sequence
  derived and/or modified sequence
atgctgcgggtggtggagggcatcttcatcttcgtggtggtgagcgagtcggttttcggggttcttggaaacggctttattggactggtaaattgcatcgactgcgctaagaacaaactgagcactattggattcatcttaactgggttggcaatttcccgcatctttttaatatggatcatcatcacagatgggtttattcagatattctcccctaacatctacgcctccgggaatctgatcgaatatattagttacttttgggttatcggcaatcagtcctcgatgtggttcgccacttctctttcaatcttttactttctcaagatcgccaatttctctaactacatctttctttggctcaagagccggactaatatggtattgccattcatgatcgtgtttctgctgatttcttcacttctcaactttgcgtacattgcaaagattttgaacgactacaagaccaagaacgatacagtctgggacttaaacatgtacaaatctgaatattttatcaaacagatcttgctgaaccttggtgttatcttctttttcacactctccctgatcacatgtattttcctgatcatttccctatggcgacacaatcggcaaatgcagagcaacgttacgggcctgcgggactccaatactgaggcccacgtcaaggcaatgaaggtccttatttcttttataattctctttatcctgtatttcatcggaatggccatagaaatttcatgttttaccgtgagggagaacaaattactgctgatgtttggtatgactactacagcaatctatccttggggtcattctttcatcctgatcttgggcaatagcaaactgaaacaggcctctctacgggtgttgcaacagctcaagtgttgcgagaagagaaaaaacttgagggtgacgtag

SEQ ID NO: 214081 - DNA, 924 bp, Artificial Sequence
  derived and/or modified sequence
atgctccgagtagtggagggcatctttatctttgttgtagtctccgagagcgtctttggcgttctgggcaacggtttcatcggcctggttaactgcatcgattgtgccaagaataagcttagcacaattggttttatccttaccggactagccatctcccgcatctttctgatctggataatcattacagacggatttatccagatctttagccccaatatctacgcctcgggaaacttgatagagtatattagctatttttgggttatcggaaaccagagttccatgtggtttgctacttccctttccatcttctacttcttaaaaatcgctaatttttccaactacattttcctctggctgaagagtcgcaccaacatggtgctgccctttatgatcgtgttcctgctgatttcttccctgcttaattttgcctacattgccaaaatactgaatgattataagacaaaaaatgatactgtgtgggacttgaacatgtacaagagtgagtacttcattaagcagatccttctcaatctgggggtgatcttcttttttacgcttagtctcatcacatgtatttttcttatcatatcactttggcgtcacaatcggcaaatgcagagcaacgtaactggcctgagggactctaataccgaagcccacgtcaaagcgatgaaagtgctcatttctttcattatcctgttcatcctttattttattggcatggctattgagatcagctgctttaccgtgagagaaaacaagttgctccttatgttcggcatgaccacaacagccatatatccttggggacattccttcatactcatccttggcaacagtaagctcaagcaggcctccctgcgtgtcctgcaacaactgaagtgttgtgagaaaaggaaaaacctgcgcgttacttag

SEQ ID NO: 214082 - DNA, 1042 bp, Artificial Sequence
  derived and/or modified sequence
cacttccgtcgagcagccaatatatgcctcattctgcagcaggtaatctaagatagatgtaacagaagcaatattaagaattagcagatatgctacgtgtagtggaaggcatcttcatttttgttgtagttagtgagtcagtgtttggggttttggggaatggatttattggacttgtaaactgcattgactgtgccaagaataagttatctacgattggctttattctcaccggcttagctatttcaagaatttttctgatatggataataattacagatggatttatacagatattctctccaaatatatatgcctccggtaacctaattgaatatattagttacttttgggtaattggtaatcaatcaagtatgtggtttgccaccagcctcagcatcttctatttcctgaagatagcaaatttttccaactacatatttctctggttgaagagcagaacaaatatggttcttcccttcatgatagtattcttacttatttcatcgttacttaattttgcatacattgcgaagattcttaatgattataaaacgaagaatgacacagtctgggatctcaacatgtataaaagtgaatactttattaaacagattttgctaaatctgggagtcattttcttctttacactatccctaattacatgtatttttttaatcatttccctttggagacacaacaggcagatgcaatcgaatgtgacaggattgagagactccaacacagaagctcatgtgaaggcaatgaaagttttgatatctttcatcatcctctttatcttgtattttataggcatggccatagaaatatcatgttttactgtgcgagaaaacaaactgctgcttatgtttggaatgacaaccacagccatctatccctggggtcactcatttatcttaattctaggaaacagcaagctaaagcaagcctctttgagggtactgcagcaattgaagtgctgtgagaaaaggaaaaatctcagagtcacatagacaccttgggaagagatggatgttccacg

SEQ ID NO: 214083 - protein, 317 aa, Artificial Sequence
  derived and/or modified sequence
MGGVIKSIFTFVLIVEFIIGNLGNSFIALVNCIDWVKGRKISSVDRILTALAISRISLVWLIFGSWCVSVFFPALFATEKMFRMLTNIWTVINHFSVWLATGLGTFYFLKIANFSNSIFLYLKWRVKKVVLVLLLVTSVFLFLNIALINIHINASINGYRRNKTCSSDSSNFTRFSSLIVLTSTVFIFIPFTLSLAMFLLLIFSMWKHRKKMQHTVKISGDASTKAHRGVKSVITFFLLYAIFSLSFFISVWTSERLEENLIILSQVMGMAYPSCHSCVLILGNKKLRQASLSVLLWLRYMFKDGEPSGHKEFRESS

SEQ ID NO: 214084 - DNA, 954 bp, Artificial Sequence
  derived and/or modified sequence
atgggcggcgtgatcaagagcatcttcaccttcgtgctgatcgtggagttcatcatcggcaacctgggcaacagcttcatcgccctggtgaactgcatcgactgggtgaagggcagaaagatcagcagcgtggacagaatcctgaccgccctggccatcagcagaatcagcctggtgtggctgatcttcggcagctggtgcgtgagcgtgttcttccccgccctgttcgccaccgagaagatgttcagaatgctgaccaacatctggaccgtgatcaaccacttcagcgtgtggctggccaccggcctgggcaccttctacttcctgaagatcgccaacttcagcaacagcatcttcctgtacctgaagtggagagtgaagaaggtggtgctggtgctgctgctggtgaccagcgtgttcctgttcctgaacatcgccctgatcaacatccacatcaacgccagcatcaacggctacagaagaaacaagacctgcagcagcgacagcagcaacttcaccagattcagcagcctgatcgtgctgaccagcaccgtgttcatcttcatccccttcaccctgagcctggccatgttcctgctgctgatcttcagcatgtggaagcacagaaagaagatgcagcacaccgtgaagatcagcggcgacgccagcaccaaggcccacagaggcgtgaagagcgtgatcaccttcttcctgctgtacgccatcttcagcctgagcttcttcatcagcgtgtggaccagcgagagactggaggagaacctgatcatcctgagccaggtgatgggcatggcctaccccagctgccacagctgcgtgctgatcctgggcaacaagaagctgagacaggccagcctgagcgtgctgctgtggctgagatacatgttcaaggacggcgagcccagcggccacaaggagttcagagagagcagctag

SEQ ID NO: 214085 - DNA, 954 bp, Artificial Sequence
  derived and/or modified sequence
atgggcggcgtaatcaaaagcatcttcactttcgtgctgattgttgagttcatcatcggcaacctggggaactcttttatagctctcgtcaattgtatcgattgggtcaaagggcgtaagatttcttctgtggaccgcatcctgacagccctcgcgatttctcgaatatcactcgtttggctgatctttggttcgtggtgcgtgtctgtcttcttccctgccctgttcgctaccgaaaagatgtttcggatgttaaccaatatatggaccgtcattaatcatttttccgtgtggctggccaccggtctgggaacattctacttcctcaaaatcgccaatttctctaactcgatcttcctttacttgaaatggcgcgtgaagaaggtggtgttggtgctcctgctggtgaccagtgtatttctgtttttgaacatagcattaatcaatattcacataaatgcctcaatcaatggataccggaggaacaagacctgtagttctgactcttccaactttactaggttttccagccttattgtgctgacgtcaaccgtgtttatcttcatccctttcaccctgagtctcgccatgttcctccttctgatcttctccatgtggaagcataggaaaaagatgcagcacactgtgaagatatcaggcgacgcaagcactaaagcccacaggggcgtgaaatccgtgattactttctttctcctgtacgccatctttagtctatctttctttataagtgtgtggacctcagagcgactcgaagagaacttgattatcttaagccaggtgatgggaatggcctatccatcttgccactcatgcgtgctaattctgggaaacaagaaactccgccaagctagtctgagcgttctcctatggctcaggtacatgtttaaagacggggagccatccggccacaaagagttccgcgagtcctcctag

SEQ ID NO: 214086 - DNA, 954 bp, Artificial Sequence
  derived and/or modified sequence
atgggcggcgtcatcaagagcatcttcacctttgtgctgattgtggagttcatcatcggcaacctgggcaacagcttcatcgccctggtgaactgcatcgactgggtgaagggcaggaagatcagctctgtggaccgcatcctgacagccctggccatcagccgcatcagcctggtgtggctgatcttcggctcctggtgtgtgtctgtgttcttccctgccctgtttgccacagagaagatgttcaggatgctgaccaacatctggacagtcatcaaccacttctctgtgtggctggccaccggcctgggcaccttctacttcctgaagatcgccaacttcagcaacagcatcttcctgtacctgaagtggagggtgaagaaggtggtgctggtgctgctgctggtgaccagcgtcttcctgttcctgaacatcgccctgatcaacatccacatcaatgccagcatcaatggctacagaagaaacaagacctgcagcagtgacagcagcaacttcacccgcttcagcagcctgattgtgctgaccagcaccgtcttcatcttcatccccttcaccctgagcctggccatgttcctgctgctgatcttctccatgtggaagcacaggaagaagatgcagcacacagtgaagatctctggagatgccagcaccaaggcccacagaggagtgaagagcgtcatcaccttcttcctgctgtatgccatcttcagcctgtccttcttcatctctgtgtggaccagcgagcggctggaggagaacctgatcatcctgagccaggtgatgggcatggcctaccccagctgccacagctgtgtgctgatcctgggcaacaagaagctgcggcaggccagcctgtctgtgctgctgtggctgcgctacatgttcaaggatggagagcccagcggccacaaggagttccgggagagcagctag

SEQ ID NO: 214087 - DNA, 954 bp, Artificial Sequence
  derived and/or modified sequence
atgggcggcgtgatcaagagcatcttcaccttcgtgctgatcgtggagttcattattgggaatctgggaaattcattcatagctttagtcaattgtattgattgggtcaagggacgcaaaatatccagcgttgaccgaatactgacagctctcgctattagcagaattagtctggtgtggctcatttttggaagctggtgcgtatctgtgttttttcccgctctattcgccacagagaagatgttccggatgctgacaaatatatggaccgttattaatcacttcagcgtgtggctagcgacagggctggggaccttctatttcttgaaaattgctaatttctccaactccatttttctctatctgaagtggagagttaagaaagttgtcttggtcctgttgctggtgacaagtgtgttcctattcttgaatattgcgcttatcaacatccacattaacgcctccatcaatggataccgcagaaacaagacttgttctagcgactcatctaattttactcgcttttcatccttgattgtgttgacttcaaccgttttcatttttattccttttactctaagcctggccatgtttctactgcttattttctccatgtggaaacataggaagaaaatgcaacacaccgtgaagatctccggggacgccagcactaaggcacaccgcggagtaaagagcgtcattaccttcttcttactttacgctatcttctccttaagtttttttatctctgtgtggacaagcgagagactggaagagaatctaatcatactctcccaagtgatgggaatggcttacccttcttgtcattcatgtgtgctgatcctgggcaataagaagctgcgccaagctagcctgagtgtgttgctgtggctgagatacatgttcaaggacggagaaccttcagggcacaaggagttccgcgagagttcttag

SEQ ID NO: 214088 - DNA, 564 bp, Artificial Sequence
  derived and/or modified sequence
ctacaggacctccctgggaacctgttctctttccttgtcctgatgtgttactcttataggccaatttttgcctttgtgttgtgcctaaatggtgtaattaccccgttttgggaaggtggtattatcccgttttatcttgcggaaactgagggttaagaggaatgttatgattttgtgactatttgtgacagctttttaatattaggtcacttttaaacctatagcttctctcttctagaccacatggttgagaaaggagaaagagaaaatgattacttgtagagaaaaatccatttctgcagtggtatggttaaggataatctaaccataatcacattatccttgtatgcctggctacttatgctggcctgtatgtgaatgttaaccccaaagactcctttagatgtcgctgaactagttactataaaaagtatttcgctttcaaactcccacatttcaagaagagcaaaactcaatacaaggcaattttgaagtttccctgaaacctgggctcttgaagacgcatcactggagcagatggataatggagactggggctatatg

SEQ ID NO: 214089 - DNA, 954 bp, Artificial Sequence
  derived and/or modified sequence
atgggaggagtaattaaatcaatcttcaccttcgtgctcattgtcgagtttatcattggaaatctcggcaactccttcatcgctctggtgaactgcattgattgggtcaaaggccgtaaaattagctctgtggatcggattcttaccgcactggcaatcagtcgcatatcgcttgtgtggctgattttcggctcgtggtgcgtttcggtgttctttcctgcactgtttgccacagagaagatgttccggatgttaacaaacatatggacagtgataaatcacttcagtgtatggcttgcgaccgggctcggcactttttatttcctgaaaattgccaacttctctaacagtatctttctctatcttaagtggcgcgtgaagaaggtggtactggtccttctgctggttacatcagtgtttctgtttctgaacattgctctgatcaatattcacattaacgctagcataaacggatatcggagaaacaagacatgttcgtcagatagctccaatttcaccaggttctcctctctgatagtgctcacaagcaccgttttcatcttcatcccctttactctgtccctggccatgtttctgctgctgatttttagcatgtggaagcatcgaaaaaaaatgcaacacactgtgaagattagtggcgacgcctcaactaaggctcaccggggtgtcaaatcagtgattaccttctttcttttatacgccatcttcagcttaagctttttcatcagtgtgtggacaagcgaacgtcttgaagaaaacctcataatcttatctcaggtaatggggatggcctatccttcatgccattcctgtgtgttgatcctaggtaataaaaagctaagacaggcgagtctgtctgtgctgttgtggctcaggtatatgtttaaggacggagagccatcaggccacaaagaattcagagagtccagctag

SEQ ID NO: 214090 - DNA, 1858 bp, Artificial Sequence
  derived and/or modified sequence
tgcattaagaagtcttcagcagtgatattagacattggggcatgctcttacaggcaatgggtggtgtcataaagagcatatttacattcgttttaattgtggaatttataattggaaatttaggaaatagtttcatagcactggtgaactgtattgactgggtcaagggaagaaagatctcttcggttgatcggatcctcactgctttggcaatctctcgaattagcctggtttggttaatattcggaagctggtgtgtgtctgtgtttttcccagctttatttgccactgaaaaaatgttcagaatgcttactaatatctggacagtgatcaatcattttagtgtctggttagctacaggcctcggtactttttattttctcaagatagccaatttttctaactctatttttctctacctaaagtggagggttaaaaaggtggttttggtgctgcttcttgtgacttcggtcttcttgtttttaaatattgcactgataaacatccatataaatgccagtatcaatggatacagaagaaacaagacttgcagttctgattcaagtaactttacacgattttccagtcttattgtattaaccagcactgtgttcattttcataccctttactttgtccctggcaatgtttcttctcctcatcttctccatgtggaaacatcgcaagaagatgcagcacactgtcaaaatatccggagacgccagcaccaaagcccacagaggagttaaaagtgtgatcactttcttcctactctatgccattttctctctgtcttttttcatatcagtttggacctctgaaaggttggaggaaaatctaattattctttcccaggtgatgggaatggcttatccttcatgtcactcatgtgttctgattcttggaaacaagaagctgagacaggcctctctgtcagtgctactgtggctgaggtacatgttcaaagatggggagccctcaggtcacaaagaatttagagaatcatcttgaatatattagaaaaaaaatagctcctaagaaattcttgtatgttatataaatttatacttccttaagattctttcattgtgtataactttgtgaattttacaaagatatgcttggaatcaacaccatccaaacatatcacaaattaggatatatgaaagtatgtatattaccatacagagaagaatgcgaatactataaagagttcttatacaaacagataatatagattttgtatcaatcattcaccttttttgagatttttaaatgagaaaacctataatgtataaaatacatgtgtgtatgtatgtatgtgacacagttactaaaaataggcttcttaaacttacatctcaatctggtagataaagtacataaaagaatatggaattttagtacctatattaagtgtttttaatttttgtataatatttagtacctgattagcgtgtatgcaaaaaagtaatttgcttcgtttgttgaattagaagccagctgccttactaaactaccacatttgctttgctcattctcttggctttgcagatagaaaattatatcatctgcatatagtgacttataatgattattttacttctccattttactacttgtaattcttttttggtatcagttgtataatgaaatggtttgaacattcaaagtgttaagtaatcctgatcgtaactgctgtctttgcaaatggagtgttttctagtgttttaacaataaacgtaatactgactctagctttgagataaattcttttaaaaatattcttcagggagaatatttgtttcctatcttcctgtgtatagtattgtaataaaatctctgttaaaaactatcaa

SEQ ID NO: 214091 - protein, 1077 aa, Artificial Sequence
  derived and/or modified sequence
MEVQVSQASLGFELTSVEKSLREWSRLSREVIAWLCPSSPNFILNFPPPPSASSVSMVQLFSSPFGYQSPSGHSEEEREGNMKSAKPQVNHSQHGESQRALSPLQSTLSSAASPSQAYETYIENGLICLKHKIRNIEKKKLKLEDYKDRLKSGEHLNPDQLEAVEKYEEVLHNLEFAKELQKTFSGLSLDLLKAQKKAQRREHMLKLEAEKKKLRTILQVQYVLQNLTQEHVQKDFKGGLNGAVYLPSKELDYLIKFSKLTCPERNESLSVEDQMEQSSLYFWDLLEGSEKAVVGTTYKHLKDLLSKLLNSGYFESIPVPKNAKEKEVPLEEEMLIQSEKKTQLSKTESVKESESLMEFAQPEIQPQEFLNRRYMTEVDYSNKQGEEQPWEADYARKPNLPKRWDMLTEPDGQEKKQESFKSWEASGKHQEVSKPAVSLEQRKQDTSKLRSTLPEEQKKQEISKSKPSPSQWKQDTPKSKAGYVQEEQKKQETPKLWPVQLQKEQDPKKQTPKSWTPSMQSEQNTTKSWTTPMCEEQDSKQPETPKSWENNVESQKHSLTSQSQISPKSWGVATASLIPNDQLLPRKLNTEPKDVPKPVHQPVGSSSTLPKDPVLRKEKLQDLMTQIQGTCNFMQESVLDFDKPSSAIPTSQPPSATPGSPVASKEQNLSSQSDFLQEPLQATSSPVTCSSNACLVTTDQASSGSETEFMTSETPEVFNVNAPLPPRKEQEIKESPYSPGYNQSFTTASTQTPPQCQLPSIHVEQTVHSQETANYHPDGTIQVSNGSLAFYPAQTNVFPRPTQPFVNSRGSVRGCTRGGRLITNSYRSPGGYKGFDTYRGLPSISNGNYSQLQFQAREYSGAPYSQRDNFQQCYKRGGTSGGPRANSRAGWSDSSQVSSPERDNETFNSGDSGQGDSRSMTPVDVPVTNPAATILPVHVYPLPQQMRVAFSAARTSNLAPGTLDQPIVFDLLLNNLGETFDLQLGRFNCPVNGTYVFIFHMLKLAVNVPLYVNLMKNEEVLVSAYANDGAPDHETASNHAILQLFQGDQIWLRLHRGAIYGSSWKYSTFSGYLLYQD

SEQ ID NO: 214092 - DNA, 3234 bp, Artificial Sequence
  derived and/or modified sequence
atggaagtgcaggtttcccaagcttccctaggattcgagttaacttccgttgagaaaagtcttcgtgagtggtcccggctgtctagggaggtgatagcctggctgtgtccatcttcccccaatttcatcttgaattttccccctccaccttccgcgtccagcgtaagcatggtccagctatttagcagcccgttcggataccagtcgccatcggggcacagcgaggaggaacgggaaggaaatatgaaatccgcaaaaccacaggtgaaccattcccagcatggagagagtcagcgtgctctttccccgctacaatcaaccctgtcatccgcagcctctccttcacaggcctacgagacttacatcgaaaacggcctgatttgtctgaaacataagatccgaaatatcgagaagaaaaaactgaagctagaagattacaaggatagactaaagagtggagagcatttgaatcccgatcagctggaggccgtcgaaaagtatgaagaggtcctgcacaatctggagtttgctaaggagctgcagaagacattctccgggctgtccttggacttgctgaaagcccagaaaaaagcacaaagaagggaacacatgctaaaattggaggctgagaaaaagaaattgcgtactatcttgcaggtccaatatgtgttacaaaatctgactcaagaacacgttcagaaagactttaagggaggactgaacggggccgtttatttaccttctaaggagctggattatctgatcaagttcagtaagctgacgtgccctgaaagaaatgagtcactgagtgtcgaagatcagatggaacaaagtagcctgtacttttgggacctgttggagggaagcgagaaggcggtagtggggaccacttacaagcatctcaaggatcttctctctaagttgctgaacagcgggtattttgagtctattcctgtgcccaagaatgctaaagaaaaggaagtccctctggaggaagagatgctcatacagtcagaaaagaagacacaactgtctaagaccgaaagcgtgaaagaaagcgaatccctaatggaattcgcccagcccgaaatccagccacaggaatttttaaatcgccggtatatgaccgaggtcgattattctaataagcagggcgaggagcagccttgggaagccgattatgcaagaaagcccaatttgcccaaacgatgggacatgctcactgagccagacgggcaggagaagaagcaggagagctttaagagctgggaggctagcggcaaacatcaggaagtgtccaagccagccgtgagcttggagcagcgcaagcaggacactagtaagcttcgttccactttgccagaggagcaaaagaagcaagagatcagcaaaagcaagcccagcccgagtcagtggaagcaggacacccccaagtctaaagccggatacgttcaggaagagcaaaaaaaacaggagacgcccaagctgtggcctgtccagctgcagaaggagcaggaccctaaaaagcagacaccgaagtcatggacccctagcatgcagtcagaacagaacaccactaaatcctggactacgccaatgtgtgaggagcaggattcgaaacagcctgagacgccaaagagttgggagaacaacgtcgagagtcaaaaacacagcttgacaagccaatcacagatctcacctaagtcgtggggagttgctactgcttctctgatccctaatgaccagctactgcctcgtaagctgaataccgagcctaaggatgttcccaagccagtgcaccagcctgtggggtcctcttcaacccttccaaaggatcctgtgcttcggaaggaaaagctgcaggatctgatgacacagattcaagggacatgtaatttcatgcaggagagtgtgctggactttgataagccttctagcgcaattcctaccagtcaaccaccatctgccactcccgggagcccagtcgcgtctaaggagcagaacctgagctcacaaagcgattttctacaggagcctcttcaggccacctcttcacccgtaacgtgttcttccaatgcttgcctggttactaccgatcaagcttcatccggaagcgagactgaatttatgacatcagagacccctgaagtgtttaacgtgaatgctcctcttcccccacggaaagagcaggaaattaaggagtccccttacagccctggttataatcagtccttcactactgctagcacacagacccctccccagtgtcaactgccaagcatacacgtggaacagaccgttcacagtcaggagaccgcgaactatcaccctgatggaaccatccaggtatctaatggatctctcgccttctacccagcccagaccaacgtgttccctagacccacccaaccatttgttaattcaaggggcagtgtgaggggctgcacccgcggggggcggctcattaccaattcgtatagatcacccgggggctacaagggattcgacacttataggggactcccctctatctccaacgggaattatagccagctccagtttcaagctcgggagtattctggtgcaccctactcccagagagacaatttccaacagtgctacaagcggggaggaacatcgggaggtccacgcgccaattctagagccgggtggtcagatagctcacaagtgagtagccctgaaagagataacgaaactttcaactccggtgattcgggacagggcgatagcaggagcatgaccccagttgatgtgccagtgacaaatcccgccgcaacgatactgcccgtccatgtctatcctctgcctcagcagatgcgcgtcgcattctctgctgcccggacgagcaacctggcaccgggaaccctggatcagccaatcgtcttcgatctcctcctcaataatctcggcgagaccttcgacttgcagctgggacgctttaattgtccagtgaatggcacatatgtgtttattttccatatgctgaaactggccgtgaacgtccctctctacgtgaacttaatgaagaacgaagaggttctcgtaagtgcctacgcgaacgacggggcccctgaccatgagacagcttccaaccacgctattttacaactcttccagggcgaccaaatttggctgagactgcacagaggcgcaatttacggctcctcctggaaatatagcaccttttccggttacctgctgtaccaggattag

SEQ ID NO: 214093 - DNA, 3234 bp, Artificial Sequence
  derived and/or modified sequence
atggaggtgcaggtgtcccaggccagcctgggctttgagctgacctctgtggagaagagcctgcgggagtggagccggctgagccgggaggtgattgcctggctgtgccccagcagccccaacttcatcctgaacttccccccacctccttctgccagctctgtgtccatggtgcagctgttcagcagccccttcggctaccagagccccagcggccacagcgaggaggagcgggagggcaacatgaagagcgccaagccccaggtgaaccacagccagcacggggagagccagagggccctgagccccctgcagagcaccctgagcagcgctgccagccccagccaggcctatgagacctacattgaaaatggcctcatctgcctgaagcacaagatccggaacatcgagaagaagaagctgaagctggaggactacaaggaccggctgaagagcggggagcacctgaacccagaccagctggaggccgtggagaagtatgaggaggtgctgcacaacctggagtttgccaaggagctgcagaagaccttcagcggcctgagcctggacctgctgaaggcccagaagaaggcccagaggcgggagcacatgctgaagctggaggccgagaagaagaagctgcggaccatcctgcaggtgcagtatgtgctgcagaacctgacccaggagcacgtgcagaaggacttcaagggcggcctgaatggagctgtgtacctgcccagcaaggagctggactacctgatcaagttcagcaagctgacctgcccagagagaaatgaaagcctgtctgtggaggaccagatggagcagagcagcctgtacttctgggacctgctggagggcagcgagaaggctgtggtgggcaccacctacaagcacctgaaggacctgctgagcaagctgctgaacagcggctactttgagagcatccctgtgcccaagaatgccaaggagaaggaggtgcccctggaggaggagatgctgatccagagcgagaagaagacccagctgagcaagacagaatctgtgaaggagagcgagagcctgatggagtttgcccagcctgagatccagccccaggagttcctgaacagacgctacatgacagaggtggactacagcaacaagcagggcgaggagcagccctgggaggccgactatgccaggaagcccaacctgcccaagcgctgggacatgctgacagagccagatggccaggagaagaagcaggagagcttcaagtcctgggaggccagcggcaagcaccaggaggtgtccaagccagctgtgtccctggagcagaggaagcaggacaccagcaagctgcggagcaccctgcctgaggagcagaagaagcaggagatcagcaagagcaagcccagccccagccagtggaagcaggacacccccaagagcaaggccggctacgtgcaggaggagcagaagaagcaggagacccccaagctgtggcctgtgcagctgcagaaggagcaggaccccaagaagcagacccccaagtcctggacccccagcatgcagagcgagcagaacaccaccaagtcctggaccacccccatgtgtgaggagcaggacagcaagcagcctgagacccccaagtcctgggagaacaacgtggagagccagaagcacagcctgaccagccagagccagatcagccccaagtcctggggcgtggccacagccagcctcatccccaatgaccagctgctgcccaggaagctgaacacagagcccaaggatgtgcccaagcctgtgcaccagcctgtgggcagcagcagcaccctgcccaaggaccctgtgctgaggaaggagaagctgcaggacctgatgacccagatccagggcacctgcaacttcatgcaggagagcgtgctggactttgacaagcccagcagcgccatccccaccagccagcccccatctgccaccccaggcagccctgtggccagcaaggagcagaacctgagcagccagagcgacttcctgcaggagcccctgcaggccaccagcagccctgtgacctgcagcagcaatgcctgcctggtgaccacagaccaggccagcagcggcagcgagacagagttcatgaccagcgagaccccagaggtgttcaacgtgaatgcccccctgccccccaggaaggagcaggagatcaaggagagcccctacagccctggctacaaccagagcttcaccacagccagcacccagaccccaccccagtgccagctgcccagcatccacgtggagcagacagtgcacagccaggagacagccaactaccacccagatggcaccatccaggtgtccaatggcagcctggccttctacccagcccagaccaacgtgttcccccggcccacccagccctttgtgaacagccggggctctgtgcggggctgcacccggggcggccgcctcatcaccaacagctaccgcagccctgggggctacaagggctttgacacctaccggggcctgcccagcatcagcaatggaaactacagccagctgcagttccaggcccgggagtacagcggggccccctacagccagagggacaacttccagcagtgctacaagagaggaggcaccagcggcggcccccgggccaacagcagagctggctggagcgacagcagccaggtgagcagccctgagcgggacaatgagaccttcaacagcggggacagcggccagggcgacagccgctccatgacccctgtggatgtgcctgtgaccaacccagctgccaccatcctgcctgtgcacgtgtaccccctgccccagcagatgagggtggccttctctgctgcccggaccagcaacctggcccctggcaccctggaccagcccatcgtgtttgacctgctgctgaacaacctgggggagacctttgacctgcagctgggccgcttcaactgccctgtgaatggcacctacgtgttcatcttccacatgctgaagctggccgtgaatgtgcccctgtatgtgaacctgatgaagaatgaggaggtgctggtgtctgcctatgccaatgatggagccccagaccatgaaacagccagcaaccacgccatcctgcagctgttccagggcgaccagatctggctgcggctgcacagaggagccatctacggcagctcctggaagtacagcaccttcagcggctacctgctgtaccaggactag

SEQ ID NO: 214094 - DNA, 3234 bp, Artificial Sequence
  derived and/or modified sequence
atggaggtgcaggtgagccaggccagcctgggcttcgagctgacctcagtggaaaagagcctacgagagtggtcaaggcttagccgcgaggtgattgcatggctttgtccatcttctccgaatttcatcctgaacttcccacctcccccatctgccagctcggtcagcatggtgcagctgttctcaagcccgttcggctaccagtctccatcaggacactcagaagaggaaagggagggcaatatgaaaagtgcaaaaccacaggtcaaccactcccagcatggggagtctcagcgggccctgtccccactccagtctaccctctcctcagctgctagccccagccaggcctatgagacctacattgagaatgggctgatatgtttgaaacacaaaataagaaatatcgagaagaagaagctgaagctagaggattataaggaccggcttaagagcggggaacacttgaacccagaccagctcgaagctgttgaaaaatatgaagaggtgcttcataacctcgagttcgcgaaggaactccagaaaacattttcagggctgtctctcgacctgttaaaggctcagaagaaggcgcagcgtagggagcatatgctcaaacttgaggcagaaaaaaaaaaattaaggacgatcttgcaggtgcagtatgtgctacagaatctaacacaggaacatgtgcagaaagattttaaaggcggcctgaacggagccgtgtacctccctagcaaggaattggattatctgattaagttctccaagttaacttgtccagagcggaatgagagtcttagcgtggaggatcaaatggaacaatcatcactgtatttttgggacctgttagagggatccgagaaagcggtggtggggacgacgtacaagcacttgaaggatttgctttcaaagttgctcaatagcggatattttgagagcatcccagtacccaagaacgctaaggagaaggaggtcccattggaggaagagatgctgatacaatctgagaagaaaactcagcttagcaagacggagagtgtaaaggaatccgagagcctgatggaatttgcacagccggaaattcagcctcaggaatttctcaacaggcgttacatgacagaagtggattacagcaacaagcagggcgaggaacaaccatgggaggcagattatgcgcgaaagcccaacctccccaaaaggtgggatatgctgacggagccggatggccaggagaaaaagcaagagtccttcaagtcctgggaagcgtctggaaagcaccaggaagtatctaagcctgcagtgtctctcgaacagagaaaacaggatacatctaagctacggtcgacactccccgaagaacagaaaaagcaagaaatctcgaaatccaaaccgtcacctagccagtggaagcaggataccccaaagagcaaggccgggtacgttcaggaagaacagaaaaaacaggaaacaccgaagctttggcctgtccagttgcagaaggagcaagacccaaagaagcagaccccaaagagttggaccccgtctatgcagtcagagcagaataccacaaagagttggaccactcctatgtgcgaagaacaggatagtaaacagccagaaactcctaagtcttgggaaaataatgtggaatcccaaaagcatagtctcacaagtcaatcgcagatctctcccaagtcttggggtgtcgcaacagccagcctgattccaaacgatcagctgttaccccgcaaacttaatactgagcctaaagatgttcccaaacccgtgcaccaacccgtaggttcttcaagcacccttcccaaggatcccgttttgcgaaaggagaagctccaggacctaatgactcaaattcagggaacgtgcaattttatgcaagagtccgtgctggacttcgacaagccttctagcgcgatccctacaagccagccaccatcagcgactccagggtcgcctgtcgcatcaaaggaacagaatctctctagccagtccgatttcctacaagagcctctccaggccacctcttctccagtgacctgctcctctaatgcatgcctggtgaccacggatcaggccagcagtggcagcgagacagagtttatgacttcagaaacaccagaagtcttcaacgtgaacgcgcctttgcccccaaggaaggagcaggagatcaaggagtccccctactcccccgggtacaatcagtccttcactaccgcatcgacccagacaccaccccagtgtcaacttccgagcatccacgtggaacagacggtccatagccaagagaccgcaaactatcacccagatggcaccattcaggtaagcaatggcagtctcgctttttaccccgcccagaccaacgtctttccaaggcccacccaaccttttgtgaacagccggggctctgtgcgcggctgcacccgtggtggacgtttgatcacgaattcctaccggagcccaggcgggtataaggggttcgatacataccgcggactaccctcaatcagtaacgggaattacagtcaactgcagtttcaggccagggagtattctggcgcgccttattcccagcgtgacaactttcagcagtgctataaaagggggggaacctctggaggccctagagccaatagtagagctggttggtcagattcctcgcaagtcagctctcctgagcgcgacaacgaaacctttaattcgggtgactcgggccagggggactcccgctcaatgaccccggtagatgtgcccgtgactaacccggctgcaaccattcttcctgtgcacgtgtacccgctgcctcagcagatgagggtggctttcagcgcggcgcgaacaagcaaccttgctcccggtacccttgaccagcctatcgtcttcgaccttctcctgaacaacctgggagagaccttcgatctgcagctgggccggttcaactgtccggtcaacggcacttacgtgtttatattccacatgcttaagctggcagtgaatgtgccattgtacgtcaacctgatgaagaacgaggaggttctggtgtccgcctacgctaatgacggagcccctgatcacgaaaccgcctccaaccacgccatactgcagctcttccagggcgatcagatatggctacggctccatcggggggcaatctacgggagcagctggaagtactcaactttctccgggtatctcctgtaccaggactag

SEQ ID NO: 214095 - DNA, 3234 bp, Artificial Sequence
  derived and/or modified sequence
atggaggttcaggtttctcaggccagcctggggtttgagctaacttcagtggagaaatctttaagagagtggtcaagactttccagagaagttatcgcatggctttgtccaagctcaccaaacttcattcttaatttcccccctccgccttctgcatcctccgtaagtatggtgcaattgtttagcagccctttcggctaccagtccccttccgggcattcagaagaggagcgtgaaggaaacatgaagtctgctaagcctcaggtgaaccactcacagcacggcgaatcccagcgggcactatcgccgcttcaatctacattgtctagtgctgcctcacccagtcaggcttacgagacgtacattgaaaacgggctgatctgtctgaagcacaagatccgtaatatcgagaagaaaaagcttaaacttgaggattacaaagatcgcctgaaatctggtgagcacttgaaccccgatcagctagaggcggttgaaaaatacgaggaagtgctgcacaacttagaatttgcaaaggagcttcagaagacgttttcagggttgtctctagacctcctcaaagcgcagaagaaggcacaaagaagggagcacatgcttaaactggaggcagaaaagaaaaagttacgtaccatcctgcaagtccagtacgtgctgcagaacttgacacaagagcatgtgcaaaaagacttcaaaggcggactcaacggggctgtttacctaccctcaaaagaactggactacttaatcaaattttccaaactaacgtgcccagaacggaacgaatcactgagtgtggaagaccagatggagcagagttcattgtacttttgggacctgttagagggttccgaaaaggccgtggtggggacgacatacaagcacctcaaagacttgcttagtaagttgctgaactctggatacttcgagtctattcccgtgccgaagaatgctaaggaaaaggaggtacccctggaggaggaaatgctgatccagagcgagaagaagacccagctgtcaaagaccgagtctgtgaaagagagtgagtctcttatggagttcgcccagcctgaaatacagcctcaagagtttcttaatagacgctatatgacagaggtggattacagcaacaagcaaggcgaggagcagccgtgggaagccgattacgctagaaaacccaacctgccgaaaagatgggatatgctgacagagcccgacggccaggaaaaaaagcaggagagctttaaatcttgggaggccagcggaaaacatcaggaggtatccaagccagcagtttcactggaacagcgaaagcaggataccagtaagctcaggtcaactttgcccgaggagcagaagaaacaggaaatctccaaatcgaagccctccccttcgcagtggaagcaggacactccaaagagtaaggccggttatgtacaagaggagcagaagaagcaggaaactcccaagctgtggccagtccagttacaaaaggaacaggacccaaagaagcagacaccaaagtcatggacaccaagcatgcagtcagagcagaataccaccaaatcttggaccaccccaatgtgtgaggagcaggatagcaagcagccggagacaccaaagtcatgggagaacaacgtcgagtctcagaagcacagtttgacaagtcagtcacagatatctcctaagtcttggggcgtggcgaccgcatccctgatccccaatgatcaactgttgcctaggaaactcaatacagaacccaaggatgtgcctaagccggtgcaccagccggtgggatcatccagcacccttccgaaagatcccgtcttgcgcaaggaaaagctgcaggacttgatgactcagatacagggcacctgtaattttatgcaagagagcgttcttgacttcgataaaccatctagcgccatccctacgtctcagcctccctccgccacaccaggttcacctgttgcctcaaaggaacagaatctcagcagtcaatccgattttctccaggagcctctccaggcgacatccagccctgttacgtgcagtagcaacgcctgcctcgtgacaaccgaccaagcctcgtctggatccgaaaccgagtttatgacaagcgaaacccctgaggtgtttaacgtcaatgcaccgttgccaccacggaaagaacaggagattaaagaatcaccctactcccccggatataatcagagctttacaaccgcctccacccagacaccaccgcaatgtcagctgcctagcatacacgtggaacaaaccgtacattcccaagagacagccaattaccacccagatggaacgatccaagtgtcaaatggctctttagccttttacccggctcagacgaatgtgttccctcgaccaactcaaccctttgtgaactctcgagggtctgttcgtggttgcactagaggcggtaggctcattactaattcttatcgatctccgggagggtacaaggggttcgacacatatagaggcttgccatcaattagcaacgggaattacagccagctgcagtttcaggcccgtgagtatagtggagccccttactcgcaacgggataattttcagcaatgctacaaacgcggtggcacgtccggcggacctcgagctaattcccgcgctgggtggagtgatagcagccaagtatccagccccgaaagggataatgaaacattcaacagtggggactcaggtcaaggggattcgaggtcaatgacccccgtggacgttcccgtgaccaatcccgctgctaccatactaccagtgcacgtttacccactccctcagcagatgagggtggccttttctgccgcacgaacttcaaatctagctcccggaactctggaccagcctattgtgttcgacttattgttgaataatctgggggagacctttgacctccagctcggcaggttcaactgccctgtgaacggaacgtatgtgttcatattccacatgctgaagctcgcggtgaacgtacccttgtacgtgaatctgatgaagaacgaagaagttctagtgagcgcatacgccaacgatggcgcaccagaccacgaaaccgcctccaatcacgccattctccagctgttccagggcgaccagatctggctgcgattgcatagaggagcaatatatggttcctcttggaagtactcaacattcagcggttatttactgtaccaggactag

SEQ ID NO: 214096 - DNA, 4334 bp, Artificial Sequence
  derived and/or modified sequence
gtcggtgcctgcagggctctccgtggccgctcgggagaggtgctcttcgctcaggctcccccggagacttgagggggtgcgcgctggcgtgcatggggcctgttctgtccttggtttggggatgctcctaaggggggagaaagggatacctcgggtgcttggaggtcgagagacggatacgtaagtgcgcaagggccactgattagggcacgggaagggctcgctagaatgagctcttaaactggttgggtgtaagcggttttgggctagtctaaaccaaacaactgagaataaacgcggggttcctgcaggttgagagagtacctgtctgcaaatgtccagtagtgatggattgccttgtaggccccagagcaatcggggaagttagcattcttgttcaagaagctgctggttcacttagagctataaaagaatgttgtgagtttggattttcttccaaacgttcaggattgaggttagggctggtggtgagggatcatgtaaagaggtttgagtggctcagccttaggtcccggtgtggaaagcttattcttttggtgtcatcacgtggccgtgggaattatttagaatgtgatctgccctcatgagaagaaaggagctctgaagccgttgcagttcttcctccctatgtggaaaatcgaatttctggaaacatcctccgtattgggagattttgcctatgtaaaggctatccttattggctagcggcactaattactttaaaagtaggatggaagtacaagtatctcaagcatcattgggtttcgagctcacttctgtggaaaagagtttaagggagtggtctagactttccagggaagttattgcctggctgtgtccctctagtcctaattttatacttaactttcccccacctccttcagcctcatctgtttcaatggtgcaactcttttcatccccttttggttaccagtcaccttcaggccattcagaggaggaaagagaggggaatatgaagtcagccaagccccaagtgaaccacagtcagcatggggaaagccagcgggccttgagccccctgcagtctactctgagttctgctgcatctccttcccaagcgtatgagacctatattgaaaatggactcatatgccttaaacacaaaattagaaacatcgagaaaaagaagctcaaactggaggattataaggatcgcctgaaaagtggagagcatcttaatccagaccagttggaagctgtagagaaatatgaagaagtgctacataatttggaatttgccaaggagcttcaaaaaaccttttctgggttgagcctagatctactaaaagcgcaaaagaaggcccagagaagggagcacatgctaaaacttgaggctgagaagaaaaagcttcgaactatacttcaagttcagtatgtattgcagaacttgacacaggagcacgtacaaaaagacttcaaagggggtttgaatggtgcagtgtatttgccttcaaaagaacttgactacctcattaagttttcaaaactgacctgccctgaaagaaatgaaagtctgagtgttgaagaccagatggagcagtcatccttgtacttttgggaccttttggaaggtagtgagaaagcagtggtaggaacgacatacaaacacttgaaggatctactgtctaaattgctgaactcaggctattttgaaagtatcccagttcccaaaaatgccaaggaaaaggaagtaccactggaggaagaaatgctaatacaatcagagaaaaaaacacaattatcgaagactgaatctgtcaaagagtcagagtctctaatggaatttgcccagccagagatacaaccacaagagtttcttaacagacgctatatgacagaagtagattattcaaacaaacaaggcgaagagcaaccttgggaagcagattatgctagaaaaccaaatctcccaaaacgttgggatatgcttactgaaccagatggtcaagagaagaaacaggagtcctttaagtcctgggaggcttctggtaagcaccaggaggtatccaagcctgcagtttccttagaacagaggaaacaagacacctcaaaactcaggtctactctgccggaagagcagaagaagcaggagatctccaaatccaagccatctcctagccagtggaagcaagatacacctaaatccaaagcagggtatgttcaagaggaacaaaagaaacaggagacaccaaagctgtggccagttcagctgcagaaagaacaagatccaaagaagcaaactccaaagtcttggacaccttccatgcagagcgaacagaacaccaccaagtcatggaccactcccatgtgtgaagaacaggattcaaaacagccagagactccaaaatcctgggaaaacaatgttgagagtcaaaaacactctttaacatcacagtcacagatttctccaaagtcctggggagtagctacagcaagcctcataccaaatgaccagctgctgcccaggaagttgaacacagaacccaaagatgtgcctaagcctgtgcatcagcctgtaggttcttcctctacccttccgaaggatccagtattgaggaaagaaaaactgcaggatctgatgactcagattcaaggaacttgtaactttatgcaagagtctgttcttgactttgacaaaccttcaagtgcaattccaacgtcacaaccgccttcagctactccaggtagccccgtagcatctaaagaacaaaatctgtccagtcaaagtgattttcttcaagagccgttacaggctacttcttctccagttacttgtagctcaaatgcttgcttggttactaccgatcaggcttcttctggatctgaaacagagtttatgacctcagagactcctgaggtatttaacgttaatgcacctctgcctccacgaaaagaacaagaaataaaagaatccccttattcacctggctacaatcaaagttttaccacagcaagtacacaaacaccaccccagtgccaactgccatctatacatgtagaacaaactgtccattctcaagagactgcaaattatcatcctgatggaactattcaagtaagcaatggtagccttgccttttacccagcacagacgaatgtgtttcccagacctactcagccatttgtcaatagccggggatctgttagaggatgtactcgtggtgggagattaataaccaattcctatcggtcccctggtggttataaaggttttgatacttatagaggactcccttcaatttccaatggaaattatagccagctgcagttccaagctagagagtattctggagcaccttattcccaaagggataatttccagcagtgttataagcgaggagggacatctggtggtccacgagcaaattcgagagcagggtggagtgattcttctcaggtgagcagcccagaaagagacaacgaaacctttaacagtggtgactctggacaaggagactcccgtagcatgacccctgtggatgtgccagtgacaaatccagcagccaccatactgccagtacacgtctaccctctgcctcagcagatgcgagttgccttctcagcagccagaacctctaatctggcccctggaactttagaccaacctattgtgtttgatcttcttctgaacaacttaggagaaacttttgatcttcagcttggtagatttaattgcccagtgaatggcacttacgttttcatttttcacatgctaaagctggcagtgaatgtgccactgtatgtcaacctcatgaagaatgaagaggtcttggtatcagcctatgccaatgatggtgctccagaccatgaaactgctagcaatcatgcaattcttcagctcttccagggagaccagatatggttacgtctgcacaggggagcaatttatggaagtagctggaaatattctacgttttcaggctatcttctttatcaagattgaaagtcagtacagtattgacaataaaaggatggtgttctaattagtgggattgaaggaaaagtagtctttgccctcatgactgattggtttaggaaaatgtttttgttcctagagggaggaggtccttacttttttgttttccttcctgaggtgaaaaatcaagctgaatgacaattagcactaatctggcactttataaattgtgatgtagcctcgctagtcaagctgtgaatgtatattgtttgcacttaatccttaactgtattaacgttcagcttactaaactgactgcctcaagtccaggcaagttacaatgccttgttgtgcctcaataaaaaagttacatgca

SEQ ID NO: 214097 - DNA, 3234 bp, Artificial Sequence
  derived and/or modified sequence
atggaggtgcaggtgagccaggccagcctgggcttcgagctgaccagcgtggagaagagcctgagagagtggagcagactgagcagagaggtgatcgcctggctgtgccccagcagccccaacttcatcctgaacttcccccccccccccagcgccagcagcgtgagcatggtgcagctgttcagcagccccttcggctaccagagccccagcggccacagcgaggaggagagagagggcaacatgaagagcgccaagccccaggtgaaccacagccagcacggcgagagccagagagccctgagccccctgcagagcaccctgagcagcgccgccagccccagccaggcctacgagacctacatcgagaacggcctgatctgcctgaagcacaagatcagaaacatcgagaagaagaagctgaagctggaggactacaaggacagactgaagagcggcgagcacctgaaccccgaccagctggaggccgtggagaagtacgaggaggtgctgcacaacctggagttcgccaaggagctgcagaagaccttcagcggcctgagcctggacctgctgaaggcccagaagaaggcccagagaagagagcacatgctgaagctggaggccgagaagaagaagctgagaaccatcctgcaggtgcagtacgtgctgcagaacctgacccaggagcacgtgcagaaggacttcaagggcggcctgaacggcgccgtgtacctgcccagcaaggagctggactacctgatcaagttcagcaagctgacctgccccgagagaaacgagagcctgagcgtggaggaccagatggagcagagcagcctgtacttctgggacctgctggagggcagcgagaaggccgtggtgggcaccacctacaagcacctgaaggacctgctgagcaagctgctgaacagcggctacttcgagagcatccccgtgcccaagaacgccaaggagaaggaggtgcccctggaggaggagatgctgatccagagcgagaagaagacccagctgagcaagaccgagagcgtgaaggagagcgagagcctgatggagttcgcccagcccgagatccagccccaggagttcctgaacagaagatacatgaccgaggtggactacagcaacaagcagggcgaggagcagccctgggaggccgactacgccagaaagcccaacctgcccaagagatgggacatgctgaccgagcccgacggccaggagaagaagcaggagagcttcaagagctgggaggccagcggcaagcaccaggaggtgagcaagcccgccgtgagcctggagcagagaaagcaggacaccagcaagctgagaagcaccctgcccgaggagcagaagaagcaggagatcagcaagagcaagcccagccccagccagtggaagcaggacacccccaagagcaaggccggctacgtgcaggaggagcagaagaagcaggagacccccaagctgtggcccgtgcagctgcagaaggagcaggaccccaagaagcagacccccaagagctggacccccagcatgcagagcgagcagaacaccaccaagagctggaccacccccatgtgcgaggagcaggacagcaagcagcccgagacccccaagagctgggagaacaacgtggagagccagaagcacagcctgaccagccagagccagatcagccccaagagctggggcgtggccaccgccagcctgatccccaacgaccagctgctgcccagaaagctgaacaccgagcccaaggacgtgcccaagcccgtgcaccagcccgtgggcagcagcagcaccctgcccaaggaccccgtgctgagaaaggagaagctgcaggacctgatgacccagatccagggcacctgcaacttcatgcaggagagcgtgctggacttcgacaagcccagcagcgccatccccaccagccagccccccagcgccacccccggcagccccgtggccagcaaggagcagaacctgagcagccagagcgacttcctgcaggagcccctgcaggccaccagcagccccgtgacctgcagcagcaacgcctgcctggtgaccaccgaccaggccagcagcggcagcgagaccgagttcatgaccagcgagacccccgaggtgttcaacgtgaacgcccccctgccccccagaaaggagcaggagatcaaggagagcccctacagccccggctacaaccagagcttcaccaccgccagcacccagacccccccccagtgccagctgcccagcatccacgtggagcagaccgtgcacagccaggagaccgccaactaccaccccgacggcaccatccaggtgagcaacggcagcctggccttctaccccgcccagaccaacgtgttccccagacccacccagcccttcgtgaacagcagaggcagcgtgagaggctgcaccagaggcggcagactgatcaccaacagctacagaagccccggcggctacaagggcttcgacacctacagaggcctgcccagcatcagcaacggcaactacagccagctgcagttccaggccagagagtacagcggcgccccctacagccagagagacaacttccagcagtgctacaagagaggcggcaccagcggcggccccagagccaacagcagagccggctggagcgacagcagccaggtgagcagccccgagagagacaacgagaccttcaacagcggcgacagcggccagggcgacagcagaagcatgacccccgtggacgtgcccgtgaccaaccccgccgccaccatcctgcccgtgcacgtgtaccccctgccccagcagatgagagtggccttcagcgccgccagaaccagcaacctggcccccggcaccctggaccagcccatcgtgttcgacctgctgctgaacaacctgggcgagaccttcgacctgcagctgggcagattcaactgccccgtgaacggcacctacgtgttcatcttccacatgctgaagctggccgtgaacgtgcccctgtacgtgaacctgatgaagaacgaggaggtgctggtgagcgcctacgccaacgacggcgcccccgaccacgagaccgccagcaaccacgccatcctgcagctgttccagggcgaccagatctggctgagactgcacagaggcgccatctacggcagcagctggaagtacagcaccttcagcggctacctgctgtaccaggactag

SEQ ID NO: 214098 - protein, 432 aa, Artificial Sequence
  derived and/or modified sequence
MTELQQDVEDTKPAKVLGKRESKLGSAHSEAENGVEEKKKACRSPTAQSPTPSVEADSPDQKKIISLWSKSSFDGASLASDKNDCKTESKNDPKTERKKSSSSSQYKANMHFHKLFLSVPTEEPLKQSFTCALQKEILYQGKLFVSENWICFHSKVFGKDTKISIPAFSVTLIKKTKTALLVPNALIIATVTDRYIFVSLLSRDSTYKLLKSVCGHLENTSVGNSPNPSSAENSFRADRPSSLPLDFNDEFSDLDGVVQQRRQDMEGYSSSGSQTPESENSRDFHATESQTVLNVSKGEAKPTRADAHVNRVPEGKAKSLPVQGLSETVGILHKVKSQKCPMLHHILIFYAIVVCALIISTFYMRYRINTLEEQLGLLTSIVDTHNTEQAAPSGLRSQVQFNVEVLCQELTANIVKLEKIQNNLQKLLENGD

SEQ ID NO: 214099 - DNA, 1299 bp, Artificial Sequence
  derived and/or modified sequence
atgaccgagctgcagcaggacgtggaggacaccaagcccgccaaggtgctgggcaagagagagagcaagctgggcagcgcccacagcgaggccgagaacggcgtggaggagaagaagaaggcctgcagaagccccaccgcccagagccccacccccagcgtggaggccgacagccccgaccagaagaagatcatcagcctgtggagcaagagcagcttcgacggcgccagcctggccagcgacaagaacgactgcaagaccgagagcaagaacgaccccaagaccgagagaaagaagagcagcagcagcagccagtacaaggccaacatgcacttccacaagctgttcctgagcgtgcccaccgaggagcccctgaagcagagcttcacctgcgccctgcagaaggagatcctgtaccagggcaagctgttcgtgagcgagaactggatctgcttccacagcaaggtgttcggcaaggacaccaagatcagcatccccgccttcagcgtgaccctgatcaagaagaccaagaccgccctgctggtgcccaacgccctgatcatcgccaccgtgaccgacagatacatcttcgtgagcctgctgagcagagacagcacctacaagctgctgaagagcgtgtgcggccacctggagaacaccagcgtgggcaacagccccaaccccagcagcgccgagaacagcttcagagccgacagacccagcagcctgcccctggacttcaacgacgagttcagcgacctggacggcgtggtgcagcagagaagacaggacatggagggctacagcagcagcggcagccagacccccgagagcgagaacagcagagacttccacgccaccgagagccagaccgtgctgaacgtgagcaagggcgaggccaagcccaccagagccgacgcccacgtgaacagagtgcccgagggcaaggccaagagcctgcccgtgcagggcctgagcgagaccgtgggcatcctgcacaaggtgaagagccagaagtgccccatgctgcaccacatcctgatcttctacgccatcgtggtgtgcgccctgatcatcagcaccttctacatgagatacagaatcaacaccctggaggagcagctgggcctgctgaccagcatcgtggacacccacaacaccgagcaggccgcccccagcggcctgagaagccaggtgcagttcaacgtggaggtgctgtgccaggagctgaccgccaacatcgtgaagctggagaagatccagaacaacctgcagaagctgctggagaacggcgactag

SEQ ID NO: 214100 - DNA, 1299 bp, Artificial Sequence
  derived and/or modified sequence
atgaccgagctgcagcaggatgtggaggatacaaagcccgccaaggtcctcgggaaaagagaatccaaacttggatcagcccactccgaggccgaaaacggcgtggaggaaaaaaaaaaggcgtgtcgcagccccactgcccagagcccaacaccttcagtggaggctgacagtcctgaccagaaaaagataatcagcctatggagcaaaagcagtttcgacggggctagcctggctagcgacaagaatgactgtaagacagagtcaaagaatgatcctaaaacggaaagaaagaagagttcatcctcttcgcagtataaggcgaacatgcattttcacaagttgttcctgagtgtgcctactgaggagcctcttaagcagagctttacatgcgctctacagaaggaaatactgtaccagggtaaattgtttgtgtccgagaattggatctgctttcacagcaaagtgttcgggaaggacacgaaaatcagcatccccgcattctctgtgacactaattaagaaaaccaaaacggctctactcgtaccaaatgccctgatcatagccacagtcacagacaggtacattttcgtcagtttactgagtagagattcaacttacaagctgttgaaaagcgtgtgcgggcacctcgagaacacttccgtcggtaactccccaaacccctcttcggccgaaaattcctttagggctgaccgcccatcatcactgccattggattttaatgacgagtttagcgatctggatggtgtggtgcaacaacgtcggcaggacatggaggggtattcctcgtcagggtcccagaccccggaaagcgagaactcccgggactttcatgctacagagagccagaccgtgctgaatgtgtcgaaaggtgaagccaaaccaactcgggcggatgcccatgtcaaccgcgttcccgagggcaaagccaaatcactccccgtgcagggcctctctgagaccgtcggcatactgcataaagtgaagtcccaaaagtgtcctatgctgcatcacattctcatcttctacgccattgtggtgtgcgcgcttataatcagcacgttctacatgcgttataggatcaacactctggaggagcagctaggactgctgaccagcatcgtggatacacataataccgaacaagccgcaccctccgggctgagaagccaagtgcagttcaatgtggaggtcctctgtcaggaactgacggcaaacatagtcaagctcgaaaaaatccagaacaatttacagaaactgctggagaatggagactag

SEQ ID NO: 214101 - DNA, 1299 bp, Artificial Sequence
  derived and/or modified sequence
atgacagagctgcagcaggatgtggaggacaccaagccagccaaggtgctgggcaagcgggagagcaagctgggcagcgcccacagcgaggccgagaatggagtggaggagaagaagaaggcctgccgcagccccacagcccagagccccaccccatctgtggaggccgacagcccagaccagaagaagatcatcagcctgtggagcaagagcagctttgatggagccagcctggccagtgacaagaatgactgcaagacagagagcaagaatgaccccaagacagagaggaagaagagcagcagcagcagccagtacaaggccaacatgcacttccacaagctgttcctgtctgtgcccacagaggagcccctgaagcagagcttcacctgtgccctgcagaaggagatcctgtaccagggcaagctgtttgtgtctgagaactggatctgcttccacagcaaggtgtttgggaaggacaccaagatcagcatcccagccttctctgtgaccctcatcaagaagaccaagacagccctgctggtgcccaatgccctgatcatcgccaccgtgacagaccgctacatctttgtgtccctgctgagccgggacagcacctacaagctgctgaagtctgtgtgtggccacctggagaacacctctgtgggcaacagccccaaccccagcagcgctgagaacagcttccgggctgaccggcccagcagcctgcccctggacttcaatgatgagttcagtgacctggatggagtggtgcagcagaggcggcaggacatggagggctacagcagcagcggcagccagaccccagagagcgagaacagccgggacttccacgccacagagagccagacagtgctgaatgtgtccaaaggagaggccaagcccaccagggcagatgcccacgtgaacagagtgcctgagggcaaggccaagagcctgcctgtgcagggcctgtctgagaccgtgggcatcctgcacaaggtgaagagccagaagtgccccatgctgcaccacatcctgatcttctacgccatcgtggtgtgtgccctgatcatcagcaccttctacatgagataccgcatcaacaccctggaggagcagctgggcctgctgaccagcatcgtggacacccacaacacagagcaggccgcccccagcggcctgcggagccaggtgcagttcaacgtggaggtgctgtgccaggagctgacagccaacatcgtgaagctggagaagatccagaacaacctgcagaagctgctggagaatggagactag

SEQ ID NO: 214102 - DNA, 3175 bp, Artificial Sequence
  derived and/or modified sequence
atctagagccggctgccctctaaaaatccccctgttacagtcgggatagaaaacaaaaagcttaatttaccaggaggctaaacagattgtgccttcttaggcaaatgttccacctgcttggccaattagcttcctctcccgaaagactcgttcaacaggtttcctttttctcttctctgcctcctgggttggggaaagaggctgtcacttcgcttcgaccctccccttccctccctctcggcttttccacagtgggtcggaccaatcgcgcccgctccgacgtgtccaggtccgcggccccgggagcttggcgcggcccggcctggatgcgctgggcggagggtgcaggggagggcacggcgccgcttgcttggcctgcgcacccggacctagaagccgggacgagccggggcagagccaggcgcgcggaagtctgaaggtgccctccagacacggccccgatgactgaactacagcaagatgtggaagacacaaagcctgcgaaagtgctcgggaagagggagagcaaacttggctcagcccactcagaggctgagaatggtgtggaggagaaaaagaaagcctgcaggtcgccaacagcccaatcccctaccccatctgtggaggcggactccccagaccagaagaaaatcattagcctatggtcaaaatccagttttgatggtgcctctttagcaagtgataagaacgactgtaaaacagaaagcaaaaatgaccctaagactgaaagaaaaaagtcttcatcttccagccagtacaaggccaatatgcactttcacaagttgtttcttagtgtcccaacggaggaaccactgaagcaaagctttacctgtgctctacagaaagaaatactataccaaggaaagctctttgtatcagaaaactggatttgttttcattccaaagtctttggaaaagacacaaagatctctattccagctttctcggtaaccctaataaagaaaaccaaaactgctcttctagtgccaaacgccctgatcatagcaacagtcacagacaggtacatatttgtctccttactctccagagattcaacttacaaactactaaaatctgtgtgtggacacttagaaaatacaagtgttggtaacagtcccaatccatcttctgctgaaaacagtttccgagcagaccgcccttcatctctgcctctggatttcaatgatgaattctcagatctggatggagtggttcaacaaagaaggcaagacatggaaggatatagcagttctggttctcaaactcctgaatctgagaactctcgagatttccatgcgacagaatcccaaacagttctgaatgtctccaagggagaagcaaagccaactcgggcagatgcccatgtgaacagagtacctgaaggaaaagccaagagtctccctgtacagggtctgtcagaaactgttggaatcttacataaagtcaagtctcagaaatgtccgatgcttcaccatattcttatattctatgcaattgttgtctgtgcactaatcatctcgaccttctacatgagatacagaattaatactctggaggagcagctggggttactaacctccattgtggacacccataatactgaacaggcagcaccatctggcctgaggtcacaagtacaattcaatgtggaggttctctgtcaagagcttacagctaacatagtgaaattagaaaagatacaaaataacttacagaagttgcttgagaatggtgactgatcgaccagattgcttgggccatcggaatacctcatgtttccctttgaagaaggtgcttcctgaggcgttttgtttgagtgcaccctgctggtcagaggtgcaagcagatgagaatccagacattgcatgtggaggtctccagctcaggaaagtgaggagggaaataattttggttcttgtgcaataaaagttgaccttgactctctgaggaagattttgctgcttttgcctgaagaaaacagacccatctctggaggtctcaggaagggcccagcgaacacactctcttggataattaccacgatggcgtcagcaaacactccaccctgtgcctttttagtccttcccgccctcctgcctctcccttacacccctcttaacgactttcaaactaaaggatacatcatatactgacaaactcaatgtggtcctttcaagaattagccatgagtctcaaaaaggcaataaatggctctaagtggacaggtttgcttcaaacaagtaacatctacattttgtcttttttttttcagttctcctgttatgttctggttgaaatcacctgtgtgtcttaatttctcaattcctttttggcaagaatatcaagcaaggtgaatttaacattatgtttatgttttgttttgttgctgtaactaatagttaattggactgattcttacccagccctggtcaagaatctgtgaggcatgtgactgaagtactaaattaaacttattttgaaaccaaacctaatttttaagccaaaaggtgtaatagtgatttaatacaggatgaaaaacactgaatttttaagactgtaggtggactatgttagtagttttcaagcaggatgtctgtattcagcattcaataatgctaaaatccctttcagcatgaaatttgtatgtttttatcctttgctgactaaaataaaataactggtggtttgctaactatttaccatatgggttggctggtttttattaataattgtttagggtatcataagatctgtaagtacaaaggatattctgtttctatctgcaatgcatttgataatcatttctatgaaatgtattttatttaatcagataagctaataagcgaattggttacatcgtttgtatctgttggcctagtggacagctgtgcctggtgcacctctggcttttaataaatactcattggttgaaacaccctgctaacactgtgttttgtcagttcgtaaattcctttaaccaagacttaactatgctttttaactctttttccacctgccatctactactaccaactcacttatacttccttcctcccaagtaatcatttcaaaactaaaaaaggatttaagttcttgggttacaacggtttaaaggaaagaaaatgaactttgaagtcaaaaaaaaaagaaaaaa

SEQ ID NO: 214103 - DNA, 1299 bp, Artificial Sequence
  derived and/or modified sequence
atgaccgagctgcagcaggacgtggaggacaccaagcccgccaaggtcctgggcaaaagagaaagtaagctgggcagcgctcactccgaagcagaaaatggagtggaggaaaagaaaaaagcgtgtcggagtccaactgcgcaatccccgacaccctctgtggaggccgattcccccgatcaaaagaaaatcataagcttatggtccaaatcttcttttgacggagcaagtctggctagtgacaagaacgactgtaaaaccgagagcaagaatgatccaaaaacggaaaggaagaagagttcttcgtcctcacagtataaggctaacatgcattttcacaaactgttcctgtctgtccccactgaagagcccctgaaacagagttttacatgcgccttacaaaaagaaatcctttaccagggcaagctgttcgtatctgagaactggatttgtttccactcaaaagtcttcgggaaagacaccaagatctccattccagccttctcggtcacattaatcaaaaaaacaaagactgccctccttgtgcctaacgccctcatcatcgctaccgtgactgaccggtacatattcgtctccttattatcaagagattccacatacaagttgctcaaaagcgtatgtggacaccttgagaataccagtgttgggaatagcccaaatccgtcctcggctgaaaactcctttcgggctgaccgccctagttctctgccgctggattttaacgacgagtttagcgacttagatggcgttgttcagcagaggagacaggatatggagggctacagctctagtggatcacagacacccgaaagtgaaaattctagagacttccacgctacggagtctcagactgtcttaaatgtgagcaaaggagaagcgaaacctacacgcgcagacgcgcatgtgaacagggtgcccgagggaaaggcgaagagtttgccagtgcaggggctctctgaaacggtggggatcctgcataaagtgaagtcccaaaagtgcccgatgttgcaccatatcctgatcttctacgctatcgtggtgtgtgccctgattatctccactttttatatgagataccgcataaatactctcgaggagcagttggggctgctgaccagcattgtcgatacacacaatactgaacaagctgccccaagtgggcttcgcagccaggtacaatttaatgtcgaggtgctgtgtcaggagctcacagctaatatcgtgaaactggagaagattcagaataatctgcagaagctgttggagaacggggactag

SEQ ID NO: 214104 - DNA, 1299 bp, Artificial Sequence
  derived and/or modified sequence
atgacggagcttcagcaagatgttgaggatacaaaacctgcgaaagtgcttggcaaacgggagagcaagctaggcagtgctcactctgaggccgagaacggggtggaagagaagaaaaaagcatgccgaagtcctacggctcagtctcccacccccagcgtagaggcagatagccctgaccagaagaaaatcatcagcctgtggtctaaatcctcgtttgatggcgctagtttggcatctgacaaaaatgactgtaagaccgaatcaaaaaacgacccaaagaccgaacgcaagaaatcgagctcatctagtcagtacaaagccaatatgcatttccacaagctctttctatcagtgcccactgaggaacctttgaagcagtccttcacatgcgctctgcagaaagagatcctgtatcaggggaaactgtttgtctctgagaattggatttgctttcatagcaaggtatttggcaaggataccaaaatcagtatccccgcatttagtgtaactctgattaagaaaacaaagactgccctgctggtgccgaacgctctgataatagcgacggtgacggacagatacatctttgttagtctcttgagtcgagattctacttataagctgcttaaaagtgtgtgcgggcacctcgagaacacttcggtcggtaattcaccaaacccttcttcggcagaaaatagctttcgagccgatcgcccatcttctttgcctctggattttaatgacgagttctcagacttggatggcgtggtacaacaacggaggcaggacatggagggctactcttcttcagggtctcagacaccagagtccgagaactcccgggattttcacgcaacagagtcccagactgtcctaaacgtgagtaaaggagaggccaaaccaacccgggctgacgcccatgtaaaccgagttccagagggtaaagccaaatctctgcctgttcagggactgagcgagaccgttggcatcctgcataaggtgaagtctcagaagtgccctatgctgcaccacatcctgatcttttacgctattgtcgtgtgcgcccttattattagcaccttctacatgcgttacagaattaacactttagaggagcagctgggactactgacttcaatagtagacacacacaatactgagcaggctgctcctagtggactgagatcccaggtgcagtttaatgtcgaggtactgtgccaggagctgacagccaacattgtgaagcttgagaagatccagaacaatctgcagaaactgctcgaaaacggagactag

SEQ ID NO: 214105 - protein, 672 aa, Artificial Sequence
  derived and/or modified sequence
MSKEERPGREEILECQVMWEPDSKKNTQMDRFRAAVGAACGLALESYDDLYHWSVESYSDFWAEFWKFSGIVFSRVYDEVVDTSKGIADVPEWFKGSRLNYAENLLRHKENDRVALYIAREGKEEIVKVTFEELRQEVALFAAAMRKMGVKKGDRVVGYLPNSEHAVEAMLAAASIGAIWSSTSPDFGVNGVLDRFSQIQPKLIFSVEAVVYNGKEHNHMEKLQQVVKGLPDLKKVVVIPYVSSRENIDLSKIPNSVFLDDFLATGTSEQAPQLEFEQLPFSHPLFIMFSSGTTGAPKCMVHSAGGTLIQHLKEHLLHGNMTSSDILLCYTTVGWMMWNWMVSLLATGAAMVLYDGSPLVPTPNVLWDLVDRIGITVLVTGAKWLSVLEEKAMKPVETHSLQMLHTILSTGSPLKAQSYEYVYRCIKSSILLGSISGGTDIISCFMGHNFSLPVYKGEIQARNLGMAVEAWNEEGKAVWGESGELVCTKPIPCQPTHFWNDENGNKYRKAYFSKFPGIWAHGDYCRINPKTGGIVMLGRSDGTLNPNGVRFGSSEIYNIVESFEEVEDSLCVPQYNKYREERVILFLKMASGHAFQPDLVKRIRDAIRMGLSARHVPSLILETKGIPYTLNGKKVEVAVKQIIAGKAVEQGGAFSNPETLDLYRDIPELQGF

SEQ ID NO: 214106 - DNA, 2019 bp, Artificial Sequence
  derived and/or modified sequence
atgagcaaggaggagcgccccggtagggaggagatcctagagtgtcaagttatgtgggagcctgactctaagaagaacactcagatggataggttcagagctgctgttggggctgcttgtggcctcgcattggagtcctatgatgacctctatcactggtccgtggaaagctattctgacttttgggccgagttttggaagttctccgggatagttttctcccgtgtgtatgacgaggtcgttgatactagcaaaggtatcgccgatgtgcccgagtggtttaagggctctaggctcaattacgctgaaaatctactacggcacaaggagaacgacagagtggccttatacatcgccagggagggaaaggaggaaattgtgaaggttacttttgaagagctgcggcaggaagtagctttgtttgcagccgcaatgcggaaaatgggggttaaaaagggtgatagggttgtcggctacctccccaatagcgagcatgcagttgaagccatgctggcagcagcgtccattggggccatttggtccagcacctcccccgactttggcgtgaacggggtacttgaccgcttcagccagattcaacctaagttgatattctctgtggaagctgtcgtatacaacggcaaggaacataaccatatggagaagctgcaacaggtagtcaaaggactcccagatctcaagaaagtcgtggtgatcccttatgtctcatcccgggaaaacattgacttatccaagatccctaattccgtgtttcttgacgacttcctggccaccgggactagtgaacaagcaccccagctggagttcgaacagctgccgttctcccaccccctgttcatcatgttttccagtgggaccacaggcgccccgaagtgcatggtgcatagcgccggcggaacgctcatccagcacctgaaagaacatctcttgcacggcaacatgacgtcatcagacatcttactgtgttataccactgtcggatggatgatgtggaattggatggtgagcctgcttgcaacgggagccgcgatggtgctgtatgacggatcaccactggtaccgacaccaaacgtcctgtgggacctggtggataggataggcatcactgttctagtgacaggggcgaaatggctgagcgtacttgaggaaaaggctatgaagcccgtggaaacccatagcctgcaaatgctgcacaccatcttgtcaacaggttctccacttaaggcacagtcctacgaatacgtttaccggtgcattaaatcttctatcctgctcgggagtatcagcggtggcacagacatcatttcttgctttatgggacacaacttttccctaccagtctacaaaggtgagatccaggccagaaacctgggaatggccgtcgaagcatggaacgaggagggcaaagccgtgtggggggagagcggtgaactggtgtgcactaaaccgattccctgtcagccaactcacttttggaacgacgaaaatggcaataaatacagaaaggcctacttctctaagttcccaggaatttgggcacacggagattactgtagaataaaccctaaaacaggagggattgtcatgcttgggcgctccgacggcacactgaatcccaacggggttcggttcggatccagcgagatctataatattgtggagtccttcgaggaggtggaggactccctatgtgtgcctcagtacaacaaatacagggaggagagagtcatcctgtttctcaagatggcctctgggcacgctttccagccagacctcgtgaagcgcatccgtgatgccatccggatgggactgtcagccagacacgtgccttccctgattttggagaccaagggcatcccttacactttgaacggaaagaaagtggaggtcgccgttaaacagatcattgccggaaaagctgtcgagcagggaggagcattttccaatccggagacactagatctgtacagagatatcccggagctgcaaggattttag

SEQ ID NO: 214107 - DNA, 2019 bp, Artificial Sequence
  derived and/or modified sequence
atgagcaaggaggagaggcctggccgggaggagatcctggagtgccaggtgatgtgggagccagacagcaagaagaacacccagatggaccgcttccgggctgctgtgggcgccgcctgtggcctggccctggagagctatgatgacctgtaccactggagcgtggagagctacagcgacttctgggccgagttctggaagttctctggaattgtgttcagccgggtgtatgatgaggtggtggacaccagcaaaggaattgctgatgtgcctgagtggttcaagggcagccggctgaactatgcagagaacctgctgcggcacaaggaaaatgacagagtggccctgtacatcgcccgggagggcaaggaggagatcgtgaaggtgacctttgaggagctgcggcaggaggtggccctgtttgctgctgccatgaggaagatgggcgtgaagaagggggacagagtggtgggctacctgcccaacagcgagcacgctgtggaggccatgctggccgccgccagcatcggggccatctggagcagcaccagcccagactttggagtgaatggagtgctggaccgcttcagccagatccagcccaagctgatcttctctgtggaggccgtggtgtacaacgggaaggagcacaaccacatggagaagctgcagcaggtggtgaagggcctgcctgacctgaagaaggtggtggtgatcccctacgtgagcagccgggagaacatcgacctgagcaagatccccaacagcgtcttcctggatgacttcctggccaccggcaccagcgagcaggccccccagctggagtttgagcagctgcccttcagccaccccctcttcatcatgttcagcagcggcaccaccggggcccccaagtgcatggtgcacagcgctgggggcaccctcatccagcacctgaaggagcacctgctgcacggcaacatgaccagcagtgacatcctgctgtgctacaccaccgtgggctggatgatgtggaactggatggtgtccctgctggccactggagctgccatggtgctgtatgatggcagccccctggtgcccacccccaacgtgctgtgggacctggtggacagaattggcatcaccgtgctggtgactggagccaagtggctgtctgtgctggaggagaaggccatgaagcctgtggagacccacagcctgcagatgctgcacaccatcctgagcacaggcagccccctgaaggcccagagctatgaatatgtgtaccgctgcatcaagagcagcatcctgctgggcagcatcagcggcggcacagacatcatcagctgcttcatgggccacaacttcagcctgcctgtgtacaagggggagatccaggccaggaacctgggcatggctgtggaggcctggaatgaggagggcaaggctgtgtggggcgagagcggggagctggtgtgcaccaagcccatcccctgccagcccacccacttctggaatgatgaaaatggaaacaagtacaggaaggcctacttcagcaagtttcctggcatctgggcccatggagactactgccgcatcaaccccaagacaggaggcatcgtgatgctgggccgcagtgatggcaccctgaaccccaatggagtgcgcttcggcagcagcgagatctacaacatcgtggagagctttgaggaggtggaggacagcctgtgtgtgccccagtacaacaagtaccgggaggagagggtcatcctcttcctgaagatggccagcggccacgccttccagcctgacctggtgaagaggatcagagatgccatccgcatgggcctgagcgcccggcacgtgcccagcctcatcctggagaccaagggcatcccctacaccctgaatggcaagaaggtggaggtggccgtgaagcagatcatcgccggcaaggctgtggagcagggcggggccttcagcaaccctgagaccctggacctgtacagagacatccctgagctgcagggcttctag

SEQ ID NO: 214108 - DNA, 2019 bp, Artificial Sequence
  derived and/or modified sequence
atgagcaaggaggagcggcccggccgggaggagatcctggagtgccaggtgatgtgggaaccggacagcaagaaaaatacccagatggaccggtttagggctgccgtcggggcagcctgtggcctcgccctggagtcctacgacgatctctatcactggtcagtcgagagttacagtgatttctgggccgagttctggaagtttagtggtatagttttctcccgcgtttatgatgaagtggtagacacttcgaagggaatcgcggacgttccggagtggttcaagggctctagactgaattatgccgaaaatctgctgagacacaaggaaaatgacagagtggcactttatatcgcacgggaaggaaaggaggagattgtgaaggtcacttttgaagagcttcgccaggaggtggctctgtttgcagctgccatgcggaaaatgggagtcaaaaaaggtgatcgcgtggtggggtatctgcccaactctgagcacgccgtggaagcgatgctagcagcagccagcatcggagcgatatggagctcaacatcaccggactttggggtgaacggcgtgctggatagattcagtcaaatccagcccaagctcatcttctccgtggaggcagttgtctataatggaaaggagcacaaccacatggagaagctgcagcaggtagtaaaagggctacctgacctgaagaaagtggtggtcatcccatatgtttcaagtagggaaaacattgatttgtctaagatcccaaactcagtttttcttgacgattttctcgcaaccggaactagcgagcaggcaccccaactcgagttcgaacagctgccattcagccacccccttttcattatgttcagtagcgggaccactggcgctcccaaatgcatggtgcattcggccggcggcactttgatacagcatctgaaggaacacttgctgcatggcaacatgacaagcagcgacatccttttgtgctacaccacggtcgggtggatgatgtggaactggatggtgagtcttctcgccaccggcgcggctatggtcctctacgacggtagccctcttgttcccacgcctaatgtcttatgggacctggtggaccgaattggcattacagtcctggtgacaggtgcgaagtggttatcggtgttggaagaaaaggccatgaagcctgtcgaaacccactcccttcagatgctccacactattctgtcaactggaagtcccttaaaggcccagtcctacgagtatgtgtataggtgtataaagtcctctatcctccttggcagtatttccggcggtaccgatattatttcatgcttcatgggacacaacttttctcttcccgtatacaagggagagatacaagctagaaatctgggaatggctgttgaagcctggaacgaggaggggaaagcggtttggggggagtctggcgaacttgtgtgcacaaagccgatcccatgtcagccaacgcacttctggaatgacgaaaatggaaataaataccgcaaggcctatttcagtaagtttcccggaatctgggcccacggtgactattgccgtataaatcctaaaacgggaggtatcgtgatgttgggccgctccgatgggacccttaacccgaacggcgtgcggttcgggtcctccgagatatacaacatagtcgagagttttgaagaggtggaggactcactgtgcgtgcctcaatataacaaataccgcgaagagagggtcatcctcttcctcaaaatggcttcaggtcacgcttttcagcccgacctggtcaaacgcatacgcgacgcaattaggatgggactcagcgccaggcacgtaccttccctgattctggaaaccaagggtatcccatacactcttaacgggaagaaagttgaggttgctgtcaaacagataattgcaggaaaagccgtggagcagggaggggcattttccaatccagagaccctggacctatatcgagatatcccagaactgcaaggattttag

SEQ ID NO: 214109 - DNA, 2019 bp, Artificial Sequence
  derived and/or modified sequence
atgtccaaggaagagcggcctggacgcgaggagattttggagtgtcaggtgatgtgggagcccgacagtaaaaaaaacacccagatggacagatttagagccgcagttggcgcagcttgtggattggctcttgagtcttacgatgacctgtaccattggtcagtcgaatcctattcagatttttgggccgaattctggaagttttcagggattgtgttctcaagggtctacgacgaagttgtggacaccagtaagggtatcgctgatgtgcctgagtggtttaaggggtcacggctgaactatgcagagaatttgctccgccacaaagagaacgatagagtagcgctttacatagccagagagggcaaagaagagatcgttaaagtgacctttgaagagttgcggcaggaggtggccctcttcgccgcagccatgcggaaaatgggagtgaaaaagggagatcgcgtggtgggatatttgcccaatagtgagcatgctgtagaagcgatgctcgccgctgcgtccatcggggctatttggtcatctaccagcccggactttggagttaatggcgtgctcgatcggttctcccagatccagccaaaactcatttttagtgtcgaagccgtggtttataacggcaaagaacataaccatatggagaaactccagcaggtggtgaaggggctgcctgatctcaagaaggttgtggtgattccatacgtcagctcccgagagaatattgatctgtcgaagatccctaactctgtgttcctcgacgacttcttggcaacaggaacctcagagcaagctccacagctggaatttgaacagctccccttcagccaccccctgtttatcatgtttagtagcggaacaacaggtgcccctaaatgcatggtccacagtgctggcggtactctaatacagcacctaaaagaacatcttctgcacggcaacatgacatctagcgacattcttctgtgctatacgaccgtcggctggatgatgtggaattggatggtgtcactattggctaccggagccgcaatggtactatatgacggttccccattggtgcccacgccaaatgttctgtgggatcttgtggatcgtatcggcatcaccgtcctggttactggtgctaagtggttgagcgtgttggaagaaaaagccatgaaacccgtggagactcactccctgcaaatgctgcacaccatactatctacaggttcccctctgaaagcacagagttatgaatacgtctaccggtgtatcaagagtagtattctgcttggaagcatctccggcggaaccgatatcatctcctgcttcatgggtcataatttctccctacccgtctataaaggtgagattcaggcacgaaacctggggatggccgtcgaggcttggaacgaagaggggaaggccgtatggggtgaatccggcgagttggtctgtaccaagcctattccgtgtcagcctacgcatttctggaatgatgagaacggtaacaagtacaggaaggcgtatttttctaaatttcctgggatttgggcccacggtgattattgtcggatcaacccaaaaaccggcggaattgttatgcttggaaggtccgacggaacattgaatcccaacggcgtgagattcggctcctctgagatttataatattgtagaatccttcgaggaggtggaggacagcctgtgtgtgccgcaatacaacaaataccgcgaggaaagggtgattctctttctgaagatggcgtcaggtcatgccttccagcctgatctggtaaaaaggatccgagacgctattcggatgggactgtccgcgaggcacgtaccgagcttaattcttgaaaccaaaggtattccgtacactctgaacggaaaaaaagtcgaggtcgcggtcaaacaaataattgcaggcaaggccgtagaacagggaggtgccttctccaatccagaaactctcgacttatatcgcgatataccggaactgcagggtttctag

SEQ ID NO: 214110 - DNA, 3316 bp, Artificial Sequence
  derived and/or modified sequence
ggcctgcggggcggggcctgggccaagcggcccgcaggaggcggcggcggccgttcagtcccttgttccccgccgccgccgtcgctgacccagcccgccaggcgctcctgaccgtcgcttcctccggtcccaggtccccggccctcgcctcagccccggcccctggtccccagccctcgtcgcagccccggccgcccgccgccgccatgtccaaggaggagcgccccggtcgggaggagatcctggagtgccaggtgatgtgggagcctgacagtaagaagaacacgcagatggaccgcttccgggcggctgtgggcgccgcctgcggcctggcgctggagagttatgatgacttgtaccattggtccgttgagtcatattcagacttctgggcagagttctggaaattcagtggaattgtcttctcacgtgtgtatgatgaggttgtggacacatcgaaaggaatcgcagatgtccccgagtggttcaaaggcagtcggctcaactatgcagaaaacctcctgcggcacaaagagaatgacagagttgccctttacattgcaagggaaggcaaagaggaaattgtgaaggtgacttttgaagagctgaggcaagaagtggctttgtttgcagcagcaatgaggaaaatgggtgtgaagaaaggagatcgggttgttggttatttacccaacagtgagcacgctgtcgaggcgatgctggctgcggcaagcattggtgccatctggagctccacgtccccggacttcggtgtgaatggtgtgctggaccggttttctcaaattcagccaaagctcatcttctctgtggaggctgttgtctataatggcaaagagcacaaccacatggaaaagctgcagcaggtggttaaaggcctaccagacttgaagaaagtggtggtgattccttatgtgtcctccagagagaacatagacctttcaaagattccaaacagtgtgtttctggatgactttcttgccaccggcaccagtgagcaggccccgcagctggagttcgagcagctgcccttcagccacccactgttcatcatgttctcatcgggcaccacgggcgcacccaagtgcatggtgcattccgctgggggcaccctcatccagcatctgaaggagcacctgctgcacggcaacatgaccagcagtgacatcctcctgtgctacaccacggtcggctggatgatgtggaactggatggtgtcccttctggccacaggagcggccatggtcttgtacgatggctcccccctggtgcccacgcccaatgtgctctgggacctggttgacaggataggcatcactgtcctggtaactggggccaagtggctgtcagtgctggaagagaaggccatgaagccggtggaaacccacagtctccagatgctccacacgatcctgtccactggctccccactgaaagcccagagctacgagtatgtctacaggtgcatcaagagcagcatcctcctgggctccatctcaggaggcaccgacatcatctcctgcttcatgggccacaatttttctcttcctgtgtataaaggggagattcaggcccggaacctgggcatggccgtggaagcgtggaacgaggaaggaaaggcggtctggggagagagcggcgagctggtgtgtactaagccgatcccttgccagcccacacacttctggaacgatgagaacggcaacaagtacaggaaggcgtatttctccaaattcccaggtatctgggctcatggcgactactgcagaatcaaccccaagaccgggggcatcgtcatgcttggccggagtgacggcaccctcaaccccaacggggtgcggttcggcagctcggaaatctataacattgtggaatccttcgaggaggtggaggacagcctgtgtgtcccccagtataacaagtacagggaggagagggtgatcctcttcctgaagatggcctccgggcacgccttccagcctgacttggttaagaggatccgtgacgccatccgcatgggcttgtctgcgcgacacgtgcccagcctcatcctggaaaccaagggcatcccgtatacgctcaacggcaagaaagtggaagttgccgtcaaacagatcatcgctggaaaagccgtggagcaaggaggtgctttctcgaaccccgagaccctggatctgtaccgggacatccctgagctgcagggcttctgagtcagactggctggcgtgtcactcagccgcacccgtgtgcactgtaacttttgtgtgctcaagaaattatacagaaacctacagctgttgtaaaaggatgctcgcaccaagtgttctgtaggcttggggagggatcgtttctctgttttgttaaatctggtgggtacctggatcttccacacgagtgggattctggccttcagagaccaggagggagtgtctgggccgcaggtgtggcactgtggtgagagtgtgtgtctttgcacacacagtgcagcgggaacggtggggctggctggtgctgaagacagacacactcctgagccaaggtcttgtcttcaacctccccgtcccgttgtcccattttgctctgtgaaggtgcaaatccctttcttcccttcccatctcaggctctcctgttttccctcagggtccagtatgcctttgagctttagctgttagaaaggaacccccgtgacttgacacagctttcacagctggctgctaggaccggcgggctgggtgttcacgtgtgtctgtgtcatggatgcaatgcaggccctggaggactgtgcgtcacccgtcaaccagagcgtgcctccgggccagcttccctccaaggaatgagtggatttcatacaggatctctttattgcacagactgaatggctttacatgtttctaatgtgaattaggcatgtgaagcagtgggtgtccacccgtgtccctcatgggtgagccctccagctgtgagcccaggcagtgtggtcaccgagtgaggaccctcctcaccaggaaccgcatccctgtgctgcctccacctgagagttgctagggggttcttgtcgagatcatgtcatcagcacccctaagtcaagtcacgggtttccatagccaggcagttggtatgtacaattcagttcagcgtatgaacttgtatctctaatctgatgtccatttttatattttttgaaactgagcacaatgaaatcctttcttgaatcattttccttttggattataaaaatatgggggaaagtgctatgatgaattttatgcaataaatgtatacatgtgtgcacatgcaccca

SEQ ID NO: 214111 - DNA, 2019 bp, Artificial Sequence
  derived and/or modified sequence
atgagcaaggaggagagacccggcagagaggagatcctggagtgccaggtgatgtgggagcccgacagcaagaagaacacccagatggacagattcagagccgccgtgggcgccgcctgcggcctggccctggagagctacgacgacctgtaccactggagcgtggagagctacagcgacttctgggccgagttctggaagttcagcggcatcgtgttcagcagagtgtacgacgaggtggtggacaccagcaagggcatcgccgacgtgcccgagtggttcaagggcagcagactgaactacgccgagaacctgctgagacacaaggagaacgacagagtggccctgtacatcgccagagagggcaaggaggagatcgtgaaggtgaccttcgaggagctgagacaggaggtggccctgttcgccgccgccatgagaaagatgggcgtgaagaagggcgacagagtggtgggctacctgcccaacagcgagcacgccgtggaggccatgctggccgccgccagcatcggcgccatctggagcagcaccagccccgacttcggcgtgaacggcgtgctggacagattcagccagatccagcccaagctgatcttcagcgtggaggccgtggtgtacaacggcaaggagcacaaccacatggagaagctgcagcaggtggtgaagggcctgcccgacctgaagaaggtggtggtgatcccctacgtgagcagcagagagaacatcgacctgagcaagatccccaacagcgtgttcctggacgacttcctggccaccggcaccagcgagcaggccccccagctggagttcgagcagctgcccttcagccaccccctgttcatcatgttcagcagcggcaccaccggcgcccccaagtgcatggtgcacagcgccggcggcaccctgatccagcacctgaaggagcacctgctgcacggcaacatgaccagcagcgacatcctgctgtgctacaccaccgtgggctggatgatgtggaactggatggtgagcctgctggccaccggcgccgccatggtgctgtacgacggcagccccctggtgcccacccccaacgtgctgtgggacctggtggacagaatcggcatcaccgtgctggtgaccggcgccaagtggctgagcgtgctggaggagaaggccatgaagcccgtggagacccacagcctgcagatgctgcacaccatcctgagcaccggcagccccctgaaggcccagagctacgagtacgtgtacagatgcatcaagagcagcatcctgctgggcagcatcagcggcggcaccgacatcatcagctgcttcatgggccacaacttcagcctgcccgtgtacaagggcgagatccaggccagaaacctgggcatggccgtggaggcctggaacgaggagggcaaggccgtgtggggcgagagcggcgagctggtgtgcaccaagcccatcccctgccagcccacccacttctggaacgacgagaacggcaacaagtacagaaaggcctacttcagcaagttccccggcatctgggcccacggcgactactgcagaatcaaccccaagaccggcggcatcgtgatgctgggcagaagcgacggcaccctgaaccccaacggcgtgagattcggcagcagcgagatctacaacatcgtggagagcttcgaggaggtggaggacagcctgtgcgtgccccagtacaacaagtacagagaggagagagtgatcctgttcctgaagatggccagcggccacgccttccagcccgacctggtgaagagaatcagagacgccatcagaatgggcctgagcgccagacacgtgcccagcctgatcctggagaccaagggcatcccctacaccctgaacggcaagaaggtggaggtggccgtgaagcagatcatcgccggcaaggccgtggagcagggcggcgccttcagcaaccccgagaccctggacctgtacagagacatccccgagctgcagggcttctag

SEQ ID NO: 214112 - protein, 847 aa, Artificial Sequence
  derived and/or modified sequence
MSFSEMNRRTLAFRGGGLVTASGGGSTNNNAGGEASAWPPQPQPRQPPPPAPPALQPPNGRGADEEVELEGLEPQDLEASAGPAAGAAEEAKELLLPQDAGGPTSLGGGAGGPLLAERNRRTLAFRGGGGGGLGNNGSSRGRPETSVWPLRHFNGRGPATVDLELDALEGKELMQDGASLSDSTEDEEEGASLGDGSGAEGGSCSSSRRSGGDGGDEVEGSGVGAGEGETVQHFPLARPKSLMQKLQCSFQTSWLKDFPWLRYSKDTGLMSCGWCQKTPADGGSVDLPPVGHDELSRGTRNYKKTLLLRHHVSTEHKLHEANAQESEIPSEEGYCDFNSRPNENSYCYQLLRQLNEQRKKGILCDVSIVVSGKIFKAHKNILVAGSRFFKTLYCFSNKESPNQNNTTHLDIAAVQGFSVILDFLYSGNLVLTSQNAIEVMTVASYLQMSEVVQTCRNFIKDALNISIKSEAPESVVVDYNNRKPVNRDGLSSSRDQKIASFWATRNLTNLASNVKIENDGCNVDEGQIENYQMNDSSWVQDGSPEMAENESEGQTKVFIWNNMGSQGIQETGKTRRKNQTTKRFIYNIPPNNETNLEDCSVMQPPVAYPEENTLLIKEEPDLDGALLSGPDGDRNVNANLLAEAGTSQDGGDAGTSHDFKYGLMPGASNDFKYGLLPESWPKQETWENGESSLIMNKLKCPHCSYVAKYRRTLKRHLLIHTGVRSFSCDICGKLFTRREHVKRHSLVHKKDKKYKCMVCKKIFMLAASVGIRHGSRRYGVCVDCADKSQPGGQEGVDQGQDTEFPRDEEYEENEVGEADEELVDDGEDQNDPSRWDESGEVCMSLDD

SEQ ID NO: 214113 - DNA, 2544 bp, Artificial Sequence
  derived and/or modified sequence
atgagcttcagcgagatgaacagaagaaccctggccttcagaggcggcggcctggtgaccgccagcggcggcggcagcaccaacaacaacgccggcggcgaggccagcgcctggcccccccagccccagcccagacagccccccccccccgccccccccgccctgcagccccccaacggcagaggcgccgacgaggaggtggagctggagggcctggagccccaggacctggaggccagcgccggccccgccgccggcgccgccgaggaggccaaggagctgctgctgccccaggacgccggcggccccaccagcctgggcggcggcgccggcggccccctgctggccgagagaaacagaagaaccctggccttcagaggcggcggcggcggcggcctgggcaacaacggcagcagcagaggcagacccgagaccagcgtgtggcccctgagacacttcaacggcagaggccccgccaccgtggacctggagctggacgccctggagggcaaggagctgatgcaggacggcgccagcctgagcgacagcaccgaggacgaggaggagggcgccagcctgggcgacggcagcggcgccgagggcggcagctgcagcagcagcagaagaagcggcggcgacggcggcgacgaggtggagggcagcggcgtgggcgccggcgagggcgagaccgtgcagcacttccccctggccagacccaagagcctgatgcagaagctgcagtgcagcttccagaccagctggctgaaggacttcccctggctgagatacagcaaggacaccggcctgatgagctgcggctggtgccagaagacccccgccgacggcggcagcgtggacctgccccccgtgggccacgacgagctgagcagaggcaccagaaactacaagaagaccctgctgctgagacaccacgtgagcaccgagcacaagctgcacgaggccaacgcccaggagagcgagatccccagcgaggagggctactgcgacttcaacagcagacccaacgagaacagctactgctaccagctgctgagacagctgaacgagcagagaaagaagggcatcctgtgcgacgtgagcatcgtggtgagcggcaagatcttcaaggcccacaagaacatcctggtggccggcagcagattcttcaagaccctgtactgcttcagcaacaaggagagccccaaccagaacaacaccacccacctggacatcgccgccgtgcagggcttcagcgtgatcctggacttcctgtacagcggcaacctggtgctgaccagccagaacgccatcgaggtgatgaccgtggccagctacctgcagatgagcgaggtggtgcagacctgcagaaacttcatcaaggacgccctgaacatcagcatcaagagcgaggcccccgagagcgtggtggtggactacaacaacagaaagcccgtgaacagagacggcctgagcagcagcagagaccagaagatcgccagcttctgggccaccagaaacctgaccaacctggccagcaacgtgaagatcgagaacgacggctgcaacgtggacgagggccagatcgagaactaccagatgaacgacagcagctgggtgcaggacggcagccccgagatggccgagaacgagagcgagggccagaccaaggtgttcatctggaacaacatgggcagccagggcatccaggagaccggcaagaccagaagaaagaaccagaccaccaagagattcatctacaacatcccccccaacaacgagaccaacctggaggactgcagcgtgatgcagccccccgtggcctaccccgaggagaacaccctgctgatcaaggaggagcccgacctggacggcgccctgctgagcggccccgacggcgacagaaacgtgaacgccaacctgctggccgaggccggcaccagccaggacggcggcgacgccggcaccagccacgacttcaagtacggcctgatgcccggcgccagcaacgacttcaagtacggcctgctgcccgagagctggcccaagcaggagacctgggagaacggcgagagcagcctgatcatgaacaagctgaagtgcccccactgcagctacgtggccaagtacagaagaaccctgaagagacacctgctgatccacaccggcgtgagaagcttcagctgcgacatctgcggcaagctgttcaccagaagagagcacgtgaagagacacagcctggtgcacaagaaggacaagaagtacaagtgcatggtgtgcaagaagatcttcatgctggccgccagcgtgggcatcagacacggcagcagaagatacggcgtgtgcgtggactgcgccgacaagagccagcccggcggccaggagggcgtggaccagggccaggacaccgagttccccagagacgaggagtacgaggagaacgaggtgggcgaggccgacgaggagctggtggacgacggcgaggaccagaacgaccccagcagatgggacgagagcggcgaggtgtgcatgagcctggacgactag

SEQ ID NO: 214114 - DNA, 2544 bp, Artificial Sequence
  derived and/or modified sequence
atgagtttctccgagatgaatcgacgcaccttagctttcaggggcggcggcctggttaccgctagcggcggtggcagcactaataacaatgccggtggcgaggctagtgcctggccgccacagccccagccaagacagcccccgcctcccgcgccaccagcgcttcagcctcccaacggccgcggtgcagatgaggaggtcgagcttgagggcttggaacctcaggaccttgaagcatccgccggccctgccgccggtgcagcagaggaagccaaagagctgttattgccccaggacgccgggggacccactagtctcggggggggtgctggcgggcctctcctggcggaacggaatagaaggacactggcttttagaggtggaggcggcggggggttggggaacaacggctcaagccgcgggcggcctgagacaagtgtttggccactgcgccacttcaatggaaggggccccgctacagtagacctcgagttagacgctctggagggcaaagagctgatgcaagatggagcttctctgtctgacagcacagaagatgaggaagagggcgcctcactgggggacggatcaggggctgaaggaggatcatgttcatccagtaggcgaagcggaggtgatgggggcgatgaggtggagggctctggagtgggcgccggtgaaggtgaaacagtgcagcacttccctcttgcaaggccaaagtcgctcatgcagaaattgcagtgctccttccagacatcttggctgaaggacttcccttggctccgttacagcaaagacacaggcctcatgtcctgcggatggtgtcagaagactccagctgacggggggagtgtggacctcccgcctgtcggacatgatgagctcagtcgtggcacgcggaattacaagaagaccttgctgctcaggcatcatgtttccaccgagcataagctacatgaagcaaacgcccaagaatcagagattcctagcgaagagggctattgcgactttaattcacgtcctaacgagaattcatactgctaccaactcttgcggcagctgaacgagcaaagaaaaaaaggaatcctctgcgacgtgagcatcgtggtgtctggtaagatcttcaaggcacataagaatattcttgttgcaggctcgcgtttcttcaaaacactgtactgcttctctaataaggagtctcccaatcagaacaacacgacccatctggatatcgcagctgtccaaggatttagcgttattctggactttctttactcaggaaatttggtgttgactagccagaatgccattgaggtgatgactgtggcatcctacctgcagatgtcagaagtggtccagacctgccgcaattttattaaagacgcgctgaatattagcataaagtccgaggcccctgaatctgtggtggtggactataacaaccgcaagccagtcaacagagatggcctcagttccagtagagatcagaaaatcgcttcattctgggcaacccgtaatttgacaaatctcgcttcgaatgtgaaaattgagaacgatggatgtaatgtcgatgagggacagatcgagaactatcagatgaacgacagcagctgggtgcaggacggaagtcctgagatggctgagaacgagtccgagggacagactaaagtctttatttggaacaatatgggcagtcagggaattcaggaaaccggcaaaacccggcgaaagaaccagacgacaaaacgcttcatctataatatcccacccaataacgaaactaatctagaagactgctcagtcatgcagcctcccgtcgcctaccctgaggagaataccttgttaattaaagaggaaccagatctggacggcgcgctattgtctggccctgatggagataggaatgtgaatgcgaacctgctggccgaagccgggacatcacaggacggcggggatgctggcaccagccatgattttaaatacggtctcatgcccggggccagcaacgatttcaagtacggcttgcttccggaaagctggcccaaacaggaaacgtgggaaaacggggaatcctcactcataatgaacaagctcaagtgtccacattgctcttacgtcgctaagtatagaaggacccttaagcgccatctactcatccataccggcgtgcgctcgttctcatgcgacatttgtggcaaattgtttacacgccgcgagcatgtgaagcggcattctctggtgcataaaaaagataagaagtataaatgcatggtctgcaagaagatatttatgttggctgcttccgtcggcataagacatggttcccgacgatacggggtctgcgttgactgcgctgataagagtcagcctggcggtcaggaaggggtggatcagggccaggacaccgagtttccaagggatgaggagtatgaagaaaacgaagtgggcgaagcagatgaggagcttgtggacgacggtgaggaccaaaatgacccttcgcggtgggatgaatcaggcgaagtgtgcatgtctctcgacgattag

SEQ ID NO: 214115 - DNA, 2544 bp, Artificial Sequence
  derived and/or modified sequence
atgtccttcagcgagatgaacagaaggaccctggccttccggggcggcggcctggtgacagccagcggcggcggcagcaccaacaacaatgccggcggggaggccagcgcctggccaccccagccccagccccggcagcccccacctccagcccccccagccctgcagcccccaaatggaagaggagcagatgaggaggtggagctggagggcctggagccccaggacctggaggccagcgctggccctgctgctggagctgctgaggaggccaaggagctgctgctgccccaggatgctgggggccccaccagcctgggcggcggggccggcggccccctgctggccgagaggaacagaaggaccctggccttccggggcggcggcggcggcggcctgggcaacaacggcagcagccggggccggcctgagacctctgtgtggcccctgcggcacttcaacggccggggccctgccaccgtggacctggagctggatgccctggagggcaaggagctgatgcaggatggagccagcctgagtgacagcacagaagatgaggaggagggcgccagcctgggagatggcagcggggctgagggcggcagctgcagcagcagccgccgctctggaggagatggaggagatgaggtggagggcagcggcgtgggcgctggggagggggagaccgtgcagcacttccccctggcccggcccaagagcctgatgcagaagctgcagtgcagcttccagacctcctggctgaaggacttcccctggctgcgctacagcaaggacaccggcctgatgagctgtggctggtgccagaagaccccagcagatggcggctctgtggacctgccccctgtgggccatgatgagctgagccggggcaccaggaactacaagaagaccctgctgctgcggcaccacgtgtccacagagcacaagctgcacgaggccaatgcccaggagagcgagatccccagcgaggagggctactgtgacttcaacagccggcccaatgaaaattcctactgctaccagctgctgcggcagctgaatgagcagaggaagaagggcatcctgtgtgatgtgtccatcgtggtgtctgggaagatcttcaaggcccacaagaacatcctggtggccggcagccgcttcttcaagaccctgtactgcttcagcaacaaggagagccccaaccagaacaacaccacccacctggacattgctgctgtgcagggcttcagcgtcatcctggacttcctgtacagcggcaacctggtgctgaccagccagaatgccatcgaggtgatgacagtggccagctacctgcagatgtctgaggtggtgcagacctgcaggaacttcatcaaggatgccctgaacatcagcatcaagtctgaggcccctgagagcgtggtggtggactacaacaacaggaagcctgtgaacagagatggcctgagcagcagccgggaccagaagatcgccagcttctgggccaccaggaacctgaccaacctggccagcaatgtgaagattgaaaatgatggctgcaatgtggatgagggccagatcgagaactaccagatgaatgacagctcctgggtgcaggacggcagccctgagatggccgagaatgaaagtgagggccagaccaaggtgttcatctggaacaacatgggcagccagggcatccaggagaccgggaagaccaggaggaagaaccagaccaccaagcgcttcatctacaacatcccccccaacaatgagaccaacctggaggactgcagcgtgatgcagccccctgtggcctacccagaggagaacaccctgctgatcaaggaggagccagacctggatggagccctgctgagcggcccagatggagacagaaatgtgaatgccaacctgctggccgaggccggcaccagccaggatggaggagatgctggcaccagccatgacttcaagtatggcctgatgcctggggccagcaatgacttcaagtatggcctgctgcctgagagctggcccaagcaggagacctgggagaatggagagagcagcctcatcatgaacaagctgaagtgcccccactgcagctatgtggccaagtacagaaggaccctgaagaggcacctgctgatccacactggagtgcgctccttcagctgtgacatctgtgggaagctgttcacccggcgggagcacgtgaagaggcacagcctggtgcacaagaaggacaagaagtacaagtgcatggtgtgcaagaagatcttcatgctggccgcctctgtgggcatcagacatggcagccgccgctatggagtgtgtgtggactgtgccgacaagagccagcccggcggccaggagggcgtggaccagggccaggacacagagttccccagagatgaggagtatgaggagaatgaggtgggggaggctgatgaggagctggtggatgatggagaggaccagaatgaccccagccgctgggatgagagcggggaggtgtgcatgagcctggatgactag

SEQ ID NO: 214116 - DNA, 2544 bp, Artificial Sequence
  derived and/or modified sequence
atgagcttcagcgagatgaaccggcggaccctggccttccggggcggaggactggtcacagcctcaggaggaggttcaaccaacaataatgccgggggggaagcatccgcttggccgccccaaccacaaccaaggcagccacccccccccgcgccacccgcattgcagccgccgaacggccgcggcgcagacgaagaagtggagcttgaaggcctagagccacaggacttggaagccagtgctggccccgcagcgggagccgccgaggaagcgaaagagctgttgctgcctcaggacgcgggtgggccaacgtctctcggaggtggtgccggtggacctctactggcagagcgcaacagacgtacactagcttttcgcggcggaggtggcggcggacttggtaataatgggtcaagcagaggacgcccagagacctctgtgtggcccctgagacacttcaatggcagaggtccggcgaccgtagatctggagctggatgcactggaggggaaagagctcatgcaggacggcgccagcctctccgatagcactgaggatgaggaagaaggtgcgagcttaggggacggaagtggcgctgaaggcgggagctgttctagctcccgccgctccgggggcgacggtggtgatgaggtcgaaggctctggtgtgggcgccggcgagggagagactgtgcagcatttcccattagcacggccaaagtcgttaatgcagaagctacagtgttctttccagacttcctggctgaaggacttcccatggctccgttattcaaaagacaccggcctcatgtcttgcggctggtgtcagaagactccagccgatggcgggagtgtcgacttaccaccggtaggccacgacgagctcagcagaggaaccaggaattacaaaaagactctcctcctcagacaccatgtgtctacagaacataagctgcacgaagcaaacgcacaggagagtgagattccttcggaggagggctactgtgacttcaactcccgtccaaacgaaaattcttactgctaccagctgctgcgacaactgaatgaacagagaaagaaggggatcctttgcgatgtcagtattgtggtgtctggcaagatttttaaagcccataagaacatattggttgccggaagtcgtttttttaaaaccctgtactgtttctcaaataaagagagccccaaccagaacaacaccacccatctcgacattgccgccgtgcagggcttctctgtcatccttgatttcctttattctggtaatctggtactgacatcgcaaaacgccatcgaggtaatgactgtggcgtcctacctgcagatgtctgaggtggtacagacgtgtcgcaattttatcaaggacgctctcaacattagtattaagtcggaggcccccgaatctgtggttgtggattacaacaaccgcaaacccgtgaatcgcgacggcctcagcagttctcgggaccaaaagatcgcatcattctgggcaacccggaatctgaccaatctggcttcaaacgttaaaatcgagaacgatggctgcaacgtggacgagggtcagattgaaaactaccagatgaatgattcttcttgggtgcaggatggctcacctgagatggccgagaacgagtctgaagggcagactaaggtgtttatatggaacaatatgggcagccagggtattcaagagacaggaaagacaagacgaaagaatcagacgacgaagcgatttatatataatattccacctaacaatgagaccaacctcgaggattgttcagtaatgcaacctccagtggcatatccagaagaaaacaccctcttaatcaaggaagagcccgacctggacggagcactcctttctggccccgatggggatagaaatgtaaacgccaacctccttgccgaggccggaacatcgcaagacggcggtgacgctggaactagccacgatttcaagtacgggctgatgcccggcgcatctaatgacttcaagtacggtcttctgcccgagagctggccaaagcaggaaacctgggagaatggtgagtcctcccttatcatgaataaactcaagtgtccccactgtagttatgtggctaaatatagacggactttgaagcgccaccttctgattcacactggagtccgctctttcagctgtgatatctgtggtaagctgtttactagacgggaacacgtgaaacgccactcgctggtccacaagaaggacaagaagtacaaatgcatggtgtgtaaaaagatctttatgttggcagcttccgttggtattagacacggatccaggcggtatggggtgtgcgtggactgtgctgacaagagccagcctggcggccaggaaggagtcgatcagggccaggacaccgagttcccaagggatgaggagtacgaggaaaatgaggttggcgaggctgacgaagaactggtggacgatggcgaggatcagaacgatccatcaagatgggacgagtctggggaggtttgcatgtctctggacgattag

SEQ ID NO: 214117 - DNA, 2544 bp, Artificial Sequence
  derived and/or modified sequence
atgtcatttagcgagatgaacaggagaactctcgcgtttcgtggcggaggtctggtcaccgcttccggtggcggatcaactaacaacaacgcaggtggggaggcttccgcctggccccctcagccacaaccacgccagcctccccctcccgctccgcctgctctccagccacctaacggtcgaggcgctgacgaggaagtggagcttgaagggttggaaccacaggacctcgaggcaagtgccggtccggctgccggtgcggcagaagaggccaaagaacttctcctgccccaggatgctgggggacccacgtcgctcgggggaggggcaggcggaccgttgttggccgaacggaaccggaggaccctggcctttcgcggaggaggtggtggaggcctgggtaataacggaagctctaggggacggcctgagacgtcggtttggcctctacgacactttaatgggcgaggcccagcaaccgtcgatctcgagctggatgcactcgaaggtaaggagctcatgcaagatggagcatccttaagtgactccaccgaggacgaggaggagggggcttccttaggcgacggcagcggcgcagagggtgggagttgctctagctctcgcagaagcggcggagacggaggcgatgaagtggagggcagcggcgtgggcgctggggagggagagaccgtgcagcactttcctctcgctaggcctaagtcactgatgcaaaaacttcagtgttcgtttcagacctcctggctgaaagactttccctggctgagatattcaaaggacacgggcttaatgtcatgcggatggtgtcagaagactccagcagatggaggtagtgtggatctccctccggtgggccacgatgaactcagccggggtaccagaaattacaaaaaaactttactgcttaggcatcatgtgtcgacagagcataagcttcacgaagccaatgcccaagagagtgagatcccttctgaagagggctattgcgacttcaactcgcggccaaacgagaattcttattgctaccagctgctcagacagctgaacgaacagaggaagaaggggattctctgtgatgtctccatcgtggtgtcaggtaagatctttaaagcccataagaacatcttagtggcaggctcacgcttctttaaaacattatactgcttctcaaataaggagtccccaaatcagaataacacgacgcacctcgacattgcagcagtgcaaggatttagcgtgatcctggatttcctgtactctggcaatctggtgctgaccagccagaatgcaatcgaagtcatgacagtggcatcgtaccttcaaatgtctgaagtcgttcagacctgtcgtaactttattaaagacgctctgaacatatcaatcaaatctgaagccccagagtccgtggtggtggattacaacaatagaaagcccgtgaatcgcgatggtctcagctcctcccgcgaccagaagatcgcctccttctgggccacaagaaacctaacgaacctggcttccaatgtaaagatcgaaaacgatgggtgcaacgtggatgaaggccagatcgagaactatcagatgaatgattcctcatgggtgcaggacgggtctcctgaaatggcagagaacgagtccgagggccaaacaaaggtgtttatttggaacaacatggggagccagggtatccaagagacaggtaagacccgaaggaagaaccagaccacgaagaggttcatctataatatcccccctaacaatgagaccaatctcgaagattgttcagtgatgcagccacccgtggcataccctgaagagaatacgttacttatcaaggaagagcctgacctcgatggagcactgctgtccggccctgacggagatagaaacgtgaacgccaacctcctcgcagaggctggtacctcacaagatggcggagacgcagggactagccacgatttcaagtacggtctcatgccaggtgcttctaatgactttaaatatggcctcttgccagagagctggcctaaacaggagacttgggaaaacggcgagagttctttgattatgaacaaactcaagtgccctcattgttcttacgtagctaaatacagacgcacactaaagaggcaccttctgatacacacaggcgtacgcagcttcagttgcgatatatgtggcaaacttttcacacggagggagcacgtaaagcggcattctcttgtgcacaagaaggataaaaaatacaagtgcatggtctgtaaaaagattttcatgcttgctgcatctgtaggcatacgccacggcagtcgtcgctatggcgtctgtgttgactgtgctgacaaatcccagcctggaggtcaggagggggtagaccaaggccaggataccgaattccctcgcgatgaagagtatgaagaaaatgaggttggagaggcagatgaagagctcgttgatgatggagaggatcagaacgacccatcaaggtgggacgagtccggagaagtgtgcatgagtctagatgactag

SEQ ID NO: 214118 - DNA, 5386 bp, Artificial Sequence
  derived and/or modified sequence
cggtccgttgttcatttgccattcgacctccgccagggcctggtcggacggaaacgctccgccggctttattgtcgcttcgttatgtggcggagccgagcagtttagcgtgcctctcaccctcagcgcctgcgaagccggcggcggcgtcgggactcctcggcgcgcggaggaaggatatctgtgtggaggatcggtgtgtgcgcgcgcggctttaaagagggggcagcggagggtctccccgcactccgctgctcaacttcgaaggcctcgctcgctgcaggctcgctcctcacctctccgccgcccgcccccttctccgcgcgggacgctgcccggagcgcggcggggcgggggtggaggacgagagagcggtcggaggcgtcggcccggcagcggcagcggcagcggacgcgtgcagcagacccgggagcgagcgcgagccgggctgccgggcgagagggcgaggccgagccccgcgagaccggaacgccgggggcgggggcgagacagagggggagccgcggggagcgcgcgggacgcggcccgaggccgtgcgcgagccggggcaccgggcggcggcggcggcggcgcgcgccatgtcgttcagtgaaatgaaccgcaggacgctggcgttccgaggaggcgggttggtcaccgctagcggcggcggctccacgaacaataacgctggcggggaggcctcagcttggcctccgcagccccagccgagacagcccccgccgccagcgccgcccgcgcttcagccgcctaatgggcggggggccgacgaggaagtggaattggagggcctggagccccaagacctggaggcctccgccgggccggccgccggcgccgccgaggaagccaaggagttgctgctcccccaagacgcgggcggccccacctcgcttggcggtggcgcggggggccccctgctagcggaaaggaaccgtcggactctggccttccgaggcggcggcggcgggggtctcggcaacaatggcagtagccgcggccgccccgagacctcggtgtggcccttgaggcatttcaatgggcgagggccggcgactgtggatctggagctggacgcgctggaggggaaggagttgatgcaggacggcgcgtccctgagcgacagcaccgaggacgaggaggagggggcgagcctgggcgacggcagcggggcggaaggcggcagctgcagcagcagcaggcggtcgggcggcgatggcggggacgaagtggagggcagcggtgtgggagctggcgaaggagagactgtccagcacttcccgctcgcgcggcccaagtctctaatgcagaagctccaatgctccttccagacctcctggctcaaggactttccctggctgcgctattccaaggatactggtcttatgtcttgcggctggtgccaaaagacccctgcagatgggggaagcgtggaccttcccccagtggggcatgatgagctttcgcgagggacccgcaactacaagaaaaccctcctcctgaggcaccacgtctctaccgagcacaaactccacgaagccaacgcccaggagtcagaaataccatcagaggaggggtactgtgactttaatagtaggccaaatgagaactcttattgctatcaacttctgcgacaactaaatgaacagagaaagaaaggtattctttgtgatgtcagcattgtggtaagcggaaaaatcttcaaagctcataagaacatcctggttgcaggcagccgtttctttaagactttatattgcttttcaaacaaagaaagccctaaccaaaacaatactacccacttagatattgctgcagttcaaggtttttcagtcatcttggacttcttgtattctggtaacctggtgctcacaagccaaaatgccattgaagttatgaccgtggccagctatcttcaaatgagtgaagttgttcaaacttgccgaaatttcattaaagatgccttaaatataagcattaaatcagaagctccagagtctgtagttgtggactataataatagaaaaccagttaatagagatggtctgtcttcatcacgggatcaaaaaattgccagtttttgggcaacacggaatcttaccaatttggcaagtaatgtaaagattgaaaatgatggttgtaatgtcgacgagggccaaatagaaaactaccaaatgaatgacagtagttgggtccaggatggatctcctgaaatggctgaaaatgaatctgaaggtcaaacaaaagtgtttatttggaataatatgggctcccagggaattcaagagactggcaaaacaaggaggaaaaaccaaactacaaaaagatttatttataatattccacctaataatgaaacgaatttagaagattgctcagtaatgcagccacctgttgcctatccagaagaaaatacactactcatcaaggaagaaccagatttagatggtgctctactctcggggccagatggtgataggaatgtgaatgcaaatttattggctgaagctggcactagtcaagatggaggtgatgctggtacttcacatgatttcaagtatggtttgatgcctggtgcttcaaatgatttcaagtatggattattgccagaatcttggccaaaacaagaaacctgggaaaatggtgaatcatctctaatcatgaacaagttaaaatgccctcattgtagctatgtagccaaatacagacgaacactaaaaaggcacttgctcattcacacaggagtgagatcatttagctgtgatatttgtggaaaactgtttactcgaagagaacatgtaaaaagacattccctggtgcataaaaaggataaaaaatacaaatgtatggtgtgtaagaagatcttcatgttagcagccagtgttggaataagacatggatctcgacgttatggtgtttgtgtagactgtgcagataaatcacagccaggagggcaagaaggtgtagatcagggacaggatacagaattccctcgggatgaagaatacgaggagaatgaagtaggagaagctgatgaagagctagttgatgatggagaagatcagaatgatccctctcgatgggatgaatcaggagaagtttgtatgtctctagatgattaactgacctactatactcctcaaggatgctgcatttggacctaatatgaatcgacaatttggattgttgaacttgaaggcttgcaaaatatggtacatgctggatagtagttatgttgctgtgaaaactgtagggtcaaagccttatagcaaaaaaaatttttttttatatttgcacaggactatacagcaaacaaccatgtggttggattacatggagtccccacatactcagtcagttatcaaagtaaaatattttttatttataggatatacagtaactatttgggtcctatgaaaatagtccttaaagagcttacattcatgtgctactttaacatgaatggagaaaatccgtttatggaagtacagtgacaattgacccaatcactctgtccatcaaaccactcaggctagtttgtactagtagagttttgtttctatttttatttttattaattttattttttttaatacagattttcagtgaggggctttttcaaccccattggttctattttcttgtatttttccatttaatttgcttcataacttaaaccaagtctcttctagtcttaggtattatttctcgattttgtgctgatgggcatgtttataagaactggagaggtaatttattggaatgaactaactgacttcctccattcccctcttcctttttgacatgaattttactacttcacaaatgaagaatgatgttatgaagttaccgtggcgaagttgacaaataccactaaaatgattatgatttagaagtaactttcttctgctgctctaatctgataaatggttactatatgatattttctgacatggtatttggttttgggtatctgttactttggcactattcttgtttgcctctttatttttgccagtgtactatacctcagtcctatttgaaagacctaattgaaagaaaaatcatagaaataagtaaaatgatttgttttataatttatccaccatgtccagtttggttagcttgttatgcaatataagtgaaatatcaggtttttacccgtgtcccttttatcatgaaaattaacacaaaatgtgcattctcttttgtttcatacttagcgggatattgattgttttgaaattatgatcaatacttaatttatttttttctgtccttgaagtcactacaccttgatacagtctttctagtagtcaccatgattcaacagtctcaaaaatcttacaaataaaattctgagaagctttattattctataaattcttcagggtacaaagggtgacatattgaggtgaaattgtcagatttacttagcctggtgacatgaattagctgattgtggaactctcagcagcatttcacgtattgttaacatgtatggcatttattagcatattgtatattatataagattgagggatgtcatattttcagctttcttttaaataaaaattgagtatattttcctattttatatcaggtaactaaattatgctagttatgtggaaaaaattgcaaagatgctttgacagatataatccctttggtgctccatctgatcaaagttgaaaagttgatgttttttaagagacaagctttatcattgtctctgatttcagtagaataatggtttattgttagacaatgatgtttctgcttggataaatcaaagataaattacagttacatggttagatgcatcttttgtcatctatattgtagtttctacataactgtaaacctgacagataagaatagtttcggtttgatttttgtttaaaacagatgagtacttcttaatgttctagacaaatgagtaaaatgtatttctggtagaaattagttgggcaaagatactatgaatgaaaaagtattttaaacgtaaaatgttctttgtgaatatgtaagtatagtataaagatttctttcatcccatttatccccttcctttaaataaactagtttacaattggtagatctgtctatatataaatatatattaaagaacaaagatatatatctaaaaatcacctaaatctgctttattagactacagttcacttattgcatagaaactggacttggctttacattcttaatgtacttttacttttcctcaagatatgaacttactctcttgaagctgaattttcttttactacttaaatcatttatgtatatctggtaaattatgaccaaatttttgttagattgcatacagtaaattgaaatacacacttggt

SEQ ID NO: 214119 - protein, 189 aa, Artificial Sequence
  derived and/or modified sequence
METSAPRAGSQVVATTARHSAAYRADPLRVSSRDKLTEMAASSQGNFEGNFESLDLAEFAKKQPWWRKLFGQESGPSAEKYSVATQLFIGGVTGWCTGFIFQKVGKLAATAVGGGFFLLQLANHTGYIKVDWQRVEKDMKKAKEQLKIRKSNQIPTEVRSKAEEVVSFVKKNVLVTGGFFGGFLLGMAS

SEQ ID NO: 214120 - DNA, 570 bp, Artificial Sequence
  derived and/or modified sequence
atggagaccagcgcccccagagccggcagccaggtggtggccaccaccgccagacacagcgccgcctacagagccgaccccctgagagtgagcagcagagacaagctgaccgagatggccgccagcagccagggcaacttcgagggcaacttcgagagcctggacctggccgagttcgccaagaagcagccctggtggagaaagctgttcggccaggagagcggccccagcgccgagaagtacagcgtggccacccagctgttcatcggcggcgtgaccggctggtgcaccggcttcatcttccagaaggtgggcaagctggccgccaccgccgtgggcggcggcttcttcctgctgcagctggccaaccacaccggctacatcaaggtggactggcagagagtggagaaggacatgaagaaggccaaggagcagctgaagatcagaaagagcaaccagatccccaccgaggtgagaagcaaggccgaggaggtggtgagcttcgtgaagaagaacgtgctggtgaccggcggcttcttcggcggcttcctgctgggcatggccagctag

SEQ ID NO: 214121 - DNA, 6455 bp, Artificial Sequence
  derived and/or modified sequence
tgagcgagcgagccccgacggccgcggtgggtggaggggggaaagtgggggagagtggggcgggagtagagggagagcgagggagggagcctcacccccgggacgctttctgcgcacgcgcatctcggtgcatctgttgggcgggaccgcggggcctgtgacaccgcacgctgagctctgtgatgtagccgcttgcggagactgcaagcagccgcggcgcgcccggccctccctcttccgctgccgccgtgggaatggaaacatctgccccacgtgccggaagccaagtggtggcgacaactgcgcgccactccgcggcctaccgcgcagatcctctacgtgtgtcctcgcgagacaagctcaccgaaatggccgcgtccagtcaaggaaactttgagggaaattttgagtcactggaccttgcggaatttgctaagaagcagccatggtggcgtaagctgttcgggcaggaatctggaccttcagcagaaaagtatagcgtggcaacccagctgttcattggaggtgtcactggatggtgcacaggtttcatattccagaaggttggaaagttggctgcaacagctgtgggaggtggattttttctccttcagcttgcaaaccatactgggtacatcaaagttgactggcaacgagtggagaaggacatgaagaaagccaaagagcagctgaagatccgtaagagcaatcagatacctactgaggtcaggagcaaagctgaggaggtggtgtcatttgtgaagaagaatgttctagtaactgggggatttttcggaggctttctgcttggcatggcatcctaaggaagatgacctcatgttcattgttcctggttttttccagccagcagcctctacactccatcataggacatcgagtccctcctcctcttctcccatgccttcttccctgccatggcaaatctgagtggcttctctaagcatctgctggtacaagtcaatgtggcaccatgagcttcatggtggcagaagagacaatagtccttagctctcctcccagtacaccccctacttggccagtctgtaggccaacaagaaggttcctttacccccatgcaagacacttatgagaacacattacaagatggctgaccgtggaggatgagtggatcctgaaaggttgtcccaaactgttgatttggaaaagaaataagcacatagataaccttattgtgtgctgcatggaaaggaactgaatacatttgcctttaagcatgaaagattttggtatcttggtgtctactttcttttttagttggttttacattacagaaagctatttaaatgtgttataattatgccgacaaaattggcagcataattactgtaattgaaaaatctgatattgtccaggaatgctttctaccgtacaggataatgtatctcatggctgtttccaaagggtttatttattgtaaaacaagtgatttaggtgggaaagggaagattttggatttttattttgtagaaaaggttttaagctttgaaatgtgaatgaaatatccttatcaaaacattaggggtggccataactcctctgtgccacttctactatttttttttttaatctagttagtatgaaatacaacatttaaaccggaattttaaagaagtagctttccagggattcagaattaagaaagatagtgataggacatgagaaataaatttccatcaagtgtaatctaccgtctcatgatgaccacaaccctgagaattattctttaaaagcttacacacacacacacacacgggcacacacgcacacacagaatcttaccacattttgctgtagtggcatgttaccatgtctacagtccctactagaatatcagtcagctttcagagggcaagacttctgtcttcaccattatactcacagggcctagcacttaataggtgctgagtatttgaataatgactttatagaaagaaaactcactattaaaggttagttttactcagaattgttaatcttggagatgatctcttgtgaaatatgagtgtgtttctaaggccatacatttaaaaatgtttgcattttaacccgtcttgagaatgatgtattgaatttgaaaatcaaaactaccagtggatgtgtggaactttacagaaaccacctatttgcgtttttctccttacatttaaggaaacataagccattttgcttgcaatatgtatgaatcatctcaaaaccataatggtatgagcctctttgctgcatattttgctataagaacttattttttttcactttttattatggacgctttcaggaatatataaaagtagagaatatagtacaataatccccctgtgtatctatcactcactcacaacaatcatcaaattatagctctgctggtttttaccagttattgtgaaacaaatatcaaaatgtcattttatcatatttcagtatgtatctctaaaaggtaagaattatttctaaaaatcataaatacctcatcatatcagacattaacagtaattacataatatccaaaatctgatcagtgttcaaaatttcctcaagtgttttatatttagtttgtttgaatcaaaattcatgcaaggttcacatcgtatttgcatgatttggataagtctcttaaccttatagatcctcctctatttttttttttttgcttgctatatatttatatctctatatatattgatatagacatatgtagtgacactgagtcatctgtttcctgcttccccacactctgcctctcctgacatctgggtctctgggttatgccatatatggtgatagtggctgcagccactttacctgtgtgacttacccacagcaatgggatggtaacagcaaagctaaccaaagtgctctgtgcccctttgggttgcatgtggggagactggccacccaatgcctctccagtggggtaggggttgtcttttggtgcatctgtttttcctgtgattattggtgagggcagcaaagattagcaggtggttgtaaactaccttgagtaggttgtaataaatagtctggcctcagactgtattctgattgtctgaattaagatctgtaggtaggtccctcctgaagttttttcccagctggctgcctctacgactgtgagggtcatggttgaggtcagtattgcaggttggcctcatcctgctagtatgagaacggctgtgagttctgcccacggtgtgaggccactgtgaccacttgggattgtgcagagctggcatggaggttgaacacgcacagctgcacaccttgttttcagtttagctgaaccatcggtgaaggaggctcaggcatttggggttacctgtgaatcaaggccctattgtgccagcagttttgtttcaggtggtgaagtgggagttaaggtttcccccaaaagaacagctgccactcctccatgcaaaaccgagatgattcaaggaccaggcagctccacctttcagtgcactactttcatttgactggagaggcctgcttagctaggcacgtattttctccagtagcagagtccaatgacgctctggacttcctaattagtggtggtggggcggaagtttttccttgggaagagcgttgtcgctgtatatggtccgcagaaacttgacttggaatgtgttcggggtttcatcgcccccttgtggcggcgacgtggtaacaccgcactcaaggcttccaacttgtcaaccaataggatggcatctacgtagtgaaggcttcccttcccttgtcctgcagcgtgctggacagtgtcccggctcagggaccccttctgtccccttcctggctactatgggtcggccctgcgtcctcaccactttgagccaccctttgacccagcgtctctcccgcaatgggacctggtgggatggggacttggagcatgctacaggagaggtagaacttttgagtctcttcttcccaaggttctccccagagtcggagagcagagacggatccaggggcactttctggccgctgcctgctcgggctcaacagatggagtccaatgtttcagtctcccccaagaatgtgtatcctcattgctgacacgggagctgggtgcggggagagatgtggtggtggggacccttgcctgagcagcccattgtcatgagtgttattgccattgtgataatatgttagcatgactctcctcccaaatggccgcttgtttgttgcaatctcccgccactcagcctccagacattcattaacaggacagtggggttcttgactcccctaccactggggtgacagtccttgctactggatctgggcagttactgtctcatggatgctggcagaagacgattcaagttggcggactagattctacaaggaatgatctcttgcataattctagccaacatgctcttggggtgggtgcttctggttttggaaagcaaagttactgtgtagttaacaactattgtggtaagaatagtctctccatcattcttttgtttcacggttgtcagaaagatgggcataactaatggttgggctcttatttggaacctctacttttgtacagtttgggaatctctgcttgaaaagatggtatactgatggatttgaaatttctgagtatcatcaatgtttcatgatgatctcaatttcttctcagagggaagctcacagccagttttggaccccagagaaaaatgtggctgctgccctctactccctctaccaaattatcagcttcatttctttgtcatgaaatctagtatgatttctcagaaatcaggcccagaactaaaatacattttctgcccaattttctaagaggtcacactaacatctgagtaattgggcagaaaacctattttagttctgagcctgatttttctagaagtcatatggtatagcttatatttccgatgcttgcattctttttaaggggtcatgaatcttaatacttttttttttaaaagaaaagtgtcgcactttttcacatttttataaagctttaaagtcagtttactgacttttcaaaagtgtctacctttttaaattttaaaatggtaagaaatgacattcctgagagcagtggctttcatccttgcttgcacttgggaatcacctgtgaaattttaaaaactactaatgcctggctctcatcctagagattctgatttcactggtctggagtgctgttcaggcatcctgaggttttaaagtgtcttagctttttctaatgagcagcagagactgagaaccactgaagtacacagttggaagctggtgctgaaaaaattaagagttttgctgttaactccttaagagggctttaaagccttttatattaagtgccatacaacttcagatgccttctgaatactgaacacaagtgtaatattatagttcattaaatgtcttaggaatcgtgtggagtgaatgcaaggaaaggagtgacaagatatcaccccacaaatgacttacccattacgaagggaaaactacctttctagctaaaaggtctgtcagtcactaaccaagtgattaaacttagcatcactaatagccaacttaacaaagtttttttttttttttggtttctaaaatgggagatcatagttttcaccttcctagagttctttgcttaagactgagattcagtgttactcttggtccctaacaataagaagcactcagtaaatgttaagccttctatgatggctattttatttttttgtatgtcataataatacctaagaataagaagagttaaattaatgtcttcaaatggatttgttgacttaaactgacacaatcctttaaaagaaggaactgatttgaacctttcaaaactgaaagaaagtcgtatactgatacagtttggagccaccgaatgtcatgttgaaccgtattccctaatggaggtggatcctggtgagaggtgattggatcgtgggggccatcccctcttggtacttcactcatgatagtgagttctcatgagatctggcacttcacccctcactctctcttgctcctgctttggccatgtggagtgctcactccccttttgctttctgccatggctgtaagtttcctgaggcgtccccagaagcccatcagataccagtgccatgcttcctgtacagcccatggaactgtgagccaactaaacctcttttatttataaattaccgagtctcaggcactttttatagcaatgcaacaatggactaatacatatactttagcataaaaacatttaaaagagtctgaaactggagtagttaactcagtaaaaataacttggcaataaaacacagaaaaacaatctatttgatcatgtagtgattcctaatgtaaatcctagtacaactgtcaactgataattttaaatgtaatttagatttgtagatggtgtaacattaaagttgtatgatgtt

SEQ ID NO: 214122 - DNA, 570 bp, Artificial Sequence
  derived and/or modified sequence
atggagacatcagctccacgcgctggaagtcaggttgttgccaccaccgcccgccattcagccgcctaccgggcggacccactcagagtgtcaagcagggacaaactaacagaaatggccgcctctagtcagggaaactttgaagggaactttgaaagcctggatctggccgaattcgctaaaaagcagccctggtggagaaagctgtttggtcaggaatcagggccgtctgccgagaaatatagcgtggccactcagctatttatcggcggggttaccggctggtgtactggcttcatcttccagaaggtgggaaaactggctgccaccgctgtcggaggcgggttttttctgttacagcttgctaaccacacggggtatataaaagtggattggcaacgggtagagaaggacatgaaaaaagctaaagaacagctgaagatacgcaagtccaaccaaattcccaccgaggtccgaagcaaagccgaagaagtggttagcttcgtcaagaagaacgtcttggtgacagggggcttctttggagggtttctcttagggatggcctcctag

SEQ ID NO: 214123 - DNA, 570 bp, Artificial Sequence
  derived and/or modified sequence
atggagaccagcgccccccgggccggcagccaggtggtggccaccacagcccggcacagcgctgcctacagagctgaccccctgcgggtgagcagccgggacaagctgacagagatggccgccagcagccagggcaactttgagggcaactttgagagcctggacctggccgagtttgccaagaagcagccctggtggaggaagctgtttggccaggagagcggccccagcgctgagaagtacagcgtggccacccagctgttcatcggcggcgtgacaggctggtgcaccggcttcatcttccagaaggtgggcaagctggccgccacagctgtgggcggcggcttcttcctgctgcagctggccaaccacacaggctacatcaaggtggactggcagagggtggagaaggacatgaagaaggccaaggagcagctgaagatcaggaagagcaaccagatccccacagaggtgcgcagcaaggccgaggaggtggtgtcctttgtgaagaagaatgtgctggtgactggaggcttcttcggcggcttcctgctgggcatggccagctag

SEQ ID NO: 214124 - DNA, 570 bp, Artificial Sequence
  derived and/or modified sequence
atggagaccagcgccccccgggccggcagccaggtggtggccaccacagctcgccactccgcagcttatcgtgcggaccctctcagagtctcatccagggacaaactcaccgagatggccgcctccagccagggaaactttgagggcaactttgagagcttggacctcgcagaatttgctaaaaaacaaccctggtggaggaaactgttcggtcaggaatccggtccctctgccgaaaagtattccgtcgcaacccagctgttcatcggcggagttacaggttggtgcactgggttcattttccagaaggtgggcaaacttgcggctacagcggtgggcggaggatttttcttgctgcagctggccaaccacaccggatacatcaaggtggactggcaacgggtagaaaaggacatgaagaaagcaaaggagcagctcaaaatccggaaaagcaaccagatccctaccgaggtgcgctcgaaagcggaggaagtggtctcatttgtgaagaaaaatgtccttgtcaccgggggattttttgggggatttctgttaggaatggcatcctag

SEQ ID NO: 214125 - DNA, 570 bp, Artificial Sequence
  derived and/or modified sequence
atggagacgtcggccccaagagcagggtcccaggtagtggccacaactgccaggcacagtgctgcgtacagggccgatccacttcgcgtctcttccagagacaagcttactgaaatggccgcttcaagtcagggaaattttgaggggaactttgaaagcctggacctggcagagttcgcaaaaaagcaaccgtggtggcgaaagttgtttggtcaggaaagtggaccgagcgcagagaaatatagcgtcgccactcaactgtttatcgggggagtgacaggctggtgcaccggatttatctttcagaaagtgggcaaactagctgccactgccgtcgggggtggattcttcctgttgcagctcgctaaccacaccgggtatataaaggtcgactggcagagggtggaaaaggatatgaagaaagctaaggagcagctaaaaatcagaaagagcaatcaaatccccaccgaagtgaggtcaaaggccgaggaagtggtgtcatttgtaaagaagaatgtcctggtaacgggcggtttcttcgggggattcttactaggtatggcctcatag

SEQ ID NO: 214126 - protein, 314 aa, Artificial Sequence
  derived and/or modified sequence
MVAPVWYLVAAALLVGFILFLTRSRGRAASAGQEPLHNEELAGAGRVAQPGPLEPEEPRAGGRPRRRRDLGSRLQAQRRAQRVAWAEADENEEEAVILAQEEEGVEKPAETHLSGKIGAKKLRKLEEKQARKAQREAEEAEREERKRLESQREAEWKKEEERLRLEEEQKEEEERKAREEQAQREHEEYLKLKEAFVVEEEGVGETMTEEQSQSFLTEFINYIKQSKVVLLEDLASQVGLRTQDTINRIQDLLAEGTITGVIDDRGKFIYITPEELAAVANFIRQRGRVSIAELAQASNSLIAWGRESPAQAPA

SEQ ID NO: 214127 - protein, 298 aa, Artificial Sequence
  derived and/or modified sequence
MVAPVWYLVAAALLVGFILFLTRSRGRAASAGQEPLHNEELAGAGRVAQPGPLEPEEPRAGGRPRRRRDLGSRLQAQRRAQRVAWAEADENEEEAVILAQEEEGVEKPAETHLSGKIGAKKLRKLEEKQARKAQREAEEAEREERKRLESQREAEWKKEEERLRLEEEQKEEEERKAREEQAQREHEEYLKLKEAFVVEEEGVGETMTEEQSQSFLTEFINYIKQSKVVLLEDLASQVGLRTQVSPGTWPAVCSVARGLWLAERTCPKDRVLMHRLPCPQPRVSSAQKSPGTLGILHF

SEQ ID NO: 214128 - protein, 313 aa, Artificial Sequence
  derived and/or modified sequence
MVAPVWYLVAAALLVGFILFLTRSRGRAASAGQEPLHNEELAGAGRVAQPGPLEPEEPRAGGRPRRRRDLGSRLQAQRRAQRVAWAEADENEEEAVILAQEEEGVEKPAETHLSGKIGAKKLRKLEEKQARKAQREAEEAEREERKRLESQREAEWKKEEERLRLEEEQKEEEERKAREEQAQREHEEYLKLKEAFVVEEEGVGETMTEEQSQSFLTEFINYIKQSKVVLLEDLASQVGLRTQVSPGTWPAVCSVARGLWLAERTCPKDRVLMHRLPCPQPRVSSAQKSPGTLGILHFSLIAWGRESPAQAPA

SEQ ID NO: 214129 - DNA, 945 bp, Artificial Sequence
  derived and/or modified sequence
atggtggcccccgtgtggtacctggtggccgccgccctgctggtgggcttcatcctgttcctgaccagaagcagaggcagagccgccagcgccggccaggagcccctgcacaacgaggagctggccggcgccggcagagtggcccagcccggccccctggagcccgaggagcccagagccggcggcagacccagaagaagaagagacctgggcagcagactgcaggcccagagaagagcccagagagtggcctgggccgaggccgacgagaacgaggaggaggccgtgatcctggcccaggaggaggagggcgtggagaagcccgccgagacccacctgagcggcaagatcggcgccaagaagctgagaaagctggaggagaagcaggccagaaaggcccagagagaggccgaggaggccgagagagaggagagaaagagactggagagccagagagaggccgagtggaagaaggaggaggagagactgagactggaggaggagcagaaggaggaggaggagagaaaggccagagaggagcaggcccagagagagcacgaggagtacctgaagctgaaggaggccttcgtggtggaggaggagggcgtgggcgagaccatgaccgaggagcagagccagagcttcctgaccgagttcatcaactacatcaagcagagcaaggtggtgctgctggaggacctggccagccaggtgggcctgagaacccaggacaccatcaacagaatccaggacctgctggccgagggcaccatcaccggcgtgatcgacgacagaggcaagttcatctacatcacccccgaggagctggccgccgtggccaacttcatcagacagagaggcagagtgagcatcgccgagctggcccaggccagcaacagcctgatcgcctggggcagagagagccccgcccaggcccccgcctag

SEQ ID NO: 214130 - DNA, 897 bp, Artificial Sequence
  derived and/or modified sequence
atggtggcccccgtgtggtacctggtggccgccgccctgctggtgggcttcatcctgttcctgaccagaagcagaggcagagccgccagcgccggccaggagcccctgcacaacgaggagctggccggcgccggcagagtggcccagcccggccccctggagcccgaggagcccagagccggcggcagacccagaagaagaagagacctgggcagcagactgcaggcccagagaagagcccagagagtggcctgggccgaggccgacgagaacgaggaggaggccgtgatcctggcccaggaggaggagggcgtggagaagcccgccgagacccacctgagcggcaagatcggcgccaagaagctgagaaagctggaggagaagcaggccagaaaggcccagagagaggccgaggaggccgagagagaggagagaaagagactggagagccagagagaggccgagtggaagaaggaggaggagagactgagactggaggaggagcagaaggaggaggaggagagaaaggccagagaggagcaggcccagagagagcacgaggagtacctgaagctgaaggaggccttcgtggtggaggaggagggcgtgggcgagaccatgaccgaggagcagagccagagcttcctgaccgagttcatcaactacatcaagcagagcaaggtggtgctgctggaggacctggccagccaggtgggcctgagaacccaggtgagccccggcacctggcccgccgtgtgcagcgtggccagaggcctgtggctggccgagagaacctgccccaaggacagagtgctgatgcacagactgccctgcccccagcccagagtgagcagcgcccagaagagccccggcaccctgggcatcctgcacttctag

SEQ ID NO: 214131 - DNA, 942 bp, Artificial Sequence
  derived and/or modified sequence
atggtggcccccgtgtggtacctggtggccgccgccctgctggtgggcttcatcctgttcctgaccagaagcagaggcagagccgccagcgccggccaggagcccctgcacaacgaggagctggccggcgccggcagagtggcccagcccggccccctggagcccgaggagcccagagccggcggcagacccagaagaagaagagacctgggcagcagactgcaggcccagagaagagcccagagagtggcctgggccgaggccgacgagaacgaggaggaggccgtgatcctggcccaggaggaggagggcgtggagaagcccgccgagacccacctgagcggcaagatcggcgccaagaagctgagaaagctggaggagaagcaggccagaaaggcccagagagaggccgaggaggccgagagagaggagagaaagagactggagagccagagagaggccgagtggaagaaggaggaggagagactgagactggaggaggagcagaaggaggaggaggagagaaaggccagagaggagcaggcccagagagagcacgaggagtacctgaagctgaaggaggccttcgtggtggaggaggagggcgtgggcgagaccatgaccgaggagcagagccagagcttcctgaccgagttcatcaactacatcaagcagagcaaggtggtgctgctggaggacctggccagccaggtgggcctgagaacccaggtgagccccggcacctggcccgccgtgtgcagcgtggccagaggcctgtggctggccgagagaacctgccccaaggacagagtgctgatgcacagactgccctgcccccagcccagagtgagcagcgcccagaagagccccggcaccctgggcatcctgcacttcagcctgatcgcctggggcagagagagccccgcccaggcccccgcctag

SEQ ID NO: 214132 - DNA, 1306 bp, Artificial Sequence
  derived and/or modified sequence
ggcctatgagatcccggcctcagggtggacgcagtggttctgcactgaggccctcgtcatggtggcgcctgtgtggtacttggtagcggcggctctgctagtcggctttatcctcttcctgactcgcagccggggccgggcggcatcagccggccaagagccactgcacaatgaggagctggcaggagcaggccgggtggcccagcctgggcccctggagcctgaggagccgagagctggaggcaggcctcggcgccggagggacctgggcagccgcctacaggcccagcgtcgagcccagcgggtggcctgggcagaagcagatgagaacgaggaggaagctgtcatcctagcccaggaggaggaaggtgtcgagaagccagcggaaactcacctgtcggggaaaattggagctaagaaactgcggaagctggaggagaaacaagcgcgaaaggcccagcgtgaggcagaggaggctgaacgtgaggagcggaaacgactcgagtcccagcgcgaagctgagtggaagaaggaggaggagcggcttcgcctggaggaggagcagaaggaggaggaggagaggaaggcccgcgaggagcaggcccagcgggagcatgaggagtacctgaaactgaaggaggcctttgtggtggaggaggaaggcgtaggagagaccatgactgaggaacagtcccagagcttcctgacagagttcatcaactacatcaagcagtccaaggttgtgctcttggaagacctggcttcccaggtgggcctacgcactcaggacaccataaatcgcatccaggacctgctggctgaggggactataacaggtgtgattgacgaccggggcaagttcatctacataaccccagaggaactggccgccgtggccaacttcatccgacagcggggccgggtgtccatcgccgagcttgcccaagccagcaactccctcatcgcctggggccgggagtcccctgcccaagccccagcctgaccccagtccttccctcttggactcagagttggtgtggcctacctggctatacatcttcatccctccccaccatcctggggaagtgatggtgtggccaggcagttatagattaaaggcctgtgagtactgctgagcttggtgtggcttggtgtggcagaaggcctggcctaggatcctagataagcaggtgaaatttaggcttcagaatatatccgagaggtggggagggtcccttggaagctggtgaagtcctgttcttattatgaatccattcattcaagaaaatagcctgttgcacattta

SEQ ID NO: 214133 - DNA, 1128 bp, Artificial Sequence
  derived and/or modified sequence
ggcctatgagatcccggcctcagggtggacgcagtggttctgcactgaggccctcgtcatggtggcgcctgtgtggtacttggtagcggcggctctgctagtcggctttatcctcttcctgactcgcagccggggccgggcggcatcagccggccaagagccactgcacaatgaggagctggcaggagcaggccgggtggcccagcctgggcccctggagcctgaggagccgagagctggaggcaggcctcggcgccggagggacctgggcagccgcctacaggcccagcgtcgagcccagcgggtggcctgggcagaagcagatgagaacgaggaggaagctgtcatcctagcccaggaggaggaaggtgtcgagaagccagcggaaactcacctgtcggggaaaattggagctaagaaactgcggaagctggaggagaaacaagcgcgaaaggcccagcgtgaggcagaggaggctgaacgtgaggagcggaaacgactcgagtcccagcgcgaagctgagtggaagaaggaggaggagcggcttcgcctggaggaggagcagaaggaggaggaggagaggaaggcccgcgaggagcaggcccagcgggagcatgaggagtacctgaaactgaaggaggcctttgtggtggaggaggaaggcgtaggagagaccatgactgaggaacagtcccagagcttcctgacagagttcatcaactacatcaagcagtccaaggttgtgctcttggaagacctggcttcccaggtgggcctacgcactcaggtaagccctggaacgtggcctgctgtgtgcagtgtggccaggggtctgtggctagcagagaggacctgccctaaagatagagtcttgatgcaccgtctaccttgtccccaaccaagagtgagtagtgcacagaagtctcctggcaccctgggaatcctgcatttttaatggacgaacaggcaggaaagaaaaaaaaaacccaaaccccatcactctgccagcccctgtgaccaaagcagcccaaatcagttaccttgacaactctcatgcacagactgcaccagcctgtgttgcaaacatcactgccccgcttctaacaggaagagatactcttttggggg

SEQ ID NO: 214134 - DNA, 972 bp, Artificial Sequence
  derived and/or modified sequence
acgcagtggttctgcactgaggccctcgtcatggtggcgcctgtgtggtacttggtagcggcggctctgctagtcggctttatcctcttcctgactcgcagccggggccgggcggcatcagccggccaagagccactgcacaatgaggagctggcaggagcaggccgggtggcccagcctgggcccctggagcctgaggagccgagagctggaggcaggcctcggcgccggagggacctgggcagccgcctacaggcccagcgtcgagcccagcgggtggcctgggcagaagcagatgagaacgaggaggaagctgtcatcctagcccaggaggaggaaggtgtcgagaagccagcggaaactcacctgtcggggaaaattggagctaagaaactgcggaagctggaggagaaacaagcgcgaaaggcccagcgtgaggcagaggaggctgaacgtgaggagcggaaacgactcgagtcccagcgcgaagctgagtggaagaaggaggaggagcggcttcgcctggaggaggagcagaaggaggaggaggagaggaaggcccgcgaggagcaggcccagcgggagcatgaggagtacctgaaactgaaggaggcctttgtggtggaggaggaaggcgtaggagagaccatgactgaggaacagtcccagagcttcctgacagagttcatcaactacatcaagcagtccaaggttgtgctcttggaagacctggcttcccaggtgggcctacgcactcaggtaagccctggaacgtggcctgctgtgtgcagtgtggccaggggtctgtggctagcagagaggacctgccctaaagatagagtcttgatgcaccgtctaccttgtccccaaccaagagtgagtagtgcacagaagtctcctggcaccctgggaatcctgcatttttccctcatcgcctggggccgggagtcccctgcccaagccccagcctga

SEQ ID NO: 214135 - DNA, 945 bp, Artificial Sequence
  derived and/or modified sequence
atggtggctcccgtctggtacctcgttgctgcagccctgttagtgggtttcattctgttcttgacccgatcaagaggccgcgcggcttcagctggccaggagccattgcataatgaagaattggccggcgccgggcgcgtggctcaacctggtccactggaacccgaggagcccagggccggagggagaccgcggaggcgcagagacctcgggtctcggctccaggcccaacggcgggctcagcgggtggcctgggcggaggctgacgagaacgaagaggaagctgtcattctggcccaagaggaagagggtgtggagaagccagctgagacgcacctgagtgggaaaatcggagccaagaagctcaggaaactggaagagaaacaagctcgaaaagcacaacgcgaagctgaggaggctgagagagaagagaggaaaagattggaatcccagcgggaagctgaatggaagaaggaggaagaacgtttgagactggaggaagagcagaaggaggaagaggagaggaaggcgcgcgaggagcaagcccagagagaacacgaagaatacctcaaattgaaggaggctttcgttgtggaggaagagggagttggagagacaatgactgaggagcaaagccaatcttttcttaccgagtttattaactatatcaagcagtcaaaggtagtgctgcttgaggacctggctagccaagtggggttgaggacacaggacactataaatcgcatccaggatttactagccgaggggactatcacaggcgtgatcgacgataggggtaaatttatttacatcaccccggaggagctggctgctgtcgctaattttataagacagcgaggcagagtgtccatcgctgaactggcccaggcctccaatagtcttatcgcctggggaagagaatctcctgcccaggctcccgcctag

SEQ ID NO: 214136 - DNA, 897 bp, Artificial Sequence
  derived and/or modified sequence
atggtggcgcccgtctggtatcttgtggctgccgcactgctggtcggatttattctgttcctgacgaggtcacgaggccgggcggcttcagctggacaggagccactacacaatgaagagttagccggagctggaagggtcgcccaacctggtccactggaacccgaagaaccccgcgccggaggccgccctcggcgacgcagggatctgggctcccgtctccaggcccagaggcgggctcagcgagtggcttgggccgaagccgacgagaatgaggaagaggcagtgatcctggcccaggaggaggaaggggtcgagaagccggccgagacccatctgagcggtaaaatcggtgctaaaaagctgaggaagcttgaagagaaacaggctcgcaaggcccagcgggaggctgaagaggccgaaagagaggaacgcaagcgcctggaatcccagagggaagccgagtggaagaaagaggaggagcgactgaggcttgaggaggaacagaaagaagaagaggaacgcaaggccagggaagagcaggcccagagagagcacgaggagtatctcaaactgaaggaggcctttgtagtagaagaagagggtgttggagaaaccatgactgaggaacagtcacagagcttcctaaccgaattcataaattacatcaagcagtccaaagtggtcctgctagaggatctcgcttcacaagtgggtctgaggacccaggtgtcacctggaacttggccagcagtttgttccgtcgcaagaggcctgtggcttgcagagagaacatgccccaaggaccgggttctgatgcaccgattgccatgcccgcagccaagggtgagctcggctcaaaagtctccaggcactctggggattctccacttctag

SEQ ID NO: 214137 - DNA, 942 bp, Artificial Sequence
  derived and/or modified sequence
atggtggctcctgtctggtacctggttgccgccgccctcttagtgggatttatcttatttctgaccagaagcaggggcagagccgcctctgcaggtcaggagcccctccataacgaggagcttgctggagcgggccgagtggcccagcccggaccactggaacccgaggagcccagagctggagggagaccaaggagacggagagacctgggttccaggctacaagctcagcgtcgcgcccagcgcgtggcttgggcagaagccgacgagaatgaggaggaagctgtgatactggctcaggaggaagaaggtgtagagaaaccagcagaaacacacttgagcgggaagattggggccaaaaagcttcgaaagctggaggaaaaacaggcgagaaaagcccagcgggaggctgaggaagccgagagagaagagcggaaacggctcgaatcacagcgggaggcagagtggaagaaggaagaggagcgactacgcttggaggaggaacaaaaggaagaggaagagagaaaggctcgggaagaacaggctcagcgcgagcacgaagaatatctgaagctgaaggaagcctttgtggtagaagaggagggcgtgggtgagacaatgacggaagagcagagccaaagctttctcacagagtttatcaactacataaagcaaagcaaagtcgtattgctggaagacctggctagtcaggtgggcctacgcacacaagttagccctggcacatggcctgcagtgtgctcagtagctcggggcctttggctggccgagcgtacgtgtccaaaagatcgcgttctgatgcaccgtttaccttgccctcaacctcgagtgagtagcgcccagaaatcaccgggcaccctgggtatcctgcacttttcactgatcgcatgggggcgggaatcccctgcccaggcaccagcctag

SEQ ID NO: 214138 - DNA, 945 bp, Artificial Sequence
  derived and/or modified sequence
atggtggcccctgtgtggtacctggtggccgccgccctgctggtgggcttcatcctcttcctgaccaggagccggggccgggccgccagcgctggccaggagcccctgcacaatgaggagctggccggggccggccgggtggcccagcccggccccctggagcctgaggagccccgggccggcggccggcccaggagaagaagagacctgggcagccggctgcaggcccagaggcgggcccagagggtggcctgggccgaggctgatgaaaatgaggaggaggccgtcatcctggcccaggaggaggagggcgtggagaagccagctgagacccacctgagcggcaagattggagccaagaagctgaggaagctggaggagaagcaggccaggaaggcccagcgggaggccgaggaggccgagcgggaggagaggaagaggctggagagccagcgggaggccgagtggaagaaggaggaggagcggctgcggctggaggaggagcagaaggaggaggaggagaggaaggcccgggaggagcaggcccagcgggagcacgaggagtacctgaagctgaaggaggcctttgtggtggaggaggagggcgtgggggagaccatgacagaggagcagagccagagcttcctgacagagttcatcaactacatcaagcagagcaaggtggtgctgctggaggacctggccagccaggtgggcctgcggacccaggacaccatcaaccgcatccaggacctgctggccgagggcaccatcactggagtgattgatgaccggggcaagttcatctacatcaccccagaggagctggccgctgtggccaacttcatccggcagaggggccgggtgtccattgctgagctggcccaggccagcaacagcctcatcgcctggggccgggagagccctgcccaggccccagcctag

SEQ ID NO: 214139 - DNA, 897 bp, Artificial Sequence
  derived and/or modified sequence
atggtggcccctgtgtggtacctggtggccgccgccctgctggtgggcttcatcctcttcctgaccaggagccggggccgggccgccagcgctggccaggagcccctgcacaatgaggagctggccggggccggccgggtggcccagcccggccccctggagcctgaggagccccgggccggcggccggcccaggagaagaagagacctgggcagccggctgcaggcccagaggcgggcccagagggtggcctgggccgaggctgatgaaaatgaggaggaggccgtcatcctggcccaggaggaggagggcgtggagaagccagctgagacccacctgagcggcaagattggagccaagaagctgaggaagctggaggagaagcaggccaggaaggcccagcgggaggccgaggaggccgagcgggaggagaggaagaggctggagagccagcgggaggccgagtggaagaaggaggaggagcggctgcggctggaggaggagcagaaggaggaggaggagaggaaggcccgggaggagcaggcccagcgggagcacgaggagtacctgaagctgaaggaggcctttgtggtggaggaggagggcgtgggggagaccatgacagaggagcagagccagagcttcctgacagagttcatcaactacatcaagcagagcaaggtggtgctgctggaggacctggccagccaggtgggcctgcggacccaggtgtccccaggcacctggccagctgtgtgcagcgtggcccggggcctgtggctggccgagaggacctgccccaaggacagagtgctgatgcaccggctgccctgcccccagccccgggtgtcctctgcccagaagagccctggcaccctgggcatcctgcacttctag

SEQ ID NO: 214140 - DNA, 942 bp, Artificial Sequence
  derived and/or modified sequence
atggtggcccctgtgtggtacctggtggccgccgccctgctggtgggcttcatcctcttcctgaccaggagccggggccgggccgccagcgctggccaggagcccctgcacaatgaggagctggccggggccggccgggtggcccagcccggccccctggagcctgaggagccccgggccggcggccggcccaggagaagaagagacctgggcagccggctgcaggcccagaggcgggcccagagggtggcctgggccgaggctgatgaaaatgaggaggaggccgtcatcctggcccaggaggaggagggcgtggagaagccagctgagacccacctgagcggcaagattggagccaagaagctgaggaagctggaggagaagcaggccaggaaggcccagcgggaggccgaggaggccgagcgggaggagaggaagaggctggagagccagcgggaggccgagtggaagaaggaggaggagcggctgcggctggaggaggagcagaaggaggaggaggagaggaaggcccgggaggagcaggcccagcgggagcacgaggagtacctgaagctgaaggaggcctttgtggtggaggaggagggcgtgggggagaccatgacagaggagcagagccagagcttcctgacagagttcatcaactacatcaagcagagcaaggtggtgctgctggaggacctggccagccaggtgggcctgcggacccaggtgtccccaggcacctggccagctgtgtgcagcgtggcccggggcctgtggctggccgagaggacctgccccaaggacagagtgctgatgcaccggctgccctgcccccagccccgggtgtcctctgcccagaagagccctggcaccctgggcatcctgcacttcagcctgattgcctggggccgggagagccctgcccaggccccagcctag

SEQ ID NO: 214141 - DNA, 945 bp, Artificial Sequence
  derived and/or modified sequence
atggtggcccccgtgtggtacctggtggccgccgccctgctggtgggcttcattctgtttctgaccagaagtaggggcagagctgcaagcgccggccaggagccactccacaacgaagagctggccggtgcaggtcgcgtagcgcagccaggtccccttgagcctgaagagcctagggcaggaggccgacctcgaaggagaagagatctgggctctcggctgcaggcccagcggagagcacaaagggtcgcctgggccgaggcagacgagaatgaagaggaagcggtcattttggcccaggaggaggagggggtcgagaagcccgccgaaacacatttgagcggaaagattggtgccaagaagttgagaaaactggaggaaaagcaagcccgcaaggcacagcgtgaggcggaggaagccgaacgggaagaacgtaagaggctggagtcgcaacgcgaagctgaatggaagaaagaagaagaaagactgcgcctggaagaggaacaaaaggaagaggaggagaggaaggcgagagaggaacaggcacaacgggagcacgaagaatacctcaagcttaaggaggcgtttgttgttgaggaggaaggagtgggagagacaatgacagaggagcagtcccagagctttctgactgagttcatcaactacattaagcaatcaaaagttgtgctgctcgaggacttggcatcccaggttggactaaggacacaagacacaatcaacaggatccaggaccttttggcagagggcaccattacaggcgttatagacgatagaggaaagtttatctatataactccagaggaactcgccgccgttgcaaactttatcagacagaggggccgcgtttctatcgctgaactagcccaggcttccaatagtctcatcgcgtggggtcgtgagagtccagctcaggcccccgcatag

SEQ ID NO: 214142 - DNA, 897 bp, Artificial Sequence
  derived and/or modified sequence
atggtggcccccgtgtggtacctggtggccgccgccctgctggtggggttcatcctgtttttaacacgatctcggggtagagcagcatctgccggtcaggaaccccttcacaatgaagagctcgctggagccggaagggtagcacagcctggacctttggagccggaggagcctagggctggtggacggccccggcgccgtcgcgacctgggtagcaggttgcaggcccagagacgcgctcaacgagttgcgtgggcagaagctgacgaaaacgaagaggaagcagtcattctggcgcaagaggaagaaggcgtggagaagcccgctgaaactcatttatcaggaaagatcggtgctaagaagcttcgcaaactggaagagaaacaggctaggaaggcgcagcgcgaggctgaggaggcggagagagaggagagaaagcggctggagagccagcgcgaagccgagtggaagaaagaagaagaacgactgaggctggaggaagagcagaaggaggaggaagagagaaaagcccgagaggaacaggcgcagcgggaacacgaggagtatcttaagctcaaagaggccttcgtcgtcgaagaggagggcgtcggcgagactatgacagaggaacagagtcagtcctttctgaccgaatttattaactacatcaaacagtcaaaagtggtgcttttggaggatctggcttcgcaggttggtttgcggacacaagtgtcccccggcacgtggccagcagtctgctccgtcgctagaggcctttggctggcggaaaggacttgtccgaaggacagggtgttgatgcaccgccttccttgtcctcagcccagagtctcctcagcacagaaaagccctggaactctgggcatcttgcacttttag

SEQ ID NO: 214143 - DNA, 942 bp, Artificial Sequence
  derived and/or modified sequence
atggtggcccccgtgtggtacctggtggccgccgccctgctggtgggcttcatcctgttcctcactcggtctaggggaagagctgcttctgccggacaggaacccctgcacaacgaggaattggccggtgctggaagagtggcacagcctggtcccttagaaccagaggagccgcgggccggtggccgcccacgccgtcgaagggatctggggtcacggctgcaggcccagagaagggctcagcgcgtcgcttgggccgaggctgacgagaacgaggaagaagccgtgatactggcccaggaggaggagggagttgaaaagcctgccgagacccaccttagtggtaaaatcggagctaagaaactgagaaagcttgaggaaaagcaggctaggaaggcccagcgcgaggcggaagaagctgaacgggaggagcgtaagcgtctcgagagccagcgcgaggctgaatggaaaaaggaggaagagcgcctccggctcgaggaggagcagaaggaggaggaggagagaaaggccagggaagagcaggcacaaagagagcacgaagagtatctaaaactgaaggaagcattcgtggtggaagaggagggcgtgggtgaaaccatgactgaagaacaatctcagtcattcctgaccgaattcattaactacattaagcaatctaaagtcgtcctcctcgaggatttggccagccaggtgggcttaaggactcaggtgagtcccggcacatggccagctgtctgctctgtggctcgggggctttggctggcagagagaacctgtccaaaagatagggttttaatgcacaggctcccctgtccacagcccagggtgtcgagcgcccagaaatcaccaggaacactggggatactgcacttctcccttattgcctggggccgtgaatctcctgcccaggcgcccgcttag

SEQ ID NO: 214144 - DNA, 945 bp, Artificial Sequence
  derived and/or modified sequence
atggtggcccctgtgtggtatcttgtcgcagctgcccttcttgtcgggtttatcttattcctgactcgaagccggggaagggccgcaagcgctgggcaggagcctctacataatgaagaactcgccggtgctggtcgcgttgcacagcctggaccactggaacccgaggagcccagagccggaggtcgccctaggagacgacgagatcttgggagcaggctgcaagctcagagacgggctcagcgtgtggcgtgggccgaagcggacgaaaatgaggaggaggcagtgatcctcgcccaggaagaggaaggagtggagaagccggcagagacccacttgtctggtaagattggggctaagaagctccggaaattggaggagaagcaagctagaaaagcccagagagaggccgaagaggcggaacgggaagagcggaaacggctcgagagtcagcgcgaggccgagtggaaaaaggaagaggagcggctcagactcgaagaggagcagaaggaggaggaggaacgcaaggcgagggaagagcaagcgcaaagagaacacgaagagtaccttaagctcaaggaggcttttgtggtagaagaggagggagtgggggaaacgatgacagaggagcagtcccagagcttcttgacagagtttatcaattacattaagcagtccaaggtcgtgttactcgaggatttggcctcgcaagtggggctgagaactcaagacaccattaacagaatccaggacctcttagctgagggcactattacaggcgtgattgatgatcggggtaaatttatttatattacacctgaagagctggcagctgtcgcaaactttattcgtcagcgcggtagagtctctatcgctgaactggcccaggccagcaatagccttatcgcctggggcagggagagcccagcccaagctccagcatag

SEQ ID NO: 214145 - DNA, 897 bp, Artificial Sequence
  derived and/or modified sequence
atggttgcccctgtctggtacctggttgcagcggctttactcgtgggcttcattctcttcctcacaaggtcacgcggacgcgctgcctctgccggacaggagccactccataacgaggagctggctggcgctgggagggtggctcagcctggaccactggagccggaagaaccgagggccggaggtcgaccaaggcggaggagggatttgggaagtcgtcttcaggcccaacggagggctcaaagggtagcatgggcagaagccgatgaaaatgaggaggaggccgtgatcctggcccaggaagaagaaggcgtggaaaaacccgctgagacccacctaagcggaaagattggggctaagaagttacgcaagctggaagagaaacaagctcgcaaggcccagcgagaggccgaagaggctgagcgggaggaacgaaagaggcttgagtcccagcgagaggcagaatggaagaaagaagaggagagactaaggctcgaggaagaacaaaaggaggaagaagaaagaaaggcacgtgaggaacaggcccagagggagcatgaggagtatttgaagctgaaggaggcatttgtggtagaagaggagggcgtgggcgaaaccatgactgaggaacaatcgcagagcttccttacagaatttattaactatatcaagcaatctaaagtggtgttactggaggatttggcaagccaggtgggcctgaggacacaggttagccctgggacatggccagccgtctgctccgtggcacgtgggctctggttggcagaacggacttgccccaaggaccgggtcttaatgcacaggttaccgtgcccacagcctcgagtgtctagcgcacagaaatcgcccggaaccctggggattttgcacttctag

SEQ ID NO: 214146 - DNA, 942 bp, Artificial Sequence
  derived and/or modified sequence
atggttgccccagtgtggtatctcgtcgcggcagccctgttagtgggctttattctctttctgacaagaagtaggggcagggctgctagtgccggacaggaaccactgcacaacgaggagctggcaggggctgggagggtggcacagcccggaccgctggaacccgaggaaccaagggccggtggacggccaagaagacggagggacctcggttcccgccttcaagctcaacgcagagcccagagggttgcctgggcggaagccgatgagaacgaagaagaggccgtgattctggctcaagaggaggagggggtggagaagcccgctgaaacacacctttctgggaaaattggcgctaagaaactgcgaaaactggaagagaaacaggcgagaaaggcacagcgagaagcagaggaagctgagagggaggaacggaagcgacttgagagtcaacgagaagccgaatggaaaaaggaggaggaaagactccgtctagaggaggagcagaaagaggaggaggagcggaaggccagggaggaacaggctcagagagagcatgaagagtacctgaaactgaaagaggctttcgtcgttgaggaggagggcgttggagaaaccatgacggaggaacaaagccagagttttctgaccgagttcatcaattatatcaagcagtcaaaagtcgttctgctggaagacctggcaagccaggtgggtttgcgcacacaggtgagccctgggacctggcctgccgtttgctccgtagccaggggtctgtggttggccgaacgtacgtgtcctaaggatagggtcttgatgcaccgcctgccctgtccccagccccgtgtgtcatccgctcagaagagccctggcaccctcggcatactgcacttttcattgatcgcttggggtagagagtcccctgcacaagcacccgcttag

SEQ ID NO: 214147 - DNA, 183 bp, Artificial Sequence
  derived and/or modified sequence
atgggccggcccctgctgctgcccctgctgctgctgctgcagcccccagccttcctgcagcccggcctgtgtgagcccgccctgtctgagctggaccggggcagcggggagcggctgccccaggacctgaagccagctgagggcggccctgtgtgtgtgttcctgcccagcagagctggatag

SEQ ID NO: 214148 - DNA, 450 bp, Artificial Sequence
  derived and/or modified sequence
atgggccggcccctgctgctgcccctgctgctgctgctgcagcccccagccttcctgcagcccggcctgtgtgagcccgccctgtctgagctggaccggggcagcggggagcggctgccccaggacctgaagccagctgagggcggccctgtgtgtgtgttcctgcccagcagagctggccaccctgagatccgggaggccgctgtggccgtgcaccagggcgaccagacccaccaccaccctggctgccacaaccaccaccacctggaggcccagcagcacaaccaccacagccggccccagggccacaggaagcagagggccctgcgcatcatggcccccaagagcggccactgccaccagggctgcatcggctgccgctgtgcccagaactgccacttcggcacagctgtgcccccacctcctgtggtggaggagaaggagaggtag

SEQ ID NO: 214149 - protein, 248 aa, Artificial Sequence
  derived and/or modified sequence
MRLIQNMCTIAEYPAPGNAAASDCCVGAAGRRLVKIAVVGASGVGKTALVVRFLTKRFIGDYERNAGNLYTRQVQIEGETLALQVQDTPGIQVHENSLSCSEQLNRCIRWADAVVIVFSITDYKSYELISQLHQHVQQLHLGTRLPVVVVANKADLLHIKQVDPQLGLQLASMLGCSFYEVSVSENYNDVYSAFHVLCKEVSHKQQPSSTPEKRRTSLIPRPKSPNMQDLKRRFKQALSAKVRTVTSV

SEQ ID NO: 214150 - DNA, 747 bp, Artificial Sequence
  derived and/or modified sequence
atgcggctgatccagaacatgtgtaccatagctgaatatcccgcccccggcaacgccgccgccagtgattgctgcgtgggcgcggccggtcgcagactggttaaaatcgctgtcgtgggcgcctccggtgtgggaaaaactgccctggtggttaggtttctcactaaaagatttatcggcgactacgagcggaacgcaggaaacctgtacacaagacaagttcagatcgaaggtgagactctcgctctgcaagtgcaggatacgccagggatacaggtgcacgagaattcactcagctgtagtgaacaactgaatcgttgcattcggtgggcagatgctgtggtgatagtctttagcataacggactataagagttacgagttaatctcgcagctgcaccagcatgttcagcagctccatctgggcacccggctcccagtggtggtggttgccaataaggccgatctactgcacataaagcaggtggaccctcaactgggactgcagctggcatcaatgctcggctgcagcttctatgaggtatccgtctcagagaattacaacgatgtgtattccgccttccatgttctgtgcaaggaggtgagccataaacagcagccaagctccacacccgagaaacggaggacgtctctgatacctcgccctaagtccccgaacatgcaggacttgaaaagaagatttaagcaggccttgtccgccaaagtccggacagtgacctccgtctag

SEQ ID NO: 214151 - DNA, 747 bp, Artificial Sequence
  derived and/or modified sequence
atgaggctcatccagaacatgtgcaccatcgccgagtacccagcccctggaaatgctgctgccagtgactgctgcgtgggcgctgctggaagaaggctggtgaagattgctgtggtgggcgccagcggcgtgggcaagacagccctggtggtgcgcttcctgaccaagcgcttcatcggggactatgaaagaaatgccggcaacctgtacacccggcaggtgcagatcgagggggagaccctggccctgcaggtgcaggacaccccaggcatccaggtgcatgagaacagcctgagctgcagcgagcagctgaaccgctgcatccgctgggcagatgctgtggtgattgtgttcagcatcacagactacaagagctatgagctgatcagccagctgcaccagcacgtgcagcagctgcacctgggcacccggctgcctgtggtggtggtggccaacaaggctgacctgctgcacatcaagcaggtggacccccagctgggcctgcagctggcctccatgctgggctgcagcttctatgaggtgtctgtgtctgagaactacaatgatgtgtacagcgccttccacgtgctgtgcaaggaggtgagccacaagcagcagcccagcagcaccccagagaagaggaggaccagcctcatcccccggcccaagagccccaacatgcaggacctgaagaggcgcttcaagcaggccctgagcgccaaggtgaggacagtgacctctgtgtag

SEQ ID NO: 214152 - DNA, 747 bp, Artificial Sequence
  derived and/or modified sequence
atgcggctgatccagaacatgtgcaccatcgccgagtaccccgccccaggcaacgctgctgcctctgattgttgcgtgggggctgccgggaggagattggtgaaaatcgccgtcgttggagcatctggagttggcaagaccgcgcttgtggtgaggttcctcaccaaacgtttcatcggtgattatgagcggaacgctggaaatttgtatacacggcaagtacagatcgaaggagagaccctagcactgcaggtgcaggacaccccaggcattcaggtgcatgaaaactccctctcgtgctctgaacagctcaatagatgcatccggtgggccgatgcagtggttattgtgttctcaataacagactacaaatcatatgaactgatcagtcaacttcatcagcacgtgcagcagctccatctcgggacgcggctgcctgtggtagttgtagccaacaaagccgatttactgcacattaaacaggtggatccacagctaggcttgcagcttgcaagtatgttagggtgcagcttctatgaagtgagcgtgtccgagaactataatgacgtgtattctgcattccatgtattatgcaaagaagtatcccataaacagcagccgtcctcaacaccggagaaacgcaggacaagcctcatcccccgtccgaagagcccgaacatgcaggatctcaaaagacggttcaaacaggctctatcagcaaaagttagaaccgttactagcgtttag

SEQ ID NO: 214153 - DNA, 747 bp, Artificial Sequence
  derived and/or modified sequence
atgaggctcattcaaaacatgtgtacaatcgcggagtaccctgcgccaggaaacgccgctgcctcagactgctgcgtgggagcagccggacggagacttgtaaagatagccgttgtcggagccagcggggtgggcaagactgcgctggttgtgcggttcctgactaaaaggtttataggtgactacgagagaaatgcagggaacctatacactagacaagtacagatcgagggcgagacgctggcactgcaggtgcaggacacaccgggtattcaggtgcacgagaattctcttagctgcagcgagcagctcaacagatgcattcgttgggccgatgccgtcgtgatcgtttttagcatcaccgactacaagagttatgagctgataagtcagctgcaccaacatgttcagcagctgcaccttggaacacgccttcccgttgtggttgtggctaataaagctgatttgctgcacatcaaacaggtggaccctcagcttggcctccagctggcgagcatgttgggatgcagcttctatgaggtttcggtctcggaaaactacaatgacgtgtactctgctttccacgtgttgtgcaaggaagtgtcacataaacagcagccatcctccactcctgagaagaggcgcaccagcttgattcccaggcctaaaagcccaaatatgcaggacctaaaaagaaggttcaagcaggccttgagcgccaaggtgcgaaccgtaaccagcgtgtag

SEQ ID NO: 214154 - DNA, 1993 bp, Artificial Sequence
  derived and/or modified sequence
aaaacagccggcgcgccgcgcgagtgcagtctgggtctggagcctgagccctgcggaacctcggcgctcggccccaccccgcccgtacctgcacttatttattgttgttatttcttaccgcggagccccgcagtcgggtcctcccgcccgctcccgcgcagcgctagcattctccagtccctcagtcccttcccgcgcggtgcgccgcagccgaggcgatgcgcctcattcagaacatgtgcaccatcgccgagtaccccgcgccgggcaacgccgcggcctccgactgctgtgtgggcgccgccggccgccgcctggtcaagatcgccgtggtgggcgccagcggcgtgggcaagaccgcactggtggtccggttcctcaccaaacgattcatcggtgactatgaaagaaatgcaggtaatctctatactagacaagttcagatagaaggtgaaaccctggctcttcaggttcaagacactccaggtattcaggtccatgagaacagcctgagctgcagtgaacagctgaataggtgcattcgctgggcagatgctgtggtgatcgttttctccatcactgactacaagagctatgaactcatcagccagctccaccagcacgtgcagcagctacacctgggcacccggctgcctgtggtggtcgtggccaacaaagctgacctgttgcacatcaaacaggttgaccctcagcttggactgcagctagccagcatgctaggctgctcattctatgaagtgtctgtcagtgaaaattataatgatgtctacagcgccttccacgtcctctgtaaagaggtcagtcacaaacagcagcctagcagtacacccgagaagcgaagaacctccctcattcccaggcccaagtcacccaacatgcaggacctgaagaggaggtttaagcaagccctctctgccaaagtgaggactgtcacctccgtctgaagcaggaggagcactcaagggggtttggtcttcccaggaagagggcctgaggttctcctagtgcaggaacgttgaatattggcaatgattcctggttccagaaagggctggagcagaagggccaagagggcctgtggaactgctacagaaaaggaagtgttgttctgagcagggggacaggattgatgaggcttgaaagagcccactgagccactctctgaatatgtgaaatgtactctgtgtcttttcctttagagtggggagggggcataatcgtttcggtttctgcattcaactaccttgtaaatggtggtccgttgcagtttcaccaaatgtattgatgtgatttacagtgggaatgaaagaacagattaagcattgataggctttcttttttcccccttttttcttttttctcttttcttctttcttttcctctttttccccaagaggaagaattgcttttctcttaccagtatgatttgtaactctggaacactattcttacagaatgcctttctaacctgaaggatacccagatttctttctttatgtacaagatggaaaatcccctacccctcaaaaacaggttgagtttatgggccagaatattttgtataccagacattggtaagctctcatggtttacaggaaggctctggttccccctcacaggatgagcatgctcagttgggcgtgtgtggaggagctgtgaacttcacgctcttcaaccccagactttgactgtatagttttttgtttttttaactgttccatcaggaaaaaaatgtgtcagttgattttggtgtgacttgtgtaaatggttcatggcaatgacgttgggttgcttcctaggcctggctgagttgtgcctaagggtggctgaaatactaaaacacttatcttacagcaagtgaacaggggctacctgccacatcccctccacagatgcactttaaaaagccactcatgctttggcttaaactgtaattaatttattttatgtacaataaatcgcatttgaaaaa

SEQ ID NO: 214155 - DNA, 747 bp, Artificial Sequence
  derived and/or modified sequence
atgagactgatccagaacatgtgcaccatcgccgagtaccccgcccccggcaacgccgccgccagcgactgctgcgtgggcgccgccggcagaagactggtgaagatcgccgtggtgggcgccagcggcgtgggcaagaccgccctggtggtgagattcctgaccaagagattcatcggcgactacgagagaaacgccggcaacctgtacaccagacaggtgcagatcgagggcgagaccctggccctgcaggtgcaggacacccccggcatccaggtgcacgagaacagcctgagctgcagcgagcagctgaacagatgcatcagatgggccgacgccgtggtgatcgtgttcagcatcaccgactacaagagctacgagctgatcagccagctgcaccagcacgtgcagcagctgcacctgggcaccagactgcccgtggtggtggtggccaacaaggccgacctgctgcacatcaagcaggtggacccccagctgggcctgcagctggccagcatgctgggctgcagcttctacgaggtgagcgtgagcgagaactacaacgacgtgtacagcgccttccacgtgctgtgcaaggaggtgagccacaagcagcagcccagcagcacccccgagaagagaagaaccagcctgatccccagacccaagagccccaacatgcaggacctgaagagaagattcaagcaggccctgagcgccaaggtgagaaccgtgaccagcgtgtag

SEQ ID NO: 214156 - DNA, 1575 bp, Artificial Sequence
  derived and/or modified sequence
atgagcctcctctccctgccctggttgggattgcggccagtcgctaccagtccgtggctgctcctcctcctggtggtggggtcctggctgctggcacggatcctcgcctggacatacgccttctacaataattgtcgtagacttcaatgtttcccccagccgcctaagaggaattggttttgggggcatctcggcttgattaccccaacagaggaagggctcaagaactccacacagatgtctgccacatacagtcaaggttttactatctggctgggacccattataccgttcatcgtactgtgccaccccgacaccatcagaagcattactaatgcttcagcagctatagcccctaaagacaacttgttcatccggttcttgaaaccctggttgggagagggcatcctgctgtcgggaggagacaagtggagtagacataggcggatgctgaccccagccttccactttaatattctgaagagttatataaccatattcaacaagtcagcgaacatcatgctggacaaatggcagcaccttgcttcagagggcagctcctgcctcgatatgttcgagcacataagcctaatgacgttggactccctgcagaagtgtatcttcagctttgactcgcactgccaggaacggcccagcgaatacatcgccactatcctcgagttatccgctctggtggagaaacgaagccagcatattctgcagcacatggactttctttactacctgagccatgatgggcgtaggtttcaccgtgcctgccggctggtgcatgacttcactgatgcagtcatacgcgaaaggcggcgcaccctgccaacgcaaggaattgacgacttctttaaagataaggccaaatcaaagacccttgattttattgatgttcttctgctctccaaggatgaggatggaaaggcactgtccgatgaggacatccgggctgaggcagacactttcatgtttggcggacatgatactactgcttccggcttgagctgggttttatataacttagctagacacccggaatatcaggagcgctgcaggcaggaggttcaagagttgctgaaagatagggatcccaaagagattgaatgggacgaccttgcccaactcccattcctcaccatgtgcgtaaaggagagcctccggttgcatcctcctgcacctttcataagtaggtgctgcacacaggatatcgtgttgccagacggccgcgtgatcccaaagggaatcacttgtttaattgacattatcggcgttcaccacaatccgacagtgtggcctgacccagaagtgtatgacccatttagatttgatcctgagaattctaaaggtcgttcccctctggcattcatacctttttcggcaggcccccggaactgtattggtcaagccttcgccatggcagaaatgaaggtggtgctagcgctgatgttactccatttccgatttcttcccgaccataccgagccaaggcgcaaactggagctgatcatgagagctgagggcggcctgtggctacgagtcgagccgctaaacgtcagtctccaatag

SEQ ID NO: 214157 - DNA, 1575 bp, Artificial Sequence
  derived and/or modified sequence
atgtcccttttatcgctcccctggctgggactgcgacccgtagcgacgagcccttggttactactgctgctggtagtggggtcatggcttttggctaggatcttagcctggacttacgccttttacaacaattgtagaaggctgcaatgtttcccacagccccccaagaggaactggttctggggccatctcggactaattaccccaaccgaagagggtctcaaaaacagcacacagatgtccgctacctattcgcaaggatttactatttggttaggcccaatcattccgttcatcgtgctgtgccacccagacactatacggtccattacgaacgccagtgcggctatcgcgcccaaagataacttattcatcaggttcttgaaaccatggctcggcgaaggaattctactgtctgggggagacaaatggtccagacatcggcgtatgctcaccccggcattccatttcaatatactaaagagctacatcaccatattcaacaagtcagcaaatattatgctggacaagtggcagcatcttgcctcggagggatcttcatgcctggatatgtttgaacatatctcactcatgacactagactctttacagaaatgtatattctcctttgacagtcattgtcaagaacgcccttctgagtacatagcaaccattttggaactgtcggctctcgtcgagaagaggtcgcagcacattttacagcacatggatttcctctattatctgagtcacgatggccgcaggtttcaccgcgcttgccggctggtacatgacttcaccgacgcagtgatacgagaacgccgtcgcacactaccaacccaggggatcgacgacttctttaaagataaggcaaaatctaaaacacttgacttcatcgatgttctgctcctgtctaaggatgaagatggcaaagctttgagtgatgaggacatcagagccgaggccgatactttcatgttcggaggccacgacaccacagcatctggcctgtcctgggtgctgtacaacctggcgaggcatcccgagtaccaggaaagatgtcgccaagaagtgcaagagctgttgaaggatagggacccaaaggagattgaatgggacgacctggcgcagttgccatttttgaccatgtgcgtcaaggaatccctccggcttcacccccctgcaccattcatctcaaggtgctgcacccaagacatagtgcttccggacggccgcgtcatccctaaaggaattacctgcctcattgacattattggcgtgcaccacaatcctacagtttggcctgaccccgaggtgtacgaccctttcaggtttgatcccgagaattccaagggaaggagccccctggcgttcatcccattctccgccggtccccgaaattgtatcggtcaagcttttgcaatggccgagatgaaagtggtgcttgcacttatgctgctgcactttcgatttcttcctgaccacaccgagccacgtcgcaagctggaactcataatgcgggccgaggggggcctctggctgagggtcgagcccttaaacgtgagcctgcagtag

SEQ ID NO: 214158 - DNA, 1575 bp, Artificial Sequence
  derived and/or modified sequence
atgagcctgctgagcctgccctggctgggcctgcggcctgtggccaccagcccctggctgctgctgctgctggtggtgggctcctggctgctggcccgcatcctggcctggacctacgccttctacaacaactgccggcggctgcagtgcttcccccagccccccaagaggaactggttctggggccacctgggcctcatcacccccacagaggagggcctgaagaacagcacccagatgtctgccacctacagccagggcttcaccatctggctgggccccatcatccccttcatcgtgctgtgccacccagacaccatccgcagcatcaccaatgccagcgctgccatcgcccccaaggacaacctcttcatccgcttcctgaagccctggctgggggagggcatcctgctgtctggaggagacaagtggagccgccacaggaggatgctgaccccagccttccacttcaacatcctgaagagctacatcaccatcttcaacaagagcgccaacatcatgctggacaagtggcagcacctggccagcgagggcagcagctgcctggacatgtttgagcacatcagcctgatgaccctggacagcctgcagaagtgcatcttctcctttgacagccactgccaggagcggcccagcgagtacatcgccaccatcctggagctgagcgccctggtggagaagaggagccagcacatcctgcagcacatggacttcctgtactacctgagccatgatggccgccgcttccaccgggcctgccgcctggtgcatgacttcacagatgctgtgatccgggagaggaggaggaccctgcccacccagggcattgatgacttcttcaaggacaaggccaagagcaagaccctggacttcattgatgtgctgctgctgagcaaggatgaagatggcaaggccctgagtgatgaggacatccgggcagaggccgacaccttcatgtttggaggccatgacaccacagccagcggcctgtcctgggtgctgtacaacctggcccggcaccctgagtaccaggagcgctgccggcaggaggtgcaggagctgctgaaggaccgggaccccaaggagattgagtgggatgacctggcccagctgcccttcctgaccatgtgtgtgaaggagagcctgcggctgcaccccccagcccccttcatcagccgctgctgcacccaggacatcgtgctgcctgatggccgggtcatccccaagggcatcacctgcctgattgacatcattggagtgcaccacaaccccaccgtgtggccagaccctgaggtgtatgaccccttccgctttgatcctgagaacagcaagggccgcagccccctggccttcatccccttctctgctggccccaggaactgcatcggccaggcctttgccatggccgagatgaaggtggtgctggccctgatgctgctgcacttccgcttcctgcctgaccacacagagcccaggaggaagctggagctgatcatgagagctgagggcggcctgtggctgcgggtggagcccctgaatgtgtccctgcagtag

SEQ ID NO: 214159 - DNA, 1575 bp, Artificial Sequence
  derived and/or modified sequence
atgagcctgctgagcctgccctggctgggcctgcggcccgtggccacctctccttggctgctccttttgctcgttgttgggagctggctgctagccagaatcctcgcttggacatatgctttctacaacaactgtagaaggctgcaatgttttccacaaccccctaaacggaactggttttggggccatctaggcttaatcacccccacagaggaaggcctcaagaactctactcaaatgagtgccacgtattcccagggattcacaatatggctcggcccaattattccatttattgtgctatgccaccccgacaccattaggagtattactaatgcgtctgcggcaattgcccccaaggacaatcttttcattcgttttctgaagccatggctgggtgagggcatactgctgtccggtggagacaaatggagccgtcaccgacgaatgttaacaccagcctttcattttaatatccttaagtcttacattactattttcaacaagtccgcaaatattatgcttgacaagtggcagcatctagcctctgaaggctcctcctgccttgatatgtttgagcatatctccttgatgacgctggacagtctccagaaatgtatcttctccttcgactcccattgtcaggagaggccatccgaatacatcgctaccatactggaactgtcagcactggtagaaaagagaagtcaacacatcctgcagcatatggattttttgtactacttaagtcacgacggtcgcagattccaccgcgcgtgtagacttgtgcacgactttacagacgccgtgatacgagagaggcgccggactctgcctacacagggaatcgacgactttttcaaagataaggccaagtcaaagaccctggactttatcgacgtgctattactgagcaaagatgaggacggcaaggcgctatccgacgaggacattcgcgccgaggccgatacatttatgtttggcggccacgacaccactgcctctggtctgtcttgggtgttgtataacctggccagacaccccgagtatcaggagagatgtcggcaggaagtccaggagctgctcaaggaccgggatcctaaagaaatagagtgggatgatctggctcaactgcctttcctcaccatgtgcgtgaaagaaagcttgcgcctgcacccccctgccccatttatctcccggtgttgcacgcaggacatagtgctgccagacggcagagtgatccccaaagggataacctgtctgatcgatattattggggtgcaccataatcctaccgtgtggcctgatccggaagtctacgatccattccgattcgatccggaaaattctaaaggccgtagtcccctggcattcatacccttttctgctgggcccaggaactgcattgggcaggcctttgccatggccgagatgaaggttgtattagcacttatgctccttcacttcaggttcttgcccgaccacacagagccccggagaaagctggagctgatcatgcgtgccgagggcggactgtggttgcgcgttgagccccttaatgtgtccctccagtag

SEQ ID NO: 214160 - DNA, 1575 bp, Artificial Sequence
  derived and/or modified sequence
atgagcctgctgagcctgccctggctgggcctgcggcccgtggccactagtccatggttgctgctccttcttgtagttgggagttggctcctggctagaattctagcctggacttacgctttttacaataattgtagacgtttacagtgcttcccgcagccccctaaaagaaactggttctgggggcacctaggtctgatcacacccactgaggaagggttgaaaaactcaacccagatgagtgctacctactcacaaggatttacaatttggctaggccccattatccctttcatcgtgctatgtcacccagacaccatcagatcaatcactaacgcctccgcagcaattgccccaaaggataatctttttatccgcttcttaaagccctggttgggcgaaggaatactcttgtccgggggagacaagtggagtaggcatcgcaggatgcttaccccagcctttcactttaacatcctcaagtcatatattacaatcttcaataaaagcgccaacatcatgttagacaagtggcaacacttggcctcagagggctcaagctgcctggacatgttcgaacacatcagcctgatgacacttgacagtctgcaaaagtgtatattttccttcgatagccattgccaggaaaggccaagcgaatatatagcaacaatccttgagctttcagccctggtggagaaaaggtcgcagcacatccttcagcatatggacttcctgtactatttatctcacgacggccgccggtttcaccgggcatgccgcctggtacacgacttcaccgatgccgttattcgtgagcggagacgcaccctgccaacccaaggaattgatgatttctttaaggacaaggctaagtccaaaaccttggactttatcgatgtgctccttctgagcaaagacgaagatggaaaggccctctccgatgaggacattcgggcagaagcggacaccttcatgttcggtggccacgacaccacggcttctgggctgagttgggtgctgtataacttagcacggcatcccgaatatcaagagagatgtcgccaggaggtgcaggaactcctgaaagatcgcgatcccaaagaaattgaatgggatgacctggcgcagttaccatttctgaccatgtgcgttaaagaatcccttcgactgcatccccctgcgccatttattagcaggtgctgtacacaagacattgtacttccagatggaagggtgatccctaaaggcattacttgcttgattgacataattggagtgcaccacaatcctaccgtgtggcccgaccccgaagtctacgacccatttcgattcgatcccgagaatagcaaaggaagaagtcctctggcctttattcctttttcagctgggcccaggaattgcatcggccaagcgttcgccatggcggaaatgaaagtggtgctggcactgatgttgctccactttcgcttcttgccggaccataccgagccccgtcgaaagctcgagctaatcatgagggctgagggggggctgtggctgcgggtggaaccattgaacgttagcctgcagtag

SEQ ID NO: 214161 - DNA, 1575 bp, Artificial Sequence
  derived and/or modified sequence
atgagtctgctatcgcttccttggctcggccttcgccctgtcgctacttctccgtggctcctactgctgctcgttgtcggctcctggctcttggctagaatattggcttggacatacgctttttacaataactgccggaggttgcagtgttttccccaaccgccaaaacggaactggttttgggggcacctcggactgatcactcctacggaagaaggcctgaaaaacagcacgcagatgagcgccacctactcacaggggttcaccatctggctgggcccaatcattcccttcattgtcctttgccaccccgacacaattaggtctatcaccaacgctagtgcagcgatcgcccctaaagataacctcttcattcgatttctaaagccgtggcttggagagggaatcctcctctcaggtggggataaatggtctcgacaccgaagaatgctgactccagcattccatttcaatatactcaagtcatacatcaccatctttaataaatctgctaacattatgctggacaaatggcaacacctcgccagtgaaggctcctcttgtttggatatgtttgagcacatttctctgatgacactggattcgctgcagaagtgcatattctcgttcgactcccactgccaggagcgcccttccgaatatattgccaccattttagagctttcggcactggtggagaagcgcagtcaacacattttgcaacatatggacttcctgtactatttaagtcatgatgggaggcggtttcatagggcgtgcaggttggtccacgactttacagacgcggtgatccgggagcgacggaggaccctcccgacacagggtattgacgacttttttaaggacaaggctaaaagcaaaactctggattttatcgacgtgttgctcctctctaaggacgaggacggtaaggctctttctgacgaagatatccgcgcagaggctgacacattcatgttcggagggcatgatacaacagcgtccggcctgtcatgggtgctgtacaacctcgcccgacacccagaataccaggagaggtgtagacaagaagtccaggaactgctcaaggatagggatcctaaggaaattgaatgggacgacctcgcacaattgcctttcttgacaatgtgtgtgaaggagtcactccgcctgcaccctccagcccctttcataagcaggtgttgcactcaggacatcgtgttgccagatggcagggtcatcccaaagggcatcacttgtcttattgacattatcggagtccaccacaacccaacagtgtggcccgaccctgaagtctacgatcccttcagattcgatccagagaatagcaaggggcgaagcccactcgcctttatcccatttagtgcaggcccacggaactgcatcgggcaggccttcgcaatggccgagatgaaggtcgtgttagcccttatgctgctgcattttcgcttcctccccgaccacaccgaacccagacgaaagttggaattaatcatgcgcgcagaaggcggtctgtggttgagggttgaaccactgaacgtcagcctgcagtag

SEQ ID NO: 214162 - DNA, 1575 bp, Artificial Sequence
  derived and/or modified sequence
atgagtttgctttcactgccttggctggggcttaggcctgtcgccacttccccatggcttttgttgctgctggtcgtggggagctggttgctcgctcgcattctggcatggacatacgccttctacaacaattgccgcaggctgcagtgttttcctcagccgcctaaacggaactggttctggggccatctgggcctgatcacacctaccgaggaggggctgaagaattcaactcagatgagtgctacatatagccagggttttactatctggctaggtcccattattccgtttattgtgctctgccatcccgacacgatccgaagcataaccaacgcgagtgctgccatcgcaccgaaagataacctctttattcggttcctcaaaccatggttgggggaaggcatactgttaagcgggggagacaagtggagtcgtcatcggaggatgcttactcctgcatttcatttcaatatactgaagtcatacataacaatatttaacaagagcgctaacattatgctcgacaaatggcagcacctcgcgtctgagggctcatcttgcctcgacatgttcgagcacatctcgcttatgactctggacagcctgcagaaatgtattttttcttttgactctcattgccaggaaaggcccagtgaatacatagcaactatccttgaactctcggcacttgtggagaagcggtcacaacacatactgcagcacatggactttttgtactaccttagtcacgacggcagaaggtttcaccgcgcatgtaggctggtccacgactttacagacgccgttattcgcgagcggagacgcaccctgccaactcagggtattgatgacttcttcaaggataaagcgaagtcaaaaaccctggactttatcgatgtcctcctgctgtccaaggacgaggacggcaaggcgctcagcgatgaggatatcagggccgaggccgataccttcatgtttggcggacacgataccacagcttccggcctgagctgggtgctctataatctggcacggcaccccgaatatcaggaacgttgcaggcaggaagttcaagagctgctgaaggatagggaccccaaggagatcgagtgggacgacttggcgcaacttcccttcttgactatgtgtgtgaaagagtcattaagactgcaccccccagctcctttcattagccgctgttgtactcaggacattgtcctacctgacggacgagtgattcccaaggggatcacctgcctgatagatataataggcgtccaccataatcccactgtgtggccagacccagaggtgtacgatccctttagatttgaccctgaaaacagtaagggacgctctccgttagccttcatcccattctcggcgggtcctcgtaactgtatcggccaggcctttgcaatggctgagatgaaggtagtgcttgccctgatgttactgcacttccgctttctgcccgaccacaccgaacccaggcgcaaactggagctgataatgcgagcagagggcggtctgtggcttcgcgtggagcctcttaatgtttccctgcagtag

SEQ ID NO: 214163 - DNA, 1575 bp, Artificial Sequence
  derived and/or modified sequence
atgagcctgctgagcctgccctggctgggcctgagacccgtggccaccagcccctggctgctgctgctgctggtggtgggcagctggctgctggccagaatcctggcctggacctacgccttctacaacaactgcagaagactgcagtgcttcccccagccccccaagagaaactggttctggggccacctgggcctgatcacccccaccgaggagggcctgaagaacagcacccagatgagcgccacctacagccagggcttcaccatctggctgggccccatcatccccttcatcgtgctgtgccaccccgacaccatcagaagcatcaccaacgccagcgccgccatcgcccccaaggacaacctgttcatcagattcctgaagccctggctgggcgagggcatcctgctgagcggcggcgacaagtggagcagacacagaagaatgctgacccccgccttccacttcaacatcctgaagagctacatcaccatcttcaacaagagcgccaacatcatgctggacaagtggcagcacctggccagcgagggcagcagctgcctggacatgttcgagcacatcagcctgatgaccctggacagcctgcagaagtgcatcttcagcttcgacagccactgccaggagagacccagcgagtacatcgccaccatcctggagctgagcgccctggtggagaagagaagccagcacatcctgcagcacatggacttcctgtactacctgagccacgacggcagaagattccacagagcctgcagactggtgcacgacttcaccgacgccgtgatcagagagagaagaagaaccctgcccacccagggcatcgacgacttcttcaaggacaaggccaagagcaagaccctggacttcatcgacgtgctgctgctgagcaaggacgaggacggcaaggccctgagcgacgaggacatcagagccgaggccgacaccttcatgttcggcggccacgacaccaccgccagcggcctgagctgggtgctgtacaacctggccagacaccccgagtaccaggagagatgcagacaggaggtgcaggagctgctgaaggacagagaccccaaggagatcgagtgggacgacctggcccagctgcccttcctgaccatgtgcgtgaaggagagcctgagactgcacccccccgcccccttcatcagcagatgctgcacccaggacatcgtgctgcccgacggcagagtgatccccaagggcatcacctgcctgatcgacatcatcggcgtgcaccacaaccccaccgtgtggcccgaccccgaggtgtacgaccccttcagattcgaccccgagaacagcaagggcagaagccccctggccttcatccccttcagcgccggccccagaaactgcatcggccaggccttcgccatggccgagatgaaggtggtgctggccctgatgctgctgcacttcagattcctgcccgaccacaccgagcccagaagaaagctggagctgatcatgagagccgagggcggcctgtggctgagagtggagcccctgaacgtgagcctgcagtag

SEQ ID NO: 214164 - protein, 1253 aa, Artificial Sequence
  derived and/or modified sequence
MVVALRYVWPLLLCSPCLLIQIPEEYEGHHVMEPPVITEQSPRRLVVFPTDDISLKCEASGKPEVQFRWTRDGVHFKPKEELGVTVYQSPHSGSFTITGNNSNFAQRFQGIYRCFASNKLGTAMSHEIRLMAEGAPKWPKETVKPVEVEEGESVVLPCNPPPSAEPLRIYWMNSKILHIKQDERVTMGQNGNLYFANVLTSDNHSDYICHAHFPGTRTIIQKEPIDLRVKATNSMIDRKPRLLFPTNSSSHLVALQGQPLVLECIAEGFPTPTIKWLRPSGPMPADRVTYQNHNKTLQLLKVGEEDDGEYRCLAENSLGSARHAYYVTVEAAPYWLHKPQSHLYGPGETARLDCQVQGRPQPEVTWRINGIPVEELAKDQKYRIQRGALILSNVQPSDTMVTQCEARNRHGLLLANAYIYVVQLPAKILTADNQTYMAVQGSTAYLLCKAFGAPVPSVQWLDEDGTTVLQDERFFPYANGTLGIRDLQANDTGRYFCLAANDQNNVTIMANLKVKDATQITQGPRSTIEKKGSRVTFTCQASFDPSLQPSITWRGDGRDLQELGDSDKYFIEDGRLVIHSLDYSDQGNYSCVASTELDVVESRAQLLVVGSPGPVPRLVLSDLHLLTQSQVRVSWSPAEDHNAPIEKYDIEFEDKEMAPEKWYSLGKVPGNQTSTTLKLSPYVHYTFRVTAINKYGPGEPSPVSETVVTPEAAPEKNPVDVKGEGNETTNMVITWKPLRWMDWNAPQVQYRVQWRPQGTRGPWQEQIVSDPFLVVSNTSTFVPYEIKVQAVNSQGKGPEPQVTIGYSGEDYPQAIPELEGIEILNSSAVLVKWRPVDLAQVKGHLRGYNVTYWREGSQRKHSKRHIHKDHVVVPANTTSVILSGLRPYSSYHLEVQAFNGRGSGPASEFTFSTPEGVPGHPEALHLECQSNTSLLLRWQPPLSHNGVLTGYVLSYHPLDEGGKGQLSFNLRDPELRTHNLTDLSPHLRYRFQLQATTKEGPGEAIVREGGTMALSGISDFGNISATAGENYSVVSWVPKEGQCNFRFHILFKALGEEKGGASLSPQYVSYNQSSYTQWDLQPDTDYEIHLFKERMFRHQMAVKTNGTGRVRLPPAGFATEGWFIGFVSAIILLLLVLLILCFIKRSKGGKYSVKDKEDTQVDSEARPMKDETFGEYSDNEEKAFGSSQPSLNGDIKPLGSDDSLADYGGSVDVQFNEDGSFIGQYSGKKEKEAAGGNDSSGATSPINPAVALE

SEQ ID NO: 214165 - protein, 84 aa, Artificial Sequence
  derived and/or modified sequence
MVVALRYVWPLLLCSPCLLIQIPEEYEGHHVMEPPVITEQSPRRLVVFPTDDISLKCEASGKPEVQFRWTRDGVHFKPKEELGV

SEQ ID NO: 214166 - protein, 1255 aa, Artificial Sequence
  derived and/or modified sequence
MVVALRYVWPLLLCSPCLLIQIPEESFPGHRVVMEPPVITEQSPRRLVVFPTDDISLKCEASGKPEVQFRWTRDGVHFKPKEELGVTVYQSPHSGSFTITGNNSNFAQRFQGIYRCFASNKLGTAMSHEIRLMAEGAPKWPKETVKPVEVEEGESVVLPCNPPPSAEPLRIYWMNSKILHIKQDERVTMGQNGNLYFANVLTSDNHSDYICHAHFPGTRTIIQKEPIDLRVKATNSMIDRKPRLLFPTNSSSHLVALQGQPLVLECIAEGFPTPTIKWLRPSGPMPADRVTYQNHNKTLQLLKVGEEDDGEYRCLAENSLGSARHAYYVTVEAAPYWLHKPQSHLYGPGETARLDCQVQGRPQPEVTWRINGIPVEELAKDQKYRIQRGALILSNVQPSDTMVTQCEARNRHGLLLANAYIYVVQLPAKILTADNQTYMAVQGSTAYLLCKAFGAPVPSVQWLDEDGTTVLQDERFFPYANGTLGIRDLQANDTGRYFCLAANDQNNVTIMANLKVKDATQITQGPRSTIEKKGSRVTFTCQASFDPSLQPSITWRGDGRDLQELGDSDKYFIEDGRLVIHSLDYSDQGNYSCVASTELDVVESRAQLLVVGSPGPVPRLVLSDLHLLTQSQVRVSWSPAEDHNAPIEKYDIEFEDKEMAPEKWYSLGKVPGNQTSTTLKLSPYVHYTFRVTAINKYGPGEPSPVSETVVTPEAAPEKNPVDVKGEGNETTNMVITWKPLRWMDWNAPQVQYRVQWRPQGTRGPWQEQIVSDPFLVVSNTSTFVPYEIKVQAVNSQGKGPEPQVTIGYSGEDYPQAIPELEGIEILNSSAVLVKWRPVDLAQVKGHLRGYNVTYWREGSQRKHSKRHIHKDHVVVPANTTSVILSGLRPYSSYHLEVQAFNGRGSGPASEFTFSTPEGVPGHPEALHLECQSNTSLLLRWQPPLSHNGVLTGYVLSYHPLDEGGKGQLSFNLRDPELRTHNLTDLSPHLRYRFQLQATTKEGPGEAIVREGGTMALSGISDFGNISATAGENYSVVSWVPKEGQCNFRFHILFKALGEEKGGASLSPQYVSYNQSSYTQWDLQPDTDYEIHLFKERMFRHQMAVKTNGTGRVRLPPAGFATEGWFIGFVSAIILLLLVLLILCFIKRSKGGKYSVKDKEDTQVDSEARPMKDETFGEYSDNEEKAFGSSQPSLNGDIKPLGSDDSLADYGGSVDVQFNEDGSFIGQYSGKKEKEAAGGNDSSGATSPINPAVALE

SEQ ID NO: 214167 - DNA, 3762 bp, Artificial Sequence
  derived and/or modified sequence
atggtagtggccctgcggtacgtgtggccgcttttattatgctccccatgcctgctgattcagatccccgaggagtatgagggacaccacgtcatggaacctcctgtgatcacagagcagtcccccaggcgtctggtagtttttcctaccgatgatattagcctcaagtgcgaggcaagcggtaaacccgaggttcagttccgatggacacgcgacggcgtgcacttcaaacctaaggaggaactgggggtcactgtatatcagtctcctcatagcggcagctttactattactggcaacaattcaaacttcgcccagcggttccagggcatctatcggtgttttgcatcgaataagttgggtacagctatgagtcacgaaatccggttaatggccgagggggcccccaagtggcctaaggaaacagttaagcccgtggaggtggaagaaggagagagcgtggtcctcccctgcaatcccccgccatcagccgagccactgcggatctattggatgaattccaagatcctgcacattaagcaggacgagcgcgttacaatgggccaaaacggcaacctgtactttgctaacgtcctcacgagcgacaatcactccgactacatctgccatgcacactttccaggcaccaggaccatcatccaaaaagagccgattgatctacgcgttaaagcgacgaactccatgattgataggaagccccggctgctctttccaacaaattcaagctcccatttagtagccttgcagggccagcccctggtgcttgaatgcatagccgagggctttcccactccgaccattaaatggcttagacccagcggcccaatgcctgccgaccgggtcacttaccaaaatcataacaagaccttacagttattgaaagtgggcgaggaagacgacggagagtatcgctgtctggcagaaaattccctgggttctgcccggcacgcatactacgtgaccgtcgaggctgccccgtactggctacacaaaccacagtctcatctatacgggcccggcgaaactgcgaggctggattgccaggttcagggtaggccacagcccgaggtcacatggagaatcaacgggattccggtggaagaactggccaaggaccagaaatatagaattcagagaggtgcactgatcctttccaacgtacaacccagcgacaccatggttacgcaatgcgaggctagaaacaggcacggcctgctcctggctaacgcttacatctacgtcgtgcagctccctgccaagatactgactgcggataaccagacctatatggccgtgcaaggctctaccgcctatctgctgtgtaaggcgttcggcgccccagtgcccagtgttcagtggctggacgaagatggcacaaccgtcctccaggatgagagattcttcccctacgccaacggaactttgggaatacgtgacttgcaggccaacgacacaggacggtacttttgcctcgcagctaatgatcagaataacgtaacaatcatggcaaatttgaaggtgaaagatgctacccaaatcacgcagggcccacggagcaccatcgaaaagaagggctcacgagtcaccttcacatgccaggcctctttcgacccttccctgcaaccctcaataacatggaggggggacggccgcgatctgcaggaactaggcgacagtgataagtatttcattgaagatggaaggctggtgatccattctcttgactacagcgatcagggcaattactcttgcgttgctagcaccgagcttgatgtggtagaatcgagagcccagctcctagtggtcggtagccccgggccagttcctcggttggttctgtccgacctgcaccttctaacccagagtcaagtcagagtctcctggagtcctgccgaggatcacaatgccccaattgagaagtacgatattgaattcgaggacaaggaaatggctcctgaaaagtggtacagcttgggtaaagttcccggaaatcagacctcgaccaccttgaaattgtccccctatgtccattatacatttcgcgttactgccattaacaaatacggaccaggcgagccttctccggtgagtgagaccgtggttacacctgaggccgcccctgagaagaatccagtggacgttaagggcgaaggcaacgaaaccactaatatggtgatcacttggaaacctctccggtggatggactggaacgctcctcaggtccagtaccgcgtgcagtggcggcctcaggggacacgaggaccctggcaggaacagattgtgtctgatccattcctggttgttagcaacacctccacattcgtcccttacgagatcaaagtccaggcagttaactcacagggaaagggacccgaacctcaggtcaccattgggtattccggagaagactatccccaggctattcccgagctcgagggtatcgagatcctgaactcctccgctgtacttgttaagtggcggccagttgatttggcccaggtcaaaggacacttacgcggctataatgtgacttattggcgtgagggtagccaaaggaagcactcaaaaaggcacatacacaaggatcacgtagtcgtgccagccaacacaaccagcgtgatcctgtctggccttcgcccatatagttcttaccacctcgaggtgcaagccttcaacggtcggggttccggccccgcttctgaatttaccttcagcactcccgagggcgtgccagggcatccagaagcgctgcacctcgagtgtcagagcaatacatctctgcttttgcggtggcagcccccactgtcccataacggcgtcctaaccggatatgtgttgtcctaccacccattggacgaaggcgggaaagggcagctgagtttcaatctcagggatcccgagttgaggacccataatctgaccgacctctctcctcacctgaggtatcgctttcagctccaggccactaccaaggaagggcccggcgaggccattgtcagagaaggtggtacaatggcgctgagcgggatctcagactttgggaatattagcgctacagctggagagaattactctgtcgtgtcttgggttcctaaggaggggcagtgcaactttcggttccatatcctgttcaaggcccttggcgaagagaagggcggtgccagtttaagcccccagtacgtatcttacaaccaaagtagctacacccagtgggacctgcagcctgataccgattacgaaattcatttatttaaagaacgcatgtttaggcaccagatggctgtgaaaaccaatgggacgggacgagtaaggctaccgcctgctgggttcgccaccgaaggatggttcattggcttcgtatccgccataattctgttgcttctggtgttgcttatcctgtgtttcattaagaggtctaagggtggtaaatactctgtgaaagacaaagaggacacccaggtggattccgaggccaggcctatgaaagacgagaccttcggggagtatagcgacaacgaagagaaggcgtttggttccagccaaccttcactcaatggggatatcaaacccttagggtcggatgatagtctggccgattatggcgggtcagtggatgtccagttcaacgaggatggatcctttattgggcaatattcaggaaagaaggagaaggaggcagccgggggaaacgattcaagcggcgccacttctccaatcaatcctgccgtggccttagaatag

SEQ ID NO: 214168 - DNA, 456 bp, Artificial Sequence
  derived and/or modified sequence
atggtcgtggctctaaggtatgtctggcccttgctcctgtgttcaccatgcctgctgattcaaatcccagaggagtacgagggacatcatgtgatggaacctcctgttatcacggagcagagccccaggagattggttgtattccccactgatgatatttctctgaaatgtgaggcttccgggaagccagaagtccagtttagatggacccgggacggtgtgcacttcaagcccaaggaggaactcggggttactgtttaccaaagcccacacagtggatcgtttactattactggcaataactcaaattttgctcagagatttcaaggaatttacaggtgttttgcgtctaacaagctggggaccgctatgagccacgaaatcagactgatggccgagggagctccaaagtggccaaaggaaactgttaaacccgtggaggtggaggaaggctag

SEQ ID NO: 214169 - DNA, 3768 bp, Artificial Sequence
  derived and/or modified sequence
atggtggtggccttgcggtatgtgtggccccttctgctttgctcaccctgtttgctaattcagattcctgaagaaagttttcctggacaccgagtcgtaatggagccacccgtaatcacagagcagtctccccgccgattggtggtgtttccaacagacgatataagtttgaagtgtgaagctagtggtaagcccgaggtacagtttagatggaccagagacggtgtacatttcaaaccaaaggaagagctcggtgtgaccgtctatcagagtcctcattccgggtcatttactattactggcaataacagcaacttcgcccagagattccaaggtatttacaggtgcttcgctagtaacaaactagggactgcgatgtctcacgagattaggttgatggccgagggtgcacccaagtggccaaaagagacagtcaagccagtggaggttgaggaaggagagtccgtggttttaccttgcaatcctccacctagtgccgagcctctgaggatctattggatgaacagcaagatactccatatcaaacaggatgagcgagtcacgatgggccaaaacgggaacttgtacttcgcaaacgtgctcaccagcgacaaccatagtgattacatctgccacgcgcactttccggggaccagaaccatcatccagaaggagccaatcgacctccgggtcaaagccaccaactcaatgatcgatcggaaaccgaggctcctcttccccaccaattccagctctcatctagtcgccctccagggacaaccactcgtacttgagtgcatcgctgagggcttccccacgcccacaataaaatggctgcgcccatcgggcccgatgcctgcggaccgagtgacatatcagaaccacaacaagactctacagcttttgaaagtcggggaggaggacgacggcgagtacagatgcctagcggagaatagtctgggctctgctcggcacgcatattatgtgactgtcgaagcggccccctactggctgcacaagccacagtcccacctctacggaccgggcgaaactgccaggctggactgtcaggttcaaggccgaccgcagcccgaggtcacatggaggatcaatggtatcccagtcgaggagctagccaaagatcaaaaatacagaatccagagaggagcgttgatcctgtctaacgtgcaaccgtccgacactatggtgacccagtgcgaagcgcgtaacaggcacggactgctgctggctaatgcctacatttatgtggtacaattgcccgcaaaaatcctgactgccgataatcagacctacatggctgtacaggggtctacggcctacctcctatgtaaggcttttggtgcacccgtgcccagcgtccagtggttggacgaggacggaactacagtcctgcaggacgaaaggttcttcccatacgctaacggcacgctgggaataagagacctccaggctaacgacaccggccgttacttctgcctggctgcgaatgaccagaacaacgtgacgatcatggccaatctgaaggtgaaggatgcaactcaaatcacgcagggtcccaggtcaacgatcgagaaaaagggctcccgagtgacatttacatgccaagcgagctttgatccctcacttcaaccttctattacctggagaggggacgggagagaccttcaggagctgggagactccgataagtactttattgaggatggaagactagtaattcattccctggattatagcgatcagggaaattacagctgcgtcgcctccaccgagcttgacgtggttgagagccgcgcccaactcctggtagtgggttctcccggtcccgtacctcggctggtgcttagtgacctgcacctgttgacccagtcccaggtgcgtgtgagttggagtcccgccgaggaccataatgctccaatcgagaaatacgacatcgagttcgaggacaaggaaatggctcccgagaaatggtactctctcggtaaagttcctggtaatcagacttctaccactttgaaactcagcccctatgttcattacacatttagggtaacggctataaacaaatacgggccaggcgaacccagtcccgtgtctgagactgtcgtaacccctgaagcagctcccgagaagaatccggtcgatgtcaagggagaaggcaatgaaaccactaatatggtgatcacatggaaacccctaaggtggatggattggaatgcgcctcaggttcagtacagggtgcagtggcgcccccaagggacgagggggccgtggcaggagcagattgtgagtgacccattccttgtcgtaagtaatacctctacctttgtgccatacgaaataaaagtgcaggcagtcaacagtcagggtaaaggaccggagccacaggtaactattgggtattctggggaagactaccctcaggctataccagagttggaaggcattgagatcctgaatagtagtgctgtcctggtcaagtggcgtcctgtggacttagcacaagtaaaggggcatctccgagggtataacgttacatactggcgcgagggcagccagagaaaacattctaagcgccacattcacaaggaccatgtggtcgtacccgcaaatacgacctccgtgatactgtcaggactccggccctattcctcgtatcacctcgaggttcaagccttcaacgggaggggcagtggtccagcttccgagttcaccttctccactcccgagggagtgccgggccaccccgaggccttgcacctagaatgtcagtccaacacctctctcttactgaggtggcaaccgcccctttcgcataacggggtcctgactgggtatgtcctctcgtatcaccccctggacgaagggggtaaaggccagctcagcttcaatctgcgggatcccgagctgcgtacccacaacctgaccgatttgagtccccacctcagataccgcttccaactccaggcgactaccaaggaagggcccggagaggctattgtccgcgagggagggaccatggccctgtctgggatctcagattttgggaatattagcgctacagcgggagagaactactctgtcgtaagctgggtccccaaggaggggcaatgcaactttagattccatatcttgtttaaggctctcggtgaggaaaagggcggagcatccctatccccccagtatgtcagttacaaccagagttcatatacccaatgggacctacagcccgatactgactatgagattcacttattcaaagaacgcatgtttcgacaccagatggccgtgaagactaacgggacaggccgcgtgcggctcccaccagccgggtttgctactgaagggtggttcatcggcttcgtctcagcaatcattctgttattacttgtactgctaattctttgctttattaagcgtagcaaaggaggcaaatattcagtcaaagacaaagaagacactcaggtcgacagcgaggcaagacccatgaaagacgaaacatttggggagtacagtgataacgaggaaaaggcgttcggatcaagtcagccatccctgaacggagatatcaagccattgggcagcgatgattctctggccgattacggcggcagtgtcgatgtccagtttaacgaagacgggagttttatcggacagtattcaggtaagaaggaaaaagaagccgccggtggaaatgattcttccggagcgacaagccccatcaaccctgccgtggcgcttgagtag

SEQ ID NO: 214170 - DNA, 3888 bp, Artificial Sequence
  derived and/or modified sequence
cgccgggaaagatggtcgtggcgctgcggtacgtgtggcctctcctcctctgcagcccctgcctgcttatccagatccccgaggaatatgaaggacaccatgtgatggagccacctgtcatcacggaacagtctccacggcgcctggttgtcttccccacagatgacatcagcctcaagtgtgaggccagtggcaagcccgaagtgcagttccgctggacgagggatggtgtccacttcaaacccaaggaagagctgggtgtgaccgtgtaccagtcgccccactctggctccttcaccatcacgggcaacaacagcaactttgctcagaggttccagggcatctaccgctgctttgccagcaataagctgggcaccgccatgtcccatgagatccggctcatggccgagggtgcccccaagtggccaaaggagacagtgaagcccgtggaggtggaggaaggggagtcagtggttctgccttgcaaccctcccccaagtgcagagcctctccggatctactggatgaacagcaagatcttgcacatcaagcaggacgagcgggtgacgatgggccagaacggcaacctctactttgccaatgtgctcacctccgacaaccactcagactacatctgccacgcccacttcccaggcaccaggaccatcattcagaaggaacccattgacctccgggtcaaggccaccaacagcatgattgacaggaagccgcgcctgctcttccccaccaactccagcagccacctggtggccttgcaggggcagccattggtcctggagtgcatcgccgagggctttcccacgcccaccatcaaatggctgcgccccagtggccccatgccagccgaccgtgtcacctaccagaaccacaacaagaccctgcagctgctgaaagtgggcgaggaggatgatggcgagtaccgctgcctggccgagaactcactgggcagtgcccggcatgcgtactatgtcaccgtggaggctgccccgtactggctgcacaagccccagagccatctatatgggccaggagagactgcccgcctggactgccaagtccagggcaggccccaaccagaggtcacctggagaatcaacgggatccctgtggaggagctggccaaagaccagaagtaccggattcagcgtggcgccctgatcctgagcaacgtgcagcccagtgacacaatggtgacccaatgtgaggcccgcaaccggcacgggctcttgctggccaatgcctacatctacgttgtccagctgccagccaagatcctgactgcggacaatcagacgtacatggctgtccagggcagcactgcctaccttctgtgcaaggccttcggagcgcctgtgcccagtgttcagtggctggacgaggatgggacaacagtgcttcaggacgaacgcttcttcccctatgccaatgggaccctgggcattcgagacctccaggccaatgacaccggacgctacttctgcctggctgccaatgaccaaaacaatgttaccatcatggctaacctgaaggttaaagatgcaactcagatcactcaggggccccgcagcacaatcgagaagaaaggttccagggtgaccttcacgtgccaggcctcctttgacccctccttgcagcccagcatcacctggcgtggggacggtcgagacctccaggagcttggggacagtgacaagtacttcatagaggatgggcgcctggtcatccacagcctggactacagcgaccagggcaactacagctgcgtggccagtaccgaactggatgtggtggagagtagggcacagctcttggtggtggggagccctgggccggtgccacggctggtgctgtccgacctgcacctgctgacgcagagccaggtgcgcgtgtcctggagtcctgcagaagaccacaatgcccccattgagaaatatgacattgaatttgaggacaaggaaatggcgcctgaaaaatggtacagtctgggcaaggttccagggaaccagacctctaccaccctcaagctgtcgccctatgtccactacacctttagggttactgccataaacaaatatggccccggggagcccagcccggtctctgagactgtggtcacacctgaggcagccccagagaagaaccctgtggatgtgaagggggaaggaaatgagaccaccaatatggtcatcacgtggaagccgctccggtggatggactggaacgccccccaggttcagtaccgcgtgcagtggcgccctcaggggacacgagggccctggcaggagcagattgtcagcgaccccttcctggtggtgtccaacacgtccaccttcgtgccctatgagatcaaagtccaggccgtcaacagccagggcaagggaccagagccccaggtcactatcggctactctggagaggactacccccaggcaatccctgagctggaaggcattgaaatcctcaactcaagtgccgtgctggtcaagtggcggccggtggacctggcccaggtcaagggccacctccgcggatacaatgtgacgtactggagggagggcagtcagaggaagcacagcaagagacatatccacaaagaccatgtggtggtgcccgccaacaccaccagtgtcatcctcagtggcttgcggccctatagctcctaccacctggaggtgcaggcctttaacgggcgaggatcggggcccgccagcgagttcaccttcagcaccccagagggagtgcctggccaccccgaggcgttgcacctggagtgccagtcgaacaccagcctgctgctgcgctggcagcccccactcagccacaacggcgtgctcaccggctacgtgctctcctaccaccccctggatgaggggggcaaggggcaactgtccttcaaccttcgggaccccgaacttcggacacacaacctgaccgatctcagcccccacctgcggtaccgcttccagcttcaggccaccaccaaagagggccctggtgaagccatcgtacgggaaggaggcactatggccttgtctgggatctcagattttggcaacatctcagccacagcgggtgaaaactacagtgtcgtctcctgggtccccaaggagggccagtgcaacttcaggttccatatcttgttcaaagccttgggagaagagaagggtggggcttccctttcgccacagtatgtcagctacaaccagagctcctacacgcagtgggacctgcagcctgacactgactacgagatccacttgtttaaggagaggatgttccggcaccaaatggctgtgaagaccaatggcacaggccgcgtgaggctccctcctgctggcttcgccactgagggctggttcatcggctttgtgagtgccatcatcctcctgctcctcgtcctgctcatcctctgcttcatcaagcgcagcaagggcggcaaatactcagtgaaggataaggaggacacccaggtggactctgaggcccgaccgatgaaagatgagaccttcggcgagtacagtgacaacgaggagaaggcctttggcagcagccagccatcgctcaacggggacatcaagcccctgggcagtgacgacagcctggccgattatgggggcagcgtggatgttcagttcaacgaggatggttcgttcattggccagtacagtggcaagaaggagaaggaggcggcagggggcaatgacagctcaggggccacttcccccatcaaccctgccgtggccctagaatagtggagtccaggacaggagatgctgtgcccctggccttgggatccaggcccctccctctccagcaggcccatgggaggctggagttggggcagaggagaacttgctgcctcggatc

SEQ ID NO: 214171 - DNA, 655 bp, Artificial Sequence
  derived and/or modified sequence
aagagcccgggcttacccagatgttagtcactaacgtccttccgttctctcgtctctcttcccccacccttcccttcccttctcccctctcccagtgcccccactcccaactcccgccccaagccgcccaccagcccccttcccctccggccggagcctgaaccgagcccggctggctgtgctgcgcggtgccgccgggaaagatggtcgtggcgctgcggtacgtgtggcctctcctcctctgcagcccctgcctgcttatccagatccccgaggaatatgaaggacaccatgtgatggagccacctgtcatcacggaacagtctccacggcgcctggttgtcttccccacagatgacatcagcctcaagtgtgaggccagtggcaagcccgaagtgcagttccgctggacgagggatggtgtccacttcaaacccaaggaagagctgggtgtgaccgtgtaccagtcgccccactctggctccttcaccatcacgggcaacaacagcaactttgctcagaggttccagggcatctaccgctgctttgccagcaataagctgggcaccgccatgtcccatgagatccggctcatggccgagggtgcccccaagtggccaaaggagacagtgaagcccgtggaggtggaggaagg

SEQ ID NO: 214172 - DNA, 637 bp, Artificial Sequence
  derived and/or modified sequence
gagtgcaacccctcccagagaagacacaccacagaaataccagctcacatacagctcactccctgcttgcagatccacaaccacacacatgcccacggacacctgcacatgcagacacatacggggatgtgcatgccatgcacaggggagctgatggggcaacaagttggtgctgggaaggcagctggcaggaaaggtgcagacagagagtagagagggaataaaaggcaacctagaggcccagccagggctatctcttccagatttctccctccaagtgcccccactcccaactcccgccccaagccgcccaccagcccccttcccctccggccggagcctgaaccgagcccggctggctgtgctgcgcggtgccgccgggaaagatggtcgtggcgctgcggtacgtgtggcctctcctcctctgcagcccctgcctgcttatccagatccccgaggaatatgaaggacaccatgtgatggagccacctgtcatcacggaacagtctccacggcgcctggttgtcttccccacagatgacatcagcctcaagtgtgaggccagtggcaagcccgaagtgcagttccgctggacgagggatggtgtccacttcaaacccaaggaagagctgggtgt

SEQ ID NO: 214173 - DNA, 5021 bp, Artificial Sequence
  derived and/or modified sequence
tgcccccactcccaactcccgccccaagccgcccaccagcccccttcccctccggccggagcctgaaccgagcccggctggctgtgctgcgcggtgccgccgggaaagatggtcgtggcgctgcggtacgtgtggcctctcctcctctgcagcccctgcctgcttatccagatccccgaggaatcctttcctgggcacagggtggtgatggagccacctgtcatcacggaacagtctccacggcgcctggttgtcttccccacagatgacatcagcctcaagtgtgaggccagtggcaagcccgaagtgcagttccgctggacgagggatggtgtccacttcaaacccaaggaagagctgggtgtgaccgtgtaccagtcgccccactctggctccttcaccatcacgggcaacaacagcaactttgctcagaggttccagggcatctaccgctgctttgccagcaataagctgggcaccgccatgtcccatgagatccggctcatggccgagggtgcccccaagtggccaaaggagacagtgaagcccgtggaggtggaggaaggggagtcagtggttctgccttgcaaccctcccccaagtgcagagcctctccggatctactggatgaacagcaagatcttgcacatcaagcaggacgagcgggtgacgatgggccagaacggcaacctctactttgccaatgtgctcacctccgacaaccactcagactacatctgccacgcccacttcccaggcaccaggaccatcattcagaaggaacccattgacctccgggtcaaggccaccaacagcatgattgacaggaagccgcgcctgctcttccccaccaactccagcagccacctggtggccttgcaggggcagccattggtcctggagtgcatcgccgagggctttcccacgcccaccatcaaatggctgcgccccagtggccccatgccagccgaccgtgtcacctaccagaaccacaacaagaccctgcagctgctgaaagtgggcgaggaggatgatggcgagtaccgctgcctggccgagaactcactgggcagtgcccggcatgcgtactatgtcaccgtggaggctgccccgtactggctgcacaagccccagagccatctatatgggccaggagagactgcccgcctggactgccaagtccagggcaggccccaaccagaggtcacctggagaatcaacgggatccctgtggaggagctggccaaagaccagaagtaccggattcagcgtggcgccctgatcctgagcaacgtgcagcccagtgacacaatggtgacccaatgtgaggcccgcaaccggcacgggctcttgctggccaatgcctacatctacgttgtccagctgccagccaagatcctgactgcggacaatcagacgtacatggctgtccagggcagcactgcctaccttctgtgcaaggccttcggagcgcctgtgcccagtgttcagtggctggacgaggatgggacaacagtgcttcaggacgaacgcttcttcccctatgccaatgggaccctgggcattcgagacctccaggccaatgacaccggacgctacttctgcctggctgccaatgaccaaaacaatgttaccatcatggctaacctgaaggttaaagatgcaactcagatcactcaggggccccgcagcacaatcgagaagaaaggttccagggtgaccttcacgtgccaggcctcctttgacccctccttgcagcccagcatcacctggcgtggggacggtcgagacctccaggagcttggggacagtgacaagtacttcatagaggatgggcgcctggtcatccacagcctggactacagcgaccagggcaactacagctgcgtggccagtaccgaactggatgtggtggagagtagggcacagctcttggtggtggggagccctgggccggtgccacggctggtgctgtccgacctgcacctgctgacgcagagccaggtgcgcgtgtcctggagtcctgcagaagaccacaatgcccccattgagaaatatgacattgaatttgaggacaaggaaatggcgcctgaaaaatggtacagtctgggcaaggttccagggaaccagacctctaccaccctcaagctgtcgccctatgtccactacacctttagggttactgccataaacaaatatggccccggggagcccagcccggtctctgagactgtggtcacacctgaggcagccccagagaagaaccctgtggatgtgaagggggaaggaaatgagaccaccaatatggtcatcacgtggaagccgctccggtggatggactggaacgccccccaggttcagtaccgcgtgcagtggcgccctcaggggacacgagggccctggcaggagcagattgtcagcgaccccttcctggtggtgtccaacacgtccaccttcgtgccctatgagatcaaagtccaggccgtcaacagccagggcaagggaccagagccccaggtcactatcggctactctggagaggactacccccaggcaatccctgagctggaaggcattgaaatcctcaactcaagtgccgtgctggtcaagtggcggccggtggacctggcccaggtcaagggccacctccgcggatacaatgtgacgtactggagggagggcagtcagaggaagcacagcaagagacatatccacaaagaccatgtggtggtgcccgccaacaccaccagtgtcatcctcagtggcttgcggccctatagctcctaccacctggaggtgcaggcctttaacgggcgaggatcggggcccgccagcgagttcaccttcagcaccccagagggagtgcctggccaccccgaggcgttgcacctggagtgccagtcgaacaccagcctgctgctgcgctggcagcccccactcagccacaacggcgtgctcaccggctacgtgctctcctaccaccccctggatgaggggggcaaggggcaactgtccttcaaccttcgggaccccgaacttcggacacacaacctgaccgatctcagcccccacctgcggtaccgcttccagcttcaggccaccaccaaagagggccctggtgaagccatcgtacgggaaggaggcactatggccttgtctgggatctcagattttggcaacatctcagccacagcgggtgaaaactacagtgtcgtctcctgggtccccaaggagggccagtgcaacttcaggttccatatcttgttcaaagccttgggagaagagaagggtggggcttccctttcgccacagtatgtcagctacaaccagagctcctacacgcagtgggacctgcagcctgacactgactacgagatccacttgtttaaggagaggatgttccggcaccaaatggctgtgaagaccaatggcacaggccgcgtgaggctccctcctgctggcttcgccactgagggctggttcatcggctttgtgagtgccatcatcctcctgctcctcgtcctgctcatcctctgcttcatcaagcgcagcaagggcggcaaatactcagtgaaggataaggaggacacccaggtggactctgaggcccgaccgatgaaagatgagaccttcggcgagtacagtgacaacgaggagaaggcctttggcagcagccagccatcgctcaacggggacatcaagcccctgggcagtgacgacagcctggccgattatgggggcagcgtggatgttcagttcaacgaggatggttcgttcattggccagtacagtggcaagaaggagaaggaggcggcagggggcaatgacagctcaggggccacttcccccatcaaccctgccgtggccctagaatagtggagtccaggacaggagatgctgtgcccctggccttgggatccaggcccctccctctccagcaggcccatgggaggctggagttggggcagaggagaacttgctgcctcggatccccttcctaccacccggtccccactttattgccaaaacccagctgcaccccttcctgggcacacgctgctctgccccagcttgggcagatctcccacatgccaggggcctttgggtgctgttttgccagcccatttgggcagagaggctgtggtttgggggagaagaagtaggggtggcccgaaagggtctccgaaatgctgtctttcttgctccctgactgggggcagacatggtggggtctcctcaggaccagggttggcaccttccccctcccccagccactccccagccagcctggctgggactgggaacagaactcggtgtccccaccatctgctgtcttttctttgccatctctgctccaaccgggatgggagccgggcaaactggccgcgggggcaggggaggccatctggagagcccagagtccccccactcccagcatcgcactctggcagcaccgcctcttcccgccgcccagcccaccccatggccggctttcaggagctccatacacacgctgccttcggtacccaccacacaacatccaagtggcctccgtcactacctggctgcggggcgggcacacctcctcccactgcccactggccggcctcttccagccgcccccaccccccaggaccccttagcagccctgccctccctatcgtctgaacagttgtcttcctcagcctcctcccgcccccaccttgggaatgtaaatacaccgtgactttgaaagtttgtacccctgtccttccctttacgccactagtgtgtaggcagatgtctgagtccctaggtggtttctaggattgatagcaattagctttgatgaacccatcccaggaaaaataaaaacagacaaaaaaaaaggaaagattggttctcccagcactgctcagcagccacagcctccctgtatgcctgtgcttggtctactgataagccctctacaaaaaaacaaaagtatatatatatatgtacataatatcagaattataacaggcaaataaaacctgaaaatc

SEQ ID NO: 214174 - DNA, 3762 bp, Artificial Sequence
  derived and/or modified sequence
atggtggtggccctgcgctacgtgtggcccctgctgctgtgcagcccctgcctgctgatccagatccctgaggagtatgagggccaccacgtgatggagccccctgtgatcacagagcagagcccccggcggctggtggtgttccccacagatgacatcagcctgaagtgtgaggccagcggcaagccagaggtgcagttccgctggaccagagatggagtgcacttcaagcccaaggaggagctgggcgtgacagtgtaccagagcccccacagcggcagcttcaccatcaccggcaacaacagcaactttgcccagcgcttccagggcatctaccgctgctttgccagcaacaagctgggcacagccatgagccatgagatccggctgatggccgagggcgcccccaagtggcccaaggagaccgtgaagcctgtggaggtggaggagggggagagcgtggtgctgccctgcaaccccccaccttctgctgagcccctgcgcatctactggatgaacagcaagatcctgcacatcaagcaggatgagcgggtgaccatgggccagaatggaaacctgtactttgccaacgtgctgaccagtgacaaccacagcgactacatctgccacgcccacttccctggcaccaggaccatcatccagaaggagcccatcgacctgcgggtgaaggccaccaacagcatgattgacaggaagccccggctgctcttccccaccaacagcagcagccacctggtggccctgcagggccagcccctggtgctggagtgcatcgccgagggcttccccacccccaccatcaagtggctgcggcccagcggccccatgcctgctgacagagtgacctaccagaaccacaacaagaccctgcagctgctgaaggtgggggaggaggatgatggagagtaccgctgcctggccgagaacagcctgggcagcgcccggcatgcctactacgtgacagtggaggccgccccctactggctgcacaagccccagagccacctgtatggccctggagaaacagcccggctggactgccaggtgcagggccggccccagcctgaggtgacctggaggatcaatggcatccctgtggaggagctggccaaggaccagaagtaccgcatccagagaggagccctgatcctgagcaatgtgcagcccagcgacaccatggtgacccagtgtgaggccaggaacagacatggcctgctgctggccaatgcctacatctacgtggtgcagctgcctgccaagatcctgacagctgacaaccagacctacatggctgtgcagggcagcacagcctacctgctgtgcaaggcctttggagcccctgtgcccagcgtgcagtggctggatgaagatggcaccaccgtgctgcaggatgagcgcttcttcccctatgccaacggcaccctgggcatccgggacctgcaggccaatgacaccggccgctacttctgcctggccgccaatgaccagaacaacgtgaccatcatggccaacctgaaggtgaaggatgccacccagatcacccagggccccaggagcaccatcgagaagaagggcagccgggtgaccttcacctgccaggccagctttgaccccagcctgcagcccagcatcacctggagaggagatggccgggacctgcaggagctgggggacagcgacaagtacttcattgaagatggccgcctggtgatccacagcctggactacagcgaccagggcaactacagctgtgtggccagcacagagctggatgtggtggagagccgggcccagctgctggtggtgggcagccctggccctgtgccccggctggtgctgagtgacctgcacctgctgacccagagccaggtgcgggtgtcctggagccctgctgaggaccacaatgcccccatcgagaagtatgacatcgagtttgaggacaaggagatggcccctgagaagtggtacagcctgggcaaggtgcccggcaaccagaccagcaccaccctgaagctgagcccctacgtgcactacaccttccgggtgacagccatcaacaagtatggccctggagagcccagccctgtgtctgagaccgtggtgaccccagaggccgcccctgagaagaaccctgtggatgtgaagggggagggcaatgagaccaccaacatggtgatcacctggaagcccctgcgctggatggactggaatgccccccaggtgcagtacagagtgcagtggaggccccagggcacccggggcccctggcaggagcagatcgtgtctgaccccttcctggtggtgagcaacaccagcacctttgtgccctatgagatcaaggtgcaggccgtgaacagccagggcaagggccctgagccccaggtgaccatcggctacagcggggaggactacccccaggccatccctgagctggagggcatcgagatcctgaacagcagcgctgtgctggtgaagtggaggcctgtggacctggcccaggtgaagggccacctgcggggctacaacgtgacctactggagggagggcagccagaggaagcacagcaagaggcacatccacaaggaccacgtggtggtgcctgccaacaccaccagcgtcatcctgagcggcctgcggccctacagcagctaccacctggaggtgcaggccttcaacggccggggcagcggccctgccagcgagttcaccttcagcaccccagagggcgtgcccggccaccctgaggccctgcacctggagtgccagagcaacaccagcctgctgctgcgctggcagccccccctgagccacaatggagtgctgaccggctacgtgctgagctaccaccccctggatgaaggaggcaagggccagctgtccttcaacctgcgggaccctgagctgcggacccacaacctgacagacctgagcccccacctgcgctaccgcttccagctgcaggccaccaccaaggagggccctggagaggccatcgtgcgggagggcggcaccatggccctgagcggcatcagtgactttggaaacatcagcgccacagctggggagaactacagcgtggtgtcctgggtgcccaaggagggccagtgcaacttccgcttccacatcctcttcaaggccctgggggaggagaagggcggggccagcctgagcccccagtatgtgtcctacaaccagagcagctacacccagtgggacctgcagcctgacacagattatgagatccacctgttcaaggagaggatgttccgccaccagatggctgtgaagaccaatggaacaggccgggtgcggctgcccccagctggctttgccacagagggctggttcatcggctttgtgtctgccatcatcctgctgctgctggtgctgctgatcctgtgcttcatcaagaggagcaaaggaggcaagtacagcgtgaaggacaaggaggacacccaggtggacagcgaggcccggcccatgaaggatgagacctttggagagtacagcgacaatgaggagaaggccttcggcagcagccagcccagcctgaatggagacatcaagcccctgggcagtgatgacagcctggccgactatggaggctctgtggatgtgcagttcaatgaagatggcagcttcatcggccagtacagcggcaagaaggagaaggaggccgccggcggcaatgacagcagcggggccaccagccccatcaacccagctgtggccctggagtag

SEQ ID NO: 214175 - DNA, 456 bp, Artificial Sequence
  derived and/or modified sequence
atggtggtggccctgcgctacgtgtggcccctgctgctgtgcagcccctgcctgctgatccagatccctgaggagtatgagggccaccacgtgatggagccccctgtgatcacagagcagagcccccggcggctggtggtgttccccacagatgacatcagcctgaagtgtgaggccagcggcaagccagaggtgcagttccgctggaccagagatggagtgcacttcaagcccaaggaggagctgggcgtgacagtgtaccagagcccccacagcggcagcttcaccatcaccggcaacaacagcaactttgcccagcgcttccagggcatctaccgctgctttgccagcaacaagctgggcacagccatgagccatgagatccggctgatggccgagggcgcccccaagtggcccaaggagaccgtgaagcctgtggaggtggaggagggctag

SEQ ID NO: 214176 - DNA, 3768 bp, Artificial Sequence
  derived and/or modified sequence
atggtggtggccctgcgctacgtgtggcccctgctgctgtgcagcccctgcctgctgatccagatccctgaggagagcttccctggccaccgggtggtgatggagccccctgtgatcacagagcagagcccccggcggctggtggtgttccccacagatgacatcagcctgaagtgtgaggccagcggcaagccagaggtgcagttccgctggaccagagatggagtgcacttcaagcccaaggaggagctgggcgtgacagtgtaccagagcccccacagcggcagcttcaccatcaccggcaacaacagcaactttgcccagcgcttccagggcatctaccgctgctttgccagcaacaagctgggcacagccatgagccatgagatccggctgatggccgagggcgcccccaagtggcccaaggagaccgtgaagcctgtggaggtggaggagggggagagcgtggtgctgccctgcaaccccccaccttctgctgagcccctgcgcatctactggatgaacagcaagatcctgcacatcaagcaggatgagcgggtgaccatgggccagaatggaaacctgtactttgccaacgtgctgaccagtgacaaccacagcgactacatctgccacgcccacttccctggcaccaggaccatcatccagaaggagcccatcgacctgcgggtgaaggccaccaacagcatgattgacaggaagccccggctgctcttccccaccaacagcagcagccacctggtggccctgcagggccagcccctggtgctggagtgcatcgccgagggcttccccacccccaccatcaagtggctgcggcccagcggccccatgcctgctgacagagtgacctaccagaaccacaacaagaccctgcagctgctgaaggtgggggaggaggatgatggagagtaccgctgcctggccgagaacagcctgggcagcgcccggcatgcctactacgtgacagtggaggccgccccctactggctgcacaagccccagagccacctgtatggccctggagaaacagcccggctggactgccaggtgcagggccggccccagcctgaggtgacctggaggatcaatggcatccctgtggaggagctggccaaggaccagaagtaccgcatccagagaggagccctgatcctgagcaatgtgcagcccagcgacaccatggtgacccagtgtgaggccaggaacagacatggcctgctgctggccaatgcctacatctacgtggtgcagctgcctgccaagatcctgacagctgacaaccagacctacatggctgtgcagggcagcacagcctacctgctgtgcaaggcctttggagcccctgtgcccagcgtgcagtggctggatgaagatggcaccaccgtgctgcaggatgagcgcttcttcccctatgccaacggcaccctgggcatccgggacctgcaggccaatgacaccggccgctacttctgcctggccgccaatgaccagaacaacgtgaccatcatggccaacctgaaggtgaaggatgccacccagatcacccagggccccaggagcaccatcgagaagaagggcagccgggtgaccttcacctgccaggccagctttgaccccagcctgcagcccagcatcacctggagaggagatggccgggacctgcaggagctgggggacagcgacaagtacttcattgaagatggccgcctggtgatccacagcctggactacagcgaccagggcaactacagctgtgtggccagcacagagctggatgtggtggagagccgggcccagctgctggtggtgggcagccctggccctgtgccccggctggtgctgagtgacctgcacctgctgacccagagccaggtgcgggtgtcctggagccctgctgaggaccacaatgcccccatcgagaagtatgacatcgagtttgaggacaaggagatggcccctgagaagtggtacagcctgggcaaggtgcccggcaaccagaccagcaccaccctgaagctgagcccctacgtgcactacaccttccgggtgacagccatcaacaagtatggccctggagagcccagccctgtgtctgagaccgtggtgaccccagaggccgcccctgagaagaaccctgtggatgtgaagggggagggcaatgagaccaccaacatggtgatcacctggaagcccctgcgctggatggactggaatgccccccaggtgcagtacagagtgcagtggaggccccagggcacccggggcccctggcaggagcagatcgtgtctgaccccttcctggtggtgagcaacaccagcacctttgtgccctatgagatcaaggtgcaggccgtgaacagccagggcaagggccctgagccccaggtgaccatcggctacagcggggaggactacccccaggccatccctgagctggagggcatcgagatcctgaacagcagcgctgtgctggtgaagtggaggcctgtggacctggcccaggtgaagggccacctgcggggctacaacgtgacctactggagggagggcagccagaggaagcacagcaagaggcacatccacaaggaccacgtggtggtgcctgccaacaccaccagcgtcatcctgagcggcctgcggccctacagcagctaccacctggaggtgcaggccttcaacggccggggcagcggccctgccagcgagttcaccttcagcaccccagagggcgtgcccggccaccctgaggccctgcacctggagtgccagagcaacaccagcctgctgctgcgctggcagccccccctgagccacaatggagtgctgaccggctacgtgctgagctaccaccccctggatgaaggaggcaagggccagctgtccttcaacctgcgggaccctgagctgcggacccacaacctgacagacctgagcccccacctgcgctaccgcttccagctgcaggccaccaccaaggagggccctggagaggccatcgtgcgggagggcggcaccatggccctgagcggcatcagtgactttggaaacatcagcgccacagctggggagaactacagcgtggtgtcctgggtgcccaaggagggccagtgcaacttccgcttccacatcctcttcaaggccctgggggaggagaagggcggggccagcctgagcccccagtatgtgtcctacaaccagagcagctacacccagtgggacctgcagcctgacacagattatgagatccacctgttcaaggagaggatgttccgccaccagatggctgtgaagaccaatggaacaggccgggtgcggctgcccccagctggctttgccacagagggctggttcatcggctttgtgtctgccatcatcctgctgctgctggtgctgctgatcctgtgcttcatcaagaggagcaaaggaggcaagtacagcgtgaaggacaaggaggacacccaggtggacagcgaggcccggcccatgaaggatgagacctttggagagtacagcgacaatgaggagaaggccttcggcagcagccagcccagcctgaatggagacatcaagcccctgggcagtgatgacagcctggccgactatggaggctctgtggatgtgcagttcaatgaagatggcagcttcatcggccagtacagcggcaagaaggagaaggaggccgccggcggcaatgacagcagcggggccaccagccccatcaacccagctgtggccctggagtag

SEQ ID NO: 214177 - DNA, 3762 bp, Artificial Sequence
  derived and/or modified sequence
atggtggtggccctgcggtacgtgtggcccctgctgctgtgcagcccctgcttgctcatccagatacccgaagaatatgagggacaccatgtcatggaaccccctgtgattactgaacaaagcccccgaagactggttgtgtttccaacagatgatattagcctgaaatgtgaagcttcaggcaagcctgaggtgcagtttcggtggactcgggacggcgtgcacttcaagcctaaggaagagctgggagtgacagtgtatcagtctcctcactccggatctttcacaatcactggcaataattctaactttgcacagagattccaggggatataccggtgtttcgctagtaacaaactggggaccgccatgtctcacgaaattcgcctgatggctgagggagccccaaaatggcctaaggaaaccgtgaagcctgtggaggttgaggagggtgagagtgtggtcttgccatgcaaccccccacccagtgctgagcctcttaggatttactggatgaactccaaaatcctgcacatcaagcaggatgagcgagtgacaatgggacagaatggcaatctgtactttgccaatgtcctcacgtccgacaatcactctgactatatttgccacgctcattttccagggaccagaaccataatccaaaaggagcctatcgacctgcgggttaaggccaccaactccatgattgatcgcaaaccaaggctcctgttccccacaaatagctcctcccatctggtcgcccttcagggtcagccactggtcctcgagtgtattgccgaaggtttccctacccctactattaagtggctccgaccctctggcccaatgccagccgatagagtcacttatcaaaatcacaacaaaactttacagctgctcaaggttggagaggaagacgatggagagtaccggtgcttggccgaaaatagtttgggatccgcacggcacgcttattatgtgaccgttgaggcggccccctattggctgcacaagccgcagtcccacctgtatgggcctggagagacggctcgccttgattgtcaggtgcagggacgccctcagccagaggtgacgtggcgtatcaatggaattccagtagaagagctcgcaaaagaccaaaaatataggatacagagaggcgccctcatcctttctaatgtacagccttccgacaccatggtcactcaatgtgaggcacgcaacaggcatggattgctgcttgcgaacgcatatatctacgttgtccagctgccagccaaaatactgactgcagataatcagacatatatggcggtgcaggggagtacggcctaccttctgtgtaaagccttcggcgctcccgtgccatctgtgcaatggctggacgaagatggcactactgttctacaggacgaaagattttttccctacgcaaatggcacattgggaattagggatctccaggcaaatgacactggtcgatacttttgtcttgccgcgaacgaccagaataacgtaaccataatggccaatctgaaagtgaaggacgccacacagatcacacagggcccacggtccaccatcgaaaagaagggctcccgtgtgacattcacatgccaggccagcttcgatccctcattacagccatcaatcacttggagaggtgatgggagggatctccaagagctcggcgattctgacaaatacttcatcgaggatggcaggctggtcatccatagtctggattactccgatcaggggaactattcctgcgtggcaagtaccgaattagacgttgtggaatctcgggcacaattgctcgttgtgggttccccgggacctgttcctcgcctagtgttgtccgatttgcatctgttaacccagagccaagtacgggtcagctggtcacctgctgaggaccacaacgcccccattgaaaagtatgacatagagtttgaagacaaggagatggccccagagaaatggtattctttaggtaaggttccaggcaaccagacatccaccactctgaagctctccccatatgtgcattatacattccgcgtcactgccatcaacaagtacgggccaggggaaccttcccccgtgtccgagacagtggtaaccccagaagccgcgcccgaaaagaaccccgtcgacgtcaagggtgaggggaacgagaccacaaatatggtgatcacctggaaacctctgaggtggatggactggaatgccccgcaggtgcaatatagagttcagtggagaccgcaggggaccagaggtccctggcaagagcagatcgtgtccgatccttttttggttgtgtccaatacctccacctttgtgccctacgagatcaaggtgcaggctgtaaattcgcagggaaaaggtcccgagccacaggtaacgattggctacagcggggaggactatccacaggcaatcccagagctagaaggcatagagatccttaacagttcagccgtattggtgaagtggcggcctgttgacctggcacaggttaagggacacctgcgtggttacaacgtcacctactggcgggagggctcgcagagaaaacactcaaagaggcatattcacaaagatcacgtggttgtgccagctaacactacgagcgtgatcttgagcggactgcgtccgtacagctcgtatcacctggaggtccaagcattcaacggcagaggctccgggcctgctagtgagtttacgttttcaaccccagaaggagtgccgggccacccagaggcactccatctggaatgccaatccaacacttccctgttgctacggtggcagccgcctctcagccataacggagtgctgactggctacgtgcttagctaccacccactggacgaagggggtaagggccagctgtcctttaaccttcgcgatccggagctccggacccacaatctcacagacctgtcaccccatctgagataccggtttcagctccaggcaaccactaaagaaggacccggcgaagccatcgtccgggagggagggacaatggcattgtccgggattagcgattttggaaacattagcgccacagctggcgagaattactcagtggtttcatgggtaccaaaggaaggacagtgcaatttccggtttcatatcctcttcaaggccctcggagaggagaagggtggcgcgtccctgtccccacaatatgtgagctataatcaatcttcatacacacagtgggatctgcagccagacaccgattacgaaatccacttgtttaaagaaaggatgttcagacaccagatggccgtcaagacaaatgggaccgggcgcgtgagactgcctccagccgggtttgccacggagggctggtttatcggcttcgtatctgcgattatactgctgctactggttcttttaattctgtgttttatcaagcgaagtaagggtggaaagtactccgtgaaagataaggaggacactcaggtggatagcgaagcccgcccgatgaaggatgagacctttggagaatactccgataatgaagagaaagctttcggatcctcacagccatccctgaacggcgacataaaacctctgggaagcgacgactcattggctgattatgggggctcagtggatgtgcagttcaatgaagacggaagctttatcggacagtactccgggaaaaaagagaaggaggccgcaggcggaaatgattccagcggagcaacaagccctatcaatcctgccgtggcactggagtag

SEQ ID NO: 214178 - DNA, 456 bp, Artificial Sequence
  derived and/or modified sequence
atggtggtggccctgcggtacgtgtggcccctgctgctgtgcagcccatgtttgctgatccagattccagaagagtacgaaggccatcacgtcatggagccacctgtaattacagaacagtccccccggaggctggtggtcttccctactgatgacattagcctcaagtgcgaagcctccggcaagccagaggtacagtttagatggacccgagacggagtgcacttcaagcccaaagaggagctgggcgtgaccgtttaccagtcaccacacagtgggtcatttacgattacgggcaacaacagcaatttcgcacaacggtttcagggcatttatagatgcttcgcatccaataagctcggtactgcaatgtcccacgagattaggctcatggccgaaggcgcaccgaagtggcccaaggaaactgtcaaacctgtggaggtggaagaaggatag

SEQ ID NO: 214179 - DNA, 3768 bp, Artificial Sequence
  derived and/or modified sequence
atggtggtggccctgcggtacgtgtggcccctgctgctgtgcagcccctgcctcctgattcagatccctgaagaaagtttcccagggcacagggttgttatggaacccccagttataaccgagcagtcaccaaggcggctggtcgtatttcccaccgacgacatcagcctgaaatgcgaagcttcaggcaaacctgaggtgcagttcagatggactagggacggtgtgcatttcaagcctaaggaagaattaggcgtgaccgtgtaccagagtccccactccggtagcttcactattacaggcaacaactctaactttgctcagcgattccagggcatctaccgttgcttcgccagcaacaagctgggcactgcaatgagccatgaaatacggttgatggcagagggcgcaccgaaatggccaaaggagacagtaaaacctgtggaggtggaggagggtgaaagcgtcgtattaccgtgtaaccccccaccgtccgccgagcccctgagaatttactggatgaactccaagatcctgcatattaaacaagacgaaagagtgaccatggggcaaaacggcaacctgtacttcgcaaatgtcttaacaagtgacaaccacagcgattacatctgccacgcccactttcctgggacgcgaactataattcagaaagaacctatcgatttacgggtcaaagccacaaacagcatgatcgaccggaaaccaagactgctgttcccaactaatagctccagccatctggtggccctccagggccagccactggtcctggaatgcatagctgagggattccccactccgaccattaagtggctgagaccatctggccctatgcccgctgaccgtgtcacatatcagaaccacaataagaccctccaattgctgaaagttggggaggaggatgacggcgagtacaggtgcttggcggagaactctctcggcagtgccagacacgcatattacgtaacagtggaagcagctccatactggctgcataaaccccaatctcatttgtatggcccaggggagactgcgcggctggactgccaagtccaaggccggcctcagcccgaagttacgtggcgtatcaatggtatcccagttgaggagctggctaaagatcaaaagtatagaatccagagaggagctttaatcttgagcaacgttcagccctcagatacgatggtcacccagtgcgaggcccggaatagacacggactcctactagcaaacgcctacatttacgtagtgcagctcccagctaagattctcaccgccgataatcagacgtatatggccgttcaagggagtacagcatacctgctttgcaaagccttcggcgccccagtgccctcagtacagtggctggacgaggatggcactaccgtgctgcaagacgagcgatttttcccgtacgcaaatggaacactaggtatcagggaccttcaggcaaatgacaccggtaggtacttctgtttagccgctaatgaccagaataatgtcacaatcatggccaatctgaaagtcaaggacgcaacccagattactcaagggcctaggtcaacaatcgaaaagaaagggtcccgggttacttttacttgccaggccagctttgatcctagcttacagccttccatcacatggcgcggcgatggccgcgatctgcaggaattgggggacagcgacaaatattttattgaggatggccgccttgtgattcactctctggattacagtgaccagggcaactacagttgtgtcgccagcaccgagttggatgtggtggaatcacgcgctcagctcctggtcgtggggtcaccggggccggttccaagactggttctgtccgatttacacctcctgactcagtctcaggtccgtgtctcttggtcccctgctgaggaccacaatgcccctatcgaaaagtacgatatagaattcgaggacaaagaaatggccccagaaaaatggtactctctgggcaaggttcccggcaaccaaacctccactactcttaaactcagtccctacgtacattatactttcagagtgaccgctataaacaaatacggccctggtgaaccatctcctgtgagtgagacggtagtgacacccgaggccgctcctgagaagaatcccgttgacgtgaaaggagagggcaatgagactactaatatggtgataacctggaagcctttgaggtggatggattggaatgcaccgcaggtgcagtatcgtgtacagtggagaccacaggggactaggggtccatggcaggaacagattgtaagtgatccatttctggttgtatctaacacatccactttcgtgccatatgaaatcaaagtgcaggcagttaatagtcagggaaaaggtccggagccccaggtaactattggttatagcggagaggactatcctcaggccatcccggagctggaaggcatagaaatacttaattcaagcgcagtgctggtcaaatggcgtcccgtcgacctcgcccaagtgaaaggccaccttagagggtacaatgtgacttattggagagaggggtcccagcggaagcattccaaacgccacattcataaggaccacgtagtggtcccagcgaacaccacaagcgtgatcctctccgggcttcggccatattccagctatcaccttgaggtgcaggcttttaatggccgcggttccgggcctgcatcagaattcactttctccacccccgagggtgtacctggccatcctgaggctcttcacctggaatgccaatccaacacaagcctgctccttcggtggcagcctcctctgagccacaatggagtgctcaccggatacgtgctgagttaccacccactagacgaggggggcaaaggccaactcagcttcaatttgcgggaccctgagcttcgaacacataacctcacagacctgtccccgcatctgcgctacaggtttcaactgcaggcgacgacgaaggagggtcccggggaggcgatagtccgggagggcggcaccatggctctctcgggcattagcgactttggaaacatctcagcgacagccggagaaaattattctgtggtctcttgggtgcccaaggaaggacagtgtaactttcggttccacatactgtttaaggcactgggggaagaaaaagggggcgccagcctatctcctcagtatgtgtcgtataaccagtcttcttatacccagtgggacctgcaacccgataccgattatgaaattcatctgttcaaggaacggatgttccgccatcagatggctgtcaaaacgaatgggaccgggcgcgttcgcctacctccagctggtttcgccaccgagggatggttcattggttttgtcagtgccataatattacttctgctggtcctactgatactgtgcttcatcaagcggagtaagggcggcaagtactctgttaaagacaaagaggatacacaggtggactccgaggcgcgcccgatgaaggatgagacattcggggaatactccgacaacgaagagaaggcctttggcagctctcaaccttctctgaatggagatatcaaacctctcgggtctgacgattctcttgcagattatggcggtagtgtggatgtgcagttcaacgaagacgggtccttcattgggcagtattccggcaaaaaagaaaaggaagccgctggcggaaacgacagctcaggagctacaagccctatcaatcccgctgtcgccctcgagtag

SEQ ID NO: 214180 - DNA, 3762 bp, Artificial Sequence
  derived and/or modified sequence
atggtagtggcactaagatacgtgtggcccctgcttctatgctcaccctgcctacttattcagatccccgaagaatatgagggacatcatgtgatggaaccgcctgttatcacagagcaatcccccagaaggctcgtggtgttcccgacagacgatatcagcctgaagtgtgaggcctccggtaagcctgaagtccagttcagatggactcgagatggcgtgcattttaagcccaaagaagagctgggggttaccgtctaccagagcccccactccgggagctttactatcaccgggaataactccaatttcgctcagcggttccagggcatctaccgctgcttcgcttctaataagctggggaccgccatgtcacacgagatacgcctgatggcagagggcgctccaaagtggcccaaagagaccgtgaagcctgtggaagtcgaggagggcgaatcagtggttctgccctgcaaccctcccccaagtgccgaaccactgcgcatttactggatgaatagcaagatcttgcacatcaaacaagatgagcgggtcactatgggtcagaatggtaacctgtattttgctaatgtactgacctcagataaccactcggactacatttgtcacgcccatttcccgggtacccggaccatcatccagaaggaacccatcgacctgcgcgtgaaggccacaaactcaatgattgatcgaaagccacgtcttttgtttcctaccaatagtagttcccatctggtggctctccaggggcaacctctcgtactggaatgcatagccgagggctttccaacacccactatcaaatggctgcgaccatccggaccgatgccagctgatcgtgttacttaccagaaccataacaagacattgcaactccttaaggtgggagaggaggatgacggggagtaccggtgcttggccgaaaacagcctgggctcagcgaggcatgcctactacgtgacagtcgaagctgcaccatattggttacataaaccacagagtcacctgtatggaccaggggaaaccgcgagactggattgtcaggtgcagggccgacctcagcccgaggtaacctggcggatcaacggcattccagtcgaggagctcgcaaaggatcagaagtatagaattcagcggggagccctgatcctctcaaatgtacagccctctgatacaatggttacacagtgcgaagcgcgaaacagacacggtctgttactggccaacgcctatatttacgttgtgcagctgccagccaaaattctcaccgcagacaaccagacctatatggccgtgcagggaagcactgcttatctcttatgcaaagccttcggcgctcctgttccctcagtgcaatggctggatgaggatggaacaacagttctgcaggatgaaagattcttcccatatgccaatgggacgcttggcatccgggatctgcaagctaatgacacgggcagatacttctgcttggctgctaacgaccagaacaacgtaactattatggcgaacctcaaggtcaaggacgccactcagataactcagggcccacggtccacgatagagaaaaaaggctccagagtcacattcacgtgtcaggcctcctttgacccttccttacagcctagcattacctggcgcggtgatgggcgtgacctccaggaattaggagattctgacaagtatttcatagaggatgggagactggtgattcacagcctggactattccgaccaggggaactattcatgtgttgctagtactgagctggatgtcgtcgagagccgagcacagcttctggtggtagggtcacctggacccgtccctaggctcgtgttatcagacctgcatctgctcactcaatcccaggtgagagtttcctggtctcccgctgaggatcataatgcgccaatcgagaagtacgatatagaattcgaggacaaagagatggccccagaaaagtggtactcactggggaaagttcctggtaaccagactagtacaactcttaagctcagcccatacgtgcactataccttcagagtgacagctatcaataagtatggtccaggtgaacccagtccagtatccgagacggttgtgacacctgaagccgcaccagaaaagaatccggtggacgtgaaaggggaaggcaatgagaccaccaatatggtgataacctggaagccacttcggtggatggactggaacgctccccaggtgcagtatcgggtgcagtggcgtccccagggtacgcggggtccctggcaggagcagatcgtttccgacccatttctggtagtgtcaaatacaagcacttttgtcccctacgagatcaaggttcaggctgtaaatagccagggtaagggtcccgagccacaggtgaccattgggtattctggcgaagattacccacaggccattcctgaactcgaaggtattgagattcttaacagttccgccgtgctggtgaaatggcgaccagtcgacctggcccaggtcaagggccacctgaggggctataacgtcacttattggcgggagggttcacaacgtaaacatagtaaaagacatattcacaaggatcacgtggttgtgccagctaacacaactagcgtgatcctttcaggactgcggccatacagttcttatcacctggaagtgcaggcctttaacggcagagggagcgggccagcatctgagttcactttttccactcctgagggcgtccctggccaccccgaggcactccatttggagtgtcagtccaataccagtctgctgctgaggtggcagccccctcttagccacaatggggtgctgaccggttatgtgctgtcataccatcctctagacgagggcggtaagggccagctcagctttaacctcagagacccagaactccgaacccataatctgactgacctgtcccctcacctgcgctaccggttccagctccaggcaacgacaaaagagggtccaggagaagctattgtgcgagaggggggaaccatggccttaagcggcatttccgattttggcaatatctcagctactgcaggagagaattattccgtcgtttcttgggtcccaaaagaaggccagtgcaatttcagattccatatcctgttcaaggccctgggggaagaaaaggggggagcttccctgagcccacagtacgtctcatataatcagagtagctatacacagtgggacctccaacccgataccgattacgagatccatctgttcaaggaacgcatgtttagacatcaaatggccgtgaagacgaacgggaccggcagggtgcggttgcctcccgcaggattcgctacggaggggtggttcatcgggtttgtgagcgccatcatcctactgctcctggtgttgctgatcttgtgtttcatcaagcggtctaaaggcggaaagtacagcgtgaaggataaagaggacacccaggtggattccgaagcaagaccgatgaaggacgagacatttggagaatattctgacaacgaggagaaggcatttggatcctctcaaccatctctaaacggcgatatcaagccattgggcagcgatgactcactggcagactatggcggatcggtggatgtgcagtttaatgaagatgggagcttcataggtcagtactccggcaaaaaagaaaaagaagccgctggagggaacgactcatctggcgctaccagtccaatcaacccagctgtggcgttagagtag

SEQ ID NO: 214181 - DNA, 456 bp, Artificial Sequence
  derived and/or modified sequence
atggtcgttgccctgaggtacgtgtggcccttgctgctttgtagcccttgcctactaatacagattcctgaagagtacgaaggtcatcacgtcatggaacccccagtgatcaccgaacaaagtccacgcagacttgtagtatttcctaccgacgatattagtctgaagtgcgaggcgagcggcaagccagaggtgcaatttcggtggacacgtgacggggtgcactttaaaccaaaggaggagttaggagtcaccgtgtaccagagcccacactcgggatcgttcaccatcaccgggaataactccaactttgctcagagattccaaggtatctatcgctgcttcgcatcaaacaaactcggaaccgcgatgtctcacgagattaggctgatggctgagggtgcaccaaaatggcctaaggaaactgtcaagcccgtcgaagtggaggaggggtag

SEQ ID NO: 214182 - DNA, 3768 bp, Artificial Sequence
  derived and/or modified sequence
atggtggtggctcttaggtacgtctggcctctgctgctgtgcagtccgtgtctgctaatccagatcccagaagagtctttccctggacatcgcgttgttatggagcctcccgtgatcactgagcaatcacctaggcgactggtggtttttcctaccgacgacatttcgctgaagtgcgaagcctctgggaagcctgaggtccagttcagatggactagagacggtgtgcattttaagccaaaggaagagttaggagtcaccgtgtaccagagtccccatagtggcagtttcactattactggaaacaatagtaatttcgcccagcgattccagggaatctataggtgtttcgccagcaacaaactgggcacggccatgtcacacgaaatacgcttgatggctgaaggggctcccaagtggccgaaggaaaccgttaaaccagtagaggtggaagagggagagagtgttgtgctgccctgtaatcccccacccagcgccgagccactgcggatctactggatgaactccaagatcctgcatattaagcaggatgagagagtgaccatggggcagaatgggaacctgtattttgctaatgttctcacttccgataatcatagtgactacatttgtcatgcacactttcctggtactagaaccataatccagaaggagcctattgatctgagagtgaaggctacgaattcaatgattgataggaagccccgactgctgtttcccacaaattcatcaagccacctcgtggcgctccaaggccagcctctcgtgctggagtgtatcgctgaagggttcccaacacctacaatcaagtggctgaggcctagtggaccgatgcccgctgacagagtaacctaccagaaccacaacaagacactgcagcttctgaaagtgggagaagaagatgacggggaatatcgatgtcttgccgaaaattcactgggctctgcacggcacgcctactatgtcactgtcgaagcagcaccttactggctgcacaaacctcagagccacctttacggaccaggcgagacagccagacttgactgccaagtgcaaggtagacctcagcctgaggtcacctggcggataaatggtattcctgtcgaggaattagctaaagaccagaagtatagaatccagagaggggctctgattcttagtaatgtccagcccagcgacaccatggtaacccagtgcgaggcgagaaatagacacggcctgttgttggccaatgcgtacatctacgtagtgcagctgcctgccaaaattctcaccgccgacaatcagacatatatggctgtccaagggtctacagcttacctactgtgcaaggctttcggagcccctgtgccctcagtacagtggcttgatgaggatgggacaactgtgctgcaggacgagcgcttctttccttacgcaaacgggactctgggaattcgagatctgcaagctaatgataccggccgatacttttgcctcgctgcgaacgaccagaacaacgtaactattatggctaatttgaaagtcaaggacgccacgcagattactcagggcccaagatctacaatagaaaaaaaaggctcgcgagttactttcacctgtcaggcaagcttcgacccctctctgcagccaagcatcacctggcggggagacggaagggacctccaagagctgggcgattccgataaatacttcatcgaagatggcaggctcgttatccacagcctggactatagcgatcagggtaactactcttgtgtggcttctacagaacttgatgtcgttgagtctcgtgcccagcttttggtcgtgggctcccccggtccggtcccgcgtctggtcctcagtgaccttcatcttctcacacaaagtcaggtgcgggtatcttggtctcctgctgaggaccacaatgcccctatcgaaaagtacgacatcgaattcgaggataaagagatggcgccagaaaagtggtattcgctcggcaaggttcctggaaaccaaaccagcaccacactgaagctctccccttatgtgcattatacctttcgagtgaccgctataaataagtacggcccaggcgaacctagccccgtgtccgagacagtggtaactccagaagccgcacccgagaagaatcccgtagacgttaagggcgaaggcaatgagaccaccaatatggtgatcacctggaaacctcttagatggatggactggaatgcccctcaggtacagtatcgcgtccaatggaggccacagggaacacgagggccttggcaggaacagattgtgtctgatcctttcctggtggtcagcaataccagtacttttgtgccttatgagataaaggtgcaggccgtgaacagtcaaggcaaagggcctgagccacaggtcaccattgggtacagcggcgaagattacccccaggccatcccagaattagaaggtattgaaatccttaattcttccgcggttctggtcaagtggaggccggtcgacctggcccaagtgaaaggccacctgcggggatataacgtgacttattggcgggaggggagccagagaaagcacagcaagcgacatatccacaaagaccatgtcgtggtgcccgcaaacaccacctctgtgatactgtctggcttacggccatatagcagttatcacttggaggtccaggcctttaatggcagaggatcaggcccagcctctgagttcacattcagcaccccagaaggtgttccagggcacccggaggctctgcacctcgagtgtcaaagtaacacctctctcttactgcgctggcagcctcccctgagtcacaatggtgtgctaacaggatacgtcctgagctaccacccattagatgaggggggaaaaggccagctatccttcaacctgcgcgaccccgagcttaggacgcataatctgaccgacttgagcccgcacctgaggtatcggtttcaacttcaagccacaaccaaggagggaccgggagaggcgatcgtcagagagggaggaactatggctctatccgggatctctgattttggaaacattagtgccacggctggggagaactatagcgtcgtctcttgggttcctaaggaggggcagtgcaactttcgctttcatattctgtttaaagcgttaggggaagaaaaggggggtgccagcctctcaccccaatacgtctcttacaaccaaagtagctacacacaatgggacctgcaacccgatacagattatgagatccacctattcaaggaacgcatgttccgacaccagatggcagtgaaaacaaatggtaccggtagggtgcgcctgccccctgcaggattcgcaaccgaggggtggtttatcgggttcgtgtcagccatcatacttctactactcgtcctcctgatcctttgctttattaaacggagcaaggggggaaagtatagcgtgaaggataaagaggacactcaggtggatagcgaagccagacctatgaaagatgagacgtttggagagtactccgataatgaagagaaggccttcgggagtagtcaaccttctctgaatggtgatatcaaacccctggggagtgatgacagccttgctgattacgggggaagcgtggatgtccagttcaacgaagatggatcatttattggtcaatactccggaaaaaaagagaaggaagccgctggaggaaatgactcaagcggggctacctccccaattaatcccgctgtggctctcgaatag

SEQ ID NO: 214183 - DNA, 3762 bp, Artificial Sequence
  derived and/or modified sequence
atggtggtggccctgagatacgtgtggcccctgctgctgtgcagcccctgcctgctgatccagatccccgaggagtacgagggccaccacgtgatggagccccccgtgatcaccgagcagagccccagaagactggtggtgttccccaccgacgacatcagcctgaagtgcgaggccagcggcaagcccgaggtgcagttcagatggaccagagacggcgtgcacttcaagcccaaggaggagctgggcgtgaccgtgtaccagagcccccacagcggcagcttcaccatcaccggcaacaacagcaacttcgcccagagattccagggcatctacagatgcttcgccagcaacaagctgggcaccgccatgagccacgagatcagactgatggccgagggcgcccccaagtggcccaaggagaccgtgaagcccgtggaggtggaggagggcgagagcgtggtgctgccctgcaaccccccccccagcgccgagcccctgagaatctactggatgaacagcaagatcctgcacatcaagcaggacgagagagtgaccatgggccagaacggcaacctgtacttcgccaacgtgctgaccagcgacaaccacagcgactacatctgccacgcccacttccccggcaccagaaccatcatccagaaggagcccatcgacctgagagtgaaggccaccaacagcatgatcgacagaaagcccagactgctgttccccaccaacagcagcagccacctggtggccctgcagggccagcccctggtgctggagtgcatcgccgagggcttccccacccccaccatcaagtggctgagacccagcggccccatgcccgccgacagagtgacctaccagaaccacaacaagaccctgcagctgctgaaggtgggcgaggaggacgacggcgagtacagatgcctggccgagaacagcctgggcagcgccagacacgcctactacgtgaccgtggaggccgccccctactggctgcacaagccccagagccacctgtacggccccggcgagaccgccagactggactgccaggtgcagggcagaccccagcccgaggtgacctggagaatcaacggcatccccgtggaggagctggccaaggaccagaagtacagaatccagagaggcgccctgatcctgagcaacgtgcagcccagcgacaccatggtgacccagtgcgaggccagaaacagacacggcctgctgctggccaacgcctacatctacgtggtgcagctgcccgccaagatcctgaccgccgacaaccagacctacatggccgtgcagggcagcaccgcctacctgctgtgcaaggccttcggcgcccccgtgcccagcgtgcagtggctggacgaggacggcaccaccgtgctgcaggacgagagattcttcccctacgccaacggcaccctgggcatcagagacctgcaggccaacgacaccggcagatacttctgcctggccgccaacgaccagaacaacgtgaccatcatggccaacctgaaggtgaaggacgccacccagatcacccagggccccagaagcaccatcgagaagaagggcagcagagtgaccttcacctgccaggccagcttcgaccccagcctgcagcccagcatcacctggagaggcgacggcagagacctgcaggagctgggcgacagcgacaagtacttcatcgaggacggcagactggtgatccacagcctggactacagcgaccagggcaactacagctgcgtggccagcaccgagctggacgtggtggagagcagagcccagctgctggtggtgggcagccccggccccgtgcccagactggtgctgagcgacctgcacctgctgacccagagccaggtgagagtgagctggagccccgccgaggaccacaacgcccccatcgagaagtacgacatcgagttcgaggacaaggagatggcccccgagaagtggtacagcctgggcaaggtgcccggcaaccagaccagcaccaccctgaagctgagcccctacgtgcactacaccttcagagtgaccgccatcaacaagtacggccccggcgagcccagccccgtgagcgagaccgtggtgacccccgaggccgcccccgagaagaaccccgtggacgtgaagggcgagggcaacgagaccaccaacatggtgatcacctggaagcccctgagatggatggactggaacgccccccaggtgcagtacagagtgcagtggagaccccagggcaccagaggcccctggcaggagcagatcgtgagcgaccccttcctggtggtgagcaacaccagcaccttcgtgccctacgagatcaaggtgcaggccgtgaacagccagggcaagggccccgagccccaggtgaccatcggctacagcggcgaggactacccccaggccatccccgagctggagggcatcgagatcctgaacagcagcgccgtgctggtgaagtggagacccgtggacctggcccaggtgaagggccacctgagaggctacaacgtgacctactggagagagggcagccagagaaagcacagcaagagacacatccacaaggaccacgtggtggtgcccgccaacaccaccagcgtgatcctgagcggcctgagaccctacagcagctaccacctggaggtgcaggccttcaacggcagaggcagcggccccgccagcgagttcaccttcagcacccccgagggcgtgcccggccaccccgaggccctgcacctggagtgccagagcaacaccagcctgctgctgagatggcagccccccctgagccacaacggcgtgctgaccggctacgtgctgagctaccaccccctggacgagggcggcaagggccagctgagcttcaacctgagagaccccgagctgagaacccacaacctgaccgacctgagcccccacctgagatacagattccagctgcaggccaccaccaaggagggccccggcgaggccatcgtgagagagggcggcaccatggccctgagcggcatcagcgacttcggcaacatcagcgccaccgccggcgagaactacagcgtggtgagctgggtgcccaaggagggccagtgcaacttcagattccacatcctgttcaaggccctgggcgaggagaagggcggcgccagcctgagcccccagtacgtgagctacaaccagagcagctacacccagtgggacctgcagcccgacaccgactacgagatccacctgttcaaggagagaatgttcagacaccagatggccgtgaagaccaacggcaccggcagagtgagactgccccccgccggcttcgccaccgagggctggttcatcggcttcgtgagcgccatcatcctgctgctgctggtgctgctgatcctgtgcttcatcaagagaagcaagggcggcaagtacagcgtgaaggacaaggaggacacccaggtggacagcgaggccagacccatgaaggacgagaccttcggcgagtacagcgacaacgaggagaaggccttcggcagcagccagcccagcctgaacggcgacatcaagcccctgggcagcgacgacagcctggccgactacggcggcagcgtggacgtgcagttcaacgaggacggcagcttcatcggccagtacagcggcaagaaggagaaggaggccgccggcggcaacgacagcagcggcgccaccagccccatcaaccccgccgtggccctggagtag

SEQ ID NO: 214184 - DNA, 456 bp, Artificial Sequence
  derived and/or modified sequence
atggtggtggccctgagatacgtgtggcccctgctgctgtgcagcccctgcctgctgatccagatccccgaggagtacgagggccaccacgtgatggagccccccgtgatcaccgagcagagccccagaagactggtggtgttccccaccgacgacatcagcctgaagtgcgaggccagcggcaagcccgaggtgcagttcagatggaccagagacggcgtgcacttcaagcccaaggaggagctgggcgtgaccgtgtaccagagcccccacagcggcagcttcaccatcaccggcaacaacagcaacttcgcccagagattccagggcatctacagatgcttcgccagcaacaagctgggcaccgccatgagccacgagatcagactgatggccgagggcgcccccaagtggcccaaggagaccgtgaagcccgtggaggtggaggagggctag

SEQ ID NO: 214185 - DNA, 3768 bp, Artificial Sequence
  derived and/or modified sequence
atggtggtggccctgagatacgtgtggcccctgctgctgtgcagcccctgcctgctgatccagatccccgaggagagcttccccggccacagagtggtgatggagccccccgtgatcaccgagcagagccccagaagactggtggtgttccccaccgacgacatcagcctgaagtgcgaggccagcggcaagcccgaggtgcagttcagatggaccagagacggcgtgcacttcaagcccaaggaggagctgggcgtgaccgtgtaccagagcccccacagcggcagcttcaccatcaccggcaacaacagcaacttcgcccagagattccagggcatctacagatgcttcgccagcaacaagctgggcaccgccatgagccacgagatcagactgatggccgagggcgcccccaagtggcccaaggagaccgtgaagcccgtggaggtggaggagggcgagagcgtggtgctgccctgcaaccccccccccagcgccgagcccctgagaatctactggatgaacagcaagatcctgcacatcaagcaggacgagagagtgaccatgggccagaacggcaacctgtacttcgccaacgtgctgaccagcgacaaccacagcgactacatctgccacgcccacttccccggcaccagaaccatcatccagaaggagcccatcgacctgagagtgaaggccaccaacagcatgatcgacagaaagcccagactgctgttccccaccaacagcagcagccacctggtggccctgcagggccagcccctggtgctggagtgcatcgccgagggcttccccacccccaccatcaagtggctgagacccagcggccccatgcccgccgacagagtgacctaccagaaccacaacaagaccctgcagctgctgaaggtgggcgaggaggacgacggcgagtacagatgcctggccgagaacagcctgggcagcgccagacacgcctactacgtgaccgtggaggccgccccctactggctgcacaagccccagagccacctgtacggccccggcgagaccgccagactggactgccaggtgcagggcagaccccagcccgaggtgacctggagaatcaacggcatccccgtggaggagctggccaaggaccagaagtacagaatccagagaggcgccctgatcctgagcaacgtgcagcccagcgacaccatggtgacccagtgcgaggccagaaacagacacggcctgctgctggccaacgcctacatctacgtggtgcagctgcccgccaagatcctgaccgccgacaaccagacctacatggccgtgcagggcagcaccgcctacctgctgtgcaaggccttcggcgcccccgtgcccagcgtgcagtggctggacgaggacggcaccaccgtgctgcaggacgagagattcttcccctacgccaacggcaccctgggcatcagagacctgcaggccaacgacaccggcagatacttctgcctggccgccaacgaccagaacaacgtgaccatcatggccaacctgaaggtgaaggacgccacccagatcacccagggccccagaagcaccatcgagaagaagggcagcagagtgaccttcacctgccaggccagcttcgaccccagcctgcagcccagcatcacctggagaggcgacggcagagacctgcaggagctgggcgacagcgacaagtacttcatcgaggacggcagactggtgatccacagcctggactacagcgaccagggcaactacagctgcgtggccagcaccgagctggacgtggtggagagcagagcccagctgctggtggtgggcagccccggccccgtgcccagactggtgctgagcgacctgcacctgctgacccagagccaggtgagagtgagctggagccccgccgaggaccacaacgcccccatcgagaagtacgacatcgagttcgaggacaaggagatggcccccgagaagtggtacagcctgggcaaggtgcccggcaaccagaccagcaccaccctgaagctgagcccctacgtgcactacaccttcagagtgaccgccatcaacaagtacggccccggcgagcccagccccgtgagcgagaccgtggtgacccccgaggccgcccccgagaagaaccccgtggacgtgaagggcgagggcaacgagaccaccaacatggtgatcacctggaagcccctgagatggatggactggaacgccccccaggtgcagtacagagtgcagtggagaccccagggcaccagaggcccctggcaggagcagatcgtgagcgaccccttcctggtggtgagcaacaccagcaccttcgtgccctacgagatcaaggtgcaggccgtgaacagccagggcaagggccccgagccccaggtgaccatcggctacagcggcgaggactacccccaggccatccccgagctggagggcatcgagatcctgaacagcagcgccgtgctggtgaagtggagacccgtggacctggcccaggtgaagggccacctgagaggctacaacgtgacctactggagagagggcagccagagaaagcacagcaagagacacatccacaaggaccacgtggtggtgcccgccaacaccaccagcgtgatcctgagcggcctgagaccctacagcagctaccacctggaggtgcaggccttcaacggcagaggcagcggccccgccagcgagttcaccttcagcacccccgagggcgtgcccggccaccccgaggccctgcacctggagtgccagagcaacaccagcctgctgctgagatggcagccccccctgagccacaacggcgtgctgaccggctacgtgctgagctaccaccccctggacgagggcggcaagggccagctgagcttcaacctgagagaccccgagctgagaacccacaacctgaccgacctgagcccccacctgagatacagattccagctgcaggccaccaccaaggagggccccggcgaggccatcgtgagagagggcggcaccatggccctgagcggcatcagcgacttcggcaacatcagcgccaccgccggcgagaactacagcgtggtgagctgggtgcccaaggagggccagtgcaacttcagattccacatcctgttcaaggccctgggcgaggagaagggcggcgccagcctgagcccccagtacgtgagctacaaccagagcagctacacccagtgggacctgcagcccgacaccgactacgagatccacctgttcaaggagagaatgttcagacaccagatggccgtgaagaccaacggcaccggcagagtgagactgccccccgccggcttcgccaccgagggctggttcatcggcttcgtgagcgccatcatcctgctgctgctggtgctgctgatcctgtgcttcatcaagagaagcaagggcggcaagtacagcgtgaaggacaaggaggacacccaggtggacagcgaggccagacccatgaaggacgagaccttcggcgagtacagcgacaacgaggagaaggccttcggcagcagccagcccagcctgaacggcgacatcaagcccctgggcagcgacgacagcctggccgactacggcggcagcgtggacgtgcagttcaacgaggacggcagcttcatcggccagtacagcggcaagaaggagaaggaggccgccggcggcaacgacagcagcggcgccaccagccccatcaaccccgccgtggccctggagtag

SEQ ID NO: 214186 - protein, 163 aa, Artificial Sequence
  derived and/or modified sequence
MGSTWGSPGWVRLALCLTGLVLSLYALHVKAARARDRDYRALCDVGTAISCSRVFSSRWGRGFGLVEHVLGQDSILNQSNSIFGCIFYTLQLLLGCLRTRWASVLMLLSSLVSLAGSVYLAWILFFVLYDFCIVCITTYAINVSLMWLSFRKVQEPQGKAKRH

SEQ ID NO: 214187 - DNA, 492 bp, Artificial Sequence
  derived and/or modified sequence
atgggcagcacctggggcagccccggctgggtgagactggccctgtgcctgaccggcctggtgctgagcctgtacgccctgcacgtgaaggccgccagagccagagacagagactacagagccctgtgcgacgtgggcaccgccatcagctgcagcagagtgttcagcagcagatggggcagaggcttcggcctggtggagcacgtgctgggccaggacagcatcctgaaccagagcaacagcatcttcggctgcatcttctacaccctgcagctgctgctgggctgcctgagaaccagatgggccagcgtgctgatgctgctgagcagcctggtgagcctggccggcagcgtgtacctggcctggatcctgttcttcgtgctgtacgacttctgcatcgtgtgcatcaccacctacgccatcaacgtgagcctgatgtggctgagcttcagaaaggtgcaggagccccagggcaaggccaagagacactag

SEQ ID NO: 214188 - DNA, 492 bp, Artificial Sequence
  derived and/or modified sequence
atgggctctacctggggcagtccaggttgggttcgactggccttatgcctgaccggactggtactgagtttgtacgctctccacgtcaaggcagccagagccagagacagagactaccgggccttgtgcgacgtaggaactgcaattagctgttcacgggtattcagttccagatggggacgtggtttcggcttagtcgagcatgtgctcgggcaggattctatcctcaaccagagtaactctattttcgggtgtatcttctacaccctgcaattgctgctggggtgtcttcggacgcggtgggcaagtgtactcatgctcctgtcctctctcgttagcctagcaggctccgtatatctcgcatggattttgttctttgtcctttacgacttctgcatcgtttgtatcaccacctacgccatcaatgtgagcctaatgtggttatccttccgaaaagttcaggagccacagggcaaggctaaaaggcactag

SEQ ID NO: 214189 - DNA, 492 bp, Artificial Sequence
  derived and/or modified sequence
atgggcagcacctggggcagccctggctgggtgcggctggccctgtgcctgaccggcctggtgctgagcctgtatgccctgcacgtgaaggccgcccgggcccgggaccgggactaccgggccctgtgtgatgtgggcacagccatcagctgcagcagggtcttcagcagccgctggggccggggcttcggcctggtggagcacgtgctgggccaggacagcatcctgaaccagagcaacagcatcttcggctgcatcttctacaccctgcagctgctgctgggctgcctgcggacccgctgggcctctgtgctgatgctgctgagcagcctggtgtccctggccggctctgtgtacctggcctggatcctcttctttgtgctgtatgacttctgcatcgtgtgcatcaccacctacgccatcaacgtgtccctgatgtggctgtccttcaggaaggtgcaggagccccagggcaaggccaagaggcactag

SEQ ID NO: 214190 - DNA, 492 bp, Artificial Sequence
  derived and/or modified sequence
atgggcagcacctggggcagccccggctgggtgcggctggccctgtgccttactgggctggtgctgagcttgtacgccctccatgtcaaagctgctcgggctcgggatcgagactaccgtgccctttgcgatgtggggactgccatctcctgtagcagagtcttttcctccaggtggggccgtggttttggactagtggagcatgtccttgggcaagattcgatcctgaatcagtctaacagcattttcggctgcattttctataccctccagctgctcctgggatgtctccgtacacgatgggcatcggtgctgatgttgctgtcctcgctggtcagtttagcaggctcggtgtacctggcgtggattctgttctttgtcctgtacgatttctgtatcgtttgcatcaccacgtacgccattaatgtaagcctcatgtggctctcattccgcaaggtgcaggagccccagggtaaagccaaaagacattag

SEQ ID NO: 214191 - DNA, 492 bp, Artificial Sequence
  derived and/or modified sequence
atgggtagcacttgggggtctcccggttgggttcgcctcgccctgtgtctgaccggcctggtattgagtctctacgccttacacgttaaggcagccagggcaagggaccgcgattacagagccctgtgcgacgtagggacagctatctcgtgcagcagagtcttttcctcccgatggggcagaggttttgggttagtcgagcacgtcttggggcaggattcgatccttaaccagtccaactcaatattcggatgcattttctataccctccagctgctcctggggtgtctcaggaccaggtgggccagtgtcctgatgcttctgtccagcttggtctcgttggctgggtccgtgtacctcgcctggatccttttttttgtgctttatgacttctgcattgtgtgcattacaacgtacgccataaacgtgagcctgatgtggctctcattccgcaaggtgcaggagccccagggcaaggccaagagacactag

SEQ ID NO: 214192 - DNA, 1012 bp, Artificial Sequence
  derived and/or modified sequence
cgcgattccgcacgtcccttacccgcttcactagtcccggcattcttcgctgttttcctaactcgcccgcttgactagcgccctggaacagccatttgggtcgtggagtgcgagcacggccggccaatcgccgagtcagagggccaggaggggcgcggccattcgccgcccggcccctgctccgtggctggttttctccgcgggcgcctcgggcggaacctggagataatgggcagcacctgggggagccctggctgggtgcggctcgctctttgcctgacgggcttagtgctctcgctctacgcgctgcacgtgaaggcggcgcgcgcccgggaccgggattaccgcgcgctctgcgacgtgggcaccgccatcagctgttcgcgcgtcttctcctccaggtggggcaggggtttcgggctggtggagcatgtgctgggacaggacagcatcctcaatcaatccaacagcatattcggttgcatcttctacacactacagctattgttaggttgcctgcggacacgctgggcctctgtcctgatgctgctgagctccctggtgtctctcgctggttctgtctacctggcctggatcctgttcttcgtgctctatgatttctgcattgtttgtatcaccacctatgctatcaacgtgagcctgatgtggctcagtttccggaaggtccaagaaccccagggcaaggctaagaggcactgagccctcaacccaagccaggctgacctcatctgctttgctttggcatgtgagccttgcctaagggggcatatctgggtccctagaaggccctagatgtggggcttctagattaccccctcctcctgccatacccgcacatgacaatggaccaaatgtgccacacgctcgctcttttttacacccagtgcctctgactctgtccccatgggctggtctccaaagctctttccattgcccagggagggaaggttctgagcaataaagtttcttagatcaatcagccaagtctgaa

SEQ ID NO: 214193 - protein, 591 aa, Artificial Sequence
  derived and/or modified sequence
MFGIQESIQRSGSSMKEEPLGSGMNAVRTWMQGAGVLDANTAAQSGVGLARAHFEKQPPSNLRKSNFFHFVLALYDRQGQPVEIERTAFVGFVEKEKEANSEKTNNGIHYRLQLLYSNGIRTEQDFYVRLIDSMTKQAIVYEGQDKNPEMCRVLLTHEIMCSRCCDKKSCGNRNETPSDPVIIDRFFLKFFLKCNQNCLKNAGNPRDMRRFQVVVSTTVNVDGHVLAVSDNMFVHNNSKHGRRARRLDPSEGTPSYLEHATPCIKAISPSEGWTTGGATVIIIGDNFFDGLQVIFGTMLVWSELITPHAIRVQTPPRHIPGVVEVTLSYKSKQFCKGTPGRFIYTALNEPTIDYGFQRLQKVIPRHPGDPERLPKEVILKRAADLVEALYGMPHNNQEIILKRAADIAEALYSVPRNHNQLPALANTSVHAGMMGVNSFSGQLAVNVSEASQATNQGFTRNSSSVSPHGYVPSTTPQQTNYNSVTTSMNGYGSAAMSNLGGSPTFLNGSAANSPYAIVPSSPTMASSTSLPSNCSSSSGIFSFSPANMVSAVKQKSAFAPVVRPQTSPPPTCTSTNGNSLQAISGMIVPPM

SEQ ID NO: 214194 - DNA, 1776 bp, Artificial Sequence
  derived and/or modified sequence
atgtttggcatacaggaatccatacagcggtccggatcttccatgaaagaggagcccctcggctcaggcatgaatgctgtgcgcacatggatgcaaggagccggcgtcctggatgctaacactgcggcccaatccggagtgggcctggcaagagcccacttcgagaagcagccaccatccaatctgaggaagagcaatttctttcatttcgttttagcactatatgatcggcagggccagcctgtagaaatcgaacgtacagcgttcgtagggtttgttgagaaagaaaaggaggccaactccgagaagactaataacgggatccattaccgtttgcagttgctgtattcaaacgggatcagaacagagcaggacttttatgttcgccttattgatagcatgaccaaacaagccatagtttatgagggacaggacaagaacccggaaatgtgcagggtgttactgacccacgagataatgtgcagcagatgttgtgataaaaagagttgtgggaaccggaacgaaacaccctccgaccccgttattattgataggttttttctcaagttcttcctgaagtgtaatcagaactgccttaagaacgctgggaatcctcgtgatatgcgtaggttccaggttgtcgtgtcgaccacagtcaacgtggacggccatgtgctggctgtgtctgataacatgttcgtgcataataattccaaacacggtagacgtgcacgtcggttggatcctagcgagggcaccccttcttacctggaacatgccacaccatgcattaaggccatttctccctccgagggctggacaacaggcggggcgaccgtcatcatcataggagacaactttttcgatgggctgcaggtgatctttggtactatgctggtatggtcagagctgatcactccccacgctattagggtgcagactccccctagacacattccaggagtggtggaggtgactctctcatataaaagcaaacagttctgcaagggtacacccggtcgctttatttataccgccctaaacgagcccactatcgattatggctttcagaggctgcaaaaagtaatcccgaggcatccaggagacccagagaggcttccaaaggaagtgatcctgaagagagcggccgaccttgtggaagccctctatgggatgccccataataatcaggaaatcattctcaaacgtgccgccgacatcgccgaagccttgtatagtgttccgcggaaccacaaccagctacccgccctggccaacactagcgtgcatgctgggatgatgggagttaactcttttagcggacagctggcagttaatgttagcgaggcatcccaggcaaccaaccagggatttacaaggaattcgtcgtctgtctctccccatggatatgtgccatccactactccccagcagactaattacaactcagtgacaacaagcatgaacgggtacggatctgccgctatgtctaatctcgggggaagtccaacattcctcaacgggagtgccgcaaattcaccctacgctatcgtaccatctagtccaaccatggcatcgtctactagcctcccctctaactgctcctcttccagcggtatcttcagtttctcccccgccaacatggtctctgcggtgaagcagaaatcagcctttgccccagtggtgcgacctcagacctccccaccccctacctgtacctctaccaatggaaattccttgcaagccatttccggcatgattgtgcctccgatgtag

SEQ ID NO: 214195 - DNA, 1776 bp, Artificial Sequence
  derived and/or modified sequence
atgttcggtattcaggaaagcatccagaggagtgggagtagcatgaaggaggagcccctcggttccggcatgaatgctgtgcggacatggatgcaaggagccggcgtgttggacgctaacaccgccgcccagtccggtgtgggattggctagagcacactttgaaaagcagcccccctctaacctacggaagtctaattttttccattttgtcctcgcactgtatgatagacaggggcagccggtagaaattgagagaacggcttttgtgggattcgtggaaaaggaaaaagaagctaactctgagaagacgaacaatgggattcattatcgcctgcagctactgtattccaacggcatacggaccgagcaagacttctacgtaaggctgatcgactcgatgaccaagcaggccattgtttacgaaggacaagacaagaaccccgagatgtgccgtgtactcctgacccacgagatcatgtgtagcaggtgttgcgacaaaaaaagttgcggcaacagaaacgagacacccagcgatcctgtcatcatcgacagattctttctgaaattttttctgaagtgtaatcagaactgcctaaaaaacgccggcaatcccagggacatgcgtcgattccaggtggttgtgagcacaaccgtgaacgtggacggccacgtactagccgtgagcgacaacatgtttgtccacaataactccaagcatggacgcagagcccgcagactcgacccctctgaaggtactccatcttatctggagcacgccactccttgtatcaaagccatctccccctccgaaggctggaccactggtggcgccactgtcatcatcattggcgacaatttctttgacggattgcaggttattttcggcaccatgttggtgtggagcgagctcatcactccccatgctatcagggttcagacacctccccgacacatccccggcgtggtggaggtgactctctcttacaagtcaaaacagttctgtaaagggacccctgggaggtttatctacacagctttgaatgaaccaaccatcgactacggatttcagaggctgcagaaggtgattcctagacacccgggcgaccctgaaagactgccaaaagaggtgatcttgaagagggccgcggatctggtggaggctctgtatggcatgccccataacaaccaggagataattctgaagcgagctgccgacatcgcagaggctttgtattctgtacccaggaaccacaatcagttaccagccttagctaacacaagcgttcatgcaggcatgatgggggtgaactcatttagcggccagttggctgttaatgtctcagaagcctcacaggccacaaatcaaggctttaccagaaactcgagtagcgtatcccctcacggatacgtgcccagcactacacctcagcaaactaactacaactcagtgaccacctcaatgaacggatacggcagcgcagctatgagcaatctcggcggttccccaacctttctgaatgggtccgccgcaaactctccttatgctatcgttcccagctcgcctacaatggctagctccacgtctctccccagtaactgctcgtcctctagcgggatcttctccttttccccagccaacatggtgtcagcagtcaagcagaaatccgcttttgcgcccgtggtccgccctcagacatcaccacctccaacttgtacttccacaaatggaaattctcttcaggcaatctccgggatgatcgtcccccccatgtag

SEQ ID NO: 214196 - DNA, 1776 bp, Artificial Sequence
  derived and/or modified sequence
atgtttggcatccaggagagcatccagaggagcggcagctccatgaaggaggagcccctgggcagcggcatgaatgctgtgaggacctggatgcagggcgctggggtgctggatgccaacacagctgcccagagcggcgtgggcctggcccgggcccactttgagaagcagccccccagcaacctgaggaagagcaacttcttccactttgtgctggccctgtatgaccggcagggccagcctgtggagattgaaagaacagcctttgtgggctttgtggagaaggagaaggaggccaacagcgagaagaccaacaacggcatccactaccgcctgcagctgctgtacagcaatggcatcagaacagagcaggacttctacgtgcggctgattgacagcatgaccaagcaggccatcgtgtatgagggccaggacaagaaccctgagatgtgccgggtgctgctgacccatgagatcatgtgcagccgctgctgtgacaagaagagctgtggcaacagaaatgagacccccagcgaccccgtcatcatcgaccgcttcttcctgaagttcttcctgaagtgcaaccagaactgcctgaagaatgccggcaacccccgggacatgaggcgcttccaggtggtggtgtccaccaccgtgaatgtggatggccacgtgctggccgtgtctgacaacatgtttgtgcacaacaacagcaagcacggccggcgggcccggcggctggaccccagcgagggcacccccagctacctggagcacgccaccccctgcatcaaggccatcagccccagcgagggctggaccactggaggagccaccgtcatcatcattggagacaacttctttgatggcctgcaggtgatcttcggcaccatgctggtgtggagcgagctgatcaccccccacgccatccgggtgcagaccccacccaggcacatccctggggtggtggaggtgaccctgagctacaagagcaagcagttctgcaagggcaccccaggccgcttcatctacacagccctgaatgagcccaccatcgactatggcttccagaggctgcagaaggtgatccccaggcaccctggggaccctgagcggctgcccaaggaggtgatcctgaagagagctgctgacctggtggaggccctgtatggcatgccccacaacaaccaggagatcatcctgaagagagctgctgacattgctgaggccctgtacagcgtgcccaggaaccacaaccagctgcctgccctggccaacacctctgtgcatgctggcatgatgggcgtgaacagcttcagcggccagctggccgtgaatgtgtctgaggccagccaggccaccaaccagggcttcaccaggaacagcagctctgtgagcccccacggctacgtgcccagcaccaccccccagcagaccaactacaacagcgtgaccacctccatgaatggctacggcagcgctgccatgagcaacctgggcggcagccccaccttcctgaatggatctgctgccaacagcccctatgccatcgtgcccagcagccccaccatggccagcagcaccagcctgcccagcaactgcagcagcagcagcggcatcttctccttctccccagccaacatggtgtctgctgtgaagcagaagagcgcctttgcccctgtggtgcggccccagaccagccccccacccacctgcaccagcaccaacggcaacagcctgcaggccatcagcggcatgattgtgccccccatgtag

SEQ ID NO: 214197 - DNA, 1776 bp, Artificial Sequence
  derived and/or modified sequence
atgttcggcatccaggagagcatccagcggagcggcagcagcatgaaagaggagccactaggtagcggcatgaacgcagtcaggacatggatgcagggagctggcgtgttagacgctaacactgctgctcagtcaggtgtgggactggcaagagcccacttcgagaaacaacctccctccaatctacggaaaagcaacttctttcacttcgtcctggctctctatgaccgacagggacagcccgtcgagattgaaagaaccgcgtttgtgggcttcgtcgaaaaagaaaaagaggcaaatagcgaaaagacaaacaacggcatacattacagactgcagctgctgtactctaatggcattcgaaccgagcaagacttctatgtccgcctcatcgactccatgacaaagcaggcgatcgtgtatgagggacaggataaaaatcctgagatgtgccgagtcctcctcacacatgaaatcatgtgcagtagatgctgtgataagaagtcatgtggcaatagaaacgagacaccttcggaccctgtcatcattgatcgctttttcttaaagtttttcctcaagtgcaatcagaactgcctgaagaacgcgggaaatccccgcgatatgcgccggttccaggttgtcgtctctacgacagtgaacgtcgatggtcacgtgctagcagtgtcggataacatgtttgtgcataacaactctaaacacggaaggagagccagacggctggacccaagtgagggcactccaagttacctcgaacatgctacgccatgtataaaggcgattagtccgtctgaagggtggacaacaggcggagcaacagtcataattattggcgacaatttcttcgatggtctccaggttatctttggtacgatgttagtatggagtgaactgataactccccacgctatccgggtgcagactccacctcgccatattcccggggtcgttgaggtgacgttgtcttacaaaagtaagcagttctgcaagggcacgcccggccgatttatatatacggctttaaacgagcccacaattgactacggatttcagcggctgcagaaggtaattcctagacaccccggcgacccagaaagactgccgaaagaggtcatactgaagagggcagctgaccttgtggaagcactgtacgggatgccgcataataaccaagagataattctcaagcgggctgccgacattgctgaggctctttactctgtgccccggaatcataaccagctgccagccctggccaacacgtcggtgcacgccgggatgatgggcgttaattccttctctggtcagctggctgtcaatgtctccgaagcttctcaggccacgaaccagggattcacccgcaattcaagcagcgtttcacctcatggttatgttccttccactaccccccaacagactaattacaacagtgtaaccacctctatgaacggatacggttctgccgccatgtctaatctgggcgggtcacctacatttctgaacggttcagccgcaaacagcccctacgcgatcgttcccagcagtccaaccatggcatcttccactagcttgccatctaattgctcatctagttctggaattttctctttttcccccgccaatatggtgagtgccgtcaagcagaagtccgcctttgcccccgtggtgaggcctcagacttccccacccccaacatgcacatccacaaacgggaactcccttcaggccatatctgggatgatcgtgcccccaatgtag

SEQ ID NO: 214198 - DNA, 1776 bp, Artificial Sequence
  derived and/or modified sequence
atgttcggcatccaggagagcatccagcggagcggcagcagcatgaaagaagaaccactgggatccggaatgaatgcagttcgaacctggatgcagggcgccggcgtcctcgatgccaatacggctgctcaatccggggtgggtttggcgagggctcacttcgagaagcaacctcctagtaatcttagaaagtctaattttttccactttgtattggcgttatacgaccgtcagggacaacccgtcgaaatcgaacgtaccgctttcgtgggattcgtcgaaaaagagaaagaggcaaactcagagaaaacaaacaatgggattcactatcgcctccagttactttacagtaatggtattcgaaccgaacaggacttctatgtgcgcctcatcgactctatgacaaaacaggccatcgtctatgaggggcaggacaaaaaccccgaaatgtgccgcgtgttactcacgcacgaaattatgtgcagcaggtgttgcgacaagaaaagttgtggtaaccgtaatgaaacgccaagcgaccccgtaatcattgaccgctttttcctcaagttcttcctgaagtgcaaccagaattgcctgaaaaacgcagggaatcccagggatatgagaagatttcaggtcgtggtatccaccactgtgaacgttgacgggcatgtgctggccgtatcggacaacatgttcgtgcataataattccaagcatggtcgcagagctcgcaggctagatcccagcgaagggacgccttcctatctcgaacacgctactccatgcatcaaggcaataagcccgagtgaagggtggaccacgggtggggctacagtgattatcatcggtgacaacttcttcgatggcctacaggtgatcttcgggacgatgctggtctggtcggagcttataacgcctcacgccattcgcgtccagacgcccccaaggcatatccccggggtggtggaggttactctgagctacaagagcaagcagttttgcaaggggacaccaggacgcttcatctatacagccctgaacgaaccaaccatagactacggattccaacggctgcagaaagtgatacccaggcacccgggagacccagagaggttgcctaaggaggttatccttaagcgcgcagcagatcttgtcgaagccctgtatgggatgccccacaacaaccaggagataattctcaagcgcgctgcagacatcgcggaagctctttactccgtgcccaggaaccacaatcagctccccgcactggccaacaccagtgtccacgccggcatgatgggagtgaatagcttcagcggccagctcgctgtgaatgtctccgaggcttcccaggccaccaaccagggcttcacacgaaacagttcctctgtcagtccccacggctacgtacctagtacaacaccacagcaaaccaactacaactccgtgacaacaagcatgaatggctacggaagcgccgccatgagcaatctgggagggagtccaacttttctgaacggcagcgccgcaaactctccctacgccatagtaccctcttctccgactatggcttcatctaccagcctcccctcaaattgttcctctagctccgggatattttcattttcacctgccaatatggtatcagcagtgaagcagaagagcgcgtttgcccctgtggttcgccctcagacgtcacctccccctacatgcaccagtacaaatggaaattctttgcaggccatcagtggtatgatcgtgcccccgatgtag

SEQ ID NO: 214199 - DNA, 1776 bp, Artificial Sequence
  derived and/or modified sequence
atgttcggcattcaggagtccatccagcggtctggttcaagtatgaaggaggagcctctcggctctgggatgaacgccgttcgaacctggatgcagggggctggcgttttagacgccaatacggctgcccagtccggggtgggacttgccagagcacattttgaaaaacagcctccatctaacctcaggaagtccaacttctttcattttgttctggcattatacgaccggcagggtcagccggtggagatcgagagaacagcctttgttggctttgtcgagaaggaaaaggaggccaacagcgagaagacaaataacggcatacactaccggttgcaactgctctactcaaatggtatccggacggagcaggacttctatgtccgactgattgacagtatgaccaagcaggccatagtatatgaaggacaagataagaatccagagatgtgccgggtcttgctcacacatgagataatgtgcagcagatgctgtgataagaaaagttgcggtaacagaaatgagacaccttctgatcccgttatcatagacaggttctttctgaagtttttcttaaagtgtaaccagaactgtctcaagaatgccggaaacccgagggacatgagacgatttcaggtggtggtgtccactaccgtcaacgtcgatggacatgtgcttgccgtttctgacaacatgtttgtccataataattcaaagcatggaagacgagctcgacgtctagatccgtctgaggggacgcccagttacctggagcatgctaccccttgcattaaggcgatctccccttcagagggttggacaactgggggtgcaacagttatcatcatcggggacaacttttttgatggcctgcaggttatcttcggtacgatgctggtctggtccgaactaatcactcctcatgctatcagggtccaaactccaccaaggcacattccaggcgtcgtggaggtaacgttaagctacaaatccaagcagttctgtaaaggaaccccaggccgtttcatttataccgcactgaacgaacctaccattgactatggttttcagcgtttgcagaaggtaatccctcgccatccaggagatccagaacgactgcctaaggaggtgattctgaaacgagcagcagatttagtggaggctttgtatggtatgcctcacaacaatcaagagataatcctgaagcgcgctgcggacatagcagaggcattatactctgtccctagaaatcacaatcagctcccagcactggcaaacacctccgtccatgccggtatgatgggagtgaacagcttcagtggccagctggcagttaatgtatctgaggcctctcaagcaactaatcagggcttcacgaggaatagtagctcagtttcacctcatggatacgtccccagcactactccacagcagaccaattataatagtgtaacaacctcaatgaatggctatggttctgccgctatgagcaatctcggcggatcccctacgttcctgaacggttctgctgcgaattccccttatgccattgtaccttcaagccccaccatggcctcctccactagccttcccagcaactgttcaagcagttctggcatattctctttctctcccgctaacatggtgtcagcggttaagcagaagagcgctttcgccccagtggtcaggccccagactagccccccacctacatgcactagtacaaacggtaactcgctgcaggccatttcaggtatgattgtaccaccgatgtag

SEQ ID NO: 214200 - DNA, 1776 bp, Artificial Sequence
  derived and/or modified sequence
atgttcggaattcaggaatcaattcaacgcagtggttcaagtatgaaggaggagcccctgggatcgggtatgaacgccgttaggacgtggatgcaaggcgcaggtgttctcgatgccaatacggctgcacaatcaggcgtgggtctggcgagagcacacttcgaaaaacaaccgccatccaatctgagaaaaagcaattttttccactttgtgttggccctgtatgacaggcagggacagccagtcgaaattgagcgaaccgcttttgtgggtttcgttgaaaaagagaaagaagccaattcagagaagacaaataatggtattcactatcgcctacagctgctgtatagtaatggaatacgcaccgagcaagacttctatgtccggctgatcgacagcatgacaaagcaggctatagtgtatgaggggcaagacaagaacccggaaatgtgccgagtgttgttgactcacgaaataatgtgttctagatgctgtgacaagaagtcctgcggaaaccggaatgaaaccccatccgatcctgtcatcattgacagattcttcttgaagttttttctcaagtgtaaccagaattgtctaaaaaacgcaggaaatcctagggacatgcggagattccaggttgtggtgtctaccacagtcaacgtcgacgggcacgtgttagcagtctccgacaacatgttcgtacacaacaacagcaagcatggccgacgcgcaaggcggctggaccccagcgagggcaccccttcttacctggaacatgccactccttgcataaaggcaattagccccagtgaggggtggacgaccggcggagctaccgtaataataatcggcgacaattttttcgatggactccaagtgatctttgggaccatgctggtgtggagcgaacttattacgccccatgcaattagggttcagacgccccctagacacattccgggagtcgtcgaggtgacactttcatataagagtaaacagttctgcaaaggcacgccaggtaggttcatctacacggccctgaacgaacccacaatagactatggcttccagcgactgcagaaagtaattccacgccatccaggcgatcctgaacggctgccaaaagaggttattttaaaaagggccgcagatttagtggaagccctgtatgggatgccccacaacaaccaggagatcattctgaagagagcagcagacattgcagaagcactatatagcgttccacggaaccataatcagctgcccgcactggcaaacacatcagtacatgctggaatgatgggagttaattcttttagtggtcagctagcagttaatgtctccgaggcttcccaagcaaccaaccagggatttacacgcaattcttcaagtgttagccctcatgggtatgtgccaagtacaaccccgcagcagactaattataattccgtgacaacgagtatgaacggttatggaagcgccgcaatgtcaaatctgggtgggtctcccacattcctgaatgggtctgcagcaaattcaccgtacgccatcgttccgagtagccccaccatggcatcaagcacctcgctcccatcaaactgctctagttctagcggcatattctctttttctcctgccaacatggtctcagctgtgaagcagaagtccgcctttgccccagtggttaggccccagacctcgcccccacccacatgtactagcacaaatggcaatagcctgcaggccatttctggtatgatagttccacctatgtag

SEQ ID NO: 214201 - DNA, 5250 bp, Artificial Sequence
  derived and/or modified sequence
gccaagcatacatctctaattttattattttggtcttttcgttggattttccctttcttctttttttcgggttatcgctcagttttgagcagaggtttacattttttaaaaatttgctttccagcccgccttgatcttctaagtgcgagttcatcgtctgagaaaaaaaaaaatctctggttggcgtttttgtttcttttcttttctttcttttctttcctttttttttttttttaatttttttcaagggggaggagattttccacaagaaaaggttgttttcatgtttgggattcaggaaagcatccaacggagtggaagcagcatgaaggaagagccgctgggcagcggcatgaacgcggtgcggacgtggatgcagggcgccggggtgctggacgccaacacggcggcgcagagcggggtgggtctggcccgggctcactttgagaagcagccgccttccaatctgcggaaatccaacttcttccacttcgtcctggccctctacgacagacagggccagcccgtggagatcgagaggacagcgtttgtggggttcgtggagaaggaaaaagaagccaacagcgaaaagaccaataacggaattcactaccggcttcagcttctctacagcaatgggataaggacggagcaggatttctacgtgcgcctcattgactccatgacaaaacaagccatagtgtatgaaggccaagacaagaacccagaaatgtgccgagtcttgctcacacatgagatcatgtgcagccgctgttgtgacaagaaaagctgtggcaaccgaaatgagactccctcagatccagtgataattgacaggttcttcttgaaatttttcctcaaatgtaaccaaaattgcctaaagaatgcgggaaacccacgtgacatgcggagattccaggtcgtggtgtctacgacagtcaatgtggatggccatgtcctggcagtctctgataacatgtttgtccataataattccaagcatgggcggagggctcggaggcttgacccctcggaaggtacgccctcttatctggaacatgctactccctgtatcaaagccatcagcccgagtgaaggatggacgacgggaggtgcgactgtgatcatcataggggacaatttctttgatgggttacaggtcatattcggtaccatgctggtctggagtgagttgatcactcctcatgccatccgtgtgcagacccctcctcggcacatccctggtgttgtggaagtcacactgtcctacaaatctaagcagttctgcaaaggaacaccaggcagattcatttatacagcgctcaacgaacccaccatcgattatggtttccagaggttacagaaggtcattcctcggcaccctggtgaccctgagcgtttgccaaaggaagtaatactcaaaagggctgcggatctggtagaagcactgtatgggatgccacacaacaaccaggaaatcattctgaagagagcggccgacattgccgaggccctgtacagtgttccccgcaaccacaaccaactcccggcccttgctaacacctcggtccacgcagggatgatgggcgtgaattcgttcagtggacaactggccgtgaatgtctccgaggcatcacaagccaccaatcagggtttcacccgcaactcaagcagcgtatcaccacacgggtacgtgccgagcaccactccccagcagaccaactataactccgtcaccacgagcatgaacggatacggctctgccgcaatgtccaatttgggcggctcccccaccttcctcaacggctcagctgccaactccccctatgccatagtgccatccagccccaccatggcctcctccacaagcctcccctccaactgcagcagctcctcgggcatcttctccttctcaccagccaacatggtctcagccgtgaaacagaagagtgctttcgcaccagtcgtcagaccccagacctccccacctcccacctgcaccagcaccaacgggaacagcctgcaagcgatatctggcatgattgttcctcctatgtgaaagaattgccttgaagaattgtattaatgaagaggttggattctgctacagagagtaatctgatacaagtcccagagtggaacttttaactcaggcctttttaagaggaatcacaataactgcagatttttaaacaaacaaaatcaccgaccttgcaaatactgaaattggaagagggatctgcaagtgcagggtgttggttaaagttgtacctcccaagtatttgggggatatatttattctgtattgacaaaagcaaatccactttttctttttcttttttttttttaagcttaattctgcaatcatttgtcttttataaaccgtaaagctctatacaagggacactataaataagactccatgttttaatttatgatgtttttaaagctgtgtaaaggaagaatgaagtggtgatatttacaaaaaagtaaaaaaaaaaaaaaagaaaaaaaggaaaaaaaaaaaagcttgtatgggacagaataggaatgccagttagattttttagaaaaactaagggtcggcttttgcgccttaaagcatatcaaatggtagttagctcagacagtgcattttcaatatctaacttaacatgccaccccttagcagtgcaagcttatttatctcttttgtattgttgtcttaagcaactgtgtaaataaatgcagcctggaaagttaaaacgcgatgtaagtgatcacatttttccctctactcgaaaatccagtgcctctagacagattgttaaaactgcatatttaaatctgatctcattctctccttttacttaagtcagtttcttctgaagccgatggcctctcgagagcttggtggcacacatactgtgtgagaatctcctttgagacttcatggaacagggtccaggcacagaattccacactctgccctccagttaacaagccaaaacctcacgtacgctcccccatttgcaagtttaaagtttactcgtcctaaatgcagacttcatacctatcttccaaaagttgataaaagcaacgtggcaggtattttcgattttcccattccagatactgcctctatcagtcgacccttaccatttgtaacataatagattgaaacaacaggttaagtgctttggaattaagagttaaagggaaccgggggtggagaaaggaaaagaaggttgagacctccaaaacatagttttctgttctatgggaatttttgctctcattatctgggaagtgttcttaaaaataagaattaatagcaaagatgcagcaaagctctgaggatgcatttgcctgatatttttttctttgctcttgtgtttttgtatgtagttataaatactgtagattttttttttgtgattttttgccaaagttgttgttctatttatacattttaatgtcttaagacattttttcaatatcacaaaaagattttactgcgtattttgcaaagaaaaaaagctcactacctttagcttgcacatacttgcaaagttaattaaaaggctttttgttttaaaggggattttgtaaaatatccatataaataatgtatttatctttcgaatttgtacattgcttttcccttcttcctcttccttccacccccaatttattttattgtgtatgtttgctacgtgaaaagtgcgtatttgtttggtcacctacacttgtattagctgtttcaatgtgatttttaaacatttcatttatagttatttttagtattgttataaaccatgcttcagtttttttaatttccacccaaaagtcattgtctatttttgtattatttgtaagttaagaagttttttccaatatatggcaaaaaaaaaaaaatagtagcatattattcttgtagtatttagttcagtagatttaaaaaaaaatgtatcctttgctttggaagcttacaaaacaaccctaatgctgttttactctattaatatgcatggaatctctccctttggagtgacgcattttgtgcattaaattctagggagaaacttcatagaaatcaatgaacatactttctttcttaagtctgcttgtatatttcctctgtctttcacataaatataaaccagcagattggatgccttaacaatgcaaatcatattcatttcacttgtacattgtaactgtgcaccagaactgtcagtcatcactaacattctaagaaaaaagaaaaagaaaaaaagaaaaaaaaaaaaacaaagaaatcgaaaagcacaaaagaactgttttgttaccttaagacaatgtaactttttctagtagagcaagaaatcatttacaacaatgctgcaactgtgcatgcccccatatggattttgcaatggttttcactaggctgtcaagagtgcgatttttatgggttggggtgggtgggggaggggagttgtgggagggtaggggagggaggaaagctgtttttcatggtgagaaataataatgatgactaataataataaaaaaaactggaaaatgtaagcaaggtggacgcattgcttctcggtactcagaaaggttatctgaatttgcgtggtaagcgctggcctgaagatgtacacaagttaaagccatattttatctggtgagccccttaactgtttctgaaggaatgaacggtcagccgggaaggtgtccggcttagaccttgacaacagacactacccatctgtcagccatgtgcagtggttagaactcttcttgaaagtccaaagagcctttaaaatgtgtataatttgtgttttgttgcttctatttctattgattagatgaaaagacattctggccctctgatcctctttcttctccacaaaagttttacaaataaaagatgttcccctaaatacagaatatggctttaagaagaaaatgaaatgaagaattaaattaagatttcagtgttgggggaaaaaatacagcttctggatgactggattgcataacattgccctggcctcacattgtactaggatgcagcttaaatgaagtcatctctaaatctactaacctttcaccttcttatcaaaactttttgaatagacacacactgtacagttcaattgttagagaacctaactactgtagagattgttaaattttttttttttttttgcaaaaattcaagctgtaaaaacttttcaactttcacaatatttaattaaagttacttcctgtctgtga

SEQ ID NO: 214202 - DNA, 5273 bp, Artificial Sequence
  derived and/or modified sequence
aaccaaacaacccccaacagccaagcatacatctctaattttattattttggtcttttcgttggattttccctttcttctttttttcgggttatcgctcagttttgagcagaggtttacattttttaaaaatttgctttccagcccgccttgatcttctaagtgcgagttcatcgtctgagaaaaaaaaaaatctctggttggcgtttttgtttcttttcttttctttcttttctttcctttttttttttttttaatttttttcaagggggaggagattttccacaagaaaaggttgttttcatgtttgggattcaggaaagcatccaacggagtggaagcagcatgaaggaagagccgctgggcagcggcatgaacgcggtgcggacgtggatgcagggcgccggggtgctggacgccaacacggcggcgcagagcggggtgggtctggcccgggctcactttgagaagcagccgccttccaatctgcggaaatccaacttcttccacttcgtcctggccctctacgacagacagggccagcccgtggagatcgagaggacagcgtttgtggggttcgtggagaaggaaaaagaagccaacagcgaaaagaccaataacggaattcactaccggcttcagcttctctacagcaatgggataaggacggagcaggatttctacgtgcgcctcattgactccatgacaaaacaagccatagtgtatgaaggccaagacaagaacccagaaatgtgccgagtcttgctcacacatgagatcatgtgcagccgctgttgtgacaagaaaagctgtggcaaccgaaatgagactccctcagatccagtgataattgacaggttcttcctcaaatttttcctcaaatgtaaccaaaattgcctaaagaatgcgggaaacccacgtgacatgcggagattccaggtcgtggtgtctacgacagtcaatgtggatggccatgtcctggcagtctctgataacatgtttgtccataataattccaagcatgggcggagggctcggaggcttgacccctcggaaggtacgccctcttatctggaacatgctactccctgtatcaaagccatcagcccgagtgaaggatggacgacgggaggtgcgactgtgatcatcataggggacaatttctttgatgggttacaggtcatattcggtaccatgctggtctggagtgagttgatcactcctcatgccatccgtgtgcagacccctcctcggcacatccctggtgttgtggaagtcacactgtcctacaaatctaagcagttctgcaaaggaacaccaggcagattcatttatacagcgctcaacgaacccaccatcgattatggtttccagaggttacagaaggtcattcctcggcaccctggtgaccctgagcgtttgccaaaggaagtaatactcaaaagggctgcggatctggtagaagcactgtatgggatgccacacaacaaccaggaaatcattctgaagagagcggccgacattgccgaggccctgtacagtgttccccgcaaccacaaccaactcccggcccttgctaacacctcggtccacgcagggatgatgggcgtgaattcgttcagtggacaactggccgtgaatgtctccgaggcatcacaagccaccaatcagggtttcacccgcaactcaagcagcgtatcaccacacgggtacgtgccgagcaccactccccagcagaccaactataactccgtcaccacgagcatgaacggatacggctctgccgcaatgtccaatttgggcggctcccccaccttcctcaacggctcagctgccaactccccctatgccatagtgccatccagccccaccatggcctcctccacaagcctcccctccaactgcagcagctcctcgggcatcttctccttctcaccagccaacatggtctcagccgtgaaacagaagagtgctttcgcaccagtcgtcagaccccagacctccccacctcccacctgcaccagcaccaacgggaacagcctgcaagcgatatctggcatgattgttcctcctatgtgaaagaattgccttgaagaattgtattaatgaagaggttggattctgctacagagagtaatctgatacaagtcccagagtggaacttttaactcaggcctttttaagaggaatcacaataactgcagatttttaaacaaacaaaatcaccgaccttgcaaatactgaaattggaagagggatctgcaagtgcagggtgttggttaaagttgtacctcccaagtatttgggggatatatttattctgtattgacaaaagcaaatccactttttctttttcttttttttttttaagcttaattctgcaatcatttgtcttttataaaccgtaaagctctatacaagggacactataaataagactccatgttttaatttatgatgtttttaaagctgtgtaaaggaagaatgaagtggtgatatttacaaaaaagtaaaaaaaaaaaaaaagaaaaaaaggaaaaaaaaaaaagcttgtatgggacagaataggaatgccagttagattttttagaaaaactaagggtcggcttttgcgccttaaagcatatcaaatggtagttagctcagacagtgcattttcaatatctaacttaacatgccaccccttagcagtgcaagcttatttatctcttttgtattgttgtcttaagcaactgtgtaaataaatgcagcctggaaagttaaaacgcgatgtaagtgatcacatttttccctctactcgaaaatccagtgcctctagacagattgttaaaactgcatatttaaatctgatctcattctctccttttacttaagtcagtttcttctgaagccgatggcctctcgagagcttggtggcacacatactgtgtgagaatctcctttgagacttcatggaacagggtccaggcacagaattccacactctgccctccagttaacaagccaaaacctcacgtacgctcccccatttgcaagtttaaagtttactcgtcctaaatgcagacttcatacctatcttccaaaagttgataaaagcaacgtggcaggtattttcgattttcccattccagatactgcctctatcagtcgacccttaccatttgtaacataatagattgaaacaacaggttaagtgctttggaattaagagttaaagggaaccgggggtggagaaaggaaaagaaggttgagacctccaaaacatagttttctgttctatgggaatttttgctctcattatctgggaagtgttcttaaaaataagaattaatagcaaagatgcagcaaagctctgaggatgcatttgcctgatatttttttctttgctcttgtgtttttgtatgtagttataaatactgtagattttttttttgtgattttttgccaaagttgttgttctatttatacattttaatgtcttaagacattttttcaatatcacaaaaagattttactgcgtattttgcaaagaaaaaaagctcactacctttagcttgcacatacttgcaaagttaattaaaaggctttttgttttaaaggggattttgtaaaatatccatataaataatgtatttatctttcgaatttgtacattgcttttcccttcttcctcttccttccacccccaatttattttattgtgtatgtttgctacgtgaaaagtgcgtatttgtttggtcacctacacttgtattagctgtttcaatgtgatttttaaacatttcatttatagttatttttagtattgttataaaccatgcttcagtttttttaatttccacccaaaagtcattgtctatttttgtattatttgtaagttaagaagttttttccaatatatggcaaaaaaaaaaaaatagtagcatattattcttgtagtatttagttcagtagatttaaaaaaaaatgtatcctttgctttggaagcttacaaaacaaccctaatgctgttttactctattaatatgcatggaatctctccctttggagtgacgcattttgtgcattaaattctagggagaaacttcatagaaatcaatgaacatactttctttcttaagtctgcttgtatatttcctctgtctttcacataaatataaaccagcagattggatgccttaacaatgcaaatcatattcatttcacttgtacattgtaactgtgcaccagaactgtcagtcatcactaacattctaagaaaaaagaaaaagaaaaaaagaaaaaaaaaaaaacaaagaaatcgaaaagcacaaaagaactgttttgttaccttaagacaatgtaactttttctagtagagcaagaaatcatttacaacaatgctgcaactgtgcatgcccccatatggattttgcaatggttttcactaggctgtcaagagtgcgatttttatgggttggggtgggtgggggaggggagttgtgggagggtaggggagggaggaaagctgtttttcatggtgagaaataataatgatgactaataataataaaaaaaactggaaaatgtaagcaaggtggacgcattgcttctcggtactcagaaaggttatctgaatttgcgtggtaagcgctggcctgaagatgtacacaagttaaagccatattttatctggtgagccccttaactgtttctgaaggaatgaacggtcagccgggaaggtgtccggcttagaccttgacaacagacactacccatctgtcagccatgtgcagtggttagaactcttcttgaaagtccaaagagcctttaaaatgtgtataatttgtgttttgttgcttctatttctattgattagatgaaaagacattctggccctctgatcctctttcttctccacaaaagttttacaaataaaagatgttcccctaaatacagaatatggctttaagaagaaaatgaaatgaagaattaaattaagatttcagtgttgggggaaaaaatacagcttctggatgactggattgcataacattgccctggcctcacattgtactaggatgcagcttaaatgaagtcatctctaaatctactaacctttcaccttcttatcaaaactttttgaatagacacacactgtacagttcaattgttagagaacctaactactgtagagattgttaaattttttttttttttttgcaaaaattcaagctgtaaaaacttttcaactttcacaatatttaattaaagttacttcctgtctgtgatggc

SEQ ID NO: 214203 - DNA, 1776 bp, Artificial Sequence
  derived and/or modified sequence
atgttcggcatccaggagagcatccagagaagcggcagcagcatgaaggaggagcccctgggcagcggcatgaacgccgtgagaacctggatgcagggcgccggcgtgctggacgccaacaccgccgcccagagcggcgtgggcctggccagagcccacttcgagaagcagccccccagcaacctgagaaagagcaacttcttccacttcgtgctggccctgtacgacagacagggccagcccgtggagatcgagagaaccgccttcgtgggcttcgtggagaaggagaaggaggccaacagcgagaagaccaacaacggcatccactacagactgcagctgctgtacagcaacggcatcagaaccgagcaggacttctacgtgagactgatcgacagcatgaccaagcaggccatcgtgtacgagggccaggacaagaaccccgagatgtgcagagtgctgctgacccacgagatcatgtgcagcagatgctgcgacaagaagagctgcggcaacagaaacgagacccccagcgaccccgtgatcatcgacagattcttcctgaagttcttcctgaagtgcaaccagaactgcctgaagaacgccggcaaccccagagacatgagaagattccaggtggtggtgagcaccaccgtgaacgtggacggccacgtgctggccgtgagcgacaacatgttcgtgcacaacaacagcaagcacggcagaagagccagaagactggaccccagcgagggcacccccagctacctggagcacgccaccccctgcatcaaggccatcagccccagcgagggctggaccaccggcggcgccaccgtgatcatcatcggcgacaacttcttcgacggcctgcaggtgatcttcggcaccatgctggtgtggagcgagctgatcaccccccacgccatcagagtgcagaccccccccagacacatccccggcgtggtggaggtgaccctgagctacaagagcaagcagttctgcaagggcacccccggcagattcatctacaccgccctgaacgagcccaccatcgactacggcttccagagactgcagaaggtgatccccagacaccccggcgaccccgagagactgcccaaggaggtgatcctgaagagagccgccgacctggtggaggccctgtacggcatgccccacaacaaccaggagatcatcctgaagagagccgccgacatcgccgaggccctgtacagcgtgcccagaaaccacaaccagctgcccgccctggccaacaccagcgtgcacgccggcatgatgggcgtgaacagcttcagcggccagctggccgtgaacgtgagcgaggccagccaggccaccaaccagggcttcaccagaaacagcagcagcgtgagcccccacggctacgtgcccagcaccaccccccagcagaccaactacaacagcgtgaccaccagcatgaacggctacggcagcgccgccatgagcaacctgggcggcagccccaccttcctgaacggcagcgccgccaacagcccctacgccatcgtgcccagcagccccaccatggccagcagcaccagcctgcccagcaactgcagcagcagcagcggcatcttcagcttcagccccgccaacatggtgagcgccgtgaagcagaagagcgccttcgcccccgtggtgagaccccagaccagccccccccccacctgcaccagcaccaacggcaacagcctgcaggccatcagcggcatgatcgtgccccccatgtag

SEQ ID NO: 214204 - protein, 725 aa, Artificial Sequence
  derived and/or modified sequence
MGAASVRAGARLVEVALCSFTVTCLEVMRRFLLLYATQQGQAKAIAEEICEQAVVHGFSADLHCISESDKYDLKTETAPLVVVVSTTGTGDPPDTARKFVKEIQNQTLPVDFFAHLRYGLLGLGDSEYTYFCNGGKIIDKRLQELGARHFYDTGHADDCVGLELVVEPWIAGLWPALRKHFRSSRGQEEISGALPVASPASSRTDLVKSELLHIESQVELLRFDDSGRKDSEVLKQNAVNSNQSNVVIEDFESSLTRSVPPLSQASLNIPGLPPEYLQVHLQESLGQEESQVSVTSADPVFQVPISKAVQLTTNDAIKTTLLVELDISNTDFSYQPGDAFSVICPNSDSEVQSLLQRLQLEDKREHCVLLKIKADTKKKGATLPQHIPAGCSLQFIFTWCLEIRAIPKKAFLRALVDYTSDSAEKRRLQELCSKQGAADYSRFVRDACACLLDLLLAFPSCQPPLSLLLEHLPKLQPRPYSCASSSLFHPGKLHFVFNIVEFLSTATTEVLRKGVCTGWLALLVASVLQPNIHASHEDSGKALAPKISISPRTTNSFHLPDDPSIPIIMVGPGTGIAPFIGFLQHREKLQEQHPDGNFGAMWLFFGCRHKDRDYLFRKELRHFLKHGILTHLKVSFSRDAPVGEEEAPAKYVQDNIQLHGQQVARILLQENGHIYVCGDAKNMAKDVHDALVQIISKEVGVEKLEAMKTLATLKEEKRYLQDIWS

SEQ ID NO: 214205 - protein, 698 aa, Artificial Sequence
  derived and/or modified sequence
MRRFLLLYATQQGQAKAIAEEICEQAVVHGFSADLHCISESDKYDLKTETAPLVVVVSTTGTGDPPDTARKFVKEIQNQTLPVDFFAHLRYGLLGLGDSEYTYFCNGGKIIDKRLQELGARHFYDTGHADDCVGLELVVEPWIAGLWPALRKHFRSSRGQEEISGALPVASPASSRTDLVKSELLHIESQVELLRFDDSGRKDSEVLKQNAVNSNQSNVVIEDFESSLTRSVPPLSQASLNIPGLPPEYLQVHLQESLGQEESQVSVTSADPVFQVPISKAVQLTTNDAIKTTLLVELDISNTDFSYQPGDAFSVICPNSDSEVQSLLQRLQLEDKREHCVLLKIKADTKKKGATLPQHIPAGCSLQFIFTWCLEIRAIPKKAFLRALVDYTSDSAEKRRLQELCSKQGAADYSRFVRDACACLLDLLLAFPSCQPPLSLLLEHLPKLQPRPYSCASSSLFHPGKLHFVFNIVEFLSTATTEVLRKGVCTGWLALLVASVLQPNIHASHEDSGKALAPKISISPRTTNSFHLPDDPSIPIIMVGPGTGIAPFIGFLQHREKLQEQHPDGNFGAMWLFFGCRHKDRDYLFRKELRHFLKHGILTHLKVSFSRDAPVGEEEAPAKYVQDNIQLHGQQVARILLQENGHIYVCGDAKNMAKDVHDALVQIISKEVGVEKLEAMKTLATLKEEKRYLQDIWS

SEQ ID NO: 214206 - DNA, 2178 bp, Artificial Sequence
  derived and/or modified sequence
atgggtgccgcctcagtacgggccggcgcccgacttgtcgaggtggcattgtgttccttcacagttacttgcctggaagttatgagaagattccttctcctctatgcaacgcaacaggggcaggcaaaggcaatagctgaggagatttgtgagcaggccgttgtgcacgggttctctgcggatttacattgtataagtgagagtgacaagtacgatctcaagaccgagacagccccactcgtggtcgttgtaagtacaacaggcaccggagacccgcctgataccgcacgcaagttcgttaaggaaatacagaatcagactctgccggtagatttctttgcccatctacggtacggattgttgggcctaggcgattctgagtatacatacttctgcaacggtggaaagattatcgataagaggctgcaggagctgggtgcgcgacatttttacgacacgggccacgcagacgattgtgttgggcttgaattggtggtggaaccgtggattgcagggttatggcccgctctaagaaaacacttcaggagttctcgagggcaggaggagatctccggggcattgcccgtggcctcccctgcctcctctaggaccgatctggtcaagtccgagctgctccatatcgagtctcaagttgagttgttgaggtttgacgattctggacgaaaggatagcgaggtgttgaagcaaaacgccgtcaatagtaaccagagcaacgtggtcatcgaggattttgagtcttctctgacgagatcggtgccaccattgtctcaggctagtctgaacattcccggcctccctccagaatatctacaggtgcaccttcaggagtccctgggacaggaggagtcccaggtctctgtaacttcggccgatcctgtgtttcaggtccccatcagcaaagccgtgcaactcacaactaatgatgcaattaagactactttattagttgaactggacatctcaaatacagacttttcataccagcctggggatgcctttagcgtgatctgtccaaattctgattcagaggtccagagtctgctgcagagacttcagcttgaggataaacgagagcactgtgtgctgcttaagattaaggccgacaccaagaaaaaaggtgcaacactgcctcagcacatacctgcggggtgctccctccaattcatctttacatggtgtctggaaattcgagctattccaaagaaggcttttctgagagccctggtggattatacctccgatagcgccgagaagagaagacttcaggaattgtgtagtaaacagggtgcagcggattactctcgatttgtgcgggatgcttgtgcatgtctgttggatttgctacttgcttttcctagttgtcaaccaccgctttcacttctcctggagcatctgcccaagctgcaacctcggccgtatagttgtgcaagcagtagcctattccaccccggcaagctccacttcgttttcaacattgtcgagttcctgtccaccgccaccaccgaagttctaagaaaaggagtttgtactggatggctggctttactagttgcttcagtacttcagccaaatatccatgccagtcacgaagacagcggcaaggcactcgccccaaagatctctatcagtcctagaactacgaactctttccacttacccgacgacccctccatcccgataataatggtggggcccggaacaggcattgccccattcattggttttctccagcatagagagaagctacaggagcagcatcctgatggaaatttcggcgcaatgtggctctttttcgggtgtcgccataaagaccgagattatctcttccgtaaggagctgcgccattttctgaaacatggtattctcacccatctgaaggtttctttcagccgcgacgcaccagtcggagaagaagaagcaccagctaagtacgtgcaggataacattcagctccatggccagcaggtggccagaatcctactacaggaaaacggtcacatctacgtttgtggtgatgctaagaacatggcgaaggacgtccatgatgcactggtgcaaatcatctcaaaagaagtcggtgtagagaagttagaagcgatgaaaaccctggcaactctcaaagaggaaaagcggtacctccaggacatttggtcatag

SEQ ID NO: 214207 - DNA, 2178 bp, Artificial Sequence
  derived and/or modified sequence
atgggcgccgcctctgtgcgggccggggcccggctggtggaggtggccctgtgcagcttcaccgtgacctgcctggaggtgatgaggcgcttcctgctgctgtatgccacccagcagggccaggccaaggccatcgccgaggagatctgtgagcaggccgtggtgcacggcttctctgctgacctgcactgcatcagcgagagtgacaagtatgacctgaagacagaaacagcccccctggtggtggtggtgtccaccactggaactggagaccccccagacacagccaggaagtttgtgaaggagatccagaaccagaccctgcctgtggacttctttgcccacctgcgctatggcctgctgggcctgggggacagcgagtacacctacttctgcaatggaggcaagatcatcgacaagaggctgcaggagctgggcgcccggcacttctatgacaccggccacgcagatgactgtgtgggcctggagctggtggtggagccctggattgctggcctgtggccagccctgaggaagcacttccgcagcagccggggccaggaggagatcagcggggccctgcctgtggccagccctgccagcagcaggacagacctggtgaagtctgagctgctgcacatcgagagccaggtggagctgctgcgctttgatgacagcggcaggaaggacagcgaggtgctgaagcagaatgctgtgaacagcaaccagagcaatgtggtgattgaagattttgagagcagcctgaccaggtctgtgccccccctgagccaggccagcctgaacatccctggcctgcccccagagtacctgcaggtgcacctgcaggagagcctgggccaggaggagagccaggtgtctgtgaccagcgctgaccctgtgttccaggtgcccatcagcaaggctgtgcagctgaccaccaatgatgccatcaagaccaccctgctggtggagctggacatcagcaacacagacttctcctaccagcctggagatgccttcagcgtcatctgccccaacagcgacagcgaggtgcagagcctgctgcagaggctgcagctggaggacaagcgggagcactgtgtgctgctgaagatcaaggctgacaccaagaagaagggggccaccctgccccagcacatcccagctggctgcagcctgcagttcatcttcacctggtgcctggagatccgggccatccccaagaaggccttcctgcgggccctggtggactacaccagtgacagcgctgagaagaggcggctgcaggagctgtgcagcaagcagggcgctgctgactacagcagatttgtgagagatgcctgtgcctgcctgctggacctgctgctggccttccccagctgccagccccccctgagcctgctgctggagcacctgcccaagctgcagccccggccctacagctgtgccagcagcagcctcttccaccctgggaagctgcactttgtgttcaacatcgtggagttcctgagcacagccaccacagaggtgctgaggaaaggagtgtgcaccggctggctggccctgctggtggcctctgtgctgcagcccaacatccacgccagccatgaagattctgggaaggccctggcccccaagatcagcatcagccccaggaccaccaacagcttccacctgcctgatgaccccagcatccccatcatcatggtgggccctggcaccggcatcgcccccttcatcggcttcctgcagcaccgggagaagctgcaggagcagcacccagatggcaactttggagccatgtggctgttcttcggctgccgccacaaggaccgggactacctgttcaggaaggagctgcggcacttcctgaagcacggcatcctgacccacctgaaggtgtccttcagcagagatgcccctgtgggggaggaggaggccccagccaagtatgtgcaggacaacatccagctgcacggccagcaggtggcccgcatcctgctgcaggagaatggccacatctacgtgtgtggagatgccaagaacatggccaaggatgtgcatgatgccctggtgcagatcatcagcaaggaggtgggcgtggagaagctggaggccatgaagaccctggccaccctgaaggaggagaagcgctacctgcaggacatctggagctag

SEQ ID NO: 214208 - DNA, 2178 bp, Artificial Sequence
  derived and/or modified sequence
atgggcgccgccagcgtgcgggccggcgcccggctggtggaggtggcattatgttcctttacagtgacttgcctggaagtgatgaggcgctttttattgctttacgccacccagcaagggcaggccaaagccatcgccgaagagatctgcgagcaggccgtcgttcacggcttctccgcagacttacactgcatttccgaaagcgacaagtatgacctgaaaacagagacagccccccttgtggtggtcgtatccacaacaggaaccggcgaccctccagataccgcccggaagtttgttaaggagatccagaaccagacgctccccgttgactttttcgcacatctcagatacggactgctcggccttggtgacagcgaatacacatacttctgtaacggtggcaaaatcatcgacaagcgtttgcaggagctgggggcaagacatttttatgatacagggcatgcagatgattgtgtggggctggaattggtggtggagccgtggattgcaggcctctggcccgcgttgcggaagcattttaggtcgtccagaggacaggaggagataagcggcgccctgcctgtagcttctccagcctcttctagaacagacttagtgaagagcgaactccttcacatagaatcccaagtggaactcctgaggttcgatgactcagggcgcaaggattccgaagtgctcaagcagaacgcagtgaatagtaatcagagtaacgttgtaattgaagacttcgagagttctctgactcgcagcgttccgcctttgtcccaagcaagtctgaacataccgggcctccctcctgagtatcttcaggtgcatcttcaggagagcctaggtcaagaagaatcccaggtctccgtcacatctgctgatccggtgttccaggttccaatatccaaagctgtccaactgaccacaaatgatgctatcaagaccactctgctggtggagctagacatcagtaatacggatttttcttaccaaccgggcgacgcattttcagtcatttgtcccaattccgactccgaagtgcagtcactgctgcagcgtctgcagcttgaggacaaaagggagcactgcgtgctgctgaaaattaaggccgataccaagaaaaagggcgctacgttaccccaacatatacccgcaggttgctcattgcaatttatttttacctggtgtctggaaattagggcaatccccaagaaggcatttctgagagcccttgtggactatacctccgatagtgcggagaagcggagactgcaggagctgtgctcgaagcaaggcgcagctgattacagcagattcgttcgggacgcctgtgcttgtctgcttgacctgctcctagcatttccttcttgtcaaccgcccctgagtctcctgctagaacaccttcctaagctgcagccccggccatattcctgtgccagcagcagcttattccaccccggtaagctccactttgtttttaacatcgttgagtttctgtccacagctacaaccgaagtcctgcggaagggggtgtgtacggggtggcttgccttacttgttgcatctgttctccagcctaatatccatgcctcacacgaagattctggaaaagcgctagccccgaaaatctccatcagtccaaggactaccaattcatttcacttacctgatgacccctctattccgatcatcatggtgggccctgggaccggaatcgccccattcatcggattcctgcagcacagagaaaagctccaggaacagcaccccgacggcaactttggggcaatgtggctttttttcggatgtagacataaagatcgagattacctgttcaggaaggaattgagacactttttgaagcatgggatattgacccatctgaaagtctcattctccagagatgcacccgtgggagaggaggaagcaccagcaaagtatgttcaggataacatccaattgcatggccagcaggtcgctcgaattctgttgcaggagaacggccatatctatgtctgcggagacgctaagaacatggcaaaggatgtccacgatgccctcgtgcagatcatcagtaaggaggtgggggtggagaagctggaggcgatgaaaaccttagccacgctgaaggaagagaaacgctacctgcaggacatttggtcctag

SEQ ID NO: 214209 - DNA, 2178 bp, Artificial Sequence
  derived and/or modified sequence
atgggcgcagcatcagtccgggcaggagcgaggttagtcgaagtggcgttatgcagttttaccgtgacctgcctcgaggttatgagaaggtttctgctgctgtacgccacgcaacaaggccaggctaaagctatcgctgaggagatctgtgagcaggcagtcgtgcacgggttcagcgctgatctgcactgcattagtgagagtgacaagtatgatttaaaaacagaaaccgcaccacttgtggtggttgtctccacaaccggcactggcgatcccccagacactgctagaaaattcgtcaaggagattcagaaccaaactctgccagtcgatttcttcgcccacctccggtacgggctgttggggctgggcgattctgagtatacatacttctgtaacggtggcaaaattatcgacaagcggctccaggagctgggggcaaggcacttttatgatacgggccacgcagacgattgcgttggtctggagctggtggtagagccctggatcgcagggctttggcccgcactgagaaaacactttagatcatctcgcggacaggaggagattagcggggcacttcccgtcgcatccccagcctccagccgcaccgatctggtgaaatccgaacttctccatatagagtcccaggtggagctactcagattcgatgattctggtcgcaaggactcggaggtcctcaaacaaaacgcagttaactctaaccagtcaaatgtggttatcgaggatttcgagagctcgctgacacgtagcgttccccctctgtctcaggcatcactgaacatcccaggccttcctcccgagtatctccaggttcatctccaggaaagcctggggcaggaggagagtcaggtgtccgtaacttccgcagacccagtgttccaggtgcccattagcaaggctgtgcagctgactactaacgatgcaattaaaaccactttgctcgtggagcttgacataagcaacaccgactttagctaccagccaggggacgccttcagtgtgatttgcccaaactctgactcagaagtgcagagcttgctgcagaggcttcaactggaggataagcgagagcattgcgtgctgctgaagattaaggcagatacaaaaaaaaaaggagctactctgccccagcacatccccgctggctgtagcttacaatttatttttacctggtgtctcgaaatccgcgcaatcccgaaaaaggcgttcctccgggcactggtggactacacaagtgatagcgctgagaagcggaggctgcaggaattgtgttccaagcagggggcagccgattacagcaggttcgtccgcgatgcttgcgcgtgcttattagaccttttgctagccttcccgtcttgccagcctcccctatcgctcttattagagcacctacccaagctgcaacccagaccatacagctgcgcaagcagctccctgtttcatcctgggaagctccactttgtgtttaacattgtagagtttctatctactgcaacaaccgaggtgctccgcaaaggcgtttgtacaggttggctagcgctgcttgtggcctcggtccttcaacctaatattcatgcctcgcatgaagatagtgggaaagcgttggcaccaaagatctcgatctcacccaggacaactaacagtttccatctgcccgatgatcccagcattccaattatcatggtgggaccgggaactggtattgcacccttcattggctttttgcagcaccgggagaaattgcaggaacagcatcctgatggtaatttcggtgctatgtggctgttcttcggatgtcggcacaaagaccgggactacctgttccggaaggagctgaggcacttccttaagcacggaattttgacacacctcaaggtttccttctcccgagacgcccctgtgggagaagaggaggcacccgctaagtacgtgcaagataacatacagttgcacggccagcaagtggcacggatcttgctacaggagaacggacatatctatgtgtgcggtgatgccaagaacatggcaaaagacgttcacgatgctctggttcagatcatttccaaggaggtgggcgtggaaaaattggaagcaatgaaaaccctcgccactctgaaagaggagaaaagatacctgcaagatatttggtcttag

SEQ ID NO: 214210 - DNA, 3274 bp, Artificial Sequence
  derived and/or modified sequence
ggagctttctattggtcctgggtaccgagcatgggcgctgcgtcagtgcgcgctggcgcaaggttggtggaagtcgcgttgtgcagtttcactgttacatgccttgaagtgatgaggaggtttctgttactatatgctacacagcagggacaggcaaaggccatcgcagaagaaatatgtgagcaagctgtggtacatggattttctgcagatcttcactgtattagtgaatccgataagtatgacctaaaaaccgaaacagctcctcttgttgttgtggtttctaccacgggcaccggagacccacccgacacagcccgcaagtttgttaaggaaatacagaaccaaacactgccggttgatttctttgctcacctgcggtatgggttactgggtctcggtgattcagaatacacctacttttgcaatggggggaagataattgataaacgacttcaagagcttggagcccggcatttctatgacactggacatgcagatgactgtgtaggtttagaacttgtggttgagccgtggattgctggactctggccagccctcagaaagcattttaggtcaagcagaggacaagaggagataagtggcgcactcccggtggcatcacctgcatcctcgaggacagaccttgtgaagtcagagctgctacacattgaatctcaagtcgagcttctgagattcgatgattcaggaagaaaggattctgaggttttgaagcaaaatgcagtgaacagcaaccaatccaatgttgtaattgaagactttgagtcctcacttacccgttcggtacccccactctcacaagcctctctgaatattcctggtttacccccagaatatttacaggtacatctgcaggagtctcttggccaggaggaaagccaagtatctgtgacttcagcagatccagtttttcaagtgccaatttcaaaggcagttcaacttactacgaatgatgccataaaaaccactctgctggtagaattggacatttcaaatacagacttttcctatcagcctggagatgccttcagcgtgatctgccctaacagtgattctgaggtacaaagcctactccaaagactgcagcttgaagataaaagagagcactgcgtccttttgaaaataaaggcagacacaaagaagaaaggagctaccttaccccagcatatacctgcgggatgttctctccagttcatttttacctggtgtcttgaaatccgagcaattcctaaaaaggcatttttgcgagcccttgtggactataccagtgacagtgctgaaaagcgcaggctacaggagctgtgcagtaaacaaggggcagccgattatagccgctttgtacgagatgcctgtgcctgcttgttggatctcctcctcgctttcccttcttgccagccaccactcagtctcctgctcgaacatcttcctaaacttcaacccagaccatattcgtgtgcaagctcaagtttatttcacccaggaaagctccattttgtcttcaacattgtggaatttctgtctactgccacaacagaggttctgcggaagggagtatgtacaggctggctggccttgttggttgcttcagttcttcagccaaacatacatgcatcccatgaagacagcgggaaagccctggctcctaagatatccatctctcctcgaacaacaaattctttccacttaccagatgacccctcaatccccatcataatggtgggtccaggaaccggcatagccccgtttattgggttcctacaacatagagagaaactccaagaacaacacccagatggaaattttggagcaatgtggttgttttttggctgcaggcataaggatagggattatctattcagaaaagagctcagacatttccttaagcatgggatcttaactcatctaaaggtttccttctcaagagatgctcctgttggggaggaggaagccccagcaaagtatgtgcaagacaacatccagcttcatggccagcaggtggcgagaatcctcctccaggagaacggccatatttatgtgtgtggagatgcaaagaatatggccaaggatgtacatgatgcccttgtgcaaataataagcaaagaggttggagttgaaaaactagaagcaatgaaaaccctggccactttaaaagaagaaaaacgctaccttcaggatatttggtcataaaaccagaaattaaagaaagaggattaagcttttttgactgaaagtactaaaagtcagctttactagtgccaaacctttaaattttcaaaagaaaattttctttcaacatttcttgaaggacatggagtggagattggatcatttaacaatataacaaaacttcctgatttgattttacgtatcttctatctacgcccttcctgtgcctgtgactctccccaaattgccctgttgccttgagctcttctgagctaaggcagccttcagtccctatcagcgcctcctttacttcccagagaacttcacagagactctgtccttccatgcaaaggcttcctgaaatagggagactgactgagtagctcattcttgtgacttacagtgccaacatttaaaaaagtatgaaaatgatttatttttatatgatgtatacccataaagaatgctcatattaatgtacttaaattacacatgtagagcatatctgttatatgtttatgtaactatcaaatggttatttgttactaaagctatatttctgataaaaaatattttaggataattgcctacagagggatttatttttatgatgctggaaatatgaaatgtattttaaaatttcactctggcatatgatttatctatcaccattacttttttttaagtcacaatttcagaattttgggacatttgcattcaatttacaggtaccagtacgtacatattttaatagaaagatacaacctttttattttcactccttttatttctgctgcttggcacatttttgagttttcccacattatttgtctccatgataccactcaagcagtgtgctggacctaaaatactgactttagttagtatccttggatttttagattcccagtgtctaattccctgttataatttgcacaaacaaaacaaaatgttatgataatctttctccactgttctaatatatattgtatttttatttgatagcttgggatttaaaacatctctgttgaaggcttttgatccttttgagaaataaagatctgaaagaaatggcataatcttaaaa

SEQ ID NO: 214211 - DNA, 3215 bp, Artificial Sequence
  derived and/or modified sequence
ggttcgtgcccggctggcgcggcgtggtttcactgttacatgccttgaagtgatgaggaggtttctgttactatatgctacacagcagggacaggcaaaggccatcgcagaagaaatatgtgagcaagctgtggtacatggattttctgcagatcttcactgtattagtgaatccgataagtatgacctaaaaaccgaaacagctcctcttgttgttgtggtttctaccacgggcaccggagacccacccgacacagcccgcaagtttgttaaggaaatacagaaccaaacactgccggttgatttctttgctcacctgcggtatgggttactgggtctcggtgattcagaatacacctacttttgcaatggggggaagataattgataaacgacttcaagagcttggagcccggcatttctatgacactggacatgcagatgactgtgtaggtttagaacttgtggttgagccgtggattgctggactctggccagccctcagaaagcattttaggtcaagcagaggacaagaggagataagtggcgcactcccggtggcatcacctgcatcctcgaggacagaccttgtgaagtcagagctgctacacattgaatctcaagtcgagcttctgagattcgatgattcaggaagaaaggattctgaggttttgaagcaaaatgcagtgaacagcaaccaatccaatgttgtaattgaagactttgagtcctcacttacccgttcggtacccccactctcacaagcctctctgaatattcctggtttacccccagaatatttacaggtacatctgcaggagtctcttggccaggaggaaagccaagtatctgtgacttcagcagatccagtttttcaagtgccaatttcaaaggcagttcaacttactacgaatgatgccataaaaaccactctgctggtagaattggacatttcaaatacagacttttcctatcagcctggagatgccttcagcgtgatctgccctaacagtgattctgaggtacaaagcctactccaaagactgcagcttgaagataaaagagagcactgcgtccttttgaaaataaaggcagacacaaagaagaaaggagctaccttaccccagcatatacctgcgggatgttctctccagttcatttttacctggtgtcttgaaatccgagcaattcctaaaaaggcatttttgcgagcccttgtggactataccagtgacagtgctgaaaagcgcaggctacaggagctgtgcagtaaacaaggggcagccgattatagccgctttgtacgagatgcctgtgcctgcttgttggatctcctcctcgctttcccttcttgccagccaccactcagtctcctgctcgaacatcttcctaaacttcaacccagaccatattcgtgtgcaagctcaagtttatttcacccaggaaagctccattttgtcttcaacattgtggaatttctgtctactgccacaacagaggttctgcggaagggagtatgtacaggctggctggccttgttggttgcttcagttcttcagccaaacatacatgcatcccatgaagacagcgggaaagccctggctcctaagatatccatctctcctcgaacaacaaattctttccacttaccagatgacccctcaatccccatcataatggtgggtccaggaaccggcatagccccgtttattgggttcctacaacatagagagaaactccaagaacaacacccagatggaaattttggagcaatgtggttgttttttggctgcaggcataaggatagggattatctattcagaaaagagctcagacatttccttaagcatgggatcttaactcatctaaaggtttccttctcaagagatgctcctgttggggaggaggaagccccagcaaagtatgtgcaagacaacatccagcttcatggccagcaggtggcgagaatcctcctccaggagaacggccatatttatgtgtgtggagatgcaaagaatatggccaaggatgtacatgatgcccttgtgcaaataataagcaaagaggttggagttgaaaaactagaagcaatgaaaaccctggccactttaaaagaagaaaaacgctaccttcaggatatttggtcataaaaccagaaattaaagaaagaggattaagcttttttgactgaaagtactaaaagtcagctttactagtgccaaacctttaaattttcaaaagaaaattttctttcaacatttcttgaaggacatggagtggagattggatcatttaacaatataacaaaacttcctgatttgattttacgtatcttctatctacgcccttcctgtgcctgtgactctccccaaattgccctgttgccttgagctcttctgagctaaggcagccttcagtccctatcagcgcctcctttacttcccagagaacttcacagagactctgtccttccatgcaaaggcttcctgaaatagggagactgactgagtagctcattcttgtgacttacagtgccaacatttaaaaaagtatgaaaatgatttatttttatatgatgtatacccataaagaatgctcatattaatgtacttaaattacacatgtagagcatatctgttatatgtttatgtaactatcaaatggttatttgttactaaagctatatttctgataaaaaatattttaggataattgcctacagagggatttatttttatgatgctggaaatatgaaatgtattttaaaatttcactctggcatatgatttatctatcaccattacttttttttaagtcacaatttcagaattttgggacatttgcattcaatttacaggtaccagtacgtacatattttaatagaaagatacaacctttttattttcactccttttatttctgctgcttggcacatttttgagttttcccacattatttgtctccatgataccactcaagcagtgtgctggacctaaaatactgactttagttagtatccttggatttttagattcccagtgtctaattccctgttataatttgcacaaacaaaacaaaatgttatgataatctttctccactgttctaatatatattgtatttttatttgatagcttgggatttaaaacatctctgttgaaggcttttgatccttttgagaaataaagatctgaaagaaatggcataatcttaaaa

SEQ ID NO: 214212 - DNA, 2178 bp, Artificial Sequence
  derived and/or modified sequence
atgggcgccgccagcgtgagagccggcgccagactggtggaggtggccctgtgcagcttcaccgtgacctgcctggaggtgatgagaagattcctgctgctgtacgccacccagcagggccaggccaaggccatcgccgaggagatctgcgagcaggccgtggtgcacggcttcagcgccgacctgcactgcatcagcgagagcgacaagtacgacctgaagaccgagaccgcccccctggtggtggtggtgagcaccaccggcaccggcgacccccccgacaccgccagaaagttcgtgaaggagatccagaaccagaccctgcccgtggacttcttcgcccacctgagatacggcctgctgggcctgggcgacagcgagtacacctacttctgcaacggcggcaagatcatcgacaagagactgcaggagctgggcgccagacacttctacgacaccggccacgccgacgactgcgtgggcctggagctggtggtggagccctggatcgccggcctgtggcccgccctgagaaagcacttcagaagcagcagaggccaggaggagatcagcggcgccctgcccgtggccagccccgccagcagcagaaccgacctggtgaagagcgagctgctgcacatcgagagccaggtggagctgctgagattcgacgacagcggcagaaaggacagcgaggtgctgaagcagaacgccgtgaacagcaaccagagcaacgtggtgatcgaggacttcgagagcagcctgaccagaagcgtgccccccctgagccaggccagcctgaacatccccggcctgccccccgagtacctgcaggtgcacctgcaggagagcctgggccaggaggagagccaggtgagcgtgaccagcgccgaccccgtgttccaggtgcccatcagcaaggccgtgcagctgaccaccaacgacgccatcaagaccaccctgctggtggagctggacatcagcaacaccgacttcagctaccagcccggcgacgccttcagcgtgatctgccccaacagcgacagcgaggtgcagagcctgctgcagagactgcagctggaggacaagagagagcactgcgtgctgctgaagatcaaggccgacaccaagaagaagggcgccaccctgccccagcacatccccgccggctgcagcctgcagttcatcttcacctggtgcctggagatcagagccatccccaagaaggccttcctgagagccctggtggactacaccagcgacagcgccgagaagagaagactgcaggagctgtgcagcaagcagggcgccgccgactacagcagattcgtgagagacgcctgcgcctgcctgctggacctgctgctggccttccccagctgccagccccccctgagcctgctgctggagcacctgcccaagctgcagcccagaccctacagctgcgccagcagcagcctgttccaccccggcaagctgcacttcgtgttcaacatcgtggagttcctgagcaccgccaccaccgaggtgctgagaaagggcgtgtgcaccggctggctggccctgctggtggccagcgtgctgcagcccaacatccacgccagccacgaggacagcggcaaggccctggcccccaagatcagcatcagccccagaaccaccaacagcttccacctgcccgacgaccccagcatccccatcatcatggtgggccccggcaccggcatcgcccccttcatcggcttcctgcagcacagagagaagctgcaggagcagcaccccgacggcaacttcggcgccatgtggctgttcttcggctgcagacacaaggacagagactacctgttcagaaaggagctgagacacttcctgaagcacggcatcctgacccacctgaaggtgagcttcagcagagacgcccccgtgggcgaggaggaggcccccgccaagtacgtgcaggacaacatccagctgcacggccagcaggtggccagaatcctgctgcaggagaacggccacatctacgtgtgcggcgacgccaagaacatggccaaggacgtgcacgacgccctggtgcagatcatcagcaaggaggtgggcgtggagaagctggaggccatgaagaccctggccaccctgaaggaggagaagagatacctgcaggacatctggagctag

SEQ ID NO: 214213 - protein, 357 aa, Artificial Sequence
  derived and/or modified sequence
MDLPVNLTSFSLSTPSPLETNHSLGKDDLRPSSPLLSVFGVLILTLLGFLVAATFAWNLLVLATILRVRTFHRVPHNLVASMAVSDVLVAALVMPLSLVHELSGRRWQLGRRLCQLWIACDVLCCTASIWNVTAIALDRYWSITRHMEYTLRTRKCVSNVMIALTWALSAVISLAPLLFGWGETYSEGSEECQVSREPSYAVFSTVGAFYLPLCVVLFVYWKIYKAAKFRVGSRKTNSVSPISEAVEVKDSAKQPQMVFTVRHATVTFQPEGDTWREQKEQRAALMVGILIGVFVLCWIPFFLTELISPLCSCDIPAIWKSIFLWLGYSNSFFNPLIYTAFNKNYNSAFKNFFSRQH

SEQ ID NO: 214214 - DNA, 453 bp, Artificial Sequence
  derived and/or modified sequence
atggccgtgaccttccagatgctggccgtgcagcagagcaccagccacgccatccagagctggcacagcctgagacccagctgccagagaagacccgacagcagctgcaccagactgagcggcatgaccagcgccgccaccagaaccagcgagaccgccatggacgccaccagactgtggggcaccagatggaaggtgagaaccagaagaatggtggccagcaccagcagattccaggccaacgtggccgccaccagaaagcccagcaaggccgccggctgcagcctgaacagcgtgctgggcaagcccgtgctgggcgagcccgccttctgggacctgcccagcgtgcccgtggcccccgccacccccagcgaggccgccgcccccgagagcgagtgctggagagcccacagagacctgccctaccccagcggcgacctggccctgcagtag

SEQ ID NO: 214215 - DNA, 453 bp, Artificial Sequence
  derived and/or modified sequence
atggccgttacttttcagatgctggccgtccagcagagcacttcccacgctatccaaagttggcactctttacgcccatcgtgccaacgacggcccgactctagctgcactcggctgtccggcatgacaagcgctgcaacacggacctctgaaacggctatggacgcgactcggctctggggcacccgatggaaagtgaggacgagaagaatggtagcaagtaccagccgatttcaggcgaacgtagctgccaccaggaagcctagcaaagcggcgggctgctcgctgaacagtgttctggggaaacccgtgttgggcgagccagccttttgggacttgcccagtgttcctgtggccccggctactccatctgaggccgcagccccggaatcggagtgttggcgcgcccatcgcgatctgccatacccgagtggagatcttgccctacagtag

SEQ ID NO: 214216 - DNA, 453 bp, Artificial Sequence
  derived and/or modified sequence
atggctgtgaccttccagatgctggccgtgcagcagagcaccagccacgccatccagagctggcacagcctgcggcccagctgccagaggaggccagacagcagctgcacccggctgagcggcatgaccagcgctgccaccaggaccagcgagacagccatggatgccacccggctgtggggcacccgctggaaggtgaggaccaggaggatggtggccagcaccagccgcttccaggccaacgtggccgccaccaggaagcccagcaaggccgccggctgcagcctgaacagcgtgctgggcaagcctgtgctgggggagcccgccttctgggacctgcccagcgtgcctgtggccccagccacccccagcgaggccgccgcccctgagagcgagtgctggagggcccaccgggacctgccctaccccagcggggacctggccctgcagtag

SEQ ID NO: 214217 - DNA, 453 bp, Artificial Sequence
  derived and/or modified sequence
atggccgtgaccttccagatgctggccgtgcagcagagcaccagccacgcaattcagtcttggcacagtctgcgcccttcttgccaaagacgtccggactccagctgtaccagactctcagggatgacaagcgcagcaacccgcacttccgagaccgctatggacgcaactcgtttgtgggggactagatggaaagtgcggacgagacgcatggtggcaagcacaagtcgtttccaagcaaatgtcgcagcgacacggaaaccctctaaagctgctggctgtagtctgaattctgtactaggtaagcccgtgctcggcgagcccgctttttgggacctgccgagcgtccctgtcgcccccgctacaccctcagaggcagccgctccagaatctgagtgctggagagcccaccgtgacctaccatacccatccggggatttggccctgcagtag

SEQ ID NO: 214218 - DNA, 453 bp, Artificial Sequence
  derived and/or modified sequence
atggctgtaaccttccagatgcttgctgtccagcaatctaccagccatgcaattcagagttggcactcactgcggccatcttgtcagagacgcccagatagcagttgtacacgactgtcgggaatgaccagcgccgctactcggaccagcgagaccgcgatggacgctacccggctgtggggaactaggtggaaggtgagaacccgcagaatggttgctagcacgagccgattccaggccaacgtggctgctaccagaaagccatcaaaagcagccggttgctctctcaactcggttttggggaagcctgtgctgggtgaaccagccttttgggatctcccatcggtgccagtggctcctgcgaccccctccgaggccgctgctcccgaatcagagtgctggcgggctcatagggatctcccgtaccccagtggggatctagccctgcagtag

SEQ ID NO: 214219 - DNA, 1405 bp, Artificial Sequence
  derived and/or modified sequence
acacgaagagcaccacacagagcggcaggtagaaggcgcctacggtggagaacacggcgtaggaaggctcgcggcttacctggcactcctcgctgccctcagagtacgtctctccccagccaaaaagcagcggggccagagagatgacagcggagagtgcccaggtgagcgcgatcatgacgttggagacgcacttgcgggtgcggagcgtgtattccatgtggcgcgtgatggaccagtagcggtccagggctatggccgtcacgttccagatgctggccgtgcagcaaagcacgtcgcacgcgatccaaagctggcacagcctccgacctagctgccagcggcgcccggacagctcgtgcaccaggctcagcggcatgaccagcgcggccaccaggacatccgagacggccatggatgccaccaggttgtggggcacgcggtggaaggtgcgtacacggaggatggtcgccagcaccagcaggttccaggcgaacgtcgccgccaccagaaagcccagcaaggcagccggctgcagccttaactccgtgctagggaagccagttttgggggaacctgctttctgggacctgccttctgtccctgttgcccccgccaccccttcggaggctgcagctccggagagcgaatgctggcgcgcccaccgagacctgccttatccaagtggagatctagccctacagtaaaacaagtatcaggagaatgcactgagaaaagagaaagtcctccactggaacctagaggacgggacaacatcattaaataccggattattcacagggctgtttcaaacaccacttaaaaacagctgatggtgactgcctgcatgcagagcaactgtgcatggccccaatctggaagcaagcttgtgcttctttaaggcaaatcaccttcttgaggtcatggaactaatgggaatgagatgtaaactatgaatcctcttctttggaaaaagttctgcatctagtctcagggcctgttatctggaggaatggatgaactgtgttgcccacaggcgggcctcaatggatctctatgaatcttgaaaggcattatgggcttgtgattatattccctactgattccccaggccacagctgtctgtattgatagctaagtgagcagcagaatagttaataaggacaaagccaaggatgactgaggataatttgtgaaaaatagagtgtcataaatttagggactgaatagaatattcccacaaaggagagatccaatggagcatttccagaagggacaaaccctgttcagaaagtctggcttatctcttaaaaatacacaaataaaaaatcataatatttcagcttcatcttaaagcatagccccaattttatcttgaaaaacactgaaaaggaaaagaatctga

SEQ ID NO: 214220 - DNA, 1074 bp, Artificial Sequence
  derived and/or modified sequence
atggacctgcccgtgaatctgaccagtttcagccttagcacccccagccctctggagacaaaccactccttagggaaggacgacctgcgcccaagttcgccactgctgagtgtcttcggtgtgctgattctcacgttgctgggatttcttgtggctgccacgtttgcttggaacctattggtcctcgcgacaattctgagagttcgtacatttcatcgtgtaccgcataaccttgtagcaagcatggctgtgagcgacgtcctcgtggctgctctcgtaatgcccctctcccttgttcacgagctatcaggcaggcgctggcagttgggaaggcgactttgtcagctgtggatcgcttgcgacgtcttgtgttgcactgcgtcaatttggaacgttacagcaatagctctggacagatactggagcattactcgccatatggaatatacattaaggactaggaagtgtgtgtctaatgtcatgatcgccctcacctgggctctatctgccgtaatctcactggcccccctgttattcggttggggagagacctactcggaggggagcgaagagtgccaggtgtcacgagaaccttcctacgccgtcttttccacagtcggagccttctatttgcctctctgtgtggtccttttcgtatattggaagatctacaaggccgcaaaattccgggtcggatcaagaaaaacaaactctgtttctcctatatcagaagccgtggaagttaaggactcagcaaagcagccccagatggtgtttacggtgaggcacgctaccgttacattccagccggaaggagacacttggcgggagcagaaggaacagagggcggctctgatggtgggtatcctaattggtgtctttgtgttgtgttggattcccttttttctgactgagttgatttctccactttgctcctgtgacattccagccatctggaagagcatttttctctggttaggctactctaattctttcttcaaccccctcatctacaccgcatttaataaaaattataactcagcgtttaagaacttctttagtcgacagcattag

SEQ ID NO: 214221 - DNA, 1074 bp, Artificial Sequence
  derived and/or modified sequence
atggacctgcctgtgaacctgaccagcttcagcctgagcacccccagccccctggagaccaaccacagcctgggcaaggatgacctgcggcccagcagccccctgctgtctgtgtttggagtgctgatcctgaccctgctgggcttcctggtggccgccacctttgcctggaacctgctggtgctggccaccatcctgcgggtgaggaccttccaccgggtgccccacaacctggtggcctccatggctgtgtctgatgtgctggtggccgccctggtgatgcccctgagcctggtgcatgagctgtctggaagacgctggcagctgggccgccgcctgtgccagctgtggatcgcctgtgatgtgctgtgctgcacagccagcatctggaatgtgacagccatcgccctggaccgctactggagcatcaccaggcacatggagtacaccctgcggaccaggaaatgtgtgtccaatgtgatgattgccctgacctgggccctgtctgctgtgatcagcctggcccccctgctgtttggctggggcgagacctacagcgagggcagcgaggagtgccaggtgtcccgggagcccagctatgctgtgttcagcacagtgggcgccttctacctgcccctgtgtgtggtgctgtttgtgtactggaagatctacaaggccgccaagttccgggtgggcagcaggaagaccaacagcgtgagccccatcagcgaggccgtggaggtgaaggacagcgccaagcagccccagatggtgttcaccgtgagacatgccaccgtgaccttccagcctgagggggacacctggagggagcagaaggagcagagagctgccctgatggtgggcatcctgattggagtgtttgtgctgtgctggatccccttcttcctgacagagctgatcagccccctgtgcagctgtgacatcccagccatctggaagagcatcttcctgtggctgggctacagcaacagcttcttcaaccccctcatctacacagccttcaacaagaactacaacagcgccttcaagaacttcttcagccggcagcactag

SEQ ID NO: 214222 - DNA, 1074 bp, Artificial Sequence
  derived and/or modified sequence
atggacctgcccgtgaacctgaccagcttcagcctgagcaccccctccccacttgagaccaaccactccctcggaaaggacgatctgcggccaagttccccacttctgtccgtgttcggcgtactaatactcaccctacttgggttcttggtcgcggccacattcgcctggaatctgctggtattagcaaccatcctgcgagttaggacattccatagagtcccacataacctcgtagcctccatggccgtctctgacgtcctcgttgccgctctggtcatgcccctgtcccttgttcatgagctttccgggcggaggtggcagctaggtaggagactctgccaattatggatagcttgcgacgtactgtgctgcacagcctccatctggaacgtgactgccatcgcactggacaggtactggtctatcacccgccacatggaatatactttaagaacgcgcaaatgtgtgtccaacgtcatgatcgcccttacctgggcattgtccgccgttatctcactggctccgctccttttcggctggggggagacatattcagagggaagcgaggaatgccaggtgagtagggaaccaagctacgctgtgtttagcacagtaggtgcattctatcttcctctgtgcgtggttctctttgtgtactggaaaatctacaaagctgctaagtttcgcgtcggtagccgtaagactaattctgtctccccaataagcgaggccgtggaggttaaggactctgcaaaacagcctcagatggtctttacagtgagacatgctaccgtgacatttcagcccgaaggtgacacttggcgtgaacaaaaagaacaacgggcagctttgatggtcgggatacttataggggtgtttgtcctgtgctggattccattcttcctgaccgagctgattagtcctctctgcagctgcgacatccccgcaatctggaagtcaatcttcctctggcttggctacagcaatagcttcttcaatccgttaatatatacagcattcaataagaactacaattcagcctttaaaaacttcttctcacggcagcactag

SEQ ID NO: 214223 - DNA, 1074 bp, Artificial Sequence
  derived and/or modified sequence
atggacctgccggtgaaccttacatcatttagcctctccacaccctcaccgcttgagactaaccatagccttgggaaggacgacctgcggccatcgagcccactgctatccgtctttggagtgcttatattgaccctgttagggttcctggttgccgctaccttcgcatggaaccttctggttctcgccacaatactcagagtacggacattccatcgggtgccacataatctcgtcgcctcgatggccgtatcagacgtcctggtcgcagcactcgtgatgcccctcagcctcgtccatgagctaagtggcaggagatggcagctcggcagacggctgtgtcaactgtggatcgcttgcgacgttctgtgctgtaccgcgtcaatttggaatgtgacagcaatagccctggaccgatactggtcaatcaccaggcacatggagtacaccttgcggacacgcaagtgcgtctctaacgtgatgattgcacttacatgggccctctccgctgtgatctctctcgcccctctgctgttcggttggggtgagacttactctgaagggagcgaagagtgtcaagtgtctcgggagccctcgtacgccgtgttcagcacagtgggcgcattttacctgcccctgtgtgtggtcctgtttgtgtattggaagatttacaaagcagccaaattccgagtgggcagccggaagacaaattcagtgtcacccatcagcgaagcagttgaggtgaaagactctgccaagcaaccgcagatggttttcacagttagacacgcgaccgttacctttcagcccgagggggacacctggcgcgaacagaaggaacaaagagcagccctcatggtggggattctcatcggagtctttgtactatgttggataccgttctttctaacagaactcatctcaccactgtgttcgtgcgacatcccagccatttggaagtccatcttcctgtggctgggctatagcaacagcttctttaatcctctgatctatactgcgttcaataagaactataacagtgcctttaagaactttttctccaggcagcactag

SEQ ID NO: 214224 - DNA, 2912 bp, Artificial Sequence
  derived and/or modified sequence
agcattcgctctccggagctgcagcctccgaaggggtggcgggggcaacagggacagaaggcaggtcccagaaagcaggttcccccaaaactggcttccctagcacggagttaaggctgcagccggctgcctagagagaagggtgggcagggagacaacgcggtgagagcgactgctctgacgcaccagcccctctcctgcacccacacgctgctggccgcccagcttctccccgatctgggagatgctcggctctgggcggccaaacagcctttccaccaaggcgaggagccctgggctcctgacagcttaggcgggccctggctgcgacacgcagcccctcgcctctgcttccttagcctctgagggcttcagacctgccgcgcttgcagccacaccatctccaacggatgctcactagcaggaaattggggccaaattcacaggcactttccagaaactcccccactggccagaggttgcaaacatccggattggctctgggcacagtggccgccttaagtcctcctgaacaccccttctgcaagtaccccagggcggtctcctgacccagagatggatttacctgtgaacctaacctccttttccctctccaccccctcccctttggagaccaaccacagcctcggcaaagacgacctgcgccccagctcgcccctgctctcggtcttcggagtgcttattctcaccttgctgggctttctggtggcggcgacgttcgcctggaacctgctggtgctggcgaccatcctccgtgtacgcaccttccaccgcgtgccccacaacctggtggcatccatggccgtctcggatgtcctggtggccgcgctggtcatgccgctgagcctggtgcacgagctgtccgggcgccgctggcagctaggtcggaggctgtgccagctttggatcgcgtgcgacgtgctttgctgcacggccagcatctggaacgtgacggccatagccctggaccgctactggtccatcacgcgccacatggaatacacgctccgcacccgcaagtgcgtctccaacgtcatgatcgcgctcacctgggcactctccgctgtcatctctctggccccgctgctttttggctggggagagacgtactctgagggcagcgaggagtgccaggtaagccgcgagccttcctacgccgtgttctccaccgtaggcgccttctacctgccgctctgtgtggtgctcttcgtgtactggaagatctacaaggctgccaagttccgcgtgggctccaggaagaccaatagcgtctcacccatatccgaagctgtggaggtgaaggactctgccaaacagccccagatggtgttcacggtccgccacgccaccgtcaccttccagccagaaggggacacgtggcgggagcagaaggagcagcgggccgccctcatggtgggcatcctcattggcgtgttcgtgctctgctggatccccttctttctcaccgagctcatcagtcccctctgctcctgtgacatccccgccatctggaaaagcatcttcctgtggcttggctactccaactccttctttaaccccctgatctatacggctttcaacaagaactacaacagcgccttcaagaacttcttttctaggcaacactgagggagaggaccaggattgaaaaaagtttcttcccataattcagtggaattcccagttcatccatttcccatccccacccaacagccatgtggacgggatgaatcctcaccattctccagggtcatcttcagaactgcactggcctcttttccacctcctcagtaggaatatgactcctcatagagttacggtgacatgatgtatctaacttatctactatccctttctctgtgctgacagtcatggtctttgcccgcaaagtgtcctttcctccccaaattcactctggcatggtgatcgacattgtcttaaagaagtcaaggcaaataagaaggaggaggtaaaacaatatgggcaggttgagattgaatagaaaagaatgaacaagtcatgatgtagacctctgagggtaggagaccatagttccaggctttctggcacagtccccatttcaaatattctctgtggtcctagtacatatatcctaatactgatggggtatgacccaagagttgaccacaaaacactgtctccaaatatattaaagtatatagtcctatccatgagagcagggaatcttagctttaaggttttgtttgtggcaaccacacacgaacatacacacacacacacacacaactatgaaagaggcaggtgttctagctagctagtttactccaaaatgcaatccgttgacatgaaacaggcactgagggtaactacttcctttcattttgaagcaacagtttataaacaggaaagtctactggtttcatagaatctgtcagatttgtttatttgctactggtttcacgcgcgtggactatattccagtgtttctagtcaaagacctttatcctcaaatcatgagattagagtaaaacaactgctgtaaggttgagcatttcatgaccaatgactatgaaggcacattcaccaaacacaggcactttaagggcatccttgattaatttgctaattgctattttttgttggtatgtgaattcctgctaggaggccgaggctagtaggcaatgaaaaagacagaacaatggtaaaatgcagccccagtcctctacaaattgacagtataatttatgaggtgaggcagttaagtgatgatgcagcatttggatgatcatgtaaaaccagtgtcattacacaaaacttaaaaaaaaatcctaggcaataaaactgcctgtggtctgctatgtctctgactcttcaaatgcatgaattaaagaatgatataataatctctg

SEQ ID NO: 214225 - DNA, 1074 bp, Artificial Sequence
  derived and/or modified sequence
atggacctgcccgtgaacctgaccagcttcagcctgagcacccccagccccctggagaccaaccacagcctgggcaaggacgacctgagacccagcagccccctgctgagcgtgttcggcgtgctgatcctgaccctgctgggcttcctggtggccgccaccttcgcctggaacctgctggtgctggccaccatcctgagagtgagaaccttccacagagtgccccacaacctggtggccagcatggccgtgagcgacgtgctggtggccgccctggtgatgcccctgagcctggtgcacgagctgagcggcagaagatggcagctgggcagaagactgtgccagctgtggatcgcctgcgacgtgctgtgctgcaccgccagcatctggaacgtgaccgccatcgccctggacagatactggagcatcaccagacacatggagtacaccctgagaaccagaaagtgcgtgagcaacgtgatgatcgccctgacctgggccctgagcgccgtgatcagcctggcccccctgctgttcggctggggcgagacctacagcgagggcagcgaggagtgccaggtgagcagagagcccagctacgccgtgttcagcaccgtgggcgccttctacctgcccctgtgcgtggtgctgttcgtgtactggaagatctacaaggccgccaagttcagagtgggcagcagaaagaccaacagcgtgagccccatcagcgaggccgtggaggtgaaggacagcgccaagcagccccagatggtgttcaccgtgagacacgccaccgtgaccttccagcccgagggcgacacctggagagagcagaaggagcagagagccgccctgatggtgggcatcctgatcggcgtgttcgtgctgtgctggatccccttcttcctgaccgagctgatcagccccctgtgcagctgcgacatccccgccatctggaagagcatcttcctgtggctgggctacagcaacagcttcttcaaccccctgatctacaccgccttcaacaagaactacaacagcgccttcaagaacttcttcagcagacagcactag

SEQ ID NO: 214226 - protein, 189 aa, Artificial Sequence
  derived and/or modified sequence
MASPFALLMVLVVLSCKSSCSLGCDLPETHSLDNRRTLMLLAQMSRISPSSCLMDRHDFGFPQEEFDGNQFQKAPAISVLHELIQQIFNLFTTKDSSAAWDEDLLDKFCTELYQQLNDLEACVMQEERVGETPLMNADSILAVKKYFRRITLYLTEKKYSPCAWEVVRAEIMRSLSLSTNLQERLRRKE

SEQ ID NO: 214227 - DNA, 570 bp, Artificial Sequence
  derived and/or modified sequence
atggccagccccttcgccctgctgatggtgctggtggtgctgagctgcaagagcagctgcagcctgggctgcgacctgcccgagacccacagcctggacaacagaagaaccctgatgctgctggcccagatgagcagaatcagccccagcagctgcctgatggacagacacgacttcggcttcccccaggaggagttcgacggcaaccagttccagaaggcccccgccatcagcgtgctgcacgagctgatccagcagatcttcaacctgttcaccaccaaggacagcagcgccgcctgggacgaggacctgctggacaagttctgcaccgagctgtaccagcagctgaacgacctggaggcctgcgtgatgcaggaggagagagtgggcgagacccccctgatgaacgccgacagcatcctggccgtgaagaagtacttcagaagaatcaccctgtacctgaccgagaagaagtacagcccctgcgcctgggaggtggtgagagccgagatcatgagaagcctgagcctgagcaccaacctgcaggagagactgagaagaaaggagtag

SEQ ID NO: 214228 - DNA, 570 bp, Artificial Sequence
  derived and/or modified sequence
atggcaagcccattcgccctactgatggtcttggtagtgctgagttgcaagagctcttgttctctagggtgcgacttgcctgaaacccactccctcgataataggcgcacacttatgctgctggcacagatgtctagaattagcccttcatcatgcctgatggataggcatgatttcggcttcccacaggaagagttcgatggaaatcaattccaaaaagcacctgctatctctgtgctacatgagttgattcaacagatattcaacctattcacgactaaagacagcagtgctgcatgggatgaagacttgctggataagttctgtaccgagctctatcagcagctcaatgatctggaggcatgcgtcatgcaggaagagcgagtgggagagactcccttaatgaatgctgacagtatccttgccgtgaagaagtattttagaaggataactctgtatctgacggagaaaaagtacagtccatgtgcctgggaggtggtccgcgcggagatcatgaggagtctctccctgagtactaacctgcaagagagattaagacgaaaggaatag

SEQ ID NO: 214229 - DNA, 570 bp, Artificial Sequence
  derived and/or modified sequence
atggccagcccctttgccctgctgatggtgctggtggtgctgagctgcaagagcagctgcagcctgggctgtgacctgcctgagacccacagcctggacaacagaaggaccctgatgctgctggcccagatgagccgcatcagccccagcagctgcctgatggacagacatgactttggcttcccccaggaggagtttgatggcaaccagttccagaaggccccagccatctctgtgctgcacgagctgatccagcagatcttcaacctcttcaccaccaaggacagcagcgctgcctgggatgaggacctgctggacaagttctgcacagagctgtaccagcagctgaatgacctggaggcctgtgtgatgcaggaggagcgggtgggggagacccccctgatgaatgctgacagcatcctggccgtgaagaagtacttccgccgcatcaccctgtacctgacagagaagaagtacagcccctgtgcctgggaggtggtgcgggcagagatcatgaggagcctgagcctgagcaccaacctgcaggagcggctgcggaggaaggagtag

SEQ ID NO: 214230 - DNA, 876 bp, Artificial Sequence
  derived and/or modified sequence
agaacctagagcccaaggttcagagtcacccatctcagcaagcccagaagtatctgcaatatctacgatggcctcgccctttgctttactgatggtcctggtggtgctcagctgcaagtcaagctgctctctgggctgtgatctccctgagacccacagcctggataacaggaggaccttgatgctcctggcacaaatgagcagaatctctccttcctcctgtctgatggacagacatgactttggatttccccaggaggagtttgatggcaaccagttccagaaggctccagccatctctgtcctccatgagctgatccagcagatcttcaacctctttaccacaaaagattcatctgctgcttgggatgaggacctcctagacaaattctgcaccgaactctaccagcagctgaatgacttggaagcctgtgtgatgcaggaggagagggtgggagaaactcccctgatgaatgcggactccatcttggctgtgaagaaatacttccgaagaatcactctctatctgacagagaagaaatacagcccttgtgcctgggaggttgtcagagcagaaatcatgagatccctctctttatcaacaaacttgcaagaaagattaaggaggaaggaataacatctggtccaacatgaaaacaattcttattgactcatacaccaggtcacgctttcatgaattctgtcatttcaaagactctcacccctgctataactatgaccatgctgataaactgatttatctatttaaatatttatttaactattcataagatttaaattatttttgttcatataacgtcatgtgcacctttacactgtggttagtgtaataaaacatgttccttatatttactc

SEQ ID NO: 214231 - DNA, 570 bp, Artificial Sequence
  derived and/or modified sequence
atggccagccccttcgccctgctgatggtgctggtggtgctgagctgcaagtcctcctgcagcttgggctgtgatctgcctgaaacacactccctggacaataggcggacgctgatgctccttgcacagatgagccgaatctctccctcctcctgccttatggacagacacgactttgggtttccccaggaagaatttgacggtaatcagtttcaaaaggcccccgccatttcagtgcttcatgagctgattcagcagatcttcaatctcttcaccaccaaagacagctctgctgcatgggatgaagacctgctcgacaaattctgcaccgaactctatcagcagttaaacgatttggaggcatgtgtgatgcaggaagagcgggtgggtgagaccccgctgatgaacgcagatagcatactggcagtgaagaaatactttcggaggataactctgtatttaactgaaaagaaatattcgccttgtgcttgggaggtggttagggccgagatcatgcggtctctcagcctgagtaccaatctgcaggagcgtttgcggagaaaggagtag

SEQ ID NO: 214232 - DNA, 570 bp, Artificial Sequence
  derived and/or modified sequence
atggcatctccttttgccctgctgatggtccttgtggtgctgtcatgtaagagttcatgctcgttaggctgtgacctgcccgagactcatagcctggacaacagaagaacactgatgctgcttgcgcaaatgagcaggatatcacccagttcttgcctgatggacaggcacgacttcggatttccacaggaagagtttgatgggaatcagtttcagaaggcccctgccatctcagtgctccacgagctgatacagcaaatctttaatctctttactacaaaggattcatccgcggcatgggacgaagatctactcgacaaattttgtactgaattataccagcaactgaacgacctggaggcttgtgtaatgcaagaagagcgcgtcggtgagactccgctgatgaacgcggactctatcttggcagtcaaaaagtattttcggaggatcacgctatacctcaccgaaaagaagtatagcccctgcgcctgggaggtggtcagagcagaaattatgcggtctttgtcactcagcaccaaccttcaggaaagacttcgaagaaaggagtag

SEQ ID NO: 214233 - DNA, 570 bp, Artificial Sequence
  derived and/or modified sequence
atggctagccccttcgctctgcttatggtcctggttgttttgagctgtaaatccagttgctctttgggctgcgaccttcctgaaactcatagcctcgacaatagaaggaccctgatgctcctcgcacagatgtcgcggatctctcccagctcctgccttatggacaggcacgattttggctttcctcaggaagaattcgacgggaatcaattccagaaagccccggcaatctcggtcctgcatgaattaatccagcaaatctttaatctattcactacaaaagactcgtcagcagcctgggatgaagatctgttagataagttttgcacagaactataccaacaactgaatgacttggaagcatgcgtcatgcaagaggagagagtcggcgagactcctttgatgaacgccgactccattctagccgttaagaagtatttcagaaggattacgttgtacttaacagaaaagaaatatagtccatgcgcctgggaagtggtgcgggctgagatcatgagaagtttatcactgtctaccaacctccaggagcgcctcagacgaaaagagtag

SEQ ID NO: 214234 - DNA, 570 bp, Artificial Sequence
  derived and/or modified sequence
atggcttctccatttgcccttttaatggtcctcgtcgttctctcgtgtaagtcttcatgttctcttggctgtgacctgccagagacccacagtctcgacaatcgacgtaccctgatgctgctggctcagatgagtagaatttcccccagctcctgcctgatggaccgccacgattttggattccctcaggaagaattcgacggtaatcaattccagaaagctccagcaataagcgtcctccacgagctgatccagcagatctttaacctatttactactaaggattccagcgcagcttgggacgaagatcttttagacaaattctgcacagaactgtatcagcagcttaatgatttggaagcatgtgtcatgcaagaagaaagagtaggagagacccccctgatgaacgccgactcaatcctggccgtgaaaaaatatttccggcggatcaccctctacttaactgagaaaaagtactcaccctgtgcctgggaagtcgttcgggccgagatcatgcgctccttatctctatctacaaatctccaggaacgcctccggcgcaaggaatag

SEQ ID NO: 214235 - RNA, 570 nt, Artificial Sequence
  derived and/or modified sequence
auggcuagccccuucgcucugcuuaugguccugguuguuuugagcuguaaauccaguugcucuuugggcugcgaccuuccugaaacucauagccucgacaauagaaggacccugaugcuccucgcacagaugucgcggaucucucccagcuccugccuuauggacaggcacgauuuuggcuuuccucaggaagaauucgacgggaaucaauuccagaaagccccggcaaucucgguccugcaugaauuaauccagcaaaucuuuaaucuauucacuacaaaagacucgucagcagccugggaugaagaucuguuagauaaguuuugcacagaacuauaccaacaacugaaugacuuggaagcaugcgucaugcaagaggagagagucggcgagacuccuuugaugaacgccgacuccauucuagccguuaagaaguauuucagaaggauuacguuguacuuaacagaaaagaaauauaguccaugcgccugggaaguggugcgggcugagaucaugagaaguuuaucacugucuaccaaccuccaggagcgccucagacgaaaagaguag

SEQ ID NO: 214236 - RNA, 570 nt, Artificial Sequence
  derived and/or modified sequence
auggcuucuccauuugcccuuuuaaugguccucgucguucucucguguaagucuucauguucucuuggcugugaccugccagagacccacagucucgacaaucgacguacccugaugcugcuggcucagaugaguagaauuucccccagcuccugccugauggaccgccacgauuuuggauucccucaggaagaauucgacgguaaucaauuccagaaagcuccagcaauaagcguccuccacgagcugauccagcagaucuuuaaccuauuuacuacuaaggauuccagcgcagcuugggacgaagaucuuuuagacaaauucugcacagaacuguaucagcagcuuaaugauuuggaagcaugugucaugcaagaagaaagaguaggagagaccccccugaugaacgccgacucaauccuggccgugaaaaaauauuuccggcggaucacccucuacuuaacugagaaaaaguacucacccugugccugggaagucguucgggccgagaucaugcgcuccuuaucucuaucuacaaaucuccaggaacgccuccggcgcaaggaauag

SEQ ID NO: 214237 - protein, 233 aa, Artificial Sequence
  derived and/or modified sequence
MSSYFVNPTFPGSLPSGQDSFLGQLPLYQAGYDALRPFPASYGASSLPDKTYTSPCFYQQSNSVLACNRASYEYGASCFYSDKDLSGASPSGSGKQRGPGDYLHFSPEQQYKPDSSSGQGKALHDEGADRKYTSPVYPWMQRMNSCAGAVYGSHGRRGRQTYTRYQTLELEKEFHFNRYLTRRRRIEIANALCLTERQIKIWFQNRRMKWKKENKLINSTQPSGEDSEAKAGE

SEQ ID NO: 214238 - DNA, 702 bp, Artificial Sequence
  derived and/or modified sequence
atgagcagctacttcgtgaaccccaccttccccggcagcctgcccagcggccaggacagcttcctgggccagctgcccctgtaccaggccggctacgacgccctgagacccttccccgccagctacggcgccagcagcctgcccgacaagacctacaccagcccctgcttctaccagcagagcaacagcgtgctggcctgcaacagagccagctacgagtacggcgccagctgcttctacagcgacaaggacctgagcggcgccagccccagcggcagcggcaagcagagaggccccggcgactacctgcacttcagccccgagcagcagtacaagcccgacagcagcagcggccagggcaaggccctgcacgacgagggcgccgacagaaagtacaccagccccgtgtacccctggatgcagagaatgaacagctgcgccggcgccgtgtacggcagccacggcagaagaggcagacagacctacaccagataccagaccctggagctggagaaggagttccacttcaacagatacctgaccagaagaagaagaatcgagatcgccaacgccctgtgcctgaccgagagacagatcaagatctggttccagaacagaagaatgaagtggaagaaggagaacaagctgatcaacagcacccagcccagcggcgaggacagcgaggccaaggccggcgagtag

SEQ ID NO: 214239 - DNA, 702 bp, Artificial Sequence
  derived and/or modified sequence
atgtcatcgtacttcgtcaacccaacttttccaggcagccttccttctggacaggatagttttctcgggcaactaccactttatcaagccggctatgatgcattgcgccctttccccgccagttacggcgcttcctccctcccagacaagacctatactagcccgtgtttttaccaacaatcgaacagcgtgctggcatgcaacagagcgtcatatgaatacggggcttcctgcttctactcagacaaagatctttctggtgcttcgccctcagggtcagggaaacagcgggggccaggagattatttgcacttcagtcctgaacagcaatataagccagatagctcttccggccaaggaaaagccctgcatgacgagggggccgaccggaagtatacttctcccgtgtacccgtggatgcagcgcatgaattcttgtgctggggctgtgtatgggtctcacggcaggcggggccggcagacatacacacgctatcagacactggagctcgagaaggagttccattttaaccgctatcttacacggcggagacgcatagagattgccaacgccctatgtttgacagagaggcaaatcaaaatctggttccagaacaggcggatgaagtggaaaaaggagaacaagctgatcaattctacccagccgagtggcgaagatagcgaagcaaaagcaggggaatag

SEQ ID NO: 214240 - DNA, 989 bp, Artificial Sequence
  derived and/or modified sequence
cacagtcctgcagaggggcgcgcaaatgagttcctattttgtgaatcccactttccccgggagccttcccagcggccaggactccttcttgggccagctgcccctctaccaggctggctatgacgcgctgaggcccttcccggcctcgtacggggcgtcgagtctcccggacaagacgtacacctcaccttgtttctaccaacagtccaactcggtcctggcctgcaaccgggcgtcctacgagtacggggcctcgtgtttctattctgataaggacctcagtggcgcctcgccctcgggcagtggcaagcagaggggccccggggactacctgcacttttctcccgagcagcagtacaaacccgacagcagcagcgggcagggcaaagcactccatgacgaaggcgccgaccggaagtacacgagcccggtttacccttggatgcagcggatgaactcctgcgcgggtgctgtgtatgggagccatgggcgccgaggccgccagacctacacgcgctaccagacactggagctggagaaggagttccacttcaaccgctacctgacacggcgccgccgcatcgagatcgccaacgcgctctgcctcaccgagcgccagatcaagatctggttccagaaccgccgcatgaagtggaaaaaggaaaacaagctcatcaattccacgcagcccagcggggaggactcagaggcaaaggcgggcgagtagatgcctgggcagggaccaggccagcgctgcaacctccttcggctttgcccccttgccctcgcctgttccccaacttttctccccgcctgctcccatctgggggcttccgcagcttcaggggagcccggagctttgcaagcgtctgtgcatttatttcttacaaaacaaaacaaaacaaaacaaaacaaaacaaaacaaaacaaaacaaaacctcacacacagccaataccagcggtggagcggggcgcactgcacacaccca

SEQ ID NO: 214241 - DNA, 702 bp, Artificial Sequence
  derived and/or modified sequence
atgagcagctactttgtgaaccccaccttccctggcagcctgcccagcggccaggacagcttcctgggccagctgcccctgtaccaggccggctatgatgccctgcggcccttccctgccagctatggagccagcagcctgcctgacaagacctacaccagcccctgcttctaccagcagagcaacagcgtgctggcctgcaacagagccagctatgaatatggagccagctgcttctacagcgacaaggacctgagcggggccagccccagcggcagcggcaagcagaggggccctggggactacctgcacttcagccctgagcagcagtacaagccagacagcagcagcggccagggcaaggccctgcatgatgaaggagctgacaggaagtacaccagccctgtgtacccctggatgcagaggatgaacagctgtgccggggctgtgtatggcagccacggccggcggggccggcagacctacacccgctaccagaccctggagctggagaaggagttccacttcaaccgctacctgaccaggagaagacgcatcgagatcgccaatgccctgtgcctgacagagcggcagatcaagatctggttccagaacagaaggatgaagtggaagaaggagaacaagctgatcaacagcacccagcccagcggagaagattctgaggccaaggccggggagtag

SEQ ID NO: 214242 - DNA, 702 bp, Artificial Sequence
  derived and/or modified sequence
atgagcagctacttcgtgaaccccaccttccccggcagcctgccctcaggacaggattcttttcttgggcagctgccactttaccaagctggctacgacgctcttcgacctttcccagcctcctacggcgcctcaagcttacctgacaaaacatatacatctccctgtttttatcaacagtccaactccgtgttggcatgcaacagggcatcatacgagtacggggcttcatgtttctattctgacaaagatctgtcaggcgccagcccctctgggtcgggcaaacagagaggcccaggcgattacctccatttcagtcccgagcagcagtataaacccgactcgagtagcgggcaaggtaaagccctccatgacgagggggccgacagaaagtatacgagtcctgtgtacccctggatgcaacgtatgaactcttgcgctggagcggtgtatgggagccatggcaggaggggacggcagacatacactcgttaccaaacactcgaattagagaaagagtttcattttaatagatacttaacgcgaagaaggcgaatagagattgccaatgccctctgtctgacagagcgacagatcaagatttggtttcaaaatcggaggatgaagtggaaaaaagagaacaaacttattaactccacacagccaagcggggaagattccgaggccaaagccggggagtag

SEQ ID NO: 214243 - DNA, 702 bp, Artificial Sequence
  derived and/or modified sequence
atgtcatcatactttgtcaatcctactttccccggttccctaccctccggacaagacagttttctaggccagctgcccttgtaccaggcaggctatgacgctttaagaccctttccagccagttatggcgcttcttcgctgcccgataaaacttacacatcaccatgcttttaccagcagtccaatagcgtcttagcttgtaatcgagcctcttacgagtatggcgcttcttgtttctattctgacaaagatctctctggggcttcaccatcgggaagcgggaaacagcgcggacccggtgactacctgcacttttctccagagcagcagtacaagccagactctagctccggccagggtaaagccctgcacgacgagggcgctgatcggaagtatacaagtcctgtgtatccttggatgcaacgtatgaattcctgcgccggtgctgtctacggttcacatggcagaagaggcaggcagacgtatacacggtaccaaacattagagctggaaaaggaattccattttaacagatacctgacacgtagacggagaattgaaattgcgaatgcactctgtttgactgaaaggcagatcaagatttggttccagaataggcggatgaagtggaaaaaagagaacaaacttataaatagcacccaacccagcggcgaagattctgaggcgaaagcaggcgagtag

SEQ ID NO: 214244 - protein, 251 aa, Artificial Sequence
  derived and/or modified sequence
MAMSSFLINSNYVDPKFPPCEEYSQSDYLPSDHSPGYYAGGQRRESSFQPEAGFGRRAACTVQRYAACRDPGPPPPPPPPPPPPPPPGLSPRAPAPPPAGALLPEPGQRCEAVSSSPPPPPCAQNPLHPSPSHSACKEPVVYPWMRKVHVSTVNPNYAGGEPKRSRTAYTRQQVLELEKEFHYNRYLTRRRRVEIAHALCLSERQIKIWFQNRRMKWKKDHKLPNTKIRSGGAAGSAGGPPGRPNGGPRAL

SEQ ID NO: 214245 - DNA, 756 bp, Artificial Sequence
  derived and/or modified sequence
atggctatgtctagttttctcattaacagtaattacgtcgatccgaagtttccgccttgcgaggaatactcccagtctgactacctgccctctgaccactcaccgggctattacgctggcggccagagaagagaatcgagctttcagccagaggccggttttggccgacgggcggcatgcactgtgcaaagatacgctgcttgcagagatcccggcccccccccccctccacctccacctccccctccccctcctcctccaggcctgtccccgagagcacctgcgccaccccctgcaggcgcactgctcccggagcctggacagcgctgtgaggccgtaagtagcagcccaccaccgccaccctgcgctcagaatcctctccatcctagcccaagtcacagcgcctgcaaggagcccgtggtttacccttggatgagaaaggtccatgtttccaccgtcaatccgaattacgccggcggcgagcccaagcggtccagaacagcgtatactagacagcaggtcttggagctagagaaagaattccactataaccgttaccttacccgcaggcggcgcgttgagatcgcccacgcactttgccttagcgaaaggcagattaagatctggttccagaacagaaggatgaagtggaaaaaagatcataagttacctaacacaaagatacgcagcggaggcgccgccgggagtgcaggagggccgccgggcaggcccaatggcggtccccgggccctatag

SEQ ID NO: 214246 - DNA, 3757 bp, Artificial Sequence
  derived and/or modified sequence
gagaattgaaaaccttgtaatcccaagaacagactcgcactgcctttttctgttcccagagctcaaaactagaacaaaacgaaataaaaccaaagcactcaaaccacaccccaaacgaagaaggcgcggaaagtaggagaactggaaaatttctgggccaagaagatctgtctgtcttctgtatataccctgtagatccgaatttgtgtaaggaattttgtggtcacaaattcgtatctaggggaatatgtagttgacataaacactccgctcttatttttccagaagaaaaaaatatatatatatgtatatgtagtatttttctgaatgaggacagtctggtgactggccacacgaagactccttcctctttattcctctatcttttcctccttcaactggttagagatggagaaatcatctacctgaactctccccacgcctgcccctgggagccttggtcccttttcacatctctttaagaggttaatgttattgttgttgaagttttaaatttatcttctcgtcccaaacgcacccattttctattctgggctcagggaggctttattggaaattgcgaaaaaaaatgacttgtcttcagtgtgcgaagaaggcaaaggaaatttgtttaacaaacggatgctgaggccgcctttccgtttcagttcagaacaagatgacctggaaatactcgattaccaaggagtgttattgtctgtgtgggtcacctctatggctgtatccccagtatcaaagggatgtgagatttctattcgccgcggaggcggcgacaattagaacgtctcggacccatggttagtattgctcgggtggttatggaattagcaaattgctaatcaattttgctctcaaaagttgcaggtttttttaccccagcgctctgtctatagtgtgggaaaccaagtcgtttctccaggcttgggccgtgtgggttaaagggaggagtggataggagaagggggacagacggactgacggacacagtctagctaaccgtgcagctaaatgagatttggaaggcgaagtctccccgaattagtgcatgaatttcctatcgatccgcccgcggttccattcatctctgacaagtccctctgcgcacccgccctctagctctggacgcctcctctctcacccctacccttccccatccagctgcagagaaaagccccaagctctgtgctctggcccccgtatgggttcccctttcgagacggagcccccaacccgccagtaacctaactccccatagagacgcagggtgctagcgctccctcccgccgaggggaggagactggggcctttggaaggtacagaatgctgggcagaggtgaggcagaacaggagggctacaccgggagccccaacttcttaagggatctagggtttgcgctctgcctagcgccccaacaggccctccagtcgcaacctgcgcgcgctctctctctcgctctctctctgatcccggagagagcgaggcaaggagggggtcgccccgcaggagccctatgtaaatcctggtgttgggtgggtgggtggggagggggaagggaagaaggggaaataaacctctttggctggagtggggtccgggtgagcagatttccttatccgggaatcgcaggcggggcggccattggctcggaggatcacgtgggcgcctaactttgttcacttgacagtaagtaggagggctttcggaaacaggaaaacgagtcaggggtcggaataaattttagtatattttgtgggcaattcccagaaattaatggctatgagttcttttttgatcaactcaaactatgtcgaccccaagttccctccatgcgaggaatattcacagagcgattacctacccagcgaccactcgcccgggtactacgccggcggccagaggcgagagagcagcttccagccggaggcgggcttcgggcggcgcgcggcgtgcaccgtgcagcgctacgcggcctgccgggaccctgggcccccgccgcctccgccaccacccccgccgcccccgccaccgcccggtctgtcccctcgggctcctgcgccgccacccgccggggccctcctcccggagcccggccagcgctgcgaggcggtcagcagcagccccccgccgcctccctgcgcccagaaccccctgcaccccagcccgtcccactccgcgtgcaaagagcccgtcgtctacccctggatgcgcaaagttcacgtgagcacggtaaaccccaattacgccggcggggagcccaagcgctctcggaccgcctacacgcgccagcaggtcttggagctggagaaggaatttcactacaaccgctacctgacacggcgccggagggtggagatcgcccacgcgctctgcctctccgagcgccagatcaagatctggttccagaaccggcgcatgaagtggaaaaaagaccacaagttgcccaacaccaagatccgctcgggtggtgcggcaggctcagccggagggccccctggccggcccaatggaggcccccgcgcgctctagtgcccccgcacgcgggagccacgaacctcggggtgggggtgggcagtgagtgcaggggatggggtggggggacaggagggggccctggggcctgggccccggaaaaatctatctgccctcccccacactttatatacgaataaacgcagaagagggggaggggaagctttatttatagaaatgacaatagagggccacggggaggcccccccagaagcaagattcaaatctcttgctttctttcttaaaaaaaagaaaaagaaaaagcaagaagaaggaagaaagaaaaagacagaaagagaaataggaggaggctgcagctcctcgttttcagctttggcgaagatggatccacgtttcatctttaatcacgccaggtccaggcccatctgtcttgtttcctctgccgaggagaagacgggcctcggtggcgaccattacctcgacacccgctaacaaatgaggcccggctcggccgcctccgcctctgctactgccgctgctggaagacagcctggatttcctttctttgtcccccactcccgatacccagcgaaagcaccctctgactgccagatagtgcagtgttttggtcacggtaacacacacacactctccctcatctttcgtgcccattcactgagggccagaatgactgctcacccacttccaccgtggggttgggggtgggcaacagaggaggggagcaagtagggaagggggtggccttgacaactcaggagtgagcaggaaaattgagtccaaggaaaaagagagactcagagacccgggagggccttcctctgaaaggccaagccaagccatgcttggcagggtgaggggccagttgagttctgggagctgggcactactctgccagtccagagttgtacagcagaagcctctctcctagactgaaaatgaatgtgaaactaggaaataaaatgtgcccctcccagtctgggaggaggatgttgcagagccctctcccatagtttattatgttgcatcgtttattattattattgataatattattattactatttttttgtgtcatgtgagtcctctctccttttctctttctgacattccaaaaccaggccccttcctacctctggggctgcttgagtctagaacccttcgtatgtgtgaatatctgtgtgctgtacagagtgacaatagaaataaatgtttggtttcttgtga

SEQ ID NO: 214247 - DNA, 756 bp, Artificial Sequence
  derived and/or modified sequence
atggccatgagcagcttcctgatcaacagcaactacgtggaccccaagttccccccctgtgaggagtacagccagagcgactacctgcccagcgaccacagccctggctactatgccggcggccagaggcgggagagcagcttccagcctgaggccggcttcggccggcgggccgcctgcaccgtgcagagatatgctgcctgccgggaccccggccccccacctcctcctcctcctcctcctcctcctcctcctcctcctggcctgagcccccgggccccagcccctcctcctgctggggccctgctgcctgagcccggccagagatgtgaggccgtgagcagcagccccccacctccaccctgtgcccagaaccccctgcaccccagccccagccacagcgcctgcaaggagcctgtggtgtacccctggatgaggaaggtgcacgtgtccacagtgaaccccaactatgctggaggagagcccaagaggagcaggacagcctacacccggcagcaggtgctggagctggagaaggagttccactacaaccgctacctgaccaggagaagaagagtggagatcgcccacgccctgtgcctgtctgagcggcagatcaagatctggttccagaacagaaggatgaagtggaagaaggaccacaagctgcccaacaccaagatccgcagcggcggggccgccggcagcgctgggggccccccaggccggcccaatggaggcccccgggccctgtag

SEQ ID NO: 214248 - DNA, 756 bp, Artificial Sequence
  derived and/or modified sequence
atggccatgagcagcttcctgatcaacagcaactacgtggaccccaagttcccaccatgtgaagaatatagccagagcgactaccttcctagtgaccacagcccaggctactacgctggagggcagaggagagagtcgtccttccaacccgaggcggggtttgggagacgcgctgcctgtacggtccaacgttacgctgcctgcagagatcccggacccccccctcctcctcctcctccgccaccccccccaccaccacccggtcttagtcccagggctccagctccgcctccggccggagcactcttacctgaaccagggcagaggtgtgaggccgtgtcaagctcaccccccccacctccttgtgctcagaaccccttacacccctccccatctcattcggcttgtaaggagccagttgtgtatccttggatgaggaaggtgcacgtatctacagtgaatccaaactatgccggcggggagcccaagcgttcaagaaccgcttacactcgacagcaggtcctcgagcttgagaaagaattccactacaacaggtatctgacgaggcgccgcagagtggagatagcccacgcattgtgccttagtgagaggcagattaaaatctggtttcagaaccgtcgaatgaagtggaagaaggatcataaactgcccaacacaaagatacggtcagggggcgctgcgggaagcgccgggggcccgcctggaaggcccaatggcggccctcgggcactatag

SEQ ID NO: 214249 - DNA, 756 bp, Artificial Sequence
  derived and/or modified sequence
atggccatgtccagcttcttaatcaactcaaattatgtcgatccgaagtttccaccttgcgaggagtattcccaatcggactatctgcccagcgaccatagccctgggtactatgccggaggtcagaggcgggagtcatccttccaacccgaggccggattcggaagacgcgctgcctgtaccgtgcagcgatatgccgcttgccgagacccaggtccaccgccacctccccctcctcctcctccacctcccccaccacccggactgtctcccagggcccctgcccctccacctgccggagcccttcttcctgaaccaggacagcgctgcgaagcggtatccagcagtccacctccacccccttgtgcacaaaatcccctccacccaagtcccagtcactctgcatgtaaggaacccgtggtgtacccttggatgcgaaaagtgcacgtgtctacagtcaaccctaattatgctgggggagagccaaaaagatcaaggaccgcatacactagacaacaggttctcgaactggaaaaggaatttcattacaaccgctatctgacccgtagacggagggtggagatcgctcacgctctatgcctgtcagaaagacagataaaaatttggtttcagaatcggaggatgaagtggaaaaaggatcacaagttacccaacacgaaaatccgttctggaggagccgcagggtccgcgggtggacccccaggtcgcccaaacggtgggccacgcgcactctag

SEQ ID NO: 214250 - DNA, 756 bp, Artificial Sequence
  derived and/or modified sequence
atggccatgagcagcttcctgatcaacagcaactacgtggaccccaagttccccccctgcgaggagtacagccagagcgactacctgcccagcgaccacagccccggctactacgccggcggccagagaagagagagcagcttccagcccgaggccggcttcggcagaagagccgcctgcaccgtgcagagatacgccgcctgcagagaccccggccccccccccccccccccccccccccccccccccccccccccccccggcctgagccccagagcccccgcccccccccccgccggcgccctgctgcccgagcccggccagagatgcgaggccgtgagcagcagcccccccccccccccctgcgcccagaaccccctgcaccccagccccagccacagcgcctgcaaggagcccgtggtgtacccctggatgagaaaggtgcacgtgagcaccgtgaaccccaactacgccggcggcgagcccaagagaagcagaaccgcctacaccagacagcaggtgctggagctggagaaggagttccactacaacagatacctgaccagaagaagaagagtggagatcgcccacgccctgtgcctgagcgagagacagatcaagatctggttccagaacagaagaatgaagtggaagaaggaccacaagctgcccaacaccaagatcagaagcggcggcgccgccggcagcgccggcggcccccccggcagacccaacggcggccccagagccctgtag

SEQ ID NO: 214251 - protein, 243 aa, Artificial Sequence
  derived and/or modified sequence
MSSYFVNSLFSKYKTGESLRPNYYDCGFAQDLGGRPTVVYGPSSGGSFQHPSQIQEFYHGPSSLSTAPYQQNPCAVACHGDPGNFYGYDPLQRQSLFGAQDPDLVQYADCKLAAASGLGEEAEGSEQSPSPTQLFPWMRPQAAAGRRRGRQTYSRYQTLELEKEFLFNPYLTRKRRIEVSHALGLTERQVKIWFQNRRMKWKKENNKDKFPSSKCEQEELEKQKLERAPEAADEGDAQKGDKK

SEQ ID NO: 214252 - DNA, 732 bp, Artificial Sequence
  derived and/or modified sequence
atgtcatcgtacttcgttaactcccttttctccaaatacaagaccggagaaagccttcggccgaattactacgattgtgggttcgcccaggatctcgggggaaggcccacggttgtgtatggaccctcctccggtggatctttccaacatccaagtcagatccaggaattttatcacggccccagttctctgagtaccgcaccttatcagcagaacccgtgtgccgtggcatgccatggagatccggggaacttttatggatatgatcctcttcaacggcagtccctgttcggagcccaggatcccgatcttgtccaatatgcagattgcaagttggccgctgctagcggcctgggggaggaggccgagggtagcgagcagtccccctctccaacccagctgttcccttggatgcggccgcaggctgcagccggtcggcgcagaggtagacagacctactcgaggtatcagactctggagctcgagaaagagttcctgttcaacccttatctgacacgaaagagacggatcgaggtctctcatgcactggggttgacagaaaggcaggtgaagatatggtttcagaacagacgcatgaaatggaagaaggagaacaataaggacaagtttcctagcagcaaatgcgagcaggaggaactggagaaacagaaactcgagagggcaccggaggccgccgacgagggcgacgctcaaaaaggtgataaaaagtag

SEQ ID NO: 214253 - DNA, 3437 bp, Artificial Sequence
  derived and/or modified sequence
gctctctcctcactccctggcgctctctcgctctagctctctctctcgctcgctctctctcgctctcaccctcgctctgcgttctgtccgggaggagtacgaagaagccaataggatgcggggtctctaatggatgcaaatgatcatgaaaagacagtgcaaaatatgaaacaactcatttgcagggaagtaaatcaccgaaaactgtttatgaactggcatcccttcttcgaaatgtaaagcgaggacctctttaagtggtggtatatttttgtttggggggtggggggtggggggagggcgagcgagccgcggctgccatgcaagcttagacttttggaggcttctctgtccttttctattcctggaaaccacaaaaagtgtgtcggcttcgagatcttcttcgccttttctttcttttctttttttccctcctctctttccctctcctttcctggcgagggtgactaggagccggcgaatccgcgtttttttctctctctccctccctttccccctccccaccccctccccaacagcccccaactatagcctccgccgccgccgccgcctcaaaattcaataaaatgagctcttatttcgtcaactcactgttctccaaatacaaaaccggggagtccctgcgccccaattattatgactgcggcttcgcccaggacctgggcggccgacccaccgtggtgtacggtcccagcagcggcggcagcttccagcacccgtcgcaaatccaggagttctaccacgggccgtcgtcgctgtccacggctccctaccagcagaacccgtgcgccgtggcgtgccacggggaccccggcaatttctacggctacgacccgctgcaacgccagagcctattcggtgcgcaggatccagacctggtgcagtacgcagactgcaagcttgccgccgccagcggcctgggcgaggaggccgagggctccgagcagagcccgtcgcccacacagctcttcccctggatgcgcccgcaagcagccgccggacgcaggcgaggccgacagacctacagccgctaccagaccctggagctggagaaggagttcctatttaatccctatctgactcgtaagcggcgaatcgaggtatcgcacgccctgggactgacagagagacaggtcaaaatctggttccagaaccggaggatgaagtggaaaaaagagaacaacaaagacaagttccccagcagcaaatgcgagcaggaggagctggagaaacagaagctggagcgggccccagaggcggcggacgagggcgacgcgcagaagggcgacaagaagtaggcttcagctgggactgccagggccgcggccgcccgcacgtccgcgggtcccggccgcgccgccgccgcgcgcccctgcccgagagagctctggccccgctagcggggccaggagccgggcctcccaccgcagcgtcccccgccgcgccagtccccgctagtggtagtatctcgtaatagcttctgtgtgtgagctaccgtggatctccttcccttctcttgggggccggggggaaagaaaaggatttaagcaaaggctccctcgccctgtgagggcgagcggcaaaggcccggctgagccccccatgcccctcccctccccgtgtaaaaagcctccttgtgcaattgtcttttttttcctttgaacgtgcttctttgtaatgaccaaggtaccgatttctgctaagttctcccaacaacatgaaactgcctattcacgccgtaattctttctgtctcccttctctctctctctctcgctcgctcgctctcgctctcgctctctctcgctgcgtcctcatttcccctcccaatcctctctcccctctgcaaccccccagctcgctggctttctctctggcttctctcttttcctcctccacccaccccctttggtttgacaattttgtcttaagtgtttctcaaaagaggttactttagttagcatgcgcgctgtgggcaattgttacaagtgttcttaggtttactgtgaagagaatgtattctgtatccgtgaattgctttatgggggggagggagggctaattatatattttgttgttcctctatactttgttctgttgtctgcgcctgaaaagggcggaagagttacaataaagtttacaagcgagaacccgagactggcccggccagcgctcctcatttgctcccgggtgccttgcagagccggtggggagcctgtcaccgggctcctgcgcctgctgaggctaggctgcagagaggagggggcgggggctggaggcaggtggtgcgagtccctcggcccaggggcgctgggggtgagggaggcggctgagcctgattggaggagagaaaaacgagggaggggagccaagagaaaccccctcctctcgcgttccgaggctgcccggccagggaggccagggcgcccaggccacgctggagacctgcggctgggctggtggctgtgtcccccgccacctccctctttgttttgctgtgtgtcctcccaagatgtgtgtcgggaggtggggtggggggcaggcataaaggtggagtgcaggcctgctgagcatactttttttccctcggactgttgttgttgggggagcaggaggagaagggagaccgctcttccctgcctctccctctcagggacttggccaccttcgctctgttctgaggccatggctctctgccttccttccttcgctgcctctgcttctctggtagtcacgctccactgaggcatccgcctccgggaaccgggagagcagcgcgcccgggccaacctccacccttcctttctctccccaccctcccaaccccctttttcttttactttcaaacctttttttttctttttctttctttctttctttttttttttgccaccagaaacggcagcgtccaaggcccgtgggctggatcctgtgccctaggagcacctaggaagacttgctccatctccgcccgcatatctggggcaccaagagagacagagtcgtgagccaggctcgcctcattcctcgtcttgggagaaccggaccaacttccccaaaaggccttgccgtgcagaattggcctggtttaataaagaacagacctgccccaagcacccacccacccagttgcgtgcattcaatccctgcgtttgtctctcgctcggtaacgggctgaagaggatgggtggagggtgacacggatcgccccgaggttatttattttcccttccactcaatctcttcctccccaaatctcgcctgcaagcggcctccagcccgcgggagtcggcagcggcccttgagcccccagccccaatccacagggctcggctttcccattcattattgatcatattttataaatccaacgccacacaattttttccacattaccgggagccgtggggagacggc

SEQ ID NO: 214254 - DNA, 732 bp, Artificial Sequence
  derived and/or modified sequence
atgagcagctactttgtgaacagcctcttcagcaagtacaagacaggagagagcctgcggcccaactactatgactgtggctttgcccaggacctgggcggccggcccaccgtggtgtatggccccagcagcggcggcagcttccagcaccccagccagatccaggagttctaccacggccccagcagcctgagcacagccccctaccagcagaacccctgtgctgtggcctgccacggggaccccggcaacttctacggctatgaccccctgcagaggcagagcctgtttggagcccaggaccctgacctggtgcagtatgctgactgcaagctggccgccgccagcggcctgggggaggaggccgagggcagcgagcagagccccagccccacccagctgttcccctggatgaggccccaggccgccgccggcagaagaagaggccggcagacctacagccgctaccagaccctggagctggagaaggagttcctgttcaacccctacctgaccaggaagagaagaattgaggtgtcccatgccctgggcctgacagagcggcaggtgaagatctggttccagaacagaaggatgaagtggaagaaggagaacaacaaggacaagttccccagcagcaaatgtgagcaggaggagctggagaagcagaagctggagcgggcccctgaggccgcagatgaaggagatgcccagaagggggacaagaagtag

SEQ ID NO: 214255 - DNA, 732 bp, Artificial Sequence
  derived and/or modified sequence
atgagcagctacttcgtgaacagcctgttcagcaagtacaagaccggcgagtctttgcgacccaattactatgattgtggatttgcgcaggacctgggcggtcggccgacagtagtctacggtccatcgagtggaggaagcttccagcacccctcccaaattcaggagttctatcacggaccctctagcctctccactgccccgtaccagcaaaacccatgcgcggtggcctgccatggagaccccggcaacttctatgggtatgaccccctccaacgtcagagcctgttcggtgcccaagacccagacctagtgcagtacgcggactgcaagctggccgccgccagcggtctgggagaggaagcggaaggctcagaacagagtcctagcccaacgcagctcttcccttggatgcgtccacaggccgccgcaggccgaaggcgcggtcgacagacctacagccggtatcaaactttagagctcgaaaaagagttcttattcaacccctatctcacccgcaagcggcgaatcgaagtcagtcacgctttaggcctcactgaacgccaggtgaagatctggttccagaacagaagaatgaagtggaaaaaggagaacaataaggataaattccctagctccaagtgcgagcaggaagagcttgagaaacagaaattggaaagagcccccgaggctgccgatgaaggggacgcgcagaagggtgacaagaagtag

SEQ ID NO: 214256 - DNA, 732 bp, Artificial Sequence
  derived and/or modified sequence
atgtcgtcctatttcgtaaattccctgtttagcaaatacaagaccggggagtcactcagacctaattattacgattgcggattcgcccaggacttgggaggacggcctacagtggtatatggcccttccagcggtggatcattccagcatcccagtcaaatacaggagttttaccatggacccagtagcttgtccaccgctccttatcagcagaatccctgtgcagtggcttgtcatggggatcccggaaacttttacggatacgatccgcttcaaagacagagtttgtttggcgctcaggatcccgatctggttcagtatgctgattgcaaactggccgctgcctctggtttgggtgaggaggctgaaggctccgaacagagccctagcccaactcagctatttccatggatgcgcccacaagctgcggcaggtcgcagaaggggaagacagacttatagccggtatcaaactctcgagctcgagaaagaatttctgtttaatccgtatttgacccgtaagcgacgcatcgaagtgagccatgcgcttggcctcaccgagcgacaagtgaaaatatggtttcagaatagacgcatgaagtggaagaaggaaaacaacaaggataagttccctagctccaagtgcgagcaggaggaacttgagaaacagaaacttgagagagcgcctgaagccgcagatgagggcgacgcccagaaaggggacaaaaagtag

SEQ ID NO: 214257 - DNA, 732 bp, Artificial Sequence
  derived and/or modified sequence
atgagcagctacttcgtgaacagcctgttcagcaagtacaagaccggcgagagcctgagacccaactactacgactgcggcttcgcccaggacctgggcggcagacccaccgtggtgtacggccccagcagcggcggcagcttccagcaccccagccagatccaggagttctaccacggccccagcagcctgagcaccgccccctaccagcagaacccctgcgccgtggcctgccacggcgaccccggcaacttctacggctacgaccccctgcagagacagagcctgttcggcgcccaggaccccgacctggtgcagtacgccgactgcaagctggccgccgccagcggcctgggcgaggaggccgagggcagcgagcagagccccagccccacccagctgttcccctggatgagaccccaggccgccgccggcagaagaagaggcagacagacctacagcagataccagaccctggagctggagaaggagttcctgttcaacccctacctgaccagaaagagaagaatcgaggtgagccacgccctgggcctgaccgagagacaggtgaagatctggttccagaacagaagaatgaagtggaagaaggagaacaacaaggacaagttccccagcagcaagtgcgagcaggaggagctggagaagcagaagctggagagagcccccgaggccgccgacgagggcgacgcccagaagggcgacaagaagtag

SEQ ID NO: 214258 - protein, 250 aa, Artificial Sequence
  derived and/or modified sequence
MSISGTLSSYYVDSIISHESEDAPPAKFPSGQYASSRQPGHAEHLEFPSCSFQPKAPVFGASWAPLSPHASGSLPSVYHPYIQPQGVPPAESRYLRTWLEPAPRGEAAPGQGQAAVKAEPLLGAPGELLKQGTPEYSLETSAGREAVLSNQRPGYGDNKICEGSEDKERPDQTNPSANWLHARSSRKKRCPYTKYQTLELEKEFLFNMYLTRDRRHEVARLLNLSERQVKIWFQNRRMKMKKMNKEQGKE

SEQ ID NO: 214259 - protein, 128 aa, Artificial Sequence
  derived and/or modified sequence
MSISGTLSSYYVDSIISHESEDAPPAKFPSGQYASSRQPGHAEHLEFPSCSFQPKAPVFGASWAPLSPHASGSLPSVYHPYIQPQGVPPAESRYLRTWLEPAPRGGAAQTGHARVQFGNFGGQGGRAV

SEQ ID NO: 214260 - DNA, 2711 bp, Artificial Sequence
  derived and/or modified sequence
attttgcaaggagagctgagacgggctgctccactgtactttgttggctgagaagttgagcagggggtgggggtgggagggtggggggctgggggggtcgcgtccgaaagccctcacaccggtccgggtgccacctctccctgcttgggcgccgccgcgcgagcgcttcccttccccctgcaagcgcccggataatgtctgagaatgtccatttctgggacgcttagcagctattatgtcgactcgatcataagtcacgagagtgaggacgcgcctccagccaagtttccttctggccagtacgcgagctcgcggcagccgggccacgcggagcacctggagttcccctcgtgcagcttccagcccaaagcgccggtgttcggcgcctcctgggcgccgctgagcccgcacgcgtccgggagcctgccgtccgtctaccacccttacatccagccccagggcgtcccgccggccgagagcaggtacctccgcacctggctggagccggcgccgcgcggcgaagcggccccggggcagggccaggcggcggtgaaggcggagccgctgctgggcgcgcctggggagctgctcaaacagggcacgcccgagtacagtttggaaacttcggcgggcagggaggccgtgctgtctaatcaaagacccggctacggggacaataaaatttgcgaaggaagcgaggacaaagagaggccggatcaaaccaacccctccgccaactggctgcacgctcgctcttcccggaaaaagcgctgtccctacaccaaataccagacgctggagctagagaaggagtttctgttcaatatgtacctcaccagggaccgtaggcacgaagtggccagactcctcaatctgagtgagagacaagtcaaaatctggtttcagaaccggcggatgaaaatgaagaaaatgaataaggagcagggcaaagagtaaagattaaagattacccccagtcctccctagctcttccccatctcactcttagttatgtgacgactgcaaagccagtgctgtctgggatgtattcaagtgaatggggaagggagtctctcttccaagtcctttatctgcacctagaacctccctcctttcctttgcccttacctgtctctctcttctctctaggtgtcaggagaaagttttgttgatttagaagatagaaatagttggttcctaagaatgtgatgggccacaaggaaagagagaccccagtcaagctcctagtatgccctgtaatttttctgggaagtcctagcccctcacttccagcttgcctgtttcttctctacacccacccaaaagtcacccagggacactccaactctacacagctcagcagacatccacacacagtaatggggtgagctcacaaccaccattcagtcaagtgaggtgacactccagttgcagaccatcgcacaccaaatttggcaaaacagccctcagactgtcaggcaagcccgggttctacccctaatgcaaatacccaccagggagatgtctagaggcagactcctgagtgaggtgttgcagcccaaaggctgcagcattgccataccattcccatggagttgccaactattctcaggccaagggccatggggaagatggagcaaacctagcccccaagccggtgggctagaaagtacaagaaaaggcagcacgtggttttatgaagctatcttaggtggagctactccccacctcccaccaacatatacattttgttgcaggaaatgtttaattccgcatgatgtttccctctccttccaacaaaagaaggtcaaactgtgggtcgtagagccttgacaatgttgtcctcctgttcatctgtgcaccacttgacagactgtagcttctcttgctctcgaccggccctgcattcttccgcaccctccctagctctgaaatcaactctcttcggtcgtatccaccttgcacccgcaagtcaagccgccccttgtagaaaaatccctccaccttccgttccccgctaggtcaaccccactgtagacaggaaagccaggccaggagagtccgaatgagaatttattgtgaatcgattcccaagctcccttccgggacaagtggtctgggacagggaggagcaacggccccagcgcgcaacgctctgcgcgttcctccgaatcccgtcggcttctcgacccacgcagagaagccccgggcttggcggctctagccccagcgccaaaggagacccgccccagggccgggcttggcctcctgcttcatgggcctggatgcagatctgcgtggctggtgcgtgcgcgcgcttctgggaaacagtcccgcgtgcaaaggaaaggggcaaaatggcacctaagcatcagatggaagcttactctctgcttccgttcctccccctgctcccctacttctcagtccccttcaatttgtagactcttgctcctgcttctcctgatcctgcaaggggacattccagtagaagttttttgctttgtcggtggctgtcgtgaaattgtgcttgtgtttcgtgatttctttgggggtgattgtctcgcttgttttcagttgtcgattatatgggagggttctgggtgggagtggggagggcgaggggcctagagctctaattgtttgttttggaagaaaaaaagaaaaagaacaaaaaatatatatcactctagaaaataaaaaaaaaaaaa

SEQ ID NO: 214261 - DNA, 753 bp, Artificial Sequence
  derived and/or modified sequence
atgagcatctcagggacactgagttcttactacgtcgacagcataatcagtcatgagtctgaggacgccccccctgccaaatttccatctggccagtacgcgagctctcggcaacctggccatgccgagcatctcgaattcccttcctgtagctttcagcctaaggccccagtgttcggagcatcatgggccccactgtccccacacgcctctggtagtttgccctccgtctaccatccttatatccagcctcaaggcgtgccccctgccgagagccgctacctgcgtacatggttagagcctgcccccagaggagaggctgcaccggggcagggacaggccgccgtgaaggccgaaccgctgttgggcgcccccggggagcttctgaaacagggcactccagagtattcacttgaaactagtgcaggcagggaggccgtgctgtcaaaccaaagacctgggtacggagacaacaagatctgcgaaggatctgaagataaggagagacctgaccagaccaacccctcagcaaactggctgcacgcccgctcaagtcgtaagaaaagatgcccttacaccaagtatcagactctggagctggaaaaggagttcctgtttaatatgtacctgacacgcgatcgcaggcacgaagtcgcccgtctactaaatctctccgagcggcaggttaaaatttggtttcaaaaccggcggatgaaaatgaagaagatgaacaaagagcaaggcaaagaatag

SEQ ID NO: 214262 - DNA, 2705 bp, Artificial Sequence
  derived and/or modified sequence
aatcattttgcaaggagagctgagacgggctgctccactgtactttgttggctgagaagttgagcagggggtgggggtgggagggtggggggctgggggggtcgcgtccgaaagccctcacaccggtccgggtgccacctctccctgcttgggcgccgccgcgcgagcgcttcccttccccctgcaagcgcccggataatgtctgagaatgtccatttctgggacgcttagcagctattatgtcgactcgatcataagtcacgagagtgaggacgcgcctccagccaagtttccttctggccagtacgcgagctcgcggcagccgggccacgcggagcacctggagttcccctcgtgcagcttccagcccaaagcgccggtgttcggcgcctcctgggcgccgctgagcccgcacgcgtccgggagcctgccgtccgtctaccacccttacatccagccccagggcgtcccgccggccgagagcaggtacctccgcacctggctggagccggcgccgcgcggcgaagcggccccggggcagggccaggcggcggtgaaggcggagccgctgctgggcgcgcctggggagctgctcaaacagggcacgcccgagtacagtttggaaacttcggcgggcagggaggccgtgctgtctaatcaaagacccggctacggggacaataaaatttgcgaaggaagcgaggacaaagagaggccggatcaaaccaacccctccgccaactggctgcacgctcgctcttcccggaaaaagcgctgtccctacaccaaataccagacgctggagctagagaaggagtttctgttcaatatgtacctcaccagggaccgtaggcacgaagtggccagactcctcaatctgagtgagagacaagtcaaaatctggtttcagaaccggcggatgaaaatgaagaaaatgaataaggagcagggcaaagagtaaagattaaagattacccccagtcctccctagctcttccccatctcactcttagttatgtgacgactgcaaagccagtgctgtctgggatgtattcaagtgaatggggaagggagtctctcttccaagtcctttatctgcacctagaacctccctcctttcctttgcccttacctgtctctctcttctctctaggtgtcaggagaaagttttgttgatttagaagatagaaatagttggttcctaagaatgtgatgggccacaaggaaagagagaccccagtcaagctcctagtatgccctgtaatttttctgggaagtcctagcccctcacttccagcttgcctgtttcttctctacacccacccaaaagtcacccagggacactccaactctacacagctcagcagacatccacacacagtaatggggtgagctcacaaccaccattcagtcaagtgaggtgacactccagttgcagaccatcgcacaccaaatttggcaaaacagccctcagactgtcaggcaagcccgggttctacccctaatgcaaatacccaccagggagatgtctagaggcagactcctgagtgaggtgttgcagcccaaaggctgcagcattgccataccattcccatggagttgccaactattctcaggccaagggccatggggaagatggagcaaacctagcccccaagccggtgggctagaaagtacaagaaaaggcagcacgtggttttatgaagctatcttaggtggagctactccccacctcccaccaacatatacattttgttgcaggaaatgtttaattccgcatgatgtttccctctccttccaacaaaagaaggtcaaactgtgggtcgtagagccttgacaatgttgtcctcctgttcatctgtgcaccacttgacagactgtagcttctcttgctctcgaccggccctgcattcttccgcaccctccctagctctgaaatcaactctcttcggtcgtatccaccttgcacccgcaagtcaagccgccccttgtagaaaaatccctccaccttccgttccccgctaggtcaaccccactgtagacaggaaagccaggccaggagagtccgaatgagaatttattgtgaatcgattcccaagctcccttccgggacaagtggtctgggacagggaggagcaacggccccagcgcgcaacgctctgcgcgttcctccgaatcccgtcggcttctcgacccacgcagagaagccccgggcttggcggctctagccccagcgccaaaggagacccgccccagggccgggcttggcctcctgcttcatgggcctggatgcagatctgcgtggctggtgcgtgcgcgcgcttctgggaaacagtcccgcgtgcaaaggaaaggggcaaaatggcacctaagcatcagatggaagcttactctctgcttccgttcctccccctgctcccctacttctcagtccccttcaatttgtagactcttgctcctgcttctcctgatcctgcaaggggacattccagtagaagttttttgctttgtcggtggctgtcgtgaaattgtgcttgtgtttcgtgatttctttgggggtgattgtctcgcttgttttcagttgtcgattatatgggagggttctgggtgggagtggggagggcgaggggcctagagctctaattgtttgttttggaagaaaaaaagaaaaagaacaaaaaatatatatcactctagaaaataaa

SEQ ID NO: 214263 - DNA, 2516 bp, Artificial Sequence
  derived and/or modified sequence
acaccggtccgggtgccacctctccctgcttgggcgccgccgcgcgagcgcttcccttccccctgcaagcgcccggataatgtctgagaatgtccatttctgggacgcttagcagctattatgtcgactcgatcataagtcacgagagtgaggacgcgcctccagccaagtttccttctggccagtacgcgagctcgcggcagccgggccacgcggagcacctggagttcccctcgtgcagcttccagcccaaagcgccggtgttcggcgcctcctgggcgccgctgagcccgcacgcgtccgggagcctgccgtccgtctaccacccttacatccagccccagggcgtcccgccggccgagagcaggtacctccgcacctggctggagccggcgccgcgcggcggagctgctcaaacagggcacgcccgagtacagtttggaaacttcggcgggcagggaggccgtgctgtctaatcaaagacccggctacggggacaataaaatttgcgaaggaagcgaggacaaagagaggccggatcaaaccaacccctccgccaactggctgcacgctcgctcttcccggaaaaagcgctgtccctacaccaaataccagacgctggagctagagaaggagtttctgttcaatatgtacctcaccagggaccgtaggcacgaagtggccagactcctcaatctgagtgagagacaagtcaaaatctggtttcagaaccggcggatgaaaatgaagaaaatgaataaggagcagggcaaagagtaaagattaaagattacccccagtcctccctagctcttccccatctcactcttagttatgtgacgactgcaaagccagtgctgtctgggatgtattcaagtgaatggggaagggagtctctcttccaagtcctttatctgcacctagaacctccctcctttcctttgcccttacctgtctctctcttctctctaggtgtcaggagaaagttttgttgatttagaagatagaaatagttggttcctaagaatgtgatgggccacaaggaaagagagaccccagtcaagctcctagtatgccctgtaatttttctgggaagtcctagcccctcacttccagcttgcctgtttcttctctacacccacccaaaagtcacccagggacactccaactctacacagctcagcagacatccacacacagtaatggggtgagctcacaaccaccattcagtcaagtgaggtgacactccagttgcagaccatcgcacaccaaatttggcaaaacagccctcagactgtcaggcaagcccgggttctacccctaatgcaaatacccaccagggagatgtctagaggcagactcctgagtgaggtgttgcagcccaaaggctgcagcattgccataccattcccatggagttgccaactattctcaggccaagggccatggggaagatggagcaaacctagcccccaagccggtgggctagaaagtacaagaaaaggcagcacgtggttttatgaagctatcttaggtggagctactccccacctcccaccaacatatacattttgttgcaggaaatgtttaattccgcatgatgtttccctctccttccaacaaaagaaggtcaaactgtgggtcgtagagccttgacaatgttgtcctcctgttcatctgtgcaccacttgacagactgtagcttctcttgctctcgaccggccctgcattcttccgcaccctccctagctctgaaatcaactctcttcggtcgtatccaccttgcacccgcaagtcaagccgccccttgtagaaaaatccctccaccttccgttccccgctaggtcaaccccactgtagacaggaaagccaggccaggagagtccgaatgagaatttattgtgaatcgattcccaagctcccttccgggacaagtggtctgggacagggaggagcaacggccccagcgcgcaacgctctgcgcgttcctccgaatcccgtcggcttctcgacccacgcagagaagccccgggcttggcggctctagccccagcgccaaaggagacccgccccagggccgggcttggcctcctgcttcatgggcctggatgcagatctgcgtggctggtgcgtgcgcgcgcttctgggaaacagtcccgcgtgcaaaggaaaggggcaaaatggcacctaagcatcagatggaagcttactctctgcttccgttcctccccctgctcccctacttctcagtccccttcaatttgtagactcttgctcctgcttctcctgatcctgcaaggggacattccagtagaagttttttgctttgtcggtggctgtcgtgaaattgtgcttgtgtttcgtgatttctttgggggtgattgtctcgcttgttttcagttgtcgattatatgggagggttctgggtgggagtggggagggcgaggggcctagagctctaattgtttgttttggaagaaaaaaagaaaaagaacaaaaaatatatatcactctag

SEQ ID NO: 214264 - DNA, 753 bp, Artificial Sequence
  derived and/or modified sequence
atgagcatcagcggcaccctgagcagctactacgtggacagcatcatcagccatgaaagtgaagatgcccccccagccaagttccccagcggccagtatgccagcagccggcagcccggccacgccgagcacctggagttccccagctgcagcttccagcccaaggcccctgtgtttggagcctcctgggcccccctgagcccccacgccagcggcagcctgcccagcgtgtaccacccctacatccagccccagggcgtgcccccagctgagagccgctacctgcggacctggctggagcccgcccccagaggagaggccgcccctggccagggccaggccgctgtgaaggccgagcccctgctgggcgcccctggagagctgctgaagcagggcaccccagagtacagcctggagaccagcgctggccgggaggccgtgctgagcaaccagaggcctggctatggagacaacaagatctgtgagggcagcgaggacaaggagaggccagaccagaccaaccccagcgccaactggctgcacgcccggagcagcaggaagaagcgctgcccctacaccaagtaccagaccctggagctggagaaggagttcctgttcaacatgtacctgacccgggacagaagacatgaggtggcccggctgctgaacctgtctgagcggcaggtgaagatctggttccagaacagaaggatgaagatgaagaagatgaacaaggagcagggcaaggagtag

SEQ ID NO: 214265 - DNA, 753 bp, Artificial Sequence
  derived and/or modified sequence
atgagcatcagcggcaccctgagcagctactacgtggacagcatcattagtcacgagtccgaggatgcaccacctgccaaattcccgtctggacaatacgcctcgtccagacagcctggtcatgctgagcacctggaattccccagttgcagctttcaacctaaggcgccagtgtttggcgccagctgggccccactgagcccccacgctagcgggtccttaccaagcgtctaccacccttacattcagcctcaaggagtacccccagccgagtctcgttatcttagaacttggttggagccagccccacgcggggaggcggctcctgggcaggggcaagcagctgtcaaggcagagccactcctcggcgcacctggcgaactgttaaagcaagggacgcccgagtattcccttgaaacctcagcggggagggaggcagtcttaagcaatcagcggccaggatacggcgataacaagatttgtgaaggctccgaagacaaagagcggcctgaccagaccaatccatccgccaactggctgcacgccaggtcctctcgaaaaaagcgctgcccctatacgaaataccagacactggagctcgagaaagagtttctcttcaacatgtacctgactcgggatagacgacacgaggtggccaggctgctgaaccttagcgaacgccaggtcaagatctggtttcagaaccgaagaatgaagatgaaaaagatgaacaaagaacagggtaaggagtag

SEQ ID NO: 214266 - DNA, 753 bp, Artificial Sequence
  derived and/or modified sequence
atgagtatcagcggcactctctcaagctactatgtggacagtatcatttctcacgagtcggaggatgctccgcctgctaagttccctagcggccagtatgccagcagtagacagcctggccacgccgagcatctcgaattcccttcttgcagtttccagcccaaagcccctgtcttcggtgctagctgggcccctcttagtcctcacgcctcaggctctctgccatctgtctaccatccatatattcagccgcaaggggtgcctcctgctgagtccagatacctgcgcacctggctggaaccagcccctagaggtgaggctgctcctggccaggggcaggccgctgtaaaggccgagccactcctgggcgcaccaggcgagctgttgaaacagggcactcctgagtatagcctcgagacctctgccggtcgagaggccgtgttatctaaccaacgtcccggttacggagacaataagatctgcgaggggagcgaggacaaagagcggccagaccaaactaatccgagtgcgaactggcttcatgccagaagcagtagaaagaagagatgcccttacacaaagtaccagaccctcgaactcgagaaagagtttttatttaacatgtacctcacccgggataggagacacgaggtggccagattgttaaacctctccgagcgccaggtcaaaatctggttccagaatcgacggatgaagatgaagaaaatgaataaagaacagggtaaggagtag

SEQ ID NO: 214267 - DNA, 753 bp, Artificial Sequence
  derived and/or modified sequence
atgagcatcagcggcaccctgagcagctactacgtggacagcatcatcagccacgagagcgaggacgccccccccgccaagttccccagcggccagtacgccagcagcagacagcccggccacgccgagcacctggagttccccagctgcagcttccagcccaaggcccccgtgttcggcgccagctgggcccccctgagcccccacgccagcggcagcctgcccagcgtgtaccacccctacatccagccccagggcgtgccccccgccgagagcagatacctgagaacctggctggagcccgcccccagaggcgaggccgcccccggccagggccaggccgccgtgaaggccgagcccctgctgggcgcccccggcgagctgctgaagcagggcacccccgagtacagcctggagaccagcgccggcagagaggccgtgctgagcaaccagagacccggctacggcgacaacaagatctgcgagggcagcgaggacaaggagagacccgaccagaccaaccccagcgccaactggctgcacgccagaagcagcagaaagaagagatgcccctacaccaagtaccagaccctggagctggagaaggagttcctgttcaacatgtacctgaccagagacagaagacacgaggtggccagactgctgaacctgagcgagagacaggtgaagatctggttccagaacagaagaatgaagatgaagaagatgaacaaggagcagggcaaggagtag

SEQ ID NO: 214268 - protein, 272 aa, Artificial Sequence
  derived and/or modified sequence
MFVKSETLELKEEEDVLVLLGSASPALAALTPLSSSADEEEEEEPGASGGARRQRGAEAGQGARGGVAAGAEGCRPARLLGLVHDCKRRPSRARAVSRGAKTAETVQRIKKTRRLKANNRERNRMHNLNAALDALREVLPTFPEDAKLTKIETLRFAHNYIWALTETLRLADHCGGGGGGLPGALFSEAVLLSPGGASAALSSSGDSPSPASTWSCTNSPAPSSSVSSNSTSPYSCTLSPASPAGSDMDYWQPPPPDKHRYAPHLPIARDCI

SEQ ID NO: 214269 - DNA, 6123 bp, Artificial Sequence
  derived and/or modified sequence
ggcctcccccgccttggcggccctgaccccgctgtcatccagcgccgacgaagaagaggaggaggagccgggcgcgtcaggcggggcgcgtcggcagcgcggggctgaggccgggcagggggcgcggggcggcgtggctgcgggtgcggagggctgccggcccgcacggctgctgggtctggtacacgattgcaaacggcgcccttcccgggcgcgggccgtctcccgaggcgccaagacggccgagacggtgcagcgcatcaagaagacccgtagactgaaggccaacaaccgcgagcgaaaccgcatgcacaacctcaacgcggcactggacgcgctgcgcgaggtgctccccacgttccccgaggacgccaagctcaccaagatcgagaccctgcgcttcgcccacaactacatctgggcactcaccgagaccctgcgcctggcggatcactgcgggggcggcggcgggggcctgccgggggcgctcttctccgaggcagtgttgctgagcccgggaggagccagcgccgccctgagcagcagcggagacagcccctcgcccgcctccacgtggagttgcaccaacagccccgcgccgtcctcctccgtgtcctccaattccacctccccctacagctgcactttatcgcccgccagcccggccgggtcagacatggactattggcagcccccacctcccgacaagcaccgctatgcacctcacctccccatagccagggattgtatctagagctgccatttctgctacccacgccaggccttagtgggttccctttcctgtccccagtcgagccctcctcccttcccctgcccctcctttccacgccctggaaaccatctcacttcacagggcaggtgtagcctttctgattcctcggttgtttcttgcatttcttggctttgggtatccttcattcagacgggctctgatttactgaaggtgtgatggagcttattgtcaaagccaagggtggcgttttgggggcgcttcttgagacgaaaaagaccctgggaagagatgatggtggcatatctaaagagtttgcagagcggactgacgctcctcccctttctctttaacgccgaaggacttggtgcagttcgtgtgaatctcacagggggaatgcaactggttcctgtgatctcttcacctttgcttctacatagagatgttaatgtcgagtagaaagaaatgtatcttagcatctgaatgattttgctggtaataatattatccacagatttgcaatggctggcatctgctttattcccattgctgtctgcaggctgtgggaatttcacctgtcaaaccaaacttccctctctgatgtgcactttgttctgtttcccagattcgtcacaatgcctattgtcctgtccttctctttcctttttcttccccattttgccatctgtctcttatgatttataaggggaaaaaaacttgttttgttagaggggcaggttagaagtcattgtataatttgtaggctttgtaatgattgaatgcaagcgtggaaatttaggctgaactctctatcaaaaggaaaaatgtggaggaaaagggaaaaatcaggagggaggattgcctcatgtattatttatttcgaccttttaggggagaaggaactcccccattctttcaagagattaaaaataaatcaacagtctgaaaacctaagcagacacggagcattatccggatcagccacacacgtgttcccttctatttattataaagaaatttttcatgggaaaatatgtattttttgtatattctacagagtttattctagtatgtatttacatcttgaagaacaagaaagttgttcttgtgattaaactataaataaactatctaattttcataagtttgtgtgttgtattctacctttttcttgcttatgtgatttttagatgccaaatgagttgtgtttttttgaaattcttcccatgtcaaattgaatatagtacttgtatttttgggcaatgctttgtgtagaatatcactaagaaatcacaaaaagctgaatcatatttgagacactaatattgaaaataagagtgtaactttctatttttaagataaacacacaatttatttctaagaataaatttctgagcaaacaagataagcaaaaaaggggagaagaatttaaatgataattaagtcatgataagctccaagttcagaaaaccttgatttgaaaaaaagtgaagttgaaatttcttggtggagtgtgtagaaatttgttttttgtgcaactcgtttggcttcaattctcatctgtaaactgaagggattggacatgacctccaagggtgctccctttccagctctaacatctgtgatgtaacagtacgtataaattcattattagaagcagatttcctattaggcattttaacaagctagttgcttttaaaagcagactcccagaataaagcagatatttagagtgaactggaattgaaaatatatacagaaatagctccgctttcccaatatttgttaaagcaattacatagtcaaaacttcttcaaagagaaagcaaaaatggtttaacttgcacctcaatctccaaagcagaaatgaatgacctttgattggctttgggtcaaaaatgaccaaatgaaggttgaccacattctatgcttaatccccttggggaagagtgtctatgacaacacaagctaaaaaatatcacattaaaacttggtcgttcacagcacccacctccccacgaatgtcttacctgcatctggttgggctaaaactccactcttctgcacaatgcaataataatttctcctgaggtgtctatctgaaaccactcctctctaataactccattttaatcaaaggaagaactaactcagggtttttgtttcattttttatagccaagcatgagataccttttggtaaatcccttttaatttaaagattgtgttactcttagctgctctttgattatctgacatggggagaaagtgatatttctcttatattcacatttatgtttctaatgtttaaaaagccaagccagcaagcaaaggaattgtaatatgatagtttgaaaacatcagttttggtgctgaacaatgcttcttctggtgatacatttgatgatacatggtgcttcttttggaaacttgccaaagaaatagttcatgacaaaatctcagatgcagctactcctccaactatgggaaaccttctcaattggtgaagccatcccataaaaagatgaccctaatggctaaggtggagaggcagggatggatagatgattcaataatcctagctctgagcaagactaatacagctaatacagacttcactcttgacctagcggactctacacacttcttccaggtccagagtcttgttcaagttctcaaagctggagcttgcaggtccccattacacacaagcagatatatcctaagtgcccgggctttcatctgccatttgcaattcacactcaggctttcccttccccatctagaacacaccttattttacactaaattggcgcaattattttttatggcatctaatcatcttaagcgggtaagaatggtgttctgactgcctcagcgccgagattctctcccctaatccgttgcaaccttcacagccggtggcctgaggcccagtcgttctcttcccttcctagtaggaatgagtacaattagagggtcaaagccgctgcttctgcagtaggcaacaaggtagtatttccattttattcatttccctcccgacattgtgaccgcgctgtgatgagctgcatctgtgtgcaccaagtaggtttgcaggcctcggagccacgccattttatttctggtggctctggtgagagacacttcaaacaacgctgtggagattttcttccggtgacagacacagactctcagtgttgctagatctttccaacgccagctagcgcgctgcggcgcgttttcctaagtgcggagaggcgcgaaggtgggtcctgttctcattggagcgtcgctttagcgcggccggcgttccgggactggctgtatttatttgttctaaagtgctcaggccttgttacggctcatttttccttcactagattttaaatacatccatctgagtgccaagaaggaggaaaaaaaaagtagagaggcggactgccaaccgctgggcccgccacgggagccggacctaggctcagccggaggcaggaggaggggctgaggcttcccgggcccgcagcacctggaccagagccggatgggcgctcctggtgtcccagctgaggcgaaggccctgggcggctttggccaggagggaggaaggacccattcggcacttcccaaagcctagtccgatggcccaggaagggcgtttagacccaaggccggcttcagctgcccacccgccagtctgggtcacaggctgctaaagggccgggcttgagggcgaggctgggagctgcggcgcccccacccgctgggtacacccccctgcattgcacacccttgagctggttgtgacttctgggcaccgacacctggaaccggttaaaagcgcctcctcctcaccgccagcctcggtcttccccgagccccctcgggctcccaagcgagctttgaatgtattaattaaataaagcgggcagctcttgaatcgcgccaatgcagtgcgctcccgggagcgtgaaagtcccggcctccgaatctgcaaaagaaatgtgtgaaaagagaattagtgaaattaggttagaccaataaaacgtgagggctccaatacccccctttctcgctcccccagcctggggctagaagggctatctggtctgatctattgtttcctgccctggcagggggttcattgtgtgataaataattccccctccattttcttttattcttaaaaaaaatgggtatttgcataatcagtgctttgatgtggccagaaatcggaggtttggtctccccaagtctgctattggtagcgaagcaacaaagctagatccagatctttcacttcgctgacagtgtgtggggcagattgtcagaaatagcagcgttaagctgctgccttcttttttaaggaccactttaatgattaaacttaaggaatgtccaaaaaaggagggatgaaagaccagctttctcatcactccacggacacaccccgccccccgcccccccccccatgcttcttattattctctgcagtttcttttccaaagcgcttggtttgggggatggtgcatctcccttggggccgccccacgtggcaccgagtgggcatcggcaggggtcccctagggccaaggaggggccaggtctgcaggagcggttctccttgcccccaacgcgtttttccttccccagtttgatttttccagccgggatggggttcatcttatggaggacgttgaagtgagtcgctctttagtccccgagtggaatgagtgggggttggggggttccctgggaacgcagcttggaggcagtttcagatggtccccgacaggagaggcgagcaaagaaattcagtcatccggaaagcagaacgcgaaagccagtgtggccggacctattatttccctgcaaggtggcgtgagtcgggaggatggaatggggaagaatcctgatggtgtgtgcgttacaacaaacgacttttttccccctctcggtgccagggtcgggggaggggagacaggggtggttctgtctgctttcgctagcattctctgcttctccagctgctcagagcgcgaagggggaaatgccaacttggattactgactgagaacaccgcgtgaaaggccaggcctccctgattacccgggcaggcgccggcttcgcgctccagcctggagaggtgtcaaccgcgtgagagatgctcggcctcccgggatccaaattggagatggaatcagagatggaagggggaaaggaggaggatccttgaaacacctgcacgcccacggtcccactccttctcctcctcggccccgcatctcaccgaactgaccccaggccattcttcagatgtcccagcagcttttggatcgcagagcttcagcggtagttagctcatcgtgaattc

SEQ ID NO: 214270 - DNA, 819 bp, Artificial Sequence
  derived and/or modified sequence
atgtttgttaaatcagagacactggagctcaaagaggaggaagatgtgctagttcttctgggatctgcatccccggcgctggcggccctgacccccttatcctcctctgccgacgaggaagaggaggaagaaccaggagcatctggaggggctaggcgccagcgtggggcggaggcgggacaaggcgcccgagggggtgtcgccgcaggcgcagaaggctgtcggcctgcccgcctgctcgggttagtgcacgactgtaagcgcagaccctcaagagccagagccgtgtcccgcggggctaagaccgcagaaaccgtgcagcgcattaagaaaacccgtcgcctgaaggctaacaacagggagcgcaatcgcatgcataacctgaacgccgccctggacgccctacgcgaagtgcttcccacttttccggaagatgctaagttaaccaaaatagagactctcaggttcgctcacaactatatttgggctcttactgaaacgctcaggctcgccgaccactgtgggggcggaggcgggggcctcccgggagccctcttcagcgaggcagtattgctgtctcccggtggagcaagcgcagccctcagctcatctggagatagcccgtcaccggcatcaacctggtcttgcacaaattccccagctccttccagcagtgtgagctcgaactctacatccccgtactcatgtacactgagccccgcgagtcctgccggctctgacatggattactggcaaccccccccaccagacaagcatcgttatgccccacacctgcctattgccagggactgtatatag

SEQ ID NO: 214271 - DNA, 2287 bp, Artificial Sequence
  derived and/or modified sequence
cgcagccactgaaccacaagcagcttcgcgttaactggagtgcctgggagtcgcgtgccaggagccgcacggccagggactgactgacagacagacacgcaccaccaccacaacacacgagacccgggcgggccgccgccgccgccgccggggctcttggcaaactcgccggtcgcagaggtcccccgcggagctgcgccacagtagcgccgggcttgcagctttcacgccgggcgaaggacccggcgctgcgctcgcagctgcgcggagattcccggcacaggccaaagtcacagcaacgctgaggcacagttagagccaactaagatgttcgtcaaatccgagaccttggagttgaaggaggaagaggacgtgttagtgctgctcggatcggcctcccccgccttggcggccctgaccccgctgtcatccagcgccgacgaagaagaggaggaggagccgggcgcgtcaggcggggcgcgtcggcagcgcggggctgaggccgggcagggggcgcggggcggcgtggctgcgggtgcggagggctgccggcccgcacggctgctgggtctggtacacgattgcaaacggcgcccttcccgggcgcgggccgtctcccgaggcgccaagacggccgagacggtgcagcgcatcaagaagacccgtagactgaaggccaacaaccgcgagcgaaaccgcatgcacaacctcaacgcggcactggacgcgctgcgcgaggtgctccccacgttccccgaggacgccaagctcaccaagatcgagaccctgcgcttcgcccacaactacatctgggcactcaccgagaccctgcgcctggcggatcactgcgggggcggcggcgggggcctgccgggggcgctcttctccgaggcagtgttgctgagcccgggaggagccagcgccgccctgagcagcagcggagacagcccctcgcccgcctccacgtggagttgcaccaacagccccgcgccgtcctcctccgtgtcctccaattccacctccccctacagctgcactttatcgcccgccagcccggccgggtcagacatggactattggcagcccccacctcccgacaagcaccgctatgcacctcacctccccatagccagggattgtatctagagctgccatttctgctacccacgccaggccttagtgggttccctttcctgtccccagtcgagccctcctcccttcccctgcccctcctttccacgccctggaaaccatctcacttcacagggcaggtgtagcctttctgattcctcggttgtttcttgcatttcttggctttgggtatccttcattcagacgggctctgatttactgaaggtgtgatggagcttattgtcaaagccaagggtggcgttttgggggcgcttcttgagacgaaaaagaccctgggaagagatgatggtggcatatctaaagagtttgcagagcggactgacgctcctcccctttctctttaacgccgaaggacttggtgcagttcgtgtgaatctcacagggggaatgcaactggttcctgtgatctcttcacctttgcttctacatagagatgttaatgtcgagtagaaagaaatgtatcttagcatctgaatgattttgctggtaataatattatccacagatttgcaatggctggcatctgctttattcccattgctgtctgcaggctgtgggaatttcacctgtcaaaccaaacttccctctctgatgtgcactttgttctgtttcccagattcgtcacaatgcctattgtcctgtccttctctttcctttttcttccccattttgccatctgtctcttatgatttataaggggaaaaaaacttgttttgttagaggggcaggttagaagtcattgtataatttgtaggctttgtaatgattgaatgcaagcgtggaaatttaggctgaactctctatcaaaaggaaaaatgtggaggaaaagggaaaaatcaggagggaggattgcctcatgtattatttatttcgaccttttaggggagaaggaactcccccattctttcaagagattaaaaataaatcaacagtctgaaaacctaagcagacacggagcattatccggatcagccacacacgtgttcccttctatttattataaagaaatttttcatgggaaaatatgtattttttgtatattctacagagtttattctagtatgtatttacatcttgaagaacaagaaagttgttcttgtgattaaactataaataaactatctaattttcataa

SEQ ID NO: 214272 - DNA, 819 bp, Artificial Sequence
  derived and/or modified sequence
atgtttgtgaagtctgagaccctggagctgaaggaggaggaggatgtgctggtgctgctgggcagcgccagccctgccctggccgccctgacccccctgagcagcagcgcagatgaggaggaggaggaggagcccggggccagcggcggggcccggcggcagagaggagctgaggccggccagggcgcccggggcggcgtggccgccggggctgagggctgcaggcctgcccggctgctgggcctggtgcatgactgcaagaggcggcccagccgggcccgggctgtgtccagaggagccaagacagctgagaccgtgcagaggatcaagaagacccggcggctgaaggccaacaaccgggagaggaacaggatgcacaacctgaatgctgccctggatgccctgcgggaggtgctgcccaccttcccagaagatgccaagctgaccaagattgagaccctgcgctttgcccacaactacatctgggccctgacagagaccctgcggctggccgaccactgcggcggcggcggcggcggcctgcccggggccctcttcagcgaggccgtgctgctgagccctgggggcgccagcgctgccctgagcagcagcggggacagccccagccctgccagcacctggagctgcaccaacagccctgcccccagcagctctgtgagcagcaacagcaccagcccctacagctgcaccctgagccctgccagccctgctggcagtgacatggactactggcagcccccacctccagacaagcacagatatgccccccacctgcccatcgcccgggactgcatctag

SEQ ID NO: 214273 - DNA, 819 bp, Artificial Sequence
  derived and/or modified sequence
atgttcgtgaagagcgagaccctggagctgaaggaggaggaggacgtattggttctgctgggttccgccagccccgcgcttgcagccctgaccccactgagtagtagcgccgatgaagaagaggaggaggagcccggagcaagcggcggggccagaaggcagaggggtgccgaggcagggcagggcgcccgcggcggtgtggcggccggagctgagggctgccgaccggctcggctgcttggcttggtgcacgattgcaagcgtcgtccttcccgtgctcgcgcagtgagccgcggtgccaagacggcagagaccgtccagagaatcaaaaagactaggcgcctgaaggccaacaacagggagaggaacaggatgcacaaccttaatgctgctctggatgctctgcgggaggtgcttccgaccttccccgaggatgccaaactaaccaagatcgaaactctgcgcttcgcacacaattacatatgggcactcactgagaccctgcggctggctgaccattgcgggggaggaggcggtggactgcccggagccttgtttagcgaggctgtcctgctgtccccaggtggagctagcgctgctcttagcagcagcggcgattcaccaagtcctgcgagcacttggagctgtaccaacagcccagcgccgtccagctctgtgtcgtccaacagtacctctccatactcctgcacattatctccagctagcccggccggcagcgacatggattattggcaaccacctccacccgacaagcacagatatgcacctcaccttccaattgctcgcgactgcatatag

SEQ ID NO: 214274 - DNA, 819 bp, Artificial Sequence
  derived and/or modified sequence
atgtttgtaaaatctgagaccttggagctgaaagaggaggaggacgtgcttgttctgttaggtagcgcttcccccgctttggccgcattgacacccctttcaagttccgctgatgaggaagaggaagaggagcctggcgcttctggaggagccaggaggcagcgcggtgcagaagcagggcagggagccagaggcggagtagccgctggtgccgaaggctgtagacccgcaaggcttctaggcttggttcacgactgtaaacgtcgtccttcaagagctcgcgctgtgtcacggggtgcaaagactgctgaaacagtccagagaattaagaaaactcgaaggctcaaggcaaacaaccgagaaagaaatagaatgcacaatttgaatgctgccttagacgcactgagggaagttttgcccaccttcccagaagatgctaagctgacgaagattgaaaccctgcggttcgcccacaactacatctgggccctcactgagactctgaggttggctgatcattgcggagggggaggcggaggtctccctggtgcgctgtttagtgaggctgtgctgttgtctcccggaggtgctagtgccgcactctcctcttctggggactctccgtcccctgcatctacatggtcatgcaccaacagcccagctccaagcagttccgtctcaagcaatagcacatctccatactcttgtactctgtcgccggcatccccagccggaagtgatatggactactggcagcctccgcctcctgacaagcacagatatgctcctcacctacctatcgctcgtgactgcatttag

SEQ ID NO: 214275 - DNA, 819 bp, Artificial Sequence
  derived and/or modified sequence
atgttcgtgaagagcgagaccctggagctgaaggaggaggaggacgtgctggtgctgctgggcagcgccagccccgccctggccgccctgacccccctgagcagcagcgccgacgaggaggaggaggaggagcccggcgccagcggcggcgccagaagacagagaggcgccgaggccggccagggcgccagaggcggcgtggccgccggcgccgagggctgcagacccgccagactgctgggcctggtgcacgactgcaagagaagacccagcagagccagagccgtgagcagaggcgccaagaccgccgagaccgtgcagagaatcaagaagaccagaagactgaaggccaacaacagagagagaaacagaatgcacaacctgaacgccgccctggacgccctgagagaggtgctgcccaccttccccgaggacgccaagctgaccaagatcgagaccctgagattcgcccacaactacatctgggccctgaccgagaccctgagactggccgaccactgcggcggcggcggcggcggcctgcccggcgccctgttcagcgaggccgtgctgctgagccccggcggcgccagcgccgccctgagcagcagcggcgacagccccagccccgccagcacctggagctgcaccaacagccccgcccccagcagcagcgtgagcagcaacagcaccagcccctacagctgcaccctgagccccgccagccccgccggcagcgacatggactactggcagccccccccccccgacaagcacagatacgccccccacctgcccatcgccagagactgcatctag

SEQ ID NO: 214276 - DNA, 162 bp, Artificial Sequence
  derived and/or modified sequence
atggaggccgccggcggcttccaggtgcacttccaccccagcaatggagatggccgcttcatcgagaccagcagcgctgctgacctggaggtgatctcctacagcagcaaggtgtctgtgacagagcgctgcttcatcaaggtgtgcaccgtgctcttctag

SEQ ID NO: 214277 - DNA, 162 bp, Artificial Sequence
  derived and/or modified sequence
atggaggccgccggcggcttccaggtgcacttccaccccagcaacggggacggccggttcatcgaaacatctagtgccgccgatctcgaagtgatatcttactcttccaaagtgagcgtgaccgagcggtgttttatcaaagtttgtactgtcctgttttag

SEQ ID NO: 214278 - DNA, 162 bp, Artificial Sequence
  derived and/or modified sequence
atggaggccgccggcggcttccaggtgcacttccaccccagcaacggggacggccgttttattgagacatcaagcgcagcagaccttgaggttatcagttactctagcaaagtctccgtgaccgagcgctgcttcataaaagtgtgcacggtgctattttag

SEQ ID NO: 214279 - DNA, 663 bp, Artificial Sequence
  derived and/or modified sequence
atgactaccatgcagggtatggaacaggcaatgcccggcgccggacccggagttccccagctgggcaatatggctgtgatccacagccatctctggaagggccttcaggaaaagttcctaaagggggagcccaaggtgctcggcgtagttcaaattctaacggctctcatgagtttaagcatgggaataaccatgatgtgcatggcatcgaatacttacggcagcaaccccatctctgtatatatcggctacacgatctggggaagtgtaatgttcatcatatctggttcactttctattgcagctggaattagaaccacaaaaggcctggtcagagggagtctgggcatgaacattacgtctagcgtgttggcagccagcggaatcctgataaacacattctcactcgccttttattcatttcaccatccctattgtaactactacgggaatagcaacaactgccacggaaccatgtcaatcctgatgggcctcgatgggatggtcctcctgttatcagtgctggaattctgtattgcagtgagcctcagcgcatttggatgtaaagtcttgtgttgtactcctggaggggtggtgctcatcctccccagccactcccatatggccgagacagccagtccaacaccacttaatgaagtttag

SEQ ID NO: 214280 - DNA, 663 bp, Artificial Sequence
  derived and/or modified sequence
atgacaaccatgcaaggcatggaacaagctatgccaggagccggaccaggcgtgccgcagcttgggaacatggctgtgattcattctcatttatggaaggggctgcaggagaaatttctcaagggggaacccaaggtactcggcgtggtacaaatcctcaccgctcttatgtccctgtccatgggaatcactatgatgtgtatggcttctaatacatacggctcaaacccaatctccgtatatatcggctacacaatctggggctcagtcatgttcattatctctggtagtctttccatcgccgccggaatcagaaccacaaaagggctggtgcgtggcagtctaggaatgaatattacaagctccgtccttgctgcaagcgggatcctgattaataccttcagtctcgcattttactccttccaccacccttattgcaactactatggcaacagtaacaattgccacgggacgatgtctatcctgatggggctggacggaatggtgctgttgctgtcggttctggagttctgtatcgcagtgagcctgagcgcttttgggtgcaaagttctgtgctgtactcccgggggcgtggtgctgatactgccatcccactctcacatggctgagaccgcttctcctacgcccttgaacgaggtgtag

SEQ ID NO: 214281 - DNA, 663 bp, Artificial Sequence
  derived and/or modified sequence
atgaccaccatgcagggcatggagcaggccatgcctggggccggccctggggtgccccagctgggcaacatggctgtgatccacagccacctgtggaagggcctgcaggagaagttcctgaagggggagcccaaggtgctgggcgtggtgcagatcctgacagccctgatgagcctgtccatgggcatcaccatgatgtgcatggccagcaacacctacggcagcaaccccatctctgtgtacatcggctacaccatctggggctctgtgatgttcatcatcagcggcagcctgagcattgctgctggcatccgcaccaccaagggcctggtgcggggcagcctgggcatgaacatcaccagctctgtgctggccgccagcggcatcctgatcaacaccttcagcctggccttctacagcttccaccacccctactgcaactactacggcaacagcaacaactgccacggcaccatgagcatcctgatgggcctggatggcatggtgctgctgctgtctgtgctggagttctgcatcgctgtgtccctgagcgccttcggctgcaaggtgctgtgctgcaccccaggaggagtggtgctgatcctgcccagccacagccacatggccgagacagccagccccacccccctgaatgaggtgtag

SEQ ID NO: 214282 - DNA, 663 bp, Artificial Sequence
  derived and/or modified sequence
atgaccaccatgcagggcatggagcaggccatgcccggcgccggccctggcgtccctcagcttggcaatatggcagttatccatagccacttgtggaaaggcctccaggagaagtttctgaaaggagaacctaaagtgctaggcgtcgtccagatcctcaccgccttgatgtcccttagtatggggattaccatgatgtgcatggcttctaacacatatggttcgaaccctatttccgtgtacattggatacacaatatggggctctgtgatgtttattatcagtgggtctctgtcaattgccgcaggtattcggacgactaagggcctcgtccgcggctcattggggatgaatataacatcttcagtgctggcagccagcggtatcctgattaacacattttctttggcattttatagcttccaccacccctactgcaactattacggaaatagcaataattgccatggcacaatgtctatcctcatggggctggatgggatggtcctgctgcttagcgtactggaattttgtatcgcggtaagcctgtctgcattcggatgtaaggtgctgtgctgtacgccaggcggcgtggtactgattctcccctcacactcgcatatggctgaaacagcctcacccactccactgaatgaggtatag

SEQ ID NO: 214283 - DNA, 663 bp, Artificial Sequence
  derived and/or modified sequence
atgaccaccatgcagggcatggagcaggccatgcccggcgccggccccggggtgccgcaactaggaaacatggccgtcatccactcacacttgtggaaagggctgcaagagaaatttttgaagggcgagcccaaggtattgggagtagtccagatccttaccgccttaatgtcgctgagcatggggatcacaatgatgtgtatggcttcaaatacatacgggtcgaacccaattagcgtctacattggttataccatatggggcagtgtaatgttcataattagcggttcattgtccattgctgcagggattcgtactaccaagggtctggtgcgtggaagcctgggaatgaacattacaagtagcgtcctcgcggcctctgggatcctcatcaacacgtttagccttgccttttactcctttcaccacccctactgtaattactacggtaattctaacaattgtcacggcacaatgtcgatcctcatgggtctcgatgggatggtgttactgttaagcgtgctcgaattctgtattgcagtgtcactttctgcctttggctgtaaggttctttgctgtaccccaggcggagtggtcctcattctaccctctcacagccatatggcggaaacagcctcccccacacctctgaatgaagtgtag

SEQ ID NO: 214284 - DNA, 663 bp, Artificial Sequence
  derived and/or modified sequence
atgaccacaatgcaggggatggagcaagcgatgcctggggctggtcccggagttcctcagctggggaacatggccgtcatccatagccatctgtggaaaggcctgcaagaaaaattcctcaagggggaaccaaaggtactgggggttgtccagatcctgacagctctgatgtctctgagtatgggtattaccatgatgtgtatggcttcaaatacttacggctccaatcccattagtgtgtacatcggatacacaatttggggatcggtcatgttcataatcagtggctctctatcgatcgccgcaggaatccggactaccaaaggcctggttcgtgggagcctaggcatgaacatcacaagctccgtgcttgccgcttccgggatcctgatcaatacattcagcctcgctttttattcctttcaccacccatattgcaactattacgggaattccaataactgccatggaacgatgtcgattctcatgggtctggacggcatggtacttctgctctccgtccttgagttctgcatcgctgtgtctctttccgcttttggctgcaaggttttgtgttgcacacccggaggtgtggtgctgattctgcctagtcacagtcatatggcggaaacggctagcccaacacctctgaacgaagtgtag

SEQ ID NO: 214285 - DNA, 663 bp, Artificial Sequence
  derived and/or modified sequence
atgaccaccatgcagggcatggagcaagccatgcctggcgcagggcctggtgttcctcaactaggaaatatggccgtaattcactcgcatctgtggaaaggcctgcaggaaaaattccttaaaggcgaacccaaagtcctcggagttgttcaaattttgactgccttgatgagtttatccatgggcattacaatgatgtgtatggcaagtaatacgtatggctccaacccaatctctgtgtatatagggtacacaatctggggcagcgtgatgtttataatttcagggagtctgtccattgccgctggtatcagaacaacaaaagggctggtgcgtggctcactcggaatgaacattacttctagcgtgctggccgctagcggcatcctcatcaacacctttagcttagcattctattcttttcatcatccttactgtaattattacggaaattccaataattgccacggaaccatgagcatcctgatgggactggacgggatggtgctgctgctgagcgtgcttgagttctgcattgctgtgtcactgtctgctttcggctgtaaggtcttgtgctgcacccccggtggcgtggtcctaattttaccctctcacagtcatatggctgagactgcctcccccacccccttgaacgaggtctag

SEQ ID NO: 214286 - DNA, 663 bp, Artificial Sequence
  derived and/or modified sequence
atgaccaccatgcagggcatggagcaggccatgcccggcgccggccccggcgtgccccagctgggcaacatggccgtgatccacagccacctgtggaagggcctgcaggagaagttcctgaagggcgagcccaaggtgctgggcgtggtgcagatcctgaccgccctgatgagcctgagcatgggcatcaccatgatgtgcatggccagcaacacctacggcagcaaccccatcagcgtgtacatcggctacaccatctggggcagcgtgatgttcatcatcagcggcagcctgagcatcgccgccggcatcagaaccaccaagggcctggtgagaggcagcctgggcatgaacatcaccagcagcgtgctggccgccagcggcatcctgatcaacaccttcagcctggccttctacagcttccaccacccctactgcaactactacggcaacagcaacaactgccacggcaccatgagcatcctgatgggcctggacggcatggtgctgctgctgagcgtgctggagttctgcatcgccgtgagcctgagcgccttcggctgcaaggtgctgtgctgcacccccggcggcgtggtgctgatcctgcccagccacagccacatggccgagaccgccagccccacccccctgaacgaggtgtag

SEQ ID NO: 214287 - protein, 454 aa, Artificial Sequence
  derived and/or modified sequence
MGENDPPAVEAPFSFRSLFGLDDLKISPVAPDADAVAAQILSLLPLKFFPIIVIGIIALILALAIGLGIHFDCSGKYRCRSSFKCIELIARCDGVSDCKDGEDEYRCVRVGGQNAVLQVFTAASWKTMCSDDWKGHYANVACAQLGFPSYVSSDNLRVSSLEGQFREEFVSIDHLLPDDKVTALHHSVYVREGCASGHVVTLQCTACGHRRGYSSRIVGGNMSLLSQWPWQASLQFQGYHLCGGSVITPLWIITAAHCVYDLYLPKSWTIQVGLVSLLDNPAPSHLVEKIVYHSKYKPKRLGNDIALMKLAGPLTFNEMIQPVCLPNSEENFPDGKVCWTSGWGATEDGAGDASPVLNHAAVPLISNKICNHRDVYGGIISPSMLCAGYLTGGVDSCQGDSGGPLVCQERRLWKLVGATSFGIGCAEVNKPGVYTRVTSFLDWIHEQMERDLKT

SEQ ID NO: 214288 - protein, 538 aa, Artificial Sequence
  derived and/or modified sequence
MQAVGPKPLPTLLCGGRTGHRTARVLSFLIRSCPCEPGKGCVYGKPVTLWPTISSVVPSTFLGLGNYEVEVEAEPDVRGPEIVTMGENDPPAVEAPFSFRSLFGLDDLKISPVAPDADAVAAQILSLLPLKFFPIIVIGIIALILALAIGLGIHFDCSGKYRCRSSFKCIELIARCDGVSDCKDGEDEYRCVRVGGQNAVLQVFTAASWKTMCSDDWKGHYANVACAQLGFPSYVSSDNLRVSSLEGQFREEFVSIDHLLPDDKVTALHHSVYVREGCASGHVVTLQCTACGHRRGYSSRIVGGNMSLLSQWPWQASLQFQGYHLCGGSVITPLWIITAAHCVYDLYLPKSWTIQVGLVSLLDNPAPSHLVEKIVYHSKYKPKRLGNDIALMKLAGPLTFNEMIQPVCLPNSEENFPDGKVCWTSGWGATEDGAGDASPVLNHAAVPLISNKICNHRDVYGGIISPSMLCAGYLTGGVDSCQGDSGGPLVCQERRLWKLVGATSFGIGCAEVNKPGVYTRVTSFLDWIHEQMERDLKT

SEQ ID NO: 214289 - DNA, 1365 bp, Artificial Sequence
  derived and/or modified sequence
atgggcgagaacgacccccccgccgtggaggcccccttcagcttcagaagcctgttcggcctggacgacctgaagatcagccccgtggcccccgacgccgacgccgtggccgcccagatcctgagcctgctgcccctgaagttcttccccatcatcgtgatcggcatcatcgccctgatcctggccctggccatcggcctgggcatccacttcgactgcagcggcaagtacagatgcagaagcagcttcaagtgcatcgagctgatcgccagatgcgacggcgtgagcgactgcaaggacggcgaggacgagtacagatgcgtgagagtgggcggccagaacgccgtgctgcaggtgttcaccgccgccagctggaagaccatgtgcagcgacgactggaagggccactacgccaacgtggcctgcgcccagctgggcttccccagctacgtgagcagcgacaacctgagagtgagcagcctggagggccagttcagagaggagttcgtgagcatcgaccacctgctgcccgacgacaaggtgaccgccctgcaccacagcgtgtacgtgagagagggctgcgccagcggccacgtggtgaccctgcagtgcaccgcctgcggccacagaagaggctacagcagcagaatcgtgggcggcaacatgagcctgctgagccagtggccctggcaggccagcctgcagttccagggctaccacctgtgcggcggcagcgtgatcacccccctgtggatcatcaccgccgcccactgcgtgtacgacctgtacctgcccaagagctggaccatccaggtgggcctggtgagcctgctggacaaccccgcccccagccacctggtggagaagatcgtgtaccacagcaagtacaagcccaagagactgggcaacgacatcgccctgatgaagctggccggccccctgaccttcaacgagatgatccagcccgtgtgcctgcccaacagcgaggagaacttccccgacggcaaggtgtgctggaccagcggctggggcgccaccgaggacggcgccggcgacgccagccccgtgctgaaccacgccgccgtgcccctgatcagcaacaagatctgcaaccacagagacgtgtacggcggcatcatcagccccagcatgctgtgcgccggctacctgaccggcggcgtggacagctgccagggcgacagcggcggccccctggtgtgccaggagagaagactgtggaagctggtgggcgccaccagcttcggcatcggctgcgccgaggtgaacaagcccggcgtgtacaccagagtgaccagcttcctggactggatccacgagcagatggagagagacctgaagacctag

SEQ ID NO: 214290 - DNA, 1617 bp, Artificial Sequence
  derived and/or modified sequence
atgcaggccgtgggccccaagcccctgcccaccctgctgtgcggcggcagaaccggccacagaaccgccagagtgctgagcttcctgatcagaagctgcccctgcgagcccggcaagggctgcgtgtacggcaagcccgtgaccctgtggcccaccatcagcagcgtggtgcccagcaccttcctgggcctgggcaactacgaggtggaggtggaggccgagcccgacgtgagaggccccgagatcgtgaccatgggcgagaacgacccccccgccgtggaggcccccttcagcttcagaagcctgttcggcctggacgacctgaagatcagccccgtggcccccgacgccgacgccgtggccgcccagatcctgagcctgctgcccctgaagttcttccccatcatcgtgatcggcatcatcgccctgatcctggccctggccatcggcctgggcatccacttcgactgcagcggcaagtacagatgcagaagcagcttcaagtgcatcgagctgatcgccagatgcgacggcgtgagcgactgcaaggacggcgaggacgagtacagatgcgtgagagtgggcggccagaacgccgtgctgcaggtgttcaccgccgccagctggaagaccatgtgcagcgacgactggaagggccactacgccaacgtggcctgcgcccagctgggcttccccagctacgtgagcagcgacaacctgagagtgagcagcctggagggccagttcagagaggagttcgtgagcatcgaccacctgctgcccgacgacaaggtgaccgccctgcaccacagcgtgtacgtgagagagggctgcgccagcggccacgtggtgaccctgcagtgcaccgcctgcggccacagaagaggctacagcagcagaatcgtgggcggcaacatgagcctgctgagccagtggccctggcaggccagcctgcagttccagggctaccacctgtgcggcggcagcgtgatcacccccctgtggatcatcaccgccgcccactgcgtgtacgacctgtacctgcccaagagctggaccatccaggtgggcctggtgagcctgctggacaaccccgcccccagccacctggtggagaagatcgtgtaccacagcaagtacaagcccaagagactgggcaacgacatcgccctgatgaagctggccggccccctgaccttcaacgagatgatccagcccgtgtgcctgcccaacagcgaggagaacttccccgacggcaaggtgtgctggaccagcggctggggcgccaccgaggacggcgccggcgacgccagccccgtgctgaaccacgccgccgtgcccctgatcagcaacaagatctgcaaccacagagacgtgtacggcggcatcatcagccccagcatgctgtgcgccggctacctgaccggcggcgtggacagctgccagggcgacagcggcggccccctggtgtgccaggagagaagactgtggaagctggtgggcgccaccagcttcggcatcggctgcgccgaggtgaacaagcccggcgtgtacaccagagtgaccagcttcctggactggatccacgagcagatggagagagacctgaagacctag

SEQ ID NO: 214291 - DNA, 1365 bp, Artificial Sequence
  derived and/or modified sequence
atgggcgagaatgatcccccagctgttgaagctcccttcagcttcagaagcctgtttggcttagacgatttgaagatttcccctgtggcccccgatgctgatgcagttgcagcccagatattgagccttctgcccctgaaattcttcccgattatcgtaatcggaatcattgctttgatcctcgcactagccataggtctgggtattcacttcgattgttccggaaaatatcgttgccgcagctcctttaaatgtatcgagctaattgcaaggtgcgacggggtgtctgattgtaaggatggggaagacgaataccgttgcgttcgcgtcggtggccagaacgcagtactgcaggtttttaccgccgcgtcctggaaaactatgtgtagcgacgactggaaagggcactatgcgaatgtcgcctgtgcccaactgggttttccatcatacgtatcctctgataatctgcgggtcagtagtctggagggccaattccgggaggaattcgtttccatcgatcatctcctcccagacgacaaggttaccgccttgcaccattccgtttacgtccgtgaggggtgtgcatcaggacacgttgtgaccttgcagtgtactgcttgcggtcacaggaggggctacagctctcgcatcgtgggtgggaacatgtccttactgtcgcagtggccctggcaggcctctctgcagttccaaggttaccacctgtgcggcggatcagtcattacacctctgtggatcattactgctgcccactgtgtgtacgatctgtaccttcccaagtcatggactattcaggttggcttggtgagcctgctggataacccagcacctagtcaccttgttgagaagattgtgtaccatagcaagtacaaaccaaagcgattaggaaatgatattgcgctcatgaagttagctggcccgctcacttttaatgaaatgatccagccagtctgtttgcccaatagtgaggagaattttcctgacgggaaggtgtgctggacaagcggctggggagctacagaagatggtgccggagatgccagccctgtgctaaatcatgctgcagtgccactgatatccaacaagatctgcaatcatagggatgtgtatggtggcattatcagtcctagtatgctgtgtgccggatatttaacagggggagtggactcatgccagggggactcggggggacctctggtatgtcaggagcgcaggttgtggaaactcgtgggagccacctctttcgggatcgggtgtgctgaggtcaacaagccaggcgtttacacccgagttacctctttcttggattggattcacgaacagatggaaagagacctgaaaacgtag

SEQ ID NO: 214292 - DNA, 1617 bp, Artificial Sequence
  derived and/or modified sequence
atgcaggcagtggggccgaagccactgcccacccttctctgcggcggaaggacagggcacagaaccgctcgtgtgctctccttcctcatccggtcctgcccctgcgaacccgggaaaggctgtgtctacggcaagccggtcaccctgtggcccactatctccagtgtggtaccgtcgacttttcttggtctgggaaactacgaagtggaggttgaggcagaacctgacgtaaggggtcccgagatcgtgacaatgggcgagaacgatccccctgctgtagaggcccctttcagcttccggtccctctttggcctggacgatctgaagatcagtcccgtggcccctgatgctgacgcagtggctgcacaaatcctgtctcttctgcctctgaagttctttcctataattgtcatcggtatcatagcccttatacttgccctcgcaataggactggggattcacttcgattgctctggaaaatatagatgtcgctcatcctttaaatgtatcgaactgatagctcgatgcgacggcgtgtccgattgcaaagacggcgaggatgagtatcgatgtgtcagagtcggtggccagaatgccgtcctgcaagtatttaccgccgccagctggaaaactatgtgctctgacgattggaaggggcattatgctaacgtcgcttgcgcccagctgggttttccgtcatacgttagcagcgacaacctaagagtgagttctttagagggtcaatttagagaggagttcgtaagtattgaccacctgttacccgacgataaagttacagccttgcaccactcagtgtatgtgagagagggttgtgcctcaggccacgttgtgaccctgcaatgcaccgcttgcgggcataggcggggctacagcagccgaatagtgggtggaaatatgtccctattaagccagtggccttggcaggcctctttgcagtttcagggataccatctatgtggcggatcagtcatcacaccactgtggatcattacagccgcccattgtgtgtacgatttgtatttgccgaaaagctggaccatccaggtcggcctcgtgagccttctcgacaaccccgccccatctcacctcgttgaaaagattgtctatcacagcaagtacaagcccaagcgcctgggtaatgatattgctttaatgaagttggccgggcctctcacctttaacgagatgattcagcctgtgtgccttcctaacagtgaggaaaacttcccagacggaaaagtatgctggactagtggctggggtgccaccgaggatggggccggtgacgccagtccagtgctaaatcatgccgctgtgccgctcatctccaacaagatctgcaatcatcgggacgtgtacggggggattattagcccatctatgttgtgcgcggggtacctgactgggggggtggactcctgccagggggactccggggggccattggtctgccaggagcggaggctttggaagcttgtgggcgctacctcgttcggcattgggtgtgcagaggtgaataagccaggagtatatacaagagttacgtcctttttggattggattcatgaacagatggagcgcgacctgaagacttag

SEQ ID NO: 214293 - DNA, 1365 bp, Artificial Sequence
  derived and/or modified sequence
atgggagaaaatgaccccccagctgtggaggcccccttctccttccgcagcctgtttggcctggatgacctgaagatcagccctgtggccccagatgctgatgctgtggccgcccagatcctgagcctgctgcccctgaagttcttccccatcatcgtcatcggcatcatcgccctgatcctggccctggccatcggcctgggcatccactttgactgcagcggcaagtaccgctgccgcagcagcttcaagtgcatcgagctgattgcccgctgtgatggagtgtctgactgcaaggatggagaagatgagtaccgctgtgtgcgggtgggcggccagaatgctgtgctgcaggtgttcaccgctgcctcctggaagaccatgtgcagtgatgactggaagggccactacgccaacgtggcctgtgcccagctgggcttccccagctatgtgtccagtgacaacctgcgggtgagcagcctggagggccagttccgggaggagtttgtgtccattgaccacctgctgcctgatgacaaggtgacagccctgcaccacagcgtgtatgtgcgggagggctgtgccagcggccacgtggtgaccctgcagtgcacagcctgtggccaccggcggggctacagcagcagaattgtgggcggcaacatgagcctgctgagccagtggccctggcaggccagcctgcagttccagggctaccacctgtgtggcggcagcgtcatcacccccctgtggatcatcacagctgcccactgtgtgtatgacctgtacctgcccaagtcctggaccatccaggtgggcctggtgtccctgctggacaacccagcccccagccacctggtggagaagatcgtgtaccacagcaagtacaagcccaagaggctgggcaatgacatcgccctgatgaagctggccggccccctgaccttcaatgagatgatccagcctgtgtgcctgcccaacagcgaggagaacttcccagatggcaaggtgtgctggaccagcggctggggcgccacagaagatggagctggagatgccagccctgtgctgaaccacgccgctgtgcccctcatcagcaacaagatctgcaaccacagagatgtgtatggaggcatcatcagccccagcatgctgtgtgccggctacctgactggaggagtggacagctgccagggcgacagcggcggccccctggtgtgccaggagcggcggctgtggaagctggtgggcgccaccagctttggaattggctgtgccgaggtgaacaagccaggagtgtacaccagggtgaccagcttcctggactggattcatgagcagatggagcgggacctgaagacctag

SEQ ID NO: 214294 - DNA, 1617 bp, Artificial Sequence
  derived and/or modified sequence
atgcaggccgtgggccccaagcccctgcccaccctgctgtgtggcggccgcacaggccacaggacagcccgggtgctgtccttcctgatccgcagctgcccctgtgagcccgggaagggctgtgtgtatggcaagcctgtgaccctgtggcccaccatcagctctgtggtgcccagcaccttcctgggcctgggcaactatgaggtggaggtggaggccgagccagatgtgcggggccctgagatcgtgaccatgggagaaaatgaccccccagctgtggaggcccccttctccttccgcagcctgtttggcctggatgacctgaagatcagccctgtggccccagatgctgatgctgtggccgcccagatcctgagcctgctgcccctgaagttcttccccatcatcgtcatcggcatcatcgccctgatcctggccctggccatcggcctgggcatccactttgactgcagcggcaagtaccgctgccgcagcagcttcaagtgcatcgagctgattgcccgctgtgatggagtgtctgactgcaaggatggagaagatgagtaccgctgtgtgcgggtgggcggccagaatgctgtgctgcaggtgttcaccgctgcctcctggaagaccatgtgcagtgatgactggaagggccactacgccaacgtggcctgtgcccagctgggcttccccagctatgtgtccagtgacaacctgcgggtgagcagcctggagggccagttccgggaggagtttgtgtccattgaccacctgctgcctgatgacaaggtgacagccctgcaccacagcgtgtatgtgcgggagggctgtgccagcggccacgtggtgaccctgcagtgcacagcctgtggccaccggcggggctacagcagcagaattgtgggcggcaacatgagcctgctgagccagtggccctggcaggccagcctgcagttccagggctaccacctgtgtggcggcagcgtcatcacccccctgtggatcatcacagctgcccactgtgtgtatgacctgtacctgcccaagtcctggaccatccaggtgggcctggtgtccctgctggacaacccagcccccagccacctggtggagaagatcgtgtaccacagcaagtacaagcccaagaggctgggcaatgacatcgccctgatgaagctggccggccccctgaccttcaatgagatgatccagcctgtgtgcctgcccaacagcgaggagaacttcccagatggcaaggtgtgctggaccagcggctggggcgccacagaagatggagctggagatgccagccctgtgctgaaccacgccgctgtgcccctcatcagcaacaagatctgcaaccacagagatgtgtatggaggcatcatcagccccagcatgctgtgtgccggctacctgactggaggagtggacagctgccagggcgacagcggcggccccctggtgtgccaggagcggcggctgtggaagctggtgggcgccaccagctttggaattggctgtgccgaggtgaacaagccaggagtgtacaccagggtgaccagcttcctggactggattcatgagcagatggagcgggacctgaagacctag

SEQ ID NO: 214295 - DNA, 1365 bp, Artificial Sequence
  derived and/or modified sequence
atgggcgagaacgacccccccgccgtggaggcccccttcagcttcagatccctatttgggctcgatgatctgaaaatcagtcctgtggcccctgatgcggacgccgttgccgcccaaattttgtccctccttcccctgaaattttttccaatcattgtgatcggcataatcgccctgatcttggccctggcaattgggttgggaattcatttcgactgctccggcaaataccgctgtcggagctctttcaagtgcatcgaattgatcgctagatgcgatggagtgtcggattgcaaggacggagaggatgaataccggtgcgtaagggtgggagggcagaatgctgttcttcaggtgttcacagctgcctcttggaagactatgtgcagtgatgattggaaaggacactacgccaacgtcgcatgcgcacagttgggcttcccaagttacgtcagttcagataatcttcgggtgtcatctcttgaagggcaatttagagaggagttcgtcagcattgaccacctgttgcccgacgacaaggtgaccgcattacatcactccgtgtacgtcagagagggctgtgccagtggccacgttgtgaccctgcaatgcactgcgtgtggacatcgtcggggttactccagcagaatcgtcggcgggaacatgtcactcctaagccagtggccctggcaagcaagcctgcagtttcaggggtaccacttgtgcggcggcagtgtgattactccactgtggattatcactgctgcccattgtgtgtacgacctctatttgcccaaaagctggaccattcaggttggcctagtctccttactggacaaccccgccccgagccatttggtggagaagatcgtatatcacagcaagtacaagcctaaaaggctcggcaacgacatagccttaatgaagctagccgggccactcacattcaatgaaatgatacagcctgtgtgtctccccaattctgaagagaactttccagatgggaaggtgtgttggacatcaggctggggcgcaacagaggacggagccggtgacgcttcacccgtgctgaatcatgccgcggtcccactcattagcaacaagatctgtaatcatagggacgtctacggtggcatcatatcaccttcaatgctctgtgcagggtatctcactggaggcgtcgacagctgccaaggtgactccggaggaccactggtttgccaggagaggagattgtggaagctggttggggccacgtctttcggcatagggtgcgctgaagtaaacaaaccaggtgtgtatacaagagtcacttcctttctcgactggatccatgagcagatggaaagggatttgaagacctag

SEQ ID NO: 214296 - DNA, 1617 bp, Artificial Sequence
  derived and/or modified sequence
atgcaggccgtgggccccaagcccctgcccaccctgctgtgcggcgggcggacaggacataggaccgcacgagtgctctcatttctcatcagaagttgcccctgtgagccaggtaagggatgcgtgtacggcaaacctgtgacgctctggccaacaatttcttcagtcgtacccagcacctttctgggcttgggcaattatgaagtggaggtggaagccgaacccgacgtccggggtccagagatcgtgactatgggcgaaaatgacccgcctgcagtcgaggcccctttttccttccggtcattgtttggtctggatgatctaaaaatctcccccgtagctcctgacgccgacgccgttgccgcccaaattctgtcattactgccgctgaaattttttcccatcattgtgatagggattattgctctgatattagccttggccatagggctcggcatccactttgactgctcagggaagtatcgctgccggtcatcctttaagtgtatcgaactgattgctcgctgtgacggcgtgagcgactgcaaggatggcgaggatgagtataggtgcgtcagagtcggcggtcagaacgcggtgctccaggtgtttacagcggcctcttggaagactatgtgcagcgacgactggaaggggcattatgccaacgttgcttgtgcacaacttggcttcccctcctatgtttcttctgacaatctgcgcgtttcctcccttgaaggccaattccgcgaagaatttgtctctattgatcaccttctacccgatgataaagtaactgccctgcaccatagtgtgtacgtgcgagaaggatgcgcttctggacacgtcgtcacgctccagtgtaccgcctgtggtcatagacgcggttattccagcagaatagtgggaggaaatatgtctctgttgtcgcaatggccatggcaggccagcctacaatttcaaggctaccacctgtgtgggggatcagttattactccactgtggatcatcaccgcagctcattgcgtatacgacctctatctgcccaagtcgtggaccatccaggtgggcctggtcagtcttctcgataacccagccccatcacacctagtagagaaaattgtctatcatagtaagtacaagccaaaaaggcttgggaatgatattgcactcatgaaacttgccgggcctctaacctttaacgagatgattcagcccgtttgcctccccaattctgaagaaaattttcccgatggtaaggtttgctggacatcgggctggggcgcaactgaggatggggctggcgacgcctctcccgtcttaaatcatgccgctgtgcctctcatctccaataaaatatgtaatcatcgcgacgtgtacggggggattattagtccatccatgctttgtgccggctacctgacaggcggcgtcgattcatgtcagggagacagtggcggccccctggtgtgtcaagaaagaaggctgtggaagctagttggggccacatcctttgggattggatgcgctgaggtgaacaagccgggtgtttatacccgggtgacttcttttcttgattggatccatgaacaaatggaacgggacctgaaaacgtag

SEQ ID NO: 214297 - DNA, 1365 bp, Artificial Sequence
  derived and/or modified sequence
atgggcgagaatgacccgcctgccgtggaagcccctttctctttccgcagcttgtttgggctagatgatttgaaaatcagccctgtcgcccctgacgctgacgccgtcgctgctcagatcttaagcctgctgcctctcaagttcttccccattatagtcataggaatcattgctctgatcctcgctcttgccatcggcctcggaatacattttgattgttccgggaaataccgctgtcgttcctcttttaaatgtatcgagttgattgcaaggtgtgacggcgtgagcgactgcaaggatggggaggatgaatatcggtgcgttagagtaggcggtcagaacgcggttcttcaggtgtttactgcagcttcatggaagacgatgtgcagcgatgattggaaggggcactatgcgaacgtagcctgtgcccagcttggattcccaagttatgtgagttctgacaaccttcgggtctcgtctcttgagggacagttccgggaagaatttgtatctatcgaccatctcctgcccgacgataaagtgacagcgcttcaccattcagtgtatgtgagagagggatgcgcctccggacacgtggtcacattacaatgcactgcatgcggccaccgcagaggatattcttctcgcattgtgggcggtaatatgtctcttctgtcccaatggccttggcaagccagcctgcagttccagggctatcatctctgcggagggagtgtcatcacaccgttgtggattatcactgccgcacactgcgtctatgacctctacttgccgaaaagctggacaatacaggttgggcttgtatctcttttagataaccctgctccttcccatctcgtcgaaaagatcgtttaccactccaaatataaacccaagagactgggcaacgacattgccctcatgaagctggccggaccgctgacatttaacgaaatgattcagcctgtctgcctgccaaacagtgaagagaatttcccggacggaaaggtgtgttggacttccggctggggagcaaccgaagacggagcaggcgatgctagtcctgtactaaaccatgccgctgtgccccttatctctaacaaaatctgtaaccacagggacgtgtacggcggaatcatcagcccctcgatgttatgcgccggttatctcaccggcggagtagactcctgtcagggcgacagtggtggacctttggtatgccaggaacgcagactgtggaaactggtgggcgctacatcctttggaatagggtgtgccgaagtcaataaaccaggcgtgtacaccagagtgacttcattcctcgactggatccacgaacagatggaaagagacctgaagacatag

SEQ ID NO: 214298 - DNA, 1617 bp, Artificial Sequence
  derived and/or modified sequence
atgcaggctgtggggccaaagcccctgccaaccctgctgtgcgggggacgtaccggtcaccgcaccgctcgggtgctcagctttctgattaggtcctgcccatgcgagccaggcaaagggtgcgtttatggtaagccagttacactctggccaacaatctctagtgtcgtgccctctactttcctgggactcggcaactatgaggtagaggttgaggccgaaccagacgtgagaggtccagaaatagtaacaatgggggaaaacgatccccctgcggtcgaggctcccttcagtttccggtccttgtttgggctagatgacttgaagatttctccggttgctcctgacgccgacgcggtggcggcacaaatactgtcactgctgccccttaagttctttccaatcatcgttatagggattattgctcttattcttgcactcgctatcggactcgggatccattttgactgctcagggaaatacaggtgtcggagctccttcaaatgtattgaactaattgcgagatgtgatggcgtctccgactgtaaggacggagaggacgaataccgctgtgtacgagtcggcggacagaacgccgtgctacaagtgttcacagctgcatcatggaaaaccatgtgcagcgatgactggaaggggcactacgccaacgtggcctgcgcccagcttggttttccttcatatgttagttccgataatctccgcgtgtcatcgctggaggggcagttcagagaggaatttgtcagcatcgatcacctgctgccagatgacaaggttactgccctacaccacagcgtgtatgtccgggagggttgcgccagcgggcacgttgtaaccttgcagtgcaccgcatgtgggcaccgtagaggttactctagcagaatcgtaggcggaaacatgagcctgctctcacaatggccttggcaggctagcctccagttccagggctaccatctgtgtggcggatctgttatcacccccctatggatcatcaccgcagctcattgcgtatacgatctttatttgcctaagtcctggacgattcaggttgggttggtgagcctgctggacaaccctgcccctagccacctcgttgaaaagattgtctaccattcgaaatacaagcccaaacggttaggtaatgatatcgcgttaatgaagctcgccggaccactcacctttaatgagatgattcagcccgtctgcctccccaactccgaggagaattttcctgacggaaaggtgtgttggaccagtggctggggcgctacagaagatggtgctggggacgcttccccagtactcaaccatgccgcagttcctttgatctccaataagatatgcaaccaccgggacgtttatggcggaatcatcagcccctcaatgttgtgtgcaggatatttgactggaggtgtcgactcatgtcagggagatagtggaggcccactggtctgtcaggagaggcggctgtggaagctggttggcgctacctctttcggtattggctgtgcagaagtcaacaagcctggtgtatacactagggtcacttcatttctcgactggatccatgaacagatggaacgggaccttaaaacctag

SEQ ID NO: 214299 - DNA, 3193 bp, Artificial Sequence
  derived and/or modified sequence
ttctgcttttaatgatggcagctccagaaatggtgagtaaaatgggtgtgaggagagaagatgcttctcaacacttctcagtgttgtacagcttgccaaccacagcctgtttgggaggggatgttctcacccaggttccatctttcagaagccatttgcccacttattctttttatatggataaacgatgtaatttgctacatgctgataataaacagaggtatcagcaagaatgaaagccagaaaatggcccaacatgaacttcttgcttttctaagttactctttcaagctcttcttgcgatagaaatgaaatgaacatttttggcacagaactcttgtttagattttactatgatcttgggaaacacgggttgcttcaaatggcttactagatccctttggaatttcaaacgttacaacaggtagtcacaaagggaatgaaagcggatgatctgagtgtctgtgctgatgtgcctgctggagcccctgtggattttagcccttggaggaagcaggttcccagagcagccatgcctgatatctgggagagggaactagaatttaattgggaatcttctgctatttccctgcttcctccgccctctcagagttacagggaatgacttagaaaggtctctggtctccttggcattgtgataggtggaattctttcgtaggaaacacagccccggggttattttgatgcaagccgttggtccaaagccactccccactttgctatgtgggggaaggaccgggcaccggacggctcgggtactttcgttcttaattaggtcatgcccgtgtgagccaggaaagggctgtgtttatgggaagccagtaacactgtggcctactatctcttccgtggtgccatctacatttttgggactcgggaattatgaggtagaggtggaggcggagccggatgtcagaggtcctgaaatagtcaccatgggggaaaatgatccgcctgctgttgaagcccccttctcattccgatcgctttttggccttgatgatttgaaaataagtcctgttgcaccagatgcagatgctgttgctgcacagatcctgtcactgctgccattgaagttttttccaatcatcgtcattgggatcattgcattgatattagcactggccattggtctgggcatccacttcgactgctcagggaagtacagatgtcgctcatcctttaagtgtatcgagctgatagctcgatgtgacggagtctcggattgcaaagacggggaggacgagtaccgctgtgtccgggtgggtggtcagaatgccgtgctccaggtgttcacagctgcttcgtggaagaccatgtgctccgatgactggaagggtcactacgcaaatgttgcctgtgcccaactgggtttcccaagctatgtgagttcagataacctcagagtgagctcgctggaggggcagttccgggaggagtttgtgtccatcgatcacctcttgccagatgacaaggtgactgcattacaccactcagtatatgtgagggagggatgtgcctctggccacgtggttaccttgcagtgcacagcctgtggtcatagaaggggctacagctcacgcatcgtgggtggaaacatgtccttgctctcgcagtggccctggcaggccagccttcagttccagggctaccacctgtgcgggggctctgtcatcacgcccctgtggatcatcactgctgcacactgtgtttatgacttgtacctccccaagtcatggaccatccaggtgggtctagtttccctgttggacaatccagccccatcccacttggtggagaagattgtctaccacagcaagtacaagccaaagaggctgggcaatgacatcgcccttatgaagctggccgggccactcacgttcaatgaaatgatccagcctgtgtgcctgcccaactctgaagagaacttccccgatggaaaagtgtgctggacgtcaggatggggggccacagaggatggagcaggtgacgcctcccctgtcctgaaccacgcggccgtccctttgatttccaacaagatctgcaaccacagggacgtgtacggtggcatcatctccccctccatgctctgcgcgggctacctgacgggtggcgtggacagctgccagggggacagcggggggcccctggtgtgtcaagagaggaggctgtggaagttagtgggagcgaccagctttggcatcggctgcgcagaggtgaacaagcctggggtgtacacccgtgtcacctccttcctggactggatccacgagcagatggagagagacctaaaaacctgaagaggaaggggacaagtagccacctgagttcctgaggtgatgaagacagcccgatcctcccctggactcccgtgtaggaacctgcacacgagcagacacccttggagctctgagttccggcaccagtagcaggcccgaaagaggcacccttccatctgattccagcacaaccttcaagctgctttttgttttttgtttttttgagatggagtctcgctctgttgcccaggctggagtgcagtggcgaaatccctgctcactgcagcctccgcttccctggttcaagcgattctcttgcctcagcttccccagtagctgggaccacaggtgcccgccaccacacccaactaatttttgtatttttagtagagacagggtttcaccatgttggccaggctgctctcaaacccctgacctcaaatgatgtgcctgcttcagcctcccacagtgctgggattacaggcatgggccaccacgcctagcctcacgctcctttctgatcttcactaagaacaaaagaagcagcaacttgcaagggcggcctttcccactggtccatctggttttctctccaggggtcttgcaaaattcctgacgagataagcagttatgtgacctcacgtgcaaagccaccaacagccactcagaaaagacgcaccagcccagaagtgcagaactgcagtcactgcacgttttcatctctagggaccagaaccaaacccaccctttctacttccaagacttattttcacatgtggggaggttaatctaggaatgactcgtttaaggcctattttcatgatttctttgtagcatttggtgcttgacgtattattgtcctttgattccaaataatatgtttccttccctca

SEQ ID NO: 214300 - DNA, 3192 bp, Artificial Sequence
  derived and/or modified sequence
ttctgcttttaatgatggcagctccagaaatggtgagtaaaatgggtgtgaggagagaagatgcttctcaacacttctcagtgttgtacagcttgccaaccacagcctgtttgggaggggatgttctcacccaggttccatctttcagaagccatttgcccacttattctttttatatggataaacgatgtaatttgctacatgctgataataaacagaggtatcagcaagaatgaaagccagaaaatggcccaacatgaacttcttgcttttctaagttactctttcaagctcttcttgcgatagaaatgaaatgaacatttttggcacagaactcttgtttagattttactatgatcttgggaaacacgggttgcttcaaatggcttactagatccctttggaatttcaaacgttacaacaggtagtcacaaagggaatgaaagcggatgatctgagtgtctgtgctgatgtgcctgctggagcccctgtggattttagcccttggaggaagcaggttcccagagcagccatgcctgatatctgggagagggaactagaatttaattgggaatcttctgctatttccctgcttcctccgccctctcagagttacagggaatgacttagaaaggtctctggtctccttggcattgtgataggtggaattctttcgtaggaaacacagccccggggttattttgatgcaagccgttggtccaaagccactccccactttgctatgtgggggaaggaccgggcaccggacggctcgggtactttcgttcttaattaggtcatgcccgtgtgagccaggaaagggctgtgtttatgggaagccagtaacactgtggcctactatctcttccgtggtgccatctacatttttgggactcgggaattatgaggtagaggtggaggcggagccggatgtcagaggtcctgaaatagtcaccatgggggaaaatgatccgcctgctgttgaagcccccttctcattccgatcgctttttggccttgatgatttgaaaataagtcctgttgcaccagatgcagatgctgttgctgcacagatcctgtcactgctgccattgaagttttttccaatcatcgtcattgggatcattgcattgatattagcactggccattggtctgggcatccacttcgactgctcagggaagtacagatgtcgctcatcctttaagtgtatcgagctgatagctcgatgtgacggagtctcggattgcaaagacggggaggacgagtaccgctgtgtccgggtgggtggtcagaatgccgtgctccaggtgttcacagctgcttcgtggaagaccatgtgctccgatgactggaagggtcactacgcaaatgttgcctgtgcccaactgggtttcccaagctatgtgagttcagataacctcagagtgagctcgctggaggggcagttccgggaggagtttgtgtccatcgatcacctcttgccagatgacaaggtgactgcattacaccactcagtatatgtgagggagggatgtgcctctggccacgtggttaccttgcagtgcacagcctgtggtcatagaaggggctacagctcacgcatcgtgggtggaaacatgtccttgctctcgcagtggccctggcaggccagccttcagttccagggctaccacctgtgcgggggctctgtcatcacgcccctgtggatcatcactgctgcacactgtgtttatgacttgtacctccccaagtcatggaccatccaggtgggtctagtttccctgttggacaatccagccccatcccacttggtggagaagattgtctaccacagcaagtacaagccaaagaggctgggcaatgacatcgcccttatgaagctggccgggccactcacgttcaatgaaatgatccagcctgtgtgcctgcccaactctgaagagaacttccccgatggaaaagtgtgctggacgtcaggatggggggccacagaggatggagcaggtgacgcctcccctgtcctgaaccacgcggccgtccctttgatttccaacaagatctgcaaccacagggacgtgtacggtggcatcatctccccctccatgctctgcgcgggctacctgacgggtggcgtggacagctgccagggggacagcggggggcccctggtgtgtcaagagaggaggctgtggaagttagtgggagcgaccagctttggcatcggctgcgcagaggtgaacaagcctggggtgtacacccgtgtcacctccttcctggactggatccacgagcagatggagagagacctaaaaacctgaagaggaaggggacaagtagccacctgagttcctgaggtgatgaagacagcccgatcctcccctggactcccgtgtaggaacctgcacacgagcagacacccttggagctctgagttccggcaccagtagcaggcccgaaagaggcacccttccatctgattccagcacaaccttcaagctgctttttgttttttgtttttttgagatggagtctcgctctgttgcccaggctggagtgcagtggcgaaatccctgctcactgcagcctccgcttccctggttcaagcgattctcttgcctcagcttccccagtagctgggaccacaggtgcccgccaccacacccaactaatttttgtatttttagtagagacagggtttcaccatgttggccaggctgctctcaaacccctgacctcaaatgatgtgcctgcttcagcctcccacagtgctgggattacaggcatgggccaccacgcctagcctcacgctcctttctgatcttcactaagaacaaaagaagcagcaacttgcaagggcggcctttcccactggtccatctggttttctctccaggggtcttgcaaaattcctgacgagataagcagttatgtgacctcacgtgcaaagccaccaacagccactcagaaaagacgcaccagcccagaagtgcagaactgcagtcactgcacgttttcatctctagggaccagaaccaaacccaccctttctacttccaagacttattttcacatgtggggaggttaatctaggaatgactcgtttaaggcctattttcatgatttctttgtagcatttggtgcttgacgtattattgtcctttgattccaaataatatgtttccttccctc

SEQ ID NO: 214301 - DNA, 816 bp, Artificial Sequence
  derived and/or modified sequence
atgagggggaacctggcgctagtgggggtgctcatatcccttgccttcctttcattgctcccaagtggccatccccagcccgccggtgacgatgcctgctcggtgcaaatcctcgtgcctggcctgaagggcgatgcgggcgaaaagggggataaaggtgcccccggaaggccaggtcgagtgggtccaaccggtgagaagggtgacatgggagataaaggacaaaagggatctgtgggcaggcatggcaaaatcggcccaatcggttccaaaggggaaaagggcgactccggggatattggacctcctggccctaacggcgaaccaggcctgccttgtgagtgttcccaactgagaaaggctatcggagaaatggataaccaggtttcacagctcacctccgaactaaaattcatcaagaatgcagtggcgggtgtgcgggagacggagtctaagatctacctgctcgtcaaggaggaaaagaggtacgctgatgcccagctgagttgtcaagggagaggagggacattgtcaatgcccaaagacgaagctgccaacggtctgatggcagcctacctggcccaggccgggttagctcgagtgtttattgggatcaatgatctagaaaaggagggcgcttttgtttattccgatcacagccctatgcggacattcaacaaatggcggagcggcgaacccaataatgcctatgatgaggaagattgtgtggaaatggtagccagcggtggttggaacgatgttgcctgtcacaccaccatgtactttatgtgtgagtttgacaaggagaatatgtag

SEQ ID NO: 214302 - DNA, 816 bp, Artificial Sequence
  derived and/or modified sequence
atgaggggcaacctggccctggtgggcgtgctgatcagcctggccttcctgagcctgctgcccagcggccacccccagcctgctggagatgatgcctgcagcgtgcagatcctggtgcccggcctgaagggagatgctggggagaagggggacaagggggcccctggccggcccggccgggtgggccccaccggggagaagggggacatgggagacaagggccagaagggctctgtgggccgccacggcaagattggccccatcggcagcaaaggagagaagggggacagcggggacatcggccccccaggccccaacggggagcccggcctgccctgtgagtgcagccagctgaggaaggccatcggggagatggacaaccaggtgtcccagctgaccagcgagctgaagttcatcaagaatgctgtggccggcgtgcgggagacagagagcaagatctacctgctggtgaaggaggagaagagatatgcagatgcccagctgagctgccagggccggggcggcaccctgtccatgcccaaggatgaggccgccaacggcctgatggccgcctacctggcccaggccggcctggcccgggtcttcatcggcatcaatgacctggagaaggagggcgcctttgtgtacagcgaccacagccccatgaggaccttcaacaagtggaggtctggagagcccaacaatgcctatgatgaggaggactgtgtggagatggtggccagcggcggctggaatgatgtggcctgccacaccaccatgtacttcatgtgtgaatttgacaaggagaacatgtag

SEQ ID NO: 214303 - DNA, 816 bp, Artificial Sequence
  derived and/or modified sequence
atgcggggcaacctggccctggtgggcgtgctgatcagcctggccttcttgagcctgcttccttctgggcacccccagccagctggtgatgacgcatgttccgtgcaaatcctggttccagggctcaagggcgacgctggtgagaaaggggataagggcgcgcctggccgacctggccgggtgggccccacaggcgaaaaaggcgacatgggagacaagggccaaaaggggagcgttggtagacatggaaagataggccctatcggctctaagggcgagaagggcgattctggcgatataggaccaccagggccgaatggagaaccagggctgccctgtgaatgctcccagttacgaaaagccattggcgagatggataaccaggtgagtcaattgacctccgaactcaagtttatcaagaatgctgtcgccggagtgcgcgagaccgagtcaaagatctacttgttagtgaaagaagagaagcgttacgcggacgcccaacttagctgtcaggggagaggagggacgctcagcatgcccaaggacgaagccgccaatgggttgatggcggcgtatctggcccaggcaggcttagccagagtgtttatcggtataaacgatttggaaaaggagggggcctttgtttattccgatcatagtcccatgcgaactttcaacaagtggcgatccggcgaaccaaacaacgcctacgacgaagaggattgcgttgagatggttgcctctggcggctggaacgatgtagcttgtcacaccaccatgtatttcatgtgcgaattcgataaggagaacatgtag

SEQ ID NO: 214304 - DNA, 816 bp, Artificial Sequence
  derived and/or modified sequence
atgaggggcaatctggcactggtcggagtcctgatctcattagcctttctgagtttattaccctctggccatccacagcccgctggagatgacgcgtgctcggttcagatcctggtaccaggcctaaagggcgatgctggcgagaaaggagataagggggcaccgggaagaccaggacgtgtcggacccaccggagagaaaggggacatgggagacaagggtcagaagggcagtgtcggaagacacggcaagatcggcccaataggctcgaagggggaaaagggagacagcggcgacatcggtccaccgggaccaaacggcgagcctgggctgccatgtgagtgctcacagttgcgtaaggctattggggaaatggataatcaggtgagccagctcaccagcgagctcaagtttattaagaacgcagttgctggcgtgcgcgagacagagtccaagatttatctactcgtcaaagaagagaagcgctatgcagatgcacagttgtcctgtcaagggcgaggcggaactctgtcgatgccgaaggatgaagcggctaacggactaatggcagcatatctggcacaggcgggactggccagagtttttatcggcatcaatgacctcgaaaaagaaggtgccttcgtctattcagaccacagcccaatgaggaccttcaacaagtggaggagcggggagcctaacaacgcatacgatgaggaggattgtgttgagatggtggcatctgggggttggaacgacgttgcttgccacaccacaatgtactttatgtgcgaatttgataaggagaacatgtag

SEQ ID NO: 214305 - DNA, 816 bp, Artificial Sequence
  derived and/or modified sequence
atgagaggcaacctggccctggtgggcgtgctgatcagcctggccttcctgagcctgctgcccagcggccacccccagcccgccggcgacgacgcctgcagcgtgcagatcctggtgcccggcctgaagggcgacgccggcgagaagggcgacaagggcgcccccggcagacccggcagagtgggccccaccggcgagaagggcgacatgggcgacaagggccagaagggcagcgtgggcagacacggcaagatcggccccatcggcagcaagggcgagaagggcgacagcggcgacatcggcccccccggccccaacggcgagcccggcctgccctgcgagtgcagccagctgagaaaggccatcggcgagatggacaaccaggtgagccagctgaccagcgagctgaagttcatcaagaacgccgtggccggcgtgagagagaccgagagcaagatctacctgctggtgaaggaggagaagagatacgccgacgcccagctgagctgccagggcagaggcggcaccctgagcatgcccaaggacgaggccgccaacggcctgatggccgcctacctggcccaggccggcctggccagagtgttcatcggcatcaacgacctggagaaggagggcgccttcgtgtacagcgaccacagccccatgagaaccttcaacaagtggagaagcggcgagcccaacaacgcctacgacgaggaggactgcgtggagatggtggccagcggcggctggaacgacgtggcctgccacaccaccatgtacttcatgtgcgagttcgacaaggagaacatgtag

SEQ ID NO: 214306 - protein, 647 aa, Artificial Sequence
  derived and/or modified sequence
MACSLQKLFAVEEEFEDEDFLSAVEDAENRFTGSLPVNAGRLRPVSSRPQETVQAQSSRLLLLHPTAPSEALGLPDLDLCLPASSTPSADSRPSCIGAAPLRPVSTSSSWIGNQRRVTVTEVLRETARPQSSALHPLLTFESQQQQVGGFEGPEQDEFDKVLASMELEEPGMELECGVSSEAIPILPAQQREGSVLAKKARVVDLSGSCQKGPVPAIHKAGIMSAQDESLDPVIQCRTPRPPLRPGAVGHLPVPTALTVPTQQLHWEVCPQRSPVQALQPLQAARGTIQSSPQNRFPCQPFQSPSSWLSGKAHLPRPRTPNSSCSTPSRTSSGLFPRIPLQPQAPVSSIGSPVGTPKGPQGALQTPIVTNHLVQLVTAASRTPQQPTHPSTRAKTRRFPGPAGILPHQQSGRSLEDIMVSAPQTPTHGALAKFQTEIVASSQASVEEDFGRGPWLTMKSTLGLDERDPSCFLCTYSIVMVLRKQAALKQLPRNKVPNMAVMIKSLTRSTMDASVVFKDPTGEMQGTVHRLLLETCQNELKPGSVLLLKQIGVFSPSLRNHYLNVTPNNLVHIYSPDSGDGSFLKPSQPFPKDSGSFQHDVAAKPEEGFRTAQNLEAEASPEEELPEADDLDGLLSELPEDFFCGTSS

SEQ ID NO: 214307 - DNA, 2725 bp, Artificial Sequence
  derived and/or modified sequence
cctttaagaaggcggagacgccccagtggcggcgtcttcgaatgcggcctaaggcgcctgccgccagtctcctggcgactttccctatatcgcagagactcatccctctgaccccagcccggaagcactgtccctcggagtccgagacttccacctgggtcgtgtccaaggccccggcgactccccggactcggggtgccgggccaacctccccgccgaggcccacccgccgtcgctatggcgtgcagtttgcagaagctgtttgctgtggaagaggagtttgaagatgaggatttcttgtctgctgtggaggatgcagagaaccggtttactggctcactgcctgtgaatgctgggcgcctgagacctgtctcttctaggccacaggagactgtgcaggcacagtcctccaggctgctgctgttacaccccactgctccctcagaggctttgggcctgccagacttggacctctgcctccctgcctccagcacgcccagtgctgacagccgtccatcatgcataggagcagctcccctaaggcctgtctctacttccagcagctggattggcaatcagagaagagtgacagtgacagaagtgctcagagagacagcaagacctcagtcctcagccttacaccccctactcacctttgagagccaacagcagcaagttggtggctttgaggggcctgaacaagacgaatttgataaagtcctggcaagcatggagttggaggagcctggcatggagctggaatgtggagtcagcagtgaggccataccaatcctgcctgcccagcagcgggagggttcagtattggctaaaaaagcccgggtagttgatctgagtggatcttgccagaaggggcctgtgcctgccatccacaaagcgggtatcatgtccgcccaggatgagtctctagatcctgtcatccaatgtaggactccacgaccccccttgagacctggtgctgtgggtcaccttcctgttccaactgccttaacagttcccactcagcaactccactgggaagtctgtccgcaacgctcccctgttcaagcacttcagcctctccaagctgctagagggaccattcagagcagccctcaaaatcgtttcccttgtcagccattccagtctccaagttcctggttaagtggcaaagctcatttacccagacctcgaactcccaactcaagctgttctactccctcaaggactagctctggattatttcctcggatacccttacaaccgcaagctccagtgtcttccattgggtctcctgttggtaccccaaaaggtccccagggagctctgcagacacccatagtcaccaaccacctggtgcagctagtcactgctgccagccggacaccccagcagcccacccatccctccacccgagccaaaactcgccgtttccctggcccagctgggatcctgcctcaccagcagagtgggagaagtctggaggacatcatggtttccgcgccccaaactccaacccatggtgctctggctaaattccagacagagattgttgctagttcccaggcatctgtggaggaggattttgggcgagggccctggctgaccatgaaatccacgctaggcctggatgagagagaccctagctgcttcctctgtacctacagcattgtcatggtgctgcgcaagcaggcagccctgaagcagcttcctaggaacaaggtccccaacatggcggtgatgatcaagtccctgactcggagcacaatggacgccagtgtggttttcaaggaccccacgggagagatgcaggggacggtgcacaggttgctgctggagacgtgccagaatgagctgaagcctggctcagtgctgctgctgaagcagattggagtgttttctccttcacttcgaaatcactacctcaacgtgacacccaacaacctggtccatatttacagcccggattctggggatgggagcttcctcaagccatctcagcccttccccaaggattcagggagcttccagcatgatgtggctgcaaagcccgaggaaggcttcagaacagcacagaacctagaggcagaggcgtcccctgaggaagaactcccagaagcagatgacctggatggactcctgagtgagcttcctgaagacttcttctgtgggaccagtagttgagactgccccaacgcaggacaacccaccatgagcaggcagctctgggcatgtgtctggtcacatccaagggggagaagaaggccagcatgattggagagtggacacagccggggggcttctgtggttgctcccaccctgggtgttttccctgagagccccctcatctctgcgctgccctcactttgggccttcctttgccgttggcaccagaatccggccggagactggctctccagccaacaagaaaggcctgtcaccctcgccttgggtgtccctctcctgcctcagcttaattttagaggatattgggcctggttttcttgtcccttcataccctagtccctggacagctgaggagatgaaaggagccacaccacaacaatggcggcctgcccctccacacaggggagaagcacgctcaggcttcctctgctttgtctcttcagacctgtggttgctctgctcatccatgcccaaggttcccaggtgcaggacagaggtgtggcctattgtaccttgttctgaaataaagcatctcctgctt

SEQ ID NO: 214308 - DNA, 1944 bp, Artificial Sequence
  derived and/or modified sequence
atggcctgcagcctgcagaagctgttcgccgtggaggaggagttcgaggacgaggacttcctgagcgccgtggaggacgccgagaacagattcaccggcagcctgcccgtgaacgccggcagactgagacccgtgagcagcagaccccaggagaccgtgcaggcccagagcagcagactgctgctgctgcaccccaccgcccccagcgaggccctgggcctgcccgacctggacctgtgcctgcccgccagcagcacccccagcgccgacagcagacccagctgcatcggcgccgcccccctgagacccgtgagcaccagcagcagctggatcggcaaccagagaagagtgaccgtgaccgaggtgctgagagagaccgccagaccccagagcagcgccctgcaccccctgctgaccttcgagagccagcagcagcaggtgggcggcttcgagggccccgagcaggacgagttcgacaaggtgctggccagcatggagctggaggagcccggcatggagctggagtgcggcgtgagcagcgaggccatccccatcctgcccgcccagcagagagagggcagcgtgctggccaagaaggccagagtggtggacctgagcggcagctgccagaagggccccgtgcccgccatccacaaggccggcatcatgagcgcccaggacgagagcctggaccccgtgatccagtgcagaacccccagaccccccctgagacccggcgccgtgggccacctgcccgtgcccaccgccctgaccgtgcccacccagcagctgcactgggaggtgtgcccccagagaagccccgtgcaggccctgcagcccctgcaggccgccagaggcaccatccagagcagcccccagaacagattcccctgccagcccttccagagccccagcagctggctgagcggcaaggcccacctgcccagacccagaacccccaacagcagctgcagcacccccagcagaaccagcagcggcctgttccccagaatccccctgcagccccaggcccccgtgagcagcatcggcagccccgtgggcacccccaagggcccccagggcgccctgcagacccccatcgtgaccaaccacctggtgcagctggtgaccgccgccagcagaaccccccagcagcccacccaccccagcaccagagccaagaccagaagattccccggccccgccggcatcctgccccaccagcagagcggcagaagcctggaggacatcatggtgagcgccccccagacccccacccacggcgccctggccaagttccagaccgagatcgtggccagcagccaggccagcgtggaggaggacttcggcagaggcccctggctgaccatgaagagcaccctgggcctggacgagagagaccccagctgcttcctgtgcacctacagcatcgtgatggtgctgagaaagcaggccgccctgaagcagctgcccagaaacaaggtgcccaacatggccgtgatgatcaagagcctgaccagaagcaccatggacgccagcgtggtgttcaaggaccccaccggcgagatgcagggcaccgtgcacagactgctgctggagacctgccagaacgagctgaagcccggcagcgtgctgctgctgaagcagatcggcgtgttcagccccagcctgagaaaccactacctgaacgtgacccccaacaacctggtgcacatctacagccccgacagcggcgacggcagcttcctgaagcccagccagcccttccccaaggacagcggcagcttccagcacgacgtggccgccaagcccgaggagggcttcagaaccgcccagaacctggaggccgaggccagccccgaggaggagctgcccgaggccgacgacctggacggcctgctgagcgagctgcccgaggacttcttctgcggcaccagcagctag

SEQ ID NO: 214309 - DNA, 1944 bp, Artificial Sequence
  derived and/or modified sequence
atggcttgctctctccaaaagttattcgcagtcgaggaagagttcgaggacgaagatttcctgagcgcagtagaggacgccgaaaacaggtttacgggatctctgccggtgaatgccgggcgcctccggcccgtgtccagccgccctcaagagacagtgcaagcacagagttcaaggctcctcctgttacaccctaccgccccttctgaggcccttgggctgccggatctggatctgtgcctgcccgcctcgtccactccttctgctgacagtagaccaagttgcattggcgcagcgccactgcgccccgtcagcacatctagcagctggataggcaaccaaagacgggtgaccgtcacggaagtgcttagggagaccgctcggcctcagtcatctgctctgcacccccttctcacctttgaatcccagcagcagcaggtcggtggatttgaaggccccgagcaagacgagtttgacaaagttctggcctccatggaactggaagagccaggtatggagttggagtgtggcgtgtcttccgaagctattccgattctcccggcccaacaaagggaaggatccgtgctggccaagaaagctcgggttgtcgacttgagtggctcatgccagaaaggccctgtccccgccattcacaaggctggaatcatgtcagcacaggatgagtctcttgatcccgtgattcagtgtcgaaccccaagaccaccactcagacccggcgccgttggtcatctgccagtgcccaccgcactaacagtcccgactcagcaactccactgggaggtgtgccctcagcgcagtcctgttcaggctctgcagcccctgcaggcagctcggggcaccattcagtcatctcctcagaatagattcccttgtcaaccgttccaatcaccctcaagctggctgagtggaaaggcccatttacctagaccacgaaccccaaactcttcctgcagtacccctagcaggacgagctctggcctgttcccccgaattccattgcaaccccaagcccccgtgagtagcatcggctctcctgtgggtacccctaaggggccacaaggagccttacagacccctatagtgactaaccacctggttcagcttgtaactgctgcaagccggacgccccagcaaccaactcatccctcaacccgcgctaagaccaggagattccccggcccagccggaatcctgcctcaccaacaaagtgggaggtccctcgaagatattatggtatccgcgccccagacccccactcatggagcgctagccaaatttcaaactgaaattgtcgcctcttcacaggcaagcgtggaggaagatttcggtcgaggcccctggttgaccatgaagagcaccctgggtctcgacgagagagacccgtcatgcttcttatgtacatactcaatcgtcatggtgctgagaaaacaggctgccctgaaacaactgccccgtaacaaggtgccaaacatggccgttatgattaaatccttgacaaggtctaccatggatgccagcgttgtgttcaaagatccaacgggcgaaatgcagggaacagtgcacaggttgctcctggaaacctgtcagaatgagctgaagcctggttccgtcttgctcctaaaacagattggggtgttctccccatccctgcgaaatcattacctgaacgttacccctaacaatctcgtgcacatctattctcccgattcaggcgacgggagcttccttaagccaagccagcctttccccaaagatagcggcagtttccagcacgacgttgcagccaaaccagaggagggcttcaggacagcacagaacctagaagccgaggccagtcccgaggaagagctcccggaagcagacgacttagatgggttgttatcagaattgccagaagatttcttctgtgggacctcttcttag

SEQ ID NO: 214310 - DNA, 1944 bp, Artificial Sequence
  derived and/or modified sequence
atggcctgcagcctgcagaagctgtttgctgtggaggaggagtttgaagatgaggacttcctgtctgctgtggaggatgctgagaaccgcttcaccggcagcctgcctgtgaatgccggccgcctgcggcctgtgagcagccggccccaggagaccgtgcaggcccagagcagccggctgctgctgctgcaccccacagcccccagcgaggccctgggcctgcctgacctggacctgtgcctgcctgccagcagcacccccagcgctgacagccggcccagctgcatcggggccgcccccctgcggcctgtgtccaccagcagctcctggattggcaaccagaggagagtgacagtgacagaggtgctgcgggagacagcccggccccagagcagcgccctgcaccccctgctgacctttgagagccagcagcagcaggtgggcggctttgagggccctgagcaggatgaatttgacaaggtgctggcctccatggagctggaggagcccggcatggagctggagtgtggggtgagcagcgaggccatccccatcctgcctgcccagcagcgggagggctctgtgctggccaagaaggcccgggtggtggacctgagcggcagctgccagaagggccctgtgcctgccatccacaaggccggcatcatgtctgcccaggatgagagcctggaccccgtcatccagtgcaggacccccaggcctcccctgcggcctggagctgtgggccacctgcctgtgcccacagccctgactgtgcccacccagcagctgcactgggaggtgtgcccccagaggagccctgtgcaggccctgcagcccctgcaggccgcccggggcaccatccagagcagcccccagaaccgcttcccctgccagcccttccagagccccagctcctggctgagcggcaaggcccacctgccccggcccaggacccccaacagcagctgcagcacccccagcaggaccagcagcggcctcttcccccgcatccccctgcagccccaggcccctgtgagcagcatcggcagccctgtgggcacccccaagggcccccagggcgccctgcagacccccatcgtgaccaaccacctggtgcagctggtgacagctgccagcaggaccccccagcagcccacccaccccagcacccgggccaagacccggcgcttccctggccctgctggcatcctgccccaccagcagagcggccgcagcctggaggacatcatggtgtctgccccccagacccccacccatggagccctggccaagttccagacagaaattgtggccagcagccaggcctctgtggaggaggactttggccggggcccctggctgaccatgaagagcaccctgggcctggatgagcgggaccccagctgcttcctgtgcacctacagcatcgtgatggtgctgaggaagcaggccgccctgaagcagctgcccaggaacaaggtgcccaacatggctgtgatgatcaagagcctgaccaggagcaccatggatgcctctgtggtgttcaaggaccccaccggggagatgcagggcaccgtgcaccggctgctgctggagacctgccagaatgagctgaagccaggctctgtgctgctgctgaagcagatcggggtcttcagccccagcctgaggaaccactacctgaatgtgacccccaacaacctggtgcacatctacagcccagattctggagatggcagcttcctgaagcccagccagcccttccccaaggacagcggcagcttccagcatgatgtggccgccaagccagaggagggcttcagaacagcccagaacctggaggccgaggccagccctgaggaggagctgcctgaggctgatgacctggatggcctgctgtctgagctgcctgaggacttcttctgtggcaccagcagctag

SEQ ID NO: 214311 - DNA, 1944 bp, Artificial Sequence
  derived and/or modified sequence
atggcctgcagcctgcagaagctgttcgccgtggaggaggagttcgaggacgaggacttcctgagcgcggttgaggatgccgaaaaccgcttcacaggctcacttcccgtgaatgccggacggctccgccccgttagttccaggccccaggagactgtccaagctcaaagctcacgtctgcttctcctacatcccaccgccccctccgaggccctggggttacctgatctggacctgtgcctccccgcaagctcaacaccttcagcggacagcaggccctcttgtatcggggccgcacctttgcgccccgtgtctacttcgtcctcttggattggtaaccagcggagggttacagtgaccgaagtgctgagggagacagcccgcccccagtcaagcgccctgcaccccttactgacgtttgaaagccaacagcagcaagtgggcgggtttgagggccctgagcaagatgaattcgacaaagtacttgcctccatggaactggaggaacctggaatggaattagagtgtggagtctcgagtgaagccatccccattctgcctgcacagcagcgtgagggctccgttctggcaaaaaaagcccgtgtggtggacctgtcagggtcttgtcaaaaggggcctgttcccgccattcataaagcaggaatcatgtccgcacaggacgagagtttagaccctgtaatccaatgtaggacaccccggccacctcttcgccctggcgcagttgggcacctgcctgtccctaccgcactgacagttcccactcagcaacttcattgggaagtatgtcctcaacgaagcccagttcaagcattgcagccattgcaagctgccaggggcaccatacagagttcacctcaaaatcgcttcccttgccagccttttcagtccccttcttcttggttgtctggcaaggcccatttaccgcggcccaggacccccaactcatcctgttcaaccccgagccggacctcctcaggattattccctcggatcccgctccagccacaagctccagtaagcagcatcggatcccccgtgggtacgccaaagggtccacagggggctcttcaaacaccgatcgtgaccaaccatctggtacagctggtaacggccgcttctagaacaccacagcaacctacgcacccctccactcgagctaaaacccgaaggtttcctggtcctgccggcatcttaccacatcagcagagcggtagatctcttgaagacattatggtgagcgcccctcaaacacctactcacggtgcactcgccaaatttcagaccgagatcgtggccagcagtcaagccagcgtggaagaggacttcggacggggaccttggctaacaatgaaaagcaccctgggccttgacgaaagggatccttcatgcttcctctgcacttacagcatagtgatggttttgcgtaagcaggccgccttgaagcaattgccgagaaataaggtgccaaatatggccgtcatgatcaagagcttgacacggagcacaatggacgcctcagtggtgttcaaggatcccaccggcgaaatgcagggaacggttcatcggctgctgctcgagacatgccaaaatgagctgaagcccgggtctgtgcttctgttgaagcagatcggggtgttctccccatctcttcggaatcattacctgaatgttactcccaataacctggtgcacatttatagccctgactcaggcgatgggtcttttctaaagccgtcacaaccattccccaaggactccggatcttttcagcacgacgtcgctgctaaacctgaggaagggttcagaactgcacagaacctcgaggctgaggctagcccagaggaggaattgccggaggccgacgacctggatggactgttgtctgagctccctgaagattttttttgcggcactagctcttag

SEQ ID NO: 214312 - DNA, 1944 bp, Artificial Sequence
  derived and/or modified sequence
atggcctgttctctgcagaagctgtttgccgtcgaggaagaatttgaggacgaggatttcctgtcagccgtagaagatgccgagaaccggttcactggttccctgcctgtgaacgcaggtagactcaggccagtgagtagccgacctcaggagacagtccaggctcagagctctaggctgctgcttttgcacccgaccgccccaagcgaggcactaggtctgcctgacctggatctgtgcctgccagcatcaagcactcccagtgcggactcgcgacctagttgtattggagctgcccctctgcggcctgtatcaacctcaagcagctggattgggaaccagcgcagagttaccgttactgaagtgctaagggagacagccaggcctcagtcttctgccctgcaccccctgctgacttttgagagccaacagcagcaagtagggggtttcgagggcccagagcaagatgagtttgacaaggtgctggccagtatggaactggaggagcccggaatggagcttgaatgcggagtctcctccgaagctatcccaattctcccagcccagcagagggagggctctgtgctggccaaaaaagcacgggttgtagatctcagcggatcgtgccagaaaggccctgttccagccatacataaagccggtataatgagcgctcaggatgagagcctcgaccctgtcatacagtgccggacacctagaccacccctgagaccaggtgcggttggccacctgccagtacccaccgccctgacagtccccacccaacaattgcattgggaagtttgtccacagagatctcctgtgcaggccttacagcccctccaggccgcaagaggtacaatccagtcctctccccagaatcgcttcccatgtcaaccctttcagtcccctagcagttggctgagcggcaaagcccacctacctaggcctcggacgcctaactcttcctgctcaaccccttctcgtacttcatctgggctgttccccaggattcctcttcaaccccaggctcccgtgtcaagcatcgggtcacccgtggggaccccgaagggcccacaaggagcgttacagacccccatcgttacaaatcacctggttcaactggttactgcggcttcaaggacaccacagcagcccacccacccgtccacccgcgctaaaacccggagatttccagggcctgccggaatactgccacatcagcagtcagggcgttccttggaagatatcatggtcagcgcccctcagacccccacccacggggctttggctaaatttcaaactgaaatcgtcgctagtagccaggcttccgtggaagaggatttcggacggggaccttggctgactatgaagtctacactcggtctggatgagcgggacccatcctgctttctctgtacttactcaatcgtcatggtgcttcggaaacaggcagctctgaaacagctacctcgcaacaaggtccccaatatggctgtgatgatcaaatccctcacaagatccactatggacgcctccgtggtgtttaaagaccccactggggagatgcagggcaccgtacaccggttgctgctcgaaacctgtcaaaacgagctgaagccgggtagcgtgctcctcctgaagcagattggagtgtttagtccctctttgcggaatcactacctgaacgtaactcctaacaacctggttcatatttactccccagacagtggagatggctcatttttaaagccgagtcagccatttccaaaggacagcggatccttccagcacgacgtggcagctaagcccgaagaagggttcagaactgctcagaatctggaagcagaagcctcacctgaggaggagctccccgaggctgatgatcttgacggcctactctctgagctccctgaggattttttttgtggaacctcctcctag

SEQ ID NO: 214313 - protein, 157 aa, Artificial Sequence
  derived and/or modified sequence
METLQSETKTRVLPSWLTAQVATKNVAPMKAPKRMRMAAVPVAAARLPATRTVYCMNEAEIVDVALGILIESRKQEKACEQPALAGADNPEHSPPCSVSPHTSSGSSSEEEDSGKQALAPGLSPSQRPGGSSSACSRSPEEEEEEDVLKYVREIFFS

SEQ ID NO: 214314 - protein, 102 aa, Artificial Sequence
  derived and/or modified sequence
MNEAEIVDVALGILIESRKQEKACEQPALAGADNPEHSPPCSVSPHTSSGSSSEEEDSGKQALAPGLSPSQRPGGSSSACSRSPEEEEEEDVLKYVREIFFS

SEQ ID NO: 214315 - DNA, 474 bp, Artificial Sequence
  derived and/or modified sequence
atggagaccctgcagagcgagaccaagaccagagtgctgcccagctggctgaccgcccaggtggccaccaagaacgtggcccccatgaaggcccccaagagaatgagaatggccgccgtgcccgtggccgccgccagactgcccgccaccagaaccgtgtactgcatgaacgaggccgagatcgtggacgtggccctgggcatcctgatcgagagcagaaagcaggagaaggcctgcgagcagcccgccctggccggcgccgacaaccccgagcacagccccccctgcagcgtgagcccccacaccagcagcggcagcagcagcgaggaggaggacagcggcaagcaggccctggcccccggcctgagccccagccagagacccggcggcagcagcagcgcctgcagcagaagccccgaggaggaggaggaggaggacgtgctgaagtacgtgagagagatcttcttcagctag

SEQ ID NO: 214316 - DNA, 471 bp, Artificial Sequence
  derived and/or modified sequence
atggccgacagccccggcggctacaaggagtgcggcaccaacgagggcccccaggaggacgagaacggcagcagcgccagcggcagcagcaaggtgagacagctgtggagcgaggacagctgcgagagcggcaagctgcccgccaccagaaccgtgtactgcatgaacgaggccgagatcgtggacgtggccctgggcatcctgatcgagagcagaaagcaggagaaggcctgcgagcagcccgccctggccggcgccgacaaccccgagcacagccccccctgcagcgtgagcccccacaccagcagcggcagcagcagcgaggaggaggacagcggcaagcaggccctggcccccggcctgagccccagccagagacccggcggcagcagcagcgcctgcagcagaagccccgaggaggaggaggaggaggacgtgctgaagtacgtgagagagatcttcttcagctag

SEQ ID NO: 214317 - DNA, 474 bp, Artificial Sequence
  derived and/or modified sequence
atggagacacttcagtcagagacaaaaaccagggtactcccttcttggctcaccgctcaagtggccactaagaacgtagcccctatgaaggcacctaaacgcatgaggatggcggccgtccctgttgcagccgctcgcctgcccgccacccggacggtgtactgcatgaacgaggccgagatcgtagacgtggccctcgggatattaatcgaatctcgcaagcaggagaaggcttgtgaacaacctgctcttgctggggctgacaatccagagcactccccaccatgcagcgtctcaccccacacctcatcaggcagttcctctgaggaggaagactccggcaaacaggcactggctcccgggttgtctccaagtcagcgtccaggtggaagctctagcgcgtgttccagatcaccagaggaggaggaagaagaggacgtacttaaatacgtgcgggagatattcttcagctag

SEQ ID NO: 214318 - DNA, 471 bp, Artificial Sequence
  derived and/or modified sequence
atggccgactctccggggggctataaggagtgcggtacgaatgaaggcccacaggaggacgagaacggatcttcagcttccggatcatcgaaggtgcggcagctgtggtctgaagattcctgtgaatccggtaagttacctgccaccaggaccgtctactgcatgaacgaggctgagatagtagacgtggccctgggcatcctgatcgaatcccgaaaacaagaaaaggcgtgcgagcagcccgccctggctggcgccgacaatcctgagcattcacctccttgctccgtgtccccacatactagtagcggctctagctctgaggaagaagattctggaaagcaagccctcgcacctggactctctccaagccagaggcctggagggtcctcgagcgcctgttctcggtcccctgaagaagaagaagaggaagatgtgcttaaatacgtcagagagatttttttcagctag

SEQ ID NO: 214319 - DNA, 474 bp, Artificial Sequence
  derived and/or modified sequence
atggagaccctgcagagcgagaccaagaccagggtgctgcccagctggctgacagcccaggtggccaccaagaatgtggcccccatgaaggcccccaagaggatgaggatggctgctgtgcctgtggccgccgcccggctgcctgccaccaggacagtgtactgcatgaatgaagctgagatcgtggatgtggccctgggcatcctgattgagagcaggaagcaggagaaggcctgtgagcagcctgccctggccggggctgacaaccctgagcacagccccccctgcagcgtgagcccccacaccagcagcggcagcagcagcgaggaggaggacagcggcaagcaggccctggcccctggcctgagccccagccagaggcctgggggcagcagcagcgcctgcagccgcagccctgaggaggaggaggaggaggatgtgctgaagtatgtgcgggagatcttcttctcctag

SEQ ID NO: 214320 - DNA, 471 bp, Artificial Sequence
  derived and/or modified sequence
atggctgacagccctgggggctacaaggaatgtggcaccaatgaaggcccccaggaggatgaaaatggcagcagcgccagcggcagcagcaaggtgcggcagctgtggagcgaggacagctgtgagagcggcaagctgcctgccaccaggacagtgtactgcatgaatgaggccgagatcgtggatgtggccctgggcatcctgattgagagcaggaagcaggagaaggcctgtgagcagcctgccctggccggggctgacaaccctgagcacagccccccctgcagcgtgagcccccacaccagcagcggcagcagcagcgaggaggaggacagcggcaagcaggccctggcccctggcctgagccccagccagaggcctgggggcagcagcagcgcctgcagccgcagccctgaggaggaggaggaggaggatgtgctgaagtatgtgcgggagatcttcttctcctag

SEQ ID NO: 214321 - DNA, 1482 bp, Artificial Sequence
  derived and/or modified sequence
cagagtttgggcgccaggcgagacggcagggcttaaagttccgggaatcaaagatcaactcccactgaggacaaatggacctgtaattccgggtgtgacgagagaacgagatttaccttcctgaattaaaaaacaggtcattaagcttgggccctgactcttctttgtgagaaggtacagagatggaaaccttacaatccgagactaaaacgagggtccttccctcatggctgacagcccaggtggctacaaagaatgtggcaccaatgaaggcccccaagaggatgagaatggcagcagtgccagtggcagcagcaagactccctgcgacaaggactgtgtactgcatgaatgaggctgagatagttgatgttgctctgggaatcctgattgagagccgcaaacaggaaaaggcctgcgagcagccggccctggcgggggctgataacccagagcactcccctccctgctccgtgtcgcctcacacaagttctgggagcagcagtgaggaagaggacagtgggaaacaggcactggctccaggcctcagcccttcccagaggccggggggttccagctctgcctgtagcaggagccctgaggaggaggaggaagaggatgtgctgaaatacgtccgggagatctttttcagctagggcataaactgtgcactgaactgtctgccgagagcagctggaggacagctgagcttccactggtgctgctgggccgcccgcctgtgggaatggggctctctgtgctcctacctttgtgccttcttgggcctggcagattcacctcaggccagaagcccctggacactccgggccttggggctgccgttctgagtgtgcggaaggcaggactcaaaatgagatcccatttgactccctctgtatgtactgtgccctctcctggctcttgaggctctggagtcccaattgtctgtgttagtcagtgaccaggttccagggaaaatgatgtcatgtggtggtccaacttactggaaccaaagagacagtactttgcaaagaaaaggatcactgccaggtgcactggaattgctacagtttagtccgcatgatctctcctgaaggaggaagcctgtttcaaaaatagtttccatcatgagtctatcaatgagctcccacctctccagccagcctagaaagcaaacgagctgcccacagttctctgccctgtctgggaggttgaggccacagtgtatagactggtaagccagacaggcctcctcccgcaagctgctaccttgctttcacctgtaccttggtccccgggcagctagctataaagcaagagggacaggagcccagaagagacactgaggacaagagatcacaccagagtacatgtctctgcctctgttttcagtgtggctttggacaggaatatatgaataaatcactgccatacaggttttccaatacacaagtgctagaaaatacacacaattccccaatg

SEQ ID NO: 214322 - DNA, 474 bp, Artificial Sequence
  derived and/or modified sequence
atggagaccctgcagagcgagaccaagacccgggtgctgcccagctggctcacggctcaggtcgccacgaaaaacgtggcacctatgaaggcccctaagcggatgaggatggctgcagtgccagttgccgccgccaggttgccagccacaaggacagtgtattgcatgaacgaagccgaaatcgttgacgtcgccctcggaatccttatcgagtcccggaaacaagagaaggcctgtgagcagcccgcgctcgctggcgcagacaatcctgaacattcgccaccctgttcggtatcaccgcatacgagttctggctcctcgagcgaagaagaggatagtggtaagcaggcacttgctccgggtctcagcccctcacagcgccccggcggatctagtagcgcttgtagtcgcagccccgaagaggaggaggaagaggatgttttgaaatacgtaagagaaatcttcttcagctag

SEQ ID NO: 214323 - DNA, 471 bp, Artificial Sequence
  derived and/or modified sequence
atggccgacagccccggcggctacaaggagtgcggcaccaacgagggtccccaggaggacgaaaacggcagcagtgcgagcggctcttccaaggtgcggcagctgtggtctgaagactcctgcgagtctgggaagctacctgctacccggaccgtttattgtatgaatgaagctgagatagtagacgtggccctcgggattttaatagaatctcgcaagcaggaaaaggcctgtgagcagccagcgcttgctggcgctgacaacccagagcatagtccaccatgttctgtgtctccccatacttcgagcggaagtagtagtgaagaggaagatagcgggaaacaggctctcgccccaggtctcagcccatctcagaggccaggcggaagctcctccgcctgttcacgcagtccagaggaggaggaagaggaagatgtgctcaaatatgtacgggagatcttcttttcgtag

SEQ ID NO: 214324 - DNA, 474 bp, Artificial Sequence
  derived and/or modified sequence
atggaaaccttacagagtgagacaaagactagagtgcttccatcttggctaaccgcccaagtggccactaagaacgtggctcccatgaaggcgccaaaaagaatgcgcatggctgcagtgcccgtggccgcagccagactgcccgcaactcgtacagtctactgcatgaatgaggctgagatcgtggatgttgcgcttgggatcctcatcgaaagtcgcaaacaagaaaaagcttgcgagcagcctgccctggccggtgcagacaaccctgagcactcccccccttgtagtgtcagtccgcatacatcttcaggttcttcgagcgaggaagaggattctggtaaacaggctttggcacctggcctgagcccttcccaaagaccgggagggtcatcttcagcctgttcccgatctccagaggaggaggaagaggaagatgtgttaaaatacgtccgtgagatcttcttcagttag

SEQ ID NO: 214325 - DNA, 1738 bp, Artificial Sequence
  derived and/or modified sequence
aaagttccgggtgaggcgtgggtcccacaaccgcttggaatttgcctcccggctccgctctggaagctaagaaggggcacgagagccggagacgggaacctgagagcagggaagccagtagccggccggaggagcgcgcggccgctccagtcggaaggagccgttgcagccctgcccggcgtgtggcggggtcagcgaggcccctgcggtgcttcgcccgcgccttccgctccgcactcacccgccctctgggcctcccacaggaatcaaagatcaactcccactgaggacaaatggacctgtaattccgggtgtgacgagagaacgagatttaccttcctgaattaaaaaacaggtcattaagcttgggccctgactcttctttgtgagaaggtacagagatggaaaccttacaatccgagactaaaacgagggtccttccctcatggctgacagcccaggtggctacaaagaatgtggcaccaatgaaggcccccaagaggatgagaatggcagcagtgccagtggcagcagcaaggtgcgacagctctggtcagaagactcctgcgaatctgactccctgcgacaaggactgtgtactgcatgaatgaggctgagatagttgatgttgctctgggaatcctgattgagagccgcaaacaggaaaaggcctgcgagcagccggccctggcgggggctgataacccagagcactcccctccctgctccgtgtcgcctcacacaagttctgggagcagcagtgaggaagaggacagtgggaaacaggcactggctccaggcctcagcccttcccagaggccggggggttccagctctgcctgtagcaggagccctgaggaggaggaggaagaggatgtgctgaaatacgtccgggagatctttttcagctagggcataaactgtgcactgaactgtctgccgagagcagctggaggacagctgagcttccactggtgctgctgggccgcccgcctgtgggaatggggctctctgtgctcctacctttgtgccttcttgggcctggcagattcacctcaggccagaagcccctggacactccgggccttggggctgccgttctgagtgtgcggaaggcaggactcaaaatgagatcccatttgactccctctgtatgtactgtgccctctcctggctcttgaggctctggagtcccaattgtctgtgttagtcagtgaccaggttccagggaaaatgatgtcatgtggtggtccaacttactggaaccaaagagacagtactttgcaaagaaaaggatcactgccaggtgcactggaattgctacagtttagtccgcatgatctctcctgaaggaggaagcctgtttcaaaaatagtttccatcatgagtctatcaatgagctcccacctctccagccagcctagaaagcaaacgagctgcccacagttctctgccctgtctgggaggttgaggccacagtgtatagactggtaagccagacaggcctcctcccgcaagctgctaccttgctttcacctgtaccttggtccccgggcagctagctataaagcaagagggacaggagcccagaagagacactgaggacaagagatcacaccagagtacatgtctctgcctctgttttcagtgtggctttggacaggaatatatgaataaatcactgccatacaggttttccaatacacaagtgctagaaaatacacacaattccccaatg

SEQ ID NO: 214326 - DNA, 471 bp, Artificial Sequence
  derived and/or modified sequence
atggccgattcacctggaggatacaaagagtgcgggaccaatgagggaccccaggaggacgagaatggcagtagcgcctctggatcaagcaaagtcagacagctttggtccgaagatagctgcgaatcaggcaagctgccagcaactaggaccgtgtactgtatgaacgaggctgagattgtggatgtggccttaggcatccttatcgagtctagaaagcaagagaaagcctgtgaacagcctgccctggccggagcagacaatccagagcattcgccgccttgctctgtctccccccacactagctccggctcctcttctgaagaagaggacagtggcaagcaggccctcgcccctgggctctcaccgagccagaggccaggaggctcatccagtgcgtgctcaaggtccccagaggaggaggaggaagaggacgtgctgaagtatgtaagagagatatttttttcctag

SEQ ID NO: 214327 - DNA, 1579 bp, Artificial Sequence
  derived and/or modified sequence
ggccgggagttccccaagaccggaagtgtcccgaggccgggagcccgcgggaccccggagcgcgcggggccggaagaggcgggcggccagtggaggtccgcagagtttgggcgccaggcgagacggcagggcttaaagttccgggaatcaaagatcaactcccactgaggacaaatggacctgtaattccgggtgtgacgagagaacgagatttaccttcctgaattaaaaaacaggtcattaagcttgggccctgactcttctttgtgagaaggtacagagatggaaaccttacaatccgagactaaaacgagggtccttccctcatggctgacagcccaggtggctacaaagaatgtggcaccaatgaaggcccccaagaggatgagaatggcagcagtgccagtggcagcagcaaggtgcgacagctctggtcagaagactcctgcgaatctggcaaactccctgcgacaaggactgtgtactgcatgaatgaggctgagatagttgatgttgctctgggaatcctgattgagagccgcaaacaggaaaaggcctgcgagcagccggccctggcgggggctgataacccagagcactcccctccctgctccgtgtcgcctcacacaagttctgggagcagcagtgaggaagaggacagtgggaaacaggcactggctccaggcctcagcccttcccagaggccggggggttccagctctgcctgtagcaggagccctgaggaggaggaggaagaggatgtgctgaaatacgtccgggagatctttttcagctagggcataaactgtgcactgaactgtctgccgagagcagctggaggacagctgagcttccactggtgctgctgggccgcccgcctgtgggaatggggctctctgtgctcctacctttgtgccttcttgggcctggcagattcacctcaggccagaagcccctggacactccgggccttggggctgccgttctgagtgtgcggaaggcaggactcaaaatgagatcccatttgactccctctgtatgtactgtgccctctcctggctcttgaggctctggagtcccaattgtctgtgttagtcagtgaccaggttccagggaaaatgatgtcatgtggtggtccaacttactggaaccaaagagacagtactttgcaaagaaaaggatcactgccaggtgcactggaattgctacagtttagtccgcatgatctctcctgaaggaggaagcctgtttcaaaaatagtttccatcatgagtctatcaatgagctcccacctctccagccagcctagaaagcaaacgagctgcccacagttctctgccctgtctgggaggttgaggccacagtgtatagactggtaagccagacaggcctcctcccgcaagctgctaccttgctttcacctgtaccttggtccccgggcagctagctataaagcaagagggacaggagcccagaagagacactgaggacaagagatcacaccagagtacatgtctctgcctctgttttcagtgtggctttggacaggaatatatgaataaatcactgccatacaggt

SEQ ID NO: 214328 - DNA, 1811 bp, Artificial Sequence
  derived and/or modified sequence
agacggcagggcttaaagttccgggaatcaaagatcaactcccactgaggacaaatggacctgtaattccgggtgtgacgagagaacgagatttaccttcctgaattaaaaaacagactccctgcgacaaggactgtgtactgcatgaatgaggctgagatagttgatgttgctctgggaatcctgattgagagccgcaaacaggaaaaggcctgcgagcagccggccctggcgggggctgataacccagagcactcccctccctgctccgtgtcgcctcacacaagttctgggagcagcagtgaggaagaggacagtgggaaacaggcactggctccaggcctcagcccttcccagaggccggggggttccagctctgcctgtagcaggagccctgaggaggaggaggaagaggatgtgctgaaatacgtccgggagatctttttcagctagggcataaactgtgcactgaactgtctgccgagagcagctggaggacagctgagcttccactggtgctgctgggccgcccgcctgtgggaatggggctctctgtgctcctacctttgtgccttcttgggcctggcagattcacctcaggccagaagcccctggacactccgggccttggggctgccgttctgagtgtgcggaaggcaggactcaaaatgagatcccatttgactccctctgtatgtactgtgccctctcctggctcttgaggctctggagtcccaattgtctgtgttagtcagtgaccaggttccagggaaaatgatgtcatgtggtggtccaacttactggaaccaaagagacagtactttgcaaagaaaaggatcactgccaggtgcactggaattgctacagtttagtccgcatgatctctcctgaaggaggaagcctgtttcaaaaatagtttccatcatgagtctatcaatgagctcccacctctccagccagcctagaaagcaaacgagctgcccacagttctctgccctgtctgggaggttgaggccacagtgtatagactggtaagccagacaggcctcctcccgcaagctgctaccttgctttcacctgtaccttggtccccgggcagctagctataaagcaagagggacaggagcccagaagagacactgaggacaagagatcacaccagagtacatgtctctgcctctgttttcagtgtggctttggacaggaatatatgaataaatcactgccatacaggttttccaatacacaagtgctagaaaatacacacaattccccaatgcgtaagttgtgctaatgtctttccaagttctgggttgggaagtggagggtggcagcgtttgtttgtgtgcagccgtccagtcctgttcacagcgaggatttggagtcctccagggtctcatcatgggagtgatttgtcagcggacgcctctgccctgtctggcttcaggtccagggaagctttgaagcagtcaagccttgtctttgtaccccatgtgtcctgtctttgttgagtcactcagagatcactcctggacctctggggttggagttccagtgatggcttatggcggcccactcactatggtgggctgagtggaagctccttaaccatgtccccagagacactgaggtgctcgctcttttaatgtcctcgtttgttgccgtaagttctttgctaggtttcattttggcatttggcaaatcagcctggaagtctggccccatgacagcaatcactccctccccaccctcctgaagctagaggaagatttgctcagatccattaattaaagcaggaattggtgtgacaa

SEQ ID NO: 214329 - protein, 287 aa, Artificial Sequence
  derived and/or modified sequence
MELERIVSAALLAFVQTHLPEADLSGLDEVIFSYVLGVLEDLGPSGPSEENFDMEAFTEMMEAYVPGFAHIPRGTIGDMMQKLSGQLSDARNKENLQPQSSGVQGQVPISPEPLQRPEMLKEETRSSAAAAADTQDEATGAEEELLPGVDVLLEVFPTCSVEQAQWVLAKARGDLEEAVQMLVEGKEEGPAAWEGPNQDLPRRLRGPQKDELKSFILQKYMMVDSAEDQKIHRPMAPKEAPKKLIRYIDNQVVSTKGERFKDVRNPEAEEMKATYINLKPARKYRFH

SEQ ID NO: 214330 - DNA, 864 bp, Artificial Sequence
  derived and/or modified sequence
atggagctagagcgcatcgtgtctgctgccttgttggcctttgtgcagactcatctaccggaagccgacctttctgggttagatgaggtgatcttttcttatgtccttggagttctggaggacctcgggcccagtggcccatctgaagaaaactttgatatggaagctttcaccgagatgatggaagcttatgttccgggctttgctcatattcctcgtggcaccattggtgacatgatgcagaagctttcaggccagctctctgacgcccgcaataaagagaacctgcagccccagtccagtggcgtgcagggccaggtgccgatctcacctgaaccactgcagcgcccagaaatgctgaaagaagagacaagaagctctgctgccgcagctgccgatacccaggatgaggcaacaggagctgaggaagagctcctgcctggagttgacgtgcttctcgaggttttccccacatgcagtgtggaacaggcacagtgggttcttgcaaaggcccgaggcgacctggaggaagcagtgcaaatgctggtcgaaggtaaggaagaaggacctgccgcatgggagggccctaatcaggaccttccgcggcgtctacgaggaccccagaaggacgaactcaaaagttttatcctccagaagtacatgatggttgatagcgccgaggaccaaaagatacaccgcccaatggcccccaaggaagcacccaaaaagctgattcgatatatcgacaaccaagtagtctccactaaaggtgagcgcttcaaagacgttaggaaccctgaagcggaggaaatgaaggccacatacatcaacttgaaacccgctcgtaaataccgcttccactag

SEQ ID NO: 214331 - DNA, 864 bp, Artificial Sequence
  derived and/or modified sequence
atggagctggagcgcatcgtgtctgctgccctgctggcctttgtgcagacccacctgcctgaggccgacctgagcggcctggatgaggtgatcttctcctatgtgctgggcgtgctggaggacctgggccccagcggccccagcgaggagaactttgacatggaggccttcacagagatgatggaggcctacgtgcccggctttgcccacatcccccggggcaccatcggggacatgatgcagaagctgagcggccagctgagtgatgccaggaacaaggagaacctgcagccccagagcagtggagtgcagggccaggtgcccatcagccctgagcccctgcagaggcctgagatgctgaaggaggagaccaggagcagcgctgctgctgctgctgacacccaggatgaggccactggagctgaggaggagctgctgcccggggtggatgtgctgctggaggtgttccccacctgcagcgtggagcaggcccagtgggtgctggccaaggcccggggggacctggaggaggccgtgcagatgctggtggagggcaaggaggagggccctgctgcctgggagggccccaaccaggacctgccccggcggctgcggggcccccagaaggatgagctgaagagcttcatcctgcagaagtacatgatggtggacagcgctgaggaccagaagatccaccggcccatggcccccaaggaggcccccaagaagctgatccgctacatcgacaaccaggtggtgtccaccaagggggagcgcttcaaggatgtgaggaaccctgaggccgaggagatgaaggccacctacatcaacctgaagccagccaggaagtaccgcttccactag

SEQ ID NO: 214332 - DNA, 864 bp, Artificial Sequence
  derived and/or modified sequence
atggagctggagcggatcgtgagcgccgccctgctggccttcgtgcagacccacctgcccgaagctgacttaagcgggctagatgaggtcattttttcatacgtgcttggcgtacttgaggaccttggcccatctggaccatccgaggaaaattttgacatggaggccttcacagagatgatggaagcctatgtgccaggattcgctcacattccaagaggcacgataggagatatgatgcagaaacttagtggccagctgtctgatgcaagaaacaaagaaaacctacagccccagagctcaggagtccagggacaggtgcccatatcaccagagcctttgcagcgtccagagatgctcaaagaagagaccagatcatcagctgctgccgctgccgacacccaggacgaggcgacaggtgccgaggaggagctattgcccggtgtcgacgtcctcctcgaggtgtttcccacatgctctgtggagcaggcgcagtgggtgctggccaaggcccgtggagacctggaggaggcagtgcagatgctggttgagggaaaagaggaaggacccgccgcttgggaaggccctaatcaagatctacccaggcgcctaagaggtccccagaaggacgagctaaaaagtttcattctacaaaaatacatgatggtggactccgcagaagatcagaagatccatcggcccatggcccccaaggaggcacccaaaaaattgattcgatacatcgataatcaagtggtctccacaaagggggagcgtttcaaggatgtacgcaatccagaggccgaagagatgaaagccacttacattaacttaaagccagcacggaaatatagattccactag

SEQ ID NO: 214333 - DNA, 864 bp, Artificial Sequence
  derived and/or modified sequence
atggagttagaacgaatcgtgtcagccgcacttctcgcgttcgttcagactcatctgccagaggcagacctctctggattagatgaggtaatctttagctatgttctgggcgtgctcgaggatctaggcccaagcgggccttcagaagaaaacttcgatatggaagcgtttacagagatgatggaagcgtacgtacccggttttgctcatatacctcgaggtacaatcggtgatatgatgcagaaactttccgggcagctgtctgacgccaggaacaaagaaaacctccaaccccagtctagtggcgtgcagggacaagtgcctatctcacctgagccgctgcaacgcccagagatgctcaaggaagagacccgctcgagcgcagctgcagcggcagatacacaggacgaggctaccggagccgaggaagagctgttgcccggagtcgatgtgctgcttgaggtctttccaacttgcagtgtggaacaggctcagtgggtgctggccaaagctagaggggatctcgaggaggccgttcagatgttagtggagggcaaggaagagggacctgctgcttgggagggtcctaaccaggatttacctaggcggctgcggggacctcagaaggatgaactgaaatcatttattcttcagaagtacatgatggttgattccgcagaggaccagaagattcatcgtcccatggcaccgaaagaggcacctaaaaagcttattcgctatatcgataatcaggtagtgagcaccaaaggggaacgcttcaaagacgtccgaaaccctgaagcagaggagatgaaagcaacatatatcaacttgaagcccgcacggaagtaccggttccattag

SEQ ID NO: 214334 - DNA, 1191 bp, Artificial Sequence
  derived and/or modified sequence
gcccttctcaaacatggccgccacggcgcctctggaagggaaccgctctgggccccgcctttgatctcgttggtggggctgggggatgagagctgcaccgcgcgggacaagtcgccggcggcgcccgacggagcagaagagagagcatggagctggagaggatcgtcagtgcagccctccttgcctttgtccagacacacctcccggaggccgacctcagtggcttggatgaggtcatcttctcctatgtgcttggggtcctggaggacctgggcccctcgggcccatcagaggagaacttcgatatggaggctttcactgagatgatggaggcctatgtgcctggcttcgcccacatccccaggggcacaataggggacatgatgcagaagctctcagggcagctgagcgatgccaggaacaaagagaacctgcaaccgcagagctctggtgtccaaggtcaggtgcccatctccccagagcccctgcagcggcccgaaatgctcaaagaagagactaggtcttcggctgctgctgctgcagacacccaagatgaggcaactggcgctgaggaggagcttctgccaggggtggatgtactcctggaggtgttccctacctgttcggtggagcaggcccagtgggtgctggccaaagctcggggggacttggaagaagctgtgcagatgctggtagagggaaaggaagaggggcctgcagcctgggagggccccaaccaggacctgcccagacgcctcagaggcccccaaaaggatgagctgaagtccttcatcctgcagaagtacatgatggtggatagcgcagaggatcagaagattcaccggcccatggctcccaaggaggcccccaagaagctgatccgatacatcgacaaccaggtagtgagcaccaaaggggagcgattcaaagatgtgcggaaccctgaggccgaggagatgaaggccacatacatcaacctcaagccagccagaaagtaccgcttccattgaggcactcgccggactctgcccgagccttctaggctcagatcccagagggatgcaggagccctatacccctacacaggggccccctaactcctgtcccccttctctactcctttgctccatagtgttaacctactctcggagctgcctccatgggcacagtaaaggtggcccaaggaaggtg

SEQ ID NO: 214335 - DNA, 864 bp, Artificial Sequence
  derived and/or modified sequence
atggagctggagagaatcgtgagcgccgccctgctggccttcgtgcagacccacctgcccgaggccgacctgagcggcctggacgaggtgatcttcagctacgtgctgggcgtgctggaggacctgggccccagcggccccagcgaggagaacttcgacatggaggccttcaccgagatgatggaggcctacgtgcccggcttcgcccacatccccagaggcaccatcggcgacatgatgcagaagctgagcggccagctgagcgacgccagaaacaaggagaacctgcagccccagagcagcggcgtgcagggccaggtgcccatcagccccgagcccctgcagagacccgagatgctgaaggaggagaccagaagcagcgccgccgccgccgccgacacccaggacgaggccaccggcgccgaggaggagctgctgcccggcgtggacgtgctgctggaggtgttccccacctgcagcgtggagcaggcccagtgggtgctggccaaggccagaggcgacctggaggaggccgtgcagatgctggtggagggcaaggaggagggccccgccgcctgggagggccccaaccaggacctgcccagaagactgagaggcccccagaaggacgagctgaagagcttcatcctgcagaagtacatgatggtggacagcgccgaggaccagaagatccacagacccatggcccccaaggaggcccccaagaagctgatcagatacatcgacaaccaggtggtgagcaccaagggcgagagattcaaggacgtgagaaaccccgaggccgaggagatgaaggccacctacatcaacctgaagcccgccagaaagtacagattccactag

SEQ ID NO: 214336 - protein, 195 aa, Artificial Sequence
  derived and/or modified sequence
MLRDGRFACAICPHRPVLDTLAMLTAHRAGKKHLSSLQLFYGKKQPGKERKQNPKHQNELRREETKAEAPLLTQTRLITQSALHRAPHYNSCCRRKYRPEAPGPSVSLSPMPPSEVKLQSGKISREPEPAAGPQAEESATVSAPAPMSPTRRRALDHYLTLRSSGWIPDGRGRWVKDENVEFDSDEEEPPDLPLD

SEQ ID NO: 214337 - protein, 230 aa, Artificial Sequence
  derived and/or modified sequence
MSFKREGDDWSQLNVLKKRRVGDLLASYIPEDEALMLRDGRFACAICPHRPVLDTLAMLTAHRAGKKHLSSLQLFYGKKQPGKERKQNPKHQNELRREETKAEAPLLTQTRLITQSALHRAPHYNSCCRRKYRPEAPGPSVSLSPMPPSEVKLQSGKISREPEPAAGPQAEESATVSAPAPMSPTRRRALDHYLTLRSSGWIPDGRGRWVKDENVEFDSDEEEPPDLPLD

SEQ ID NO: 214338 - DNA, 693 bp, Artificial Sequence
  derived and/or modified sequence
atgagcttcaaacgtgaaggcgacgactggtcccagctgaacgtcctgaagaaacggcgcgttggagacctcttggccagctacatccccgaagacgaggccctgatgctccgagacggacgcttcgcctgcgctatctgcccccaccggcccgttcttgatactctcgctatgctgacagcacaccgcgctggtaagaaacatttgagcagtcttcagctcttttacggcaagaagcagcccgggaaggaaagaaaacagaaccctaagcaccagaatgagctgcgtcgcgaagagactaaggccgaggcacccttgctcactcagactcgccttatcacacagagcgctctacaccgagctccacattataactcttgctgccgtcgaaagtaccgtcccgaagccccgggtcctagtgtctcgctgtctcctatgcctcctagcgaagtcaaacttcagtcaggtaagatttccagggaacccgaaccggcggccggcccccaggccgaagaatctgctactgtatcagccccagctcctatgtcccccacgcgtcgccgagctttagaccactatttaaccttgcggtctagtggctggattcctgacgggcggggccgttgggttaaggatgaaaacgtcgagttcgattcagacgaggaagagccacctgatctgcccctggactag

SEQ ID NO: 214339 - DNA, 693 bp, Artificial Sequence
  derived and/or modified sequence
atgtccttcaagcgggagggagatgactggagccagctgaatgtgctgaagaagagaagagtgggggacctgctggccagctacatcccagaagatgaggccctgatgctgagagatggccgctttgcctgtgccatctgcccccacaggcctgtgctggacaccctggccatgctgacagcccaccgggccggcaagaagcacctgagcagcctgcagctgttctacggcaagaagcagcccgggaaggagaggaagcagaaccccaagcaccagaatgagctgcggcgggaggagaccaaggccgaggcccccctgctgacccagaccaggctcatcacccagagcgccctgcaccgggccccccactacaacagctgctgcaggaggaagtacagacctgaggcccctggccccagcgtgtccctgagccccatgcctccttctgaggtgaagctgcagagcggcaagatcagccgggagcctgagcctgctgctggcccccaggccgaggagagcgccaccgtgtctgccccagcccccatgagccccaccaggagaagagccctggaccactacctgaccctgcggagcagcggctggatcccagatggccggggccgctgggtgaaggatgaaaatgtggagtttgacagtgatgaggaggagcccccagacctgcccctggactag

SEQ ID NO: 214340 - DNA, 693 bp, Artificial Sequence
  derived and/or modified sequence
atgagcttcaagcgggagggcgacgactggagccagctgaacgtgctgaagaagcgaagggtgggagacctgctcgcatcctatatccccgaagatgaggccctgatgctgcgcgatggtcgttttgcttgtgcaatttgtccccacaggcccgtgttggatactcttgccatgctgacagcccatcgtgcaggtaagaaacacctctcaagcctgcaacttttttacggaaagaagcaacctggaaaggaacgaaagcagaatcctaagcaccagaacgagctgcgtcgcgaggaaacaaaggccgaggccccactccttacacagacccgtctcatcactcaatcagcccttcacagagcaccccattacaacagctgctgcaggcgaaagtacagacctgaggcgcccggtccctctgtcagcctgtcgccgatgcccccgagtgaagtgaaactacagtctggcaagatttctagggaacctgagcccgctgctggaccccaggccgaagagagtgccacagtgtccgcccccgctccgatgtcacccactaggagaagggcattagaccactatctgacattaagatctagcggctggattcctgatggacgtggccgatgggtgaaagacgagaacgtcgagttcgactccgacgaggaggagccaccagatctaccgctggactag

SEQ ID NO: 214341 - DNA, 693 bp, Artificial Sequence
  derived and/or modified sequence
atgagttttaaaagagagggggatgattggtctcagttgaacgtgctgaagaagcggcgagtgggcgatctccttgcgagctatattcccgaggatgaggccttgatgcttcgcgacggtcggtttgcatgcgcgatttgcccacatcgacccgttcttgacaccctggccatgctcacagctcatcgggctggcaagaaacatctgagtagccttcagctgttttacggcaagaagcaacccggaaaagaaagaaaacagaaccccaaacatcagaacgagctgcgcagagaagagacaaaagccgaggcaccgctgttgacacaaactcgcctcatcacacagtcggctttgcatagggctccgcattacaatagttgttgccgaaggaagtatcgcccagaagctccagggccttcagtgtccctgagccctatgccgccaagtgaagtgaagctacagtcgggaaagatttctagagaacctgaacctgcagctggacctcaagccgaggaatcagctaccgtatccgcccctgcacctatgtctcctaccaggcgacgagctctggaccattacctgacgctccgatcctcaggctggattcctgatggcagaggcagatgggtgaaagatgagaatgttgagtttgatagcgacgaggaggagcctcccgacctccccctcgactag

SEQ ID NO: 214342 - DNA, 869 bp, Artificial Sequence
  derived and/or modified sequence
ctcttgctacggtggcctggaggagtggcgaaaccggaacagagaatttatcacttctgggactcacagtcgtgatgtctttcaagagggaaggagacgattggagtcaactcaatgtgctcaaagtaagcgtgagcggagaggatctggagccgcttcagtcgctccctgaagaaaagaagagtcggggacctcctagccagttacattccagaggatgaggcgctgatgcttcgggatggacgctttgcttgtgccatctgcccccatcgaccggtactggacaccctggccatgctgactgcccaccgtgcaggcaagaaacatctgtccagcttgcagcttttctatggcaagaagcagccgggaaaggaaagaaagcagaatccaaaacatcagaatgaattgagaagggaagaaaccaaagctgaggctcctctgctaactcagacacgacttatcacccagagtgctctgcacagagctccccactataacagttgctgccgccggaagtacagaccagaagcccctggtccctctgtctccctttcccctatgccaccctcagaggtcaaactccaaagtgggaagatcagtagggaacctgaacctgcggctggcccacaggccgaggagtcagcaactgtctcagcccctgcacccatgagccccacaagaagacgagccctggaccattatctcacccttcgaagctctggatggatcccagatggacgaggtcgatgggtaaaagatgaaaatgttgagtttgactctgatgaggaggaaccacctgatctccccttggactgatacccttttcccattcattcacaaataaattacaatgggtgctgagaacttaa

SEQ ID NO: 214343 - DNA, 2016 bp, Artificial Sequence
  derived and/or modified sequence
acaggaagagaaggaaaaaagagaaggcgctgtcccgctcttgctacggtggcctggaggagtggcgaaaccggaacagagaatttatcacttctgggactcacagtcgtgatgtctttcaagagggaaggagacgattggagtcaactcaatgtgctcaaaaaaagaagagtcggggacctcctagccagttacattccagaggatgaggcgctgatgcttcgggatggacgctttgcttgtgccatctgcccccatcgaccggtactggacaccctggccatgctgactgcccaccgtgcaggcaagaaacatctgtccagcttgcagcttttctatggcaagaagcagccgggaaaggaaagaaagcagaatccaaaacatcagaatgaattgagaagggaagaaaccaaagctgaggctcctctgctaactcagacacgacttatcacccagagtgctctgcacagagctccccactataacagttgctgccgccggaagtacagaccagaagcccctggtccctctgtctccctttcccctatgccaccctcagaggtcaaactccaaagtgggaagatcagtagggaacctgaacctgcggctggcccacaggccgaggagtcagcaactgtctcagcccctgcacccatgagccccacaagaagacgagccctggaccattatctcacccttcgaagctctggatggatcccagatggacgaggtcgatgggtaaaagatgaaaatgttgagtttgactctgatgaggaggaaccacctgatctccccttggactgatacccttttcccattcattcacaaataaattacaatgggtgctgagaacttaactttccttaagtctggttccttgttggatctcaggatttcagatctgttcattctcattccaactactccttgcctgcaaggtacacagctctccacactccttttttttttttttttttttttgaggcagagtctcgctctatcgcccaggctggagtgcagtggcacgatctcggctcactgcaagctctgcctcccaggttcacgcctttctcctgcctcagcctcctgagtagctgggactacaggcgcccgccaccatgcccagctaattttttgtatttttagtagagacggggtttcactgtgttagccaggatggtctcgatctcctgacctcgtgatccgcccacctcggcctcccaaagtgctgggattacaggcatgagccaccgcacccagccacggctatccatacttctaacccctcccccacctcctaccaaagccatgccaagcgtcagctgcatcagcctggtgccctattaataagactgtcaaaaagaggtctttgcccttcatgttgtctgcctgcttctccactaccactcaaagtcctttcccccttcaaatcacataaggactgcaggtaggcactagggggacctggccacatctggaaacagggctgtggctaagttccctgtgaaagtagaagagtcaaaaggcattggcagggttatggggaacaccaagggagggaacacccccacctcctcctagtaacctgaacctccctgcctgctgatccccagagtataaataatcccctggtgaactggcagtaacccttgggggttagcgccaagattctcaccccaaagcccaaggaaggaggcaggcaaaatggatagaagggcttttatttacaggaaaggaggacagatgaggatttaagtgtccagtgctcccagcgctagttggtaaagggaaatgcagtgttatctcttcttttgctggcgacctgtaaaggagcaatattaaacataagtgtttgttccagctcctgctttctgcaaaggcactcttctcctttccagtcccttagccaaactcataaattggtagtgtcttaggccaccttacaggcccatcccacattaacaaaacaaaacaagaaaccacaccacaaataaaattacgatacctctaaacaag

SEQ ID NO: 214344 - DNA, 693 bp, Artificial Sequence
  derived and/or modified sequence
atgagcttcaagagagagggcgacgactggagccagctgaacgtgctgaagaagagaagagtgggcgacctgctggccagctacatccccgaggacgaggccctgatgctgagagacggcagattcgcctgcgccatctgcccccacagacccgtgctggacaccctggccatgctgaccgcccacagagccggcaagaagcacctgagcagcctgcagctgttctacggcaagaagcagcccggcaaggagagaaagcagaaccccaagcaccagaacgagctgagaagagaggagaccaaggccgaggcccccctgctgacccagaccagactgatcacccagagcgccctgcacagagccccccactacaacagctgctgcagaagaaagtacagacccgaggcccccggccccagcgtgagcctgagccccatgccccccagcgaggtgaagctgcagagcggcaagatcagcagagagcccgagcccgccgccggcccccaggccgaggagagcgccaccgtgagcgcccccgcccccatgagccccaccagaagaagagccctggaccactacctgaccctgagaagcagcggctggatccccgacggcagaggcagatgggtgaaggacgagaacgtggagttcgacagcgacgaggaggagccccccgacctgcccctggactag

SEQ ID NO: 214345 - protein, 293 aa, Artificial Sequence
  derived and/or modified sequence
MGFPAAALLCALCCGLLAPAARAGYSEERCSWRGSGLTQEPGSVGQLALACAEGAVEWLYPAGALRLTLGGPDPRARPGIACLRPVRPFAGAQVFAERAGGALELLLAEGPGPAGGRCVRWGPRERRALFLQATPHQDISRRVAAFRFELREDGRPELPPQAHGLGVDGACRPCSDAELLLAACTSDFVIHGIIHGVTHDVELQESVITVVAARVLRQTPPLFQAGRSGDQGLTSIRTPLRCGVHPGPGTFLFMGWSRFGEARLGCAPRFQEFRRAYEAARAAHLHPCEVALH

SEQ ID NO: 214346 - DNA, 879 bp, Artificial Sequence
  derived and/or modified sequence
atggggtttcccgcagctgccctgctgtgtgctctttgttgcggtctcctagcacctgcagcccgggctggttactccgaagagcgctgctcatggcgaggatcgggactgactcaggaaccagggtccgtgggtcagctagcactcgcctgtgcggaaggagccgttgaatggctatacccagcaggagccttacggctgacactcggaggccctgatccacgcgctcgtccgggtattgcatgcctgcgtccggttcgtccgtttgccggcgcacaggtgtttgctgagagagctggaggcgcactcgagctgttactcgccgaggggccaggaccagcaggagggcgatgcgtgcggtgggggccacgtgagcgacgcgccttattcctgcaggctacacctcaccaggacatcagcagaagggtagcagcttttcgtttcgagttgcgagaggatggacgtcccgagctgcccccccaggctcatggcctcggagtggacggtgcctgccggccctgctccgacgccgaattgttactggcagcctgtacatccgacttcgtcatccatggaatcattcatggagttacacacgatgtagaactgcaagagtctgtgattaccgtcgtggcagcccgggtccttcgtcagactccaccgctattccaggccggcaggtcaggtgaccaaggattaacgtctattcggactccacttaggtgcggagtgcaccctggaccagggacattcctctttatgggttggagcagattcggtgaggcgcgattggggtgtgcaccacgctttcaggagttccgcagggcctatgaggccgctagagctgctcaccttcacccttgcgaagtagcactccat

SEQ ID NO: 214347 - DNA, 879 bp, Artificial Sequence
  derived and/or modified sequence
atgggtttccctgcagccgctttgctgtgtgccctgtgctgtggattgctcgctcctgctgctagggccgggtactccgaagagcgatgttcctggcggggaagtggcttaacacaggagcccggctctgttggtcagctcgctctggcttgtgcagaaggagcggttgagtggctatatcccgccggggcactgcggttgaccttgggaggccctgatcccagagcccgcccaggcattgcttgtctacggcctgtcaggcccttcgcaggggcacaggtttttgccgagagggccggaggggctttagaactccttcttgctgaaggcccaggcccggctggcggaaggtgcgttcgctggggcccgcgggagaggcgcgccttgttcttgcaagccactcctcatcaggatattagcaggcgcgtagctgctttcaggttcgagcttagggaggatggcagaccggaactgcctcctcaagctcatggtctcggagtggatggcgcctgtcggccttgcagtgacgctgagcttctgctcgccgcatgcacaagcgatttcgtaattcacggtattattcacggagtgacgcacgacgtggaactgcaggaatctgtgatcacagttgtggccgctagggtactgcggcagacccctcccctgtttcaggcaggccggagcggcgaccaaggtctgactagcatcaggaccccacttcgctgtggcgtgcaccctggacccggtaccttcctgttcatgggatggtcacgctttggtgaggcaaggcttggttgcgcccctaggtttcaggaatttcgacgggcctatgaagcagcgagggctgcccatctgcatccctgcgaggttgctttgcat

SEQ ID NO: 214348 - DNA, 879 bp, Artificial Sequence
  derived and/or modified sequence
atgggttttccggcggcggcgttattatgtgcgttatgttgtggtctactagcgccggcggcgcgtgcgggttattcggaagaacgatgttcgtggcgaggttcgggtctaacgcaagaaccgggttcggtaggtcaattagcgttagcgtgtgcggaaggtgcggtagaatggttatatccggcgggtgcgttacgattaacgttaggtggtccggatccgcgagcgcgtccgggtatagcgtgtttacgtccggtacgaccgtttgcgggtgcgcaagtatttgcggaacgtgcgggtggtgcgttagaattattactagcggaaggtccgggtccggcgggtggtcgatgtgtacgttggggtccgcgagaacgtcgtgcgctatttttacaagcgacgccgcatcaagatatatcgcgtcgtgttgcggcgtttcgttttgaactacgtgaagatggtcgtccggaactaccgccgcaagcgcatggtttaggtgttgatggtgcgtgtcgaccgtgttcggatgcggaattactattagcggcgtgtacgtcggattttgttatacatggtataatacatggtgtaacgcatgatgttgaactacaagaatcggtaataacggttgttgcggcgcgtgttttacgtcaaacgccgccgttatttcaagcgggtcgttcgggtgatcaaggtttaacgtcgatacgtacgccgttacgttgtggtgttcatccgggtccgggtacgtttctatttatgggttggtcgcgttttggtgaagcgcgattaggttgtgcgccgcgatttcaagaatttcgacgtgcgtatgaagcggcgcgagcggcgcatctacatccgtgtgaagtagcgctacat

SEQ ID NO: 214349 - DNA, 879 bp, Artificial Sequence
  derived and/or modified sequence
atgggctttcctgccgcggccctgctctgtgcactatgctgcggcctgttggcccccgccgcccgggccggttattccgaggaacgatgctcatggaggggaagcggattaacccaggagccagggtcagtgggacaactggcactagcttgcgctgagggggcagtggaatggctttaccctgccggtgccttacgcctgacgctggggggcccagacccacgcgcacgacctggtattgcatgtcttaggcccgtccgccccttcgccggagcacaagtatttgccgagcgagccgggggagccctcgaactgcttttggccgagggtccagggcctgctggcgggagatgtgtacgctgggggcccagagagcggcgtgcactgtttctccaagccacgccacaccaggacatttccaggcgggtggccgcctttagattcgagctcagggaggatggccgaccggagctgcctcctcaggctcatggactgggagttgatggtgcctgccgcccttgcagcgatgctgaactcttgctggccgcatgtacatcagacttcgtgatccacggtatcatacacggggtaacccatgatgtggaacttcaggagtcggtaatcaccgtggtcgctgcccgggtccttcgacagacacccccactgtttcaagctggaagatctggagaccagggtctgactagcatccgcacacctctcaggtgtggggtgcaccctgggccagggacgttcctcttcatgggatggagcaggtttggagaagcccggctgggatgtgctccaaggttccaggaatttcgtcgtgcatatgaggccgcccgcgccgcgcacctccatccttgcgaggtggccttacac

SEQ ID NO: 214350 - DNA, 879 bp, Artificial Sequence
  derived and/or modified sequence
atggggtttccggccgcagctctgctgtgtgccctgtgctgtggcctgctcgcccccgccgctagagccggatactccgaggagcgctgttcctggcgagggagcgggctgacgcaagaaccaggctccgtgggacagctcgctttagcctgtgcggagggtgccgtcgaatggctatatcccgcgggtgctttgagactcacattgggaggccccgatccacgagctcgccccggcatagcatgcctgcgtccagttaggcctttcgcaggcgctcaggtttttgctgagcgggccggcggtgccttggagctgctgctcgccgaggggcccgggccagctggaggcagatgcgtgcggtggggcccgagagaacgaagagctctgttcctgcaagctactccgcaccaggacatctcccgccgcgttgccgccttccgatttgaattgcgcgaggacggcagacctgaacttccccctcaggctcacggcctaggcgtggatggagcttgccgtccttgctctgacgccgagctactcctggccgcgtgtacgagcgattttgtgattcacggtattatccatggagttacgcacgatgtagaacttcaggagtctgtcattaccgtggtggccgcaagagtcctcaggcagactccccctctcttccaggccggccgctcgggcgatcagggactcacatcaatccggactcctctcagatgtggggtccaccccggacccggcacctttctgtttatgggttggtctcggtttggtgaggcacggttaggttgcgcgccgcgcttccaggaatttcggagggcttatgaagcagcccgtgcggcccacttgcacccctgcgaggtggctttgcac

SEQ ID NO: 214351 - DNA, 879 bp, Artificial Sequence
  derived and/or modified sequence
atggggtttccagcggctgccctgttgtgcgcactatgctgcggcctcttagcacccgcggcacgcgcaggctatagtgaggagcgatgcagctggcgcggttcaggcttgactcaggaacccgggagcgtcggacaattggctctggcttgtgctgaaggagcggtggagtggctttaccccgctggtgccctccggctgactctgggcggcccggacccaagggctcgccccggaattgcttgtctgaggcccgtaaggccctttgcgggtgcccaggtgtttgccgagcgcgcaggaggagcactggagctgctgctggccgagggacccggccctgcaggcggacgctgcgtccgatgggggccaagggagagaagggcattattcctgcaggcaaccccgcaccaagacatcagccgccgggttgccgcgtttcggttcgagctgcgggaagacgggagaccagaattgccaccgcaagcccacggactgggcgtggatggcgcctgcaggccgtgtagcgatgctgaactgctgctggccgcctgcacgagcgacttcgttatccatgggataattcacggcgtcacccatgatgtcgaactgcaggagagtgtgatcactgtggtagccgcccgagtcctgagacagaccccacctctgttccaggccggacggtccggagaccagggacttacttctatacggaccccgctgcgctgcggcgtgcaccctgggccaggcacgttcttgtttatggggtggagtcgttttggcgaggcgcgcctcgggtgcgcgccaaggtttcaggaatttcgtagagcttacgaagcagccagagctgctcacctacacccttgtgaagttgccctgcac

SEQ ID NO: 214352 - DNA, 879 bp, Artificial Sequence
  derived and/or modified sequence
atgggcttcccagcagcagcgcttttgtgcgctctctgctgcggcctgctcgcaccggcggccagagccgggtactccgaggaacggtgctcatggcgcggcagcggacttacccaggaaccgggttcagtcgggcaactggccctggcttgcgccgaaggagcagtggagtggttgtacccggccggtgcgctgcgtctcactctgggagggccagatccgagagcccggccgggaatcgcgtgcctgcgcccagttagacctttcgccggggcacaggtgttcgctgaacgggccgggggagcgctggagctgctgctggcggagggacccggcccagcaggaggccgctgcgtccggtggggacctagagagcgccgggcactcttcctgcaggcgaccccgcaccaggacatctccagacgagtggctgcttttagatttgagctgcgggaggacggaaggcccgaacttccgcctcaagcccacggccttggcgtggatggcgcttgtagaccatgctcagatgcagaactgctgctggctgcgtgcacttcggacttcgtcattcatggaatcatccacggagtgacccatgacgtggagctgcaggaatcggtgatcactgtcgttgccgccagagttctccggcaaactcctccccttttccaggcgggaagatccggagatcagggactcacttcgattaggactccgctccgctgcggggtgcatccggggcctggaactttcctgttcatgggctggtcccgctttggcgaagcccgcctcggatgcgcccccagattccaagagttccggcgggcttacgaagcagcccgggccgcccacttgcacccgtgcgaggtggctttgcac

SEQ ID NO: 214353 - DNA, 879 bp, Artificial Sequence
  derived and/or modified sequence
atgggtttccctgcagcagcactgttgtgtgcactctgttgtggtttgctggcacctgccgcacgggcaggatacagcgaggagcgatgttcatggaggggctcaggactcacccaggaacctggctccgtcggacaacttgcgcttgcatgtgccgaaggagcggtggagtggctgtacccagcaggagctctgcgtctcactcttgggggtccagatccacgggctcgccccggtatagcgtgtcttagaccagtgcgcccctttgcaggagcccaagtctttgcagaacgggccggtggcgcacttgaactgctccttgcggaaggacctggacccgcaggagggagatgtgtcaggtggggtcccagggagaggcgtgcacttttccttcaagcaaccccacatcaggatatctcaagacgtgtcgcagccttccggtttgaacttagagaagatggtagacctgaactgcctcctcaggcacacggacttggagtggatggtgcctgtagaccatgctccgatgcagagctgctgctggctgcctgtacttcagactttgtgattcatgggattatacacggcgtgacccatgatgtggagttgcaggagagcgtcatcacggtggtcgcggcacgagttctgagacagacccctccactttttcaagcaggccgaagcggtgaccagggactcacctccattcgcactcctctgaggtgtggtgtgcacccaggtccaggcaccttcttgtttatggggtggagccggtttggagaggccaggctgggctgcgcaccaaggtttcaagaatttaggagggcatacgaagccgccagggcagcgcacctgcatccatgtgaagtggccctccac

SEQ ID NO: 214354 - DNA, 879 bp, Artificial Sequence
  derived and/or modified sequence
atgggatttccggcggcagctctgttgtgcgccctctgttgcggactgctcgcacctgcagcccgggccggatactcagaagaacgttgctcctggcgcggtagcggcctgactcaggagccgggatcggtgggccaactcgccctcgcctgcgctgagggagccgtggaatggctgtacccggccggcgctcttcgcctgacgctgggaggacccgatccgagagcgaggcctggaatcgcatgcctgcggcctgtgcggccattcgccggagctcaggttttcgctgaacgcgccggtggcgccctggaattgctgttggctgaaggacctggacctgctggaggtcgatgcgtccggtggggcccgagagaaagacgcgcactgtttctccaagccacccctcatcaggacatcagccgacgggtcgcagcgtttaggttcgaacttcgggaagatgggcggcccgaactgccgcctcaggcccacggattgggcgtggacggagcgtgtcgcccctgctcggacgcggagcttctcctggccgcgtgtacgagcgatttcgtgatccacggaatcattcatggtgtcacccacgacgtggaactccaggagtccgtgatcaccgtcgtcgcggctagagtgctgcggcagactccccctctcttccaagcgggacggtcaggtgaccagggcctgacttctatccgcactccactccggtgcggggtgcatcccggccctggtaccttccttttcatgggatggtcgcgctttggcgaggccagactcggctgcgccccacgcttccaagagttccgccgtgcctacgaagcggccagagcggcccatctgcatccatgtgaggtggctctgcat

SEQ ID NO: 214355 - DNA, 879 bp, Artificial Sequence
  derived and/or modified sequence
atgggatttccggccgctgcactgctgtgtgcactctgctgtggtctgctggcgccggcagcaagggctgggtactccgaagaacgctgctcctggagaggttcaggacttacccaagaaccaggctccgtgggacagcttgcactcgcctgcgccgaaggtgctgtcgagtggctttacccggctggtgctctgcgccttacgctgggcggtccggacccgagggccaggccaggtatcgcatgcctccgcccggtccgcccgttcgcaggggcccaggtgttcgccgaacgcgcgggcggcgctctcgagcttctgctggcagaaggcccaggcccggccggcggacggtgcgtgagatggggtccccgagagcgacgggccctgtttctgcaagccacccctcaccaggatatatccaggcgggtggcggcgtttagattcgagctgcgggaggacggtagaccagaacttcccccgcaagcgcatggcctcggggtggacggtgcatgccgcccatgctcagatgccgaactgttgctggccgcatgcacctccgacttcgtgatccacggaatcatccacggcgtcactcacgacgtcgaacttcaggaatcggtaatcaccgtggttgccgcacgggttttgcggcagactcctccgctcttccaggcgggaagatcaggagatcagggactcacttcgattcgcactccactgcggtgcggcgtgcatcccggaccaggcaccttcttgtttatgggctggagccgcttcggggaggcccggcttggatgtgcaccgagattccaagaattccggagagcttacgaggccgcgagggccgcccatctgcatccgtgtgaggtcgcgctccac

SEQ ID NO: 214356 - DNA, 879 bp, Artificial Sequence
  derived and/or modified sequence
atgggattccctgccgcagcacttctctgtgcactgtgttgcggcctgctggcgcccgctgcccgcgctggatattcggaagagcgctgttcttggaggggcagtggtctgacccaggagccaggatccgtcgggcagctggctttggcctgcgccgagggagcagtcgaatggctgtacccagctggcgccctcaggcttacactgggcggacccgaccccagggcccgcccaggtattgcatgcttgcgtcccgtgcgtccgtttgcaggcgcacaggtcttcgccgaacgcgcagggggggcattggaactccttctagcagagggcccagggccagcaggaggaaggtgtgtgcgttgggggccacgggagaggcgtgccttatttctacaagcaacccctcaccaggatatttccagacgcgtagccgcctttcgcttcgaattgagggaagacggccgaccagagctgcccccacaggctcacggcctgggggtggacggggcatgtcgcccgtgctctgacgcagaacttctgctagcagcctgtacttccgatttcgtcattcacggaattatccacggggtgacacacgatgttgagctccaagagtcggtcattactgtcgtggccgcccgagtcctacgacaaacccctcctctgttccaggcaggcaggtctggcgaccaggggctaaccagtattcggacacccctgcgctgtggtgtgcaccccggcccgggaactttcctctttatgggctggtctcgattcggggaagcccggctggggtgcgcccctcggtttcaggagttccggagggcttacgaagccgctcgggcagcacatctgcacccatgtgaggtcgcgctacat

SEQ ID NO: 214357 - DNA, 879 bp, Artificial Sequence
  derived and/or modified sequence
atgggttttccagcggcagcccttctgtgtgcactctgctgtggcctgcttgctccggctgcgcgggcaggatactcagaagaaaggtgtagctggcgcggatctggcctcacccaggagcctggttcggtgggccagttggcactcgcgtgtgccgaaggggccgtggagtggctgtatccagcaggtgcccttcgcctgactcttggggggcctgatcctcgggcacgaccaggaatagcgtgcctcagacccgtcaggcctttcgcgggggcacaagtgtttgccgaaagggcaggaggagcactggagcttctgctcgcagagggtcccgggccggccgggggccgctgtgtgcgctggggacctcgggaacgtcgagcactttttctgcaagccaccccccatcaggacatctcacgtagggtggctgcattcaggttcgagctgagagaggatgggcggccagaactcccaccgcaagcgcacggactgggtgttgatggagcttgccgaccatgcagcgatgcagaacttctcctggcggcctgcacctcggactttgttatccacggcattattcacggtgtgacgcatgacgttgaattgcaggaatccgtgatcaccgtggtcgcagcaagggtgttgcgacaaactcctcccctgtttcaggcaggaagatcgggggaccaaggacttacttcaatccgcactccactgagatgtggtgtgcatccgggtcctggtacctttctcttcatgggctggtcccgatttggagaggctcgacttggatgtgcacctcgttttcaagagttcaggagagcatacgaagcagctagagcagcacatctgcatccgtgtgaagtcgcgctccat

SEQ ID NO: 214358 - DNA, 879 bp, Artificial Sequence
  derived and/or modified sequence
atgggattcccggcagctgcattgctttgtgcactttgctgcggtctgcttgcaccagccgcgcgagctggctactcggaagaacgctgtagctggcggggatctggcctgacccaagagccaggatcggtcggacagctggccctcgcctgcgccgaaggagccgtggaatggttgtacccggcaggggccctgcggctgaccctgggcggccccgatccgcgcgcccgccctggaatcgcctgcctgcgtccggtgcggcctttcgcgggcgcccaggtgttcgctgagagggcggggggagccctcgaactcttgctcgccgagggacccggaccggcgggaggccggtgcgtgcggtggggaccaagagaacgccgcgccctgttcctgcaagcgactcctcaccaagacatctccaggcgcgtggccgccttcagatttgaactccgcgaggacggcagacccgagctgcctcctcaggcacacggtctgggagtggatggagcgtgtagaccgtgctccgacgcggagctgctgctggccgcgtgtacctcagattttgtgattcacggaatcatccacggtgtgactcatgacgtggagttgcaggaatccgtgatcactgtcgttgcagcccgggtcctcagacaaaccccgccactgttccaggctggaaggtcgggggaccaggggctcacttcaatcagaaccccactgcggtgcggtgtccatccaggaccggggacgttcctctttatgggctggagccgcttcggagaggctcgcctgggctgcgcaccgcggttccaggaatttcgccgggcgtacgaggccgctagggcggctcatctccacccgtgcgaagtcgcactccat

SEQ ID NO: 214359 - DNA, 879 bp, Artificial Sequence
  derived and/or modified sequence
atgggcttccctgctgctgctctcctctgtgccctgtgctgcggccttctcgcgcctgcagccagggcagggtatagcgaagagagatgttcttggcgcggctccggcctaacacaggagcctggatctgtcggacagttggccttggcgtgcgcagagggggcagttgagtggctttatcctgcaggggcactccgcctgacgcttgggggccctgacccacgagcacgcccaggaatagcatgcctccgccccgtacgcccctttgccggcgctcaggtgtttgcggagcgggcagggggcgcactcgagcttctgctggctgagggcccggggcccgcaggcgggcggtgcgtgcgatgggggccacgagagcgccgtgctctgtttttacaggcgacgccccaccaggatattagccgtcgggtggcggcgtttaggtttgagttgcgagaggatggtcgaccggagctgccgccccaggctcacggattaggcgtggacggtgcttgccgcccttgcagcgatgccgagctgctgttggcagcctgtacaagcgacttcgtgatacatgggataattcatggcgtgactcatgacgttgaattgcaagagtccgtgatcacagttgtggcggcccgagtcttacgacagaccccgccactcttccaggcgggcaggtccggcgaccagggactcactagtattagaacccctctgcggtgcggagtgcacccgggccctggaacgttcctgtttatgggatggagccggtttggggaggcaaggcttggctgtgctccacgcttccaggaattcagacgtgcatacgaggccgcccgcgccgctcacttacatccctgtgaagtggcactgcat

SEQ ID NO: 214360 - DNA, 879 bp, Artificial Sequence
  derived and/or modified sequence
atgggattccctgcggcagcacttctgtgtgcactgtgctgtgggctgcttgcacccgccgcaagagcaggttactcggaggagcgttgtagctggcgtggatccggcctcactcaagaacccggatcggtcggtcagttggctcttgcatgcgctgaaggcgcggtggaatggctttacccggcaggagccctcagactgactctcggtggcccggatcctcgagcgcgtcccggaattgcatgcctgcgtcctgtgcggcccttcgctggcgcacaagtgttcgcggaaagggcaggaggagcactggaactgctgctcgcagaaggccctggacctgccgggggccgatgcgtccgatgggggccccgggaaagaagagctctctttcttcaggccaccccacatcaggatatcagcaggcgtgtagcagcgttccggtttgagcttcgcgaggacggaaggccagagttgccacctcaagcacatggactgggagtcgatggagcgtgtcggccatgctcggatgcagaactgctcctcgccgcctgtacctcagactttgtgatccacggtatcattcatggtgttacgcatgacgtggaacttcaggagtccgtgataaccgtggtcgcagcacgcgtacttagacaaaccccgccattgtttcaagccggtaggtcaggtgatcagggactgacctcgattagaactcccctgcggtgtggtgtgcatccaggcccgggaacttttctctttatgggttggtcccgattcggagaggcgcgacttggctgtgcaccgcgctttcaagagtttagacgcgcttacgaagctgcacgcgcggcccacctccacccttgtgaagtggcactccat

SEQ ID NO: 214361 - DNA, 879 bp, Artificial Sequence
  derived and/or modified sequence
atgggttttcctgcggccgcccttttgtgcgcgctgtgttgcgggctgctggcccccgcggcccgggctggatactctgaggaacgatgttcctggagaggatccggtctcacacaggaacctggttccgtaggacagttggcgctggcctgcgcagagggcgccgtggaatggttgtaccctgccggagcgcttcgactcacgttgggggggccagatccaagggctcggcctgggattgcctgcttgagacccgtcaggccctttgcgggcgctcaggtgttcgccgaacgagcgggaggggccctagagctgctgctggctgaaggtcccggaccggcggggggccgttgtgttaggtggggtccgagggagcgccgcgcattgttcctgcaggccacaccacaccaggatatcagccggcgcgttgctgctttccgcttcgagcttcgagaagatggccgccccgaactccccccccaagcccacggactcggagtcgacggtgcctgtcgaccatgcagtgatgctgaattactgctggccgcctgtacctccgattttgtcatccatggcattattcatggagtcacgcacgatgtcgagctgcaggaatccgttattaccgttgtagcagccagggtcctcagacagacacccccactgttccaggccggacgctccggagaccagggcctcactagcatccggaccccactccgttgcggagtgcaccctgggccgggtacctttctctttatgggatggagtagattcggggaagccaggctgggctgcgcccccagatttcaggagttccgcagagcctatgaggcggcaagggctgcacacttgcacccgtgcgaggtagctttgcac

SEQ ID NO: 214362 - DNA, 879 bp, Artificial Sequence
  derived and/or modified sequence
atgggtttccccgctgccgcgctgctgtgcgctctgtgttgtggactgctggccccagctgctcgtgcgggctatagcgaggaacgctgcagctggcgcggttctggcctgacgcaagagcctggtagcgtgggtcagcttgcactggcatgtgccgagggagccgtcgaatggttgtaccccgcgggcgctctgagattgaccctgggcggcccagatccgcgcgctcgcccgggtatcgcgtgcttacgccctgtgcggccatttgctggtgcacaggtatttgccgaacgggctggtggcgcattggaactgctcctggcagaaggtccaggcccagcgggtggtcggtgtgtccgctggggtcctcgtgagaggagagcgctgttcttacaggcaaccccgcaccaggacatttcccgcagagtcgccgcgttccggttcgagctgagagaggatggacgtcccgagctgccgccacaggcccacggcctgggcgttgacggtgcttgccgcccttgctccgacgcggagcttctgctggcggcgtgtaccagcgacttcgtcattcacggcatcatccacggcgttacccacgatgtggaactgcaagagagcgttatcacggtggttgccgcgcgggtgctgcgccagacgccacctcttttccaggccggccgctctggtgaccagggcctcacctctattaggacgccactccgttgcggcgttcacccaggccccggcacatttctttttatgggctggtcccgctttggtgaagcacgcctcggatgcgctcctcgctttcaagagtttcgtcgagcgtatgaagctgctagagcggcccacttgcacccgtgcgaagtcgcgctccac

SEQ ID NO: 214363 - DNA, 879 bp, Artificial Sequence
  derived and/or modified sequence
atgggatttccagccgctgcgcttctctgtgcactgtgttgtggactcctggcccctgccgctcgcgccggatactcagaagaacggtgttcttggcgcggctcagggctcacccaggaacccggctcagttgggcagcttgccctcgcatgtgcagagggagcagtggagtggctctacccggccggggccctgcgtctcactttaggcggtcccgacccccgggcaagaccaggtattgcatgtctgaggcctgtgagaccgttcgccggggcccaagtgtttgcggaacgcgcggggggagcacttgaactgctgctggctgaagggccaggccccgcaggggggagatgcgtccgctggggaccgcgggaaaggcgcgccctgttcctgcaggccaccccccaccaagatatcagcaggcgggtggctgcgttccggtttgagctaagagaggatggacggcccgaactcccccctcaggctcacggtcttggcgttgacggagcgtgtcgaccatgctctgacgcagaactgttgctggccgcctgcacaagcgactttgtgatccacggtatcatccacggcgtaacccacgacgtggaattacaagaatctgtgatcacggtagttgccgcaagagttttgcggcagactcctcctctgtttcaggctggccggagtggggatcagggattgactagcattagaacgcctctgcgctgtggcgtccaccccggccccggtaccttcctctttatgggatggtctcggttcggggaggctcggctgggatgtgcccctcgctttcaggaatttcgccgcgcttatgaagccgccagggccgcacacctccacccctgcgaggtggctttgcac

SEQ ID NO: 214364 - DNA, 879 bp, Artificial Sequence
  derived and/or modified sequence
atgggctttccagccgcagctcttttgtgcgccctgtgttgcggcctgcttgcacctgctgcacgagcaggatacagcgaagagaggtgttcgtggaggggaagcggacttacccaagaacccggctccgtcggtcaacttgcacttgcctgcgcagaaggagcggtggaatggctgtacccggcgggcgcactccggctcactctggggggaccagaccctcgggcacggcctggcattgcatgcctccggccagtgcggccattcgcgggggcccaggtgtttgccgaacgagcaggtggcgcgctggaactcctcctggccgaaggacctgggcccgcagggggaaggtgtgtgcggtggggaccacgcgaaagacgtgctctgtttctccaagcaacccctcaccaagacattagccgccgcgtggcagcatttcgctttgagctgagagaggacggtcgccccgagcttccaccacaagcacacggtcttggagtggacggagcatgtagaccatgttccgatgctgagcttcttttggcagcatgtacttccgattttgtgattcatggaattatccatggggtgacccatgacgtcgaacttcaagaatcggtgattaccgtcgtggcagcccgcgtcctgagacaaactccgcctctcttccaggcaggacggtctggtgatcaaggactcacttcaataagaacccccctccgttgtggtgtccatcccggtcctggaacctttcttttcatgggttggtcccggtttggggaggcgagactgggatgtgccccacggtttcaagaatttagaagagcctatgaagcagcacgagcagcacatttgcacccttgtgaagtcgcacttcat

SEQ ID NO: 214365 - DNA, 879 bp, Artificial Sequence
  derived and/or modified sequence
atggggttcccagcagcagccctgctttgcgcgctttgttgtggattgttggcacctgccgcacgtgcaggctactccgaagaaaggtgtagctggagaggatcgggactcactcaagagcccgggtctgtgggacaactggcactggcctgcgcggaaggagctgtggaatggctttacccggcaggtgcacttagactgactctggggggaccagaccctcgcgcgcgccctggaatagcctgtcttagacctgtgcgtccttttgcaggcgcacaggttttcgccgaacgggccggaggggcccttgaattgcttctggcagaggggcctggacccgcgggaggtcggtgtgtccgatggggtccacgcgaacgccgggcactgtttcttcaagccacccctcatcaagatatctcccgacgggtggcagcattccgtttcgaactccgggaagatggacggcctgaactccccccacaggcccatggactgggcgtggatggcgcttgtcggccctgttcggatgcagaacttcttcttgccgcctgcacctcggattttgtgattcatggtattatccacggcgtcactcatgatgtcgaactgcaagaatcagtcattaccgtggttgccgcccgtgtgcttcgtcaaactccgcccctgtttcaggccggccggtccggtgatcaaggcctgacctcaataagaacccccctcagatgtggggtgcatccaggcccaggaacgtttctgttcatggggtggtcccgctttggcgaagctagactgggttgcgcaccccgcttccaagaatttcgtagagcatacgaggcagctagagcggcgcacctccatccttgtgaggtggcactgcat

SEQ ID NO: 214366 - DNA, 879 bp, Artificial Sequence
  derived and/or modified sequence
atgggtttcccagcagcagcacttttatgtgcattatgttgtggattattagcaccagctgcacgagcaggatattctgaagaaagatgttcatggagaggatcagggttaactcaagaaccaggaagtgttggtcaattagctttagcttgtgctgaaggagctgttgaatggctttacccagcaggagccttaagattgacacttggaggaccagatccaagagcaagaccaggaattgcttgtttaagaccagttagaccatttgcaggagctcaagtatttgcagaaagagcaggaggtgcacttgaattacttttagctgaaggaccaggaccagcaggaggaagatgtgtaagatggggtccaagagaacgaagagcactttttcttcaagcaacaccacatcaagatattagtaggagagttgcagcatttagatttgaattgagagaagatggaagaccagagttacctccacaagctcatggtcttggagttgatggagcatgtagaccatgtagtgatgcagaattgttgttagcagcttgcacttctgattttgttatacatggaattattcatggagtgacacatgatgtagaattacaagaaagtgttattacagttgttgcagcaagagtcttacgtcaaacaccaccattatttcaagctggaagatcaggagatcaaggtttaacctcaattcgtacaccattacgttgtggtgttcatcctggaccaggtacctttttgtttatgggatggtcacgatttggtgaagcaagattgggttgtgctcctcgatttcaagaattcagaagagcctatgaagctgcaagagcagctcatttacatccttgtgaagtagctcttcat

SEQ ID NO: 214367 - DNA, 879 bp, Artificial Sequence
  derived and/or modified sequence
atggggttcccagccgccgccctgctatgtgccctatgctgtggactcctcgctcctgccgcacgggccggatattcggaggaacggtgctcttggcgggggtctgggctgacacaggaacccggatctgtcgggcagcttgccctggcctgcgccgagggggcagtagagtggctgtatcccgctggagccctacgcctgactctcggggggccagatcccagagcgcgccctggaattgcctgcctgaggcctgtgaggcccttcgcaggagcccaggtattcgccgaaagagcaggaggggctcttgagctcttacttgctgaggggcccggaccggccggggggaggtgcgtcaggtggggaccacgggaacgcagggctctgtttctacaagccacaccccatcaggatatatcaaggcgtgtggccgcatttcgattcgagttacgggaagatggacgcccagaactgcctcctcaggctcatgggctcggagtggacggagcatgccggccttgttctgacgcagaacttttactagcggcatgtacatccgacttcgtgatacacggaataattcatggggtaacacatgacgtcgaactgcaggaatcagtcattactgtagtggcagcaagggttctcagacagacaccaccactcttccaggccgggcggtctggagatcagggactcacatcaatccggactcccctgcgatgcggagtccatcccgggccaggaacattcctgttcatggggtggagtagattcggagaagccagactagggtgtgcccccaggttccaagaattccgacgcgcctacgaagcagcccgggccgcacaccttcatccttgcgaagtggccctccac

SEQ ID NO: 214368 - DNA, 879 bp, Artificial Sequence
  derived and/or modified sequence
atgggatttcccgcggcagcactgctttgtgcgctttgctgcggattgctggccccggccgcccgggctggttactccgaagaaaggtgctcgtggcggggatccggactcactcaagagccgggcagcgtgggacaactggcactggcgtgtgcagaaggagcggtggagtggctgtacccagcaggagcgctgcgcctcaccctcggcgggcccgacccacgtgccaggccaggaatcgcgtgccttcgcccggtcagaccttttgccggagctcaggtgttcgccgaacgcgccggcggggcactcgagctgctcctggctgagggaccggggccggcaggaggaagatgcgtgagatgggggcctcgcgaaaggagggctctctttcttcaagccacgccccaccaggacatctcgcggcgcgtggcagcattccgcttcgaactgcgcgaggacggaaggcctgagctgccgccgcaagcacatggcctgggcgtggacggagcatgccggccgtgttcagacgccgaacttctcctggcggcgtgcaccagcgatttcgtcattcatggcatcattcatggagttactcacgacgtggagcttcaagagagcgtgatcaccgtcgtggctgcaagagtgctgagacaaacccctccgttgtttcaagccggtcggtcgggagatcaaggcctgacgtctatcagaaccccactgcggtgcggtgtgcaccccggaccaggaaccttcctcttcatgggatggtcgagattcggagaggccagactgggttgcgctccacgcttccaagaatttcgccgcgcgtacgaggctgcacgcgcggcacatctgcacccgtgcgaggtggccctccat

SEQ ID NO: 214369 - DNA, 879 bp, Artificial Sequence
  derived and/or modified sequence
atgggctttcccgcagcagctctactgtgcgctctgtgttgtggcttactggctccagccgcaagggccggatacagcgaagaaagatgttcctggaggggcagtgggctcacccaggaacctggaagcgtgggccagctggcacttgcttgtgccgaaggcgccgtggagtggctctatcccgccggcgctctacggttaacactgggaggacccgatccccgcgcaagaccaggcattgcttgcctgaggccagtaagacccttcgctggggctcaggtcttcgcagagcgggctgggggcgccctcgaactgctcttggccgaagggcccggccccgccggaggacgctgcgtgcgatgggggcccagggagaggcgagccctgttcctgcaggccacccctcaccaggatattagtcggagggtcgctgcctttcggtttgagctgcgtgaggatggcaggccagagttgccaccccaggcacacgggttgggcgttgacggcgcttgtagaccatgttccgacgctgagctacttctcgccgcctgtaccagtgatttcgtaattcatggtataattcatggagtgactcacgatgtggagttacaggagtctgtgataaccgtcgtggctgcacgagttctcagacagacccctcctctgtttcaggctggtaggtctggtgatcaagggctgactagcattaggaccccattgcgctgcggtgtgcatcccggccccggcactttcttgtttatggggtggtcaaggttcggcgaagcccgcctagggtgtgcaccacgatttcaggagtttcgaagggcttatgaagccgcacgagctgctcatttgcacccatgcgaagttgccctgcat

SEQ ID NO: 214370 - DNA, 879 bp, Artificial Sequence
  derived and/or modified sequence
atgggtttccccgcggctgcactgttgtgtgccctttgctgcggtcttttggccccagccgcccgggcaggctatagtgaggagagatgctcctggcgcggcagcggcttgacccaggagcctggctctgttggtcaactggctctcgcctgcgccgagggcgcagtggagtggctatatcccgccggtgcgctgcgcctcaccttaggtggacctgatccccgggcacgccccggaattgcctgtctacgccctgttcgtccctttgcaggagcccaagtgtttgccgaaagggccggtggtgccctggaattgttgctggccgagggcccgggaccggctggtggccgatgcgtccgctggggaccccgggagcgtcgcgctctgttccttcaggccaccccccatcaggatatctcccgccgcgtggccgcctttaggtttgaactccgtgaggacgggcgaccggagctgcccccacaggctcatggactgggcgtcgacggtgcctgccgcccatgctctgatgccgaactgttgctggcggcttgcactagcgattttgttattcacggcataattcatggagtgactcatgacgtggaactgcaggagagcgtaattacagtagtcgctgctcgtgtgctgcgtcagactcctcccttgttccaggcaggccgcagcggagaccagggcctgacctcaatccgcacacccctgcgctgtggcgtgcaccccggacccggaacattcttgttcatgggctggtcccgattcggcgaagcacgcctgggctgcgcacccaggttccaggagttccgccgggcgtatgaggccgcgcgcgccgctcacctgcacccttgcgaggtggcgttgcac

SEQ ID NO: 214371 - DNA, 879 bp, Artificial Sequence
  derived and/or modified sequence
atgggctttccagccgcagctctcctgtgcgccctgtgctgtggactgctggctcctgcagctcgggctggctactccgaagagagatgctcctggcgcggatcaggactcacccaagaaccggggtcggtaggtcaactggccctggcatgcgccgaaggcgccgtcgagtggctgtacccagcaggggccctcagactgactctgggaggaccggaccctagggcgcgcccaggaatcgcgtgcttgcgcccagtgcggcccttcgcgggtgctcaggtgttcgcggaacgggccggaggtgccctcgagcttctgttggcagagggaccaggtccggctggcggacggtgtgttcggtggggaccaagagaaagacgcgctctgttcctgcaggctactccacatcaagacatcagccgcagagtcgctgcgttcaggttcgagcttcgggaggacggcaggccagagctgccgccgcaggcgcacggcctcggtgtggatggagcgtgcaggccgtgctcagatgccgaacttttgttggcggcttgcacctcagacttcgtgatccatggtatcattcacggtgtgacccacgacgtggaactgcaagaaagcgtgatcactgtcgtggctgcccgggtcctccgacaaactccgccgctgttccaagctgggaggtccggagatcagggactcacgtctatccggacgcctctccgctgcggggttcacccggggccggggacttttcttttcatggggtggagccggtttggtgaagcacgcctgggatgtgcccctcggttccaggagtttagacgagcatacgaagctgccagggcggctcatctgcacccttgcgaagtcgcactccac

SEQ ID NO: 214372 - DNA, 879 bp, Artificial Sequence
  derived and/or modified sequence
atggggtttcctgcagcggcactcctgtgcgcactgtgctgtggtctgcttgctccggctgcaagagcaggatactcagaggaacggtgttcctggcgaggatcgggtctgacgcaagaacctggttccgtgggccaactggcactggcctgcgctgaaggtgcagtcgagtggctctaccccgcaggtgcactgagattgactcttggtggccccgatccaagagcgcgtcccggcatcgcgtgtctgcgcccggtgaggccatttgctggagctcaagtctttgcagaaagggccggtggcgccctcgagctgctgttggcagaaggtcctggtcctgcggggggtaggtgtgtgagatggggcccaagggaacgaagggccctctttctgcaagctactccgcatcaggacatttcgcgcagagtggcagcctttaggtttgaactgcgcgaagatggacgacccgagctccctcctcaagcacacggacttggagtggatggagcatgcaggccctgttcagatgcagagttgcttctcgcagcctgcaccagcgactttgtgattcatggcattatccatggtgtgactcacgatgtggaacttcaggagtccgtcattactgtcgtggcagcacgcgtcctgaggcagacccctcctctttttcaggcaggccgctcgggcgatcaaggcctcacctccattcgcaccccacttcgatgtggtgtgcatcctggacctggaactttcctgttcatgggatggagcagatttggtgaagcccgacttggatgtgcacctagatttcaggaattcagaagagcatacgaagcagcaagagcagcccatcttcatccatgcgaagtggcccttcat

SEQ ID NO: 214373 - DNA, 879 bp, Artificial Sequence
  derived and/or modified sequence
atgggcttccctgccgcagcattgctttgtgccctgtgttgtggccttctggcgcccgcggctagagcaggatacagcgaagaaaggtgttcatggagagggtctgggctcactcaagaacctggatcggtgggacagctggctcttgcatgtgcagagggagcggtggagtggctgtaccctgcaggtgcacttcgtcttaccctcggagggccagatccccgggcacggccaggtatcgcctgcctccgaccagtgcgccctttcgcaggggcacaggtgttcgccgaacgggcagggggtgcactcgaactgcttctcgcggagggacccggtcctgcaggcggtcgttgtgtaagatgggggccccgggagaggcgggcgctgttcctccaagcaactccgcatcaagacatttcaagaagggtggcagcatttcgctttgaactcagggaagatggtcggccggaacttcccccgcaggcacatgggcttggagtcgatggtgcctgtagaccttgtagcgatgcggaacttctgcttgctgcatgcaccagcgattttgtgatacacgggattatccacggagtgactcacgacgtggaattgcaggaatcggtcattaccgtggttgcagcgcgcgtgttgcggcaaacgccacctctttttcaggccggcagatcgggagatcaagggctgacttcaattaggaccccactgcggtgcggtgtccatcccggaccgggcaccttccttttcatgggatggagtaggttcggagaagcgaggctcggatgcgccccaagatttcaggaatttcgacgtgcgtacgaggcggcacgagccgcccatctccatccatgtgaggtcgcacttcat

SEQ ID NO: 214374 - DNA, 879 bp, Artificial Sequence
  derived and/or modified sequence
atgggcttccccgctgccgctcttttgtgcgcgctctgctgtggactcttggcgcctgccgcccgcgccggttactctgaagagcgatgctcatggcgtgggtctggcctgacgcaggagccgggttccgtcggccagttggctttggcgtgtgccgagggcgcagtggagtggctctatcctgccggcgcccttaggctgacgttgggcggcccggatccacgtgcccgccccggcatcgcctgcctgcggcccgttcgccccttcgcgggggcccaggtcttcgccgagcgcgccggtggtgccctcgagctgctgctcgccgagggaccgggtcccgctggcggccgctgtgtgcggtggggtccgcgtgaacgccgtgcccttttcctccaggccacaccccaccaggacatctcccgccgcgtcgccgctttcagattcgagctgcgcgaagatggccgccccgagctgccccctcaggcccacggcctgggtgtcgatggtgcttgccgcccctgttctgacgccgagctgctgctcgccgcctgcacgtctgatttcgttatccatggcatcatccacggcgtcactcacgacgtcgagttgcaggaatctgtgatcacggtggtcgcagccagggtcctgcgccagaccccacctctcttccaggccggtcgatccggtgatcagggtcttacatctatacggacacccctgagatgcggcgtacacccaggcccgggtacgttcttgttcatgggttggtcacgcttcggggaggcccgactgggctgtgctccacgcttccaggaatttcggcgggcctacgaggcggctcgtgccgcccacctccacccctgcgaagtcgcccttcac

SEQ ID NO: 214375 - DNA, 879 bp, Artificial Sequence
  derived and/or modified sequence
atgggttttcctgctgcggctctgttatgtgcactgtgttgcggcttgttggcgcccgcagcccgggccggctattccgaagagcgttgctcttggcgcggctcaggcttaactcaggagccaggaagtgttggccaactggccttggcatgtgcagaaggagccgtcgaatggctctatcctgccggggcactgcgactcacactggggggcccggaccccagagcccgccccggaatagcttgtctgagaccagttagaccctttgcgggagcgcaagtgtttgctgagagagccgggggcgctctcgaactgctcctggctgagggccctgggcccgcgggcggtaggtgtgtcaggtgggggccccgagagaggcgagccctgttcttgcaggcaactcctcatcaggacatctctcgccgcgttgccgcttttcgctttgagttacgcgaggatggacgacccgaattgcccccccaggctcacggcttgggggtggatggtgcttgtcggccctgcagcgacgcagaactacttctagccgcttgcacctccgattttgtcattcacgggattattcatggtgttacccacgacgtggaattgcaggagtctgtaatcacagtggtcgctgcccgtgttcttcgtcagacgcctccactgttccaagctggcaggtccggggaccagggcctgacgtccatccggactcctcttcggtgcggcgtgcatccaggcccgggcacattcttattcatggggtggtctcggttcggagaagcacgccttggctgtgctcctaggttccaggaattccgcagggcatacgaggccgcaagagcagcccatcttcacccatgtgaggtggccttgcat

SEQ ID NO: 214376 - DNA, 879 bp, Artificial Sequence
  derived and/or modified sequence
atgggatttcccgcagcggctctgctttgtgccctgtgttgcggactccttgctccagcagcaagggccggctacagcgaggagcgttgctcctggcgcggctcaggactgacccaggagcccggttccgtgggccaactggcacttgcatgcgctgaaggcgcagtcgagtggttgtacccagccggggccctgcgtctgactctcggagggcccgatcctcgagcaagacctggaattgcgtgccttagaccagtgcgacctttcgccggagcacaagtttttgccgaacgcgcgggtggtgcactggaactgctcctcgccgaaggacctggacccgcggggggtcgttgcgtgcggtgggggccccgcgaaagacgcgcgctctttttgcaagcgactcctcatcaggacatttcacggcgggtggctgcctttcggtttgaacttagggaagatggacgtcccgaactcccaccacaagcacatggccttggtgtcgatggagcgtgtagaccttgttcggacgcagagctgctgctcgctgcatgtacctcggattttgtgatccacggaatcattcatggtgtgacccacgacgtcgaactgcaagaaagcgtgataactgtggtggcagctcgagtcctgagacagactccgcccctcttccaagcaggacgctcgggagatcagggcctcacctcgattagaacccctttgcgctgtggcgtgcatccgggtccaggtaccttcctctttatgggatggtcgagattcggtgaagctagactcggatgtgctccgaggtttcaggaatttcggcgcgcttacgaggcggccagagcggcccacctgcacccatgcgaggtcgcattgcat

SEQ ID NO: 214377 - DNA, 879 bp, Artificial Sequence
  derived and/or modified sequence
atgggttttccggctgccgcccttctgtgtgccctctgttgtggtctcctggcgcccgcagccagggccggatacagtgaggaacgctgttcatggcgaggttccggcctcactcaggagccgggttcggtaggacagctggcgctggcctgtgcagagggcgctgtcgagtggctctaccccgccggcgcactccgtctcacccttggagggccagacccacgtgctaggcctggaattgcctgccttcggccggttcgcccattcgccggagcgcaagtgttcgcagaacgagccgggggagctttggagttgctcttggcggagggcccgggaccagcaggcggtcgttgcgtgcgttggggaccacgggagcggcgtgctctttttttgcaagcaacgccccaccaggacatatccagacgtgtcgcggcgtttagattcgaactgcgtgaagacggccgacctgaacttcctccacaagctcatggactgggtgtggacggagcttgccgcccatgtagtgacgctgaactcctcctagctgcgtgcacatcagactttgttatacatggcatcattcatggggtgacgcatgacgtggagctccaagaaagtgtgattacagtggtcgctgctagagtattgagacagaccccacccctgtttcaggcgggacgtagtggagatcaggggctgacatctatccgtacgcctctccgctgtggggtgcaccctggtcccggtacctttctcttcatgggctggagtcgctttggcgaagcgcggcttggctgcgcgccaaggtttcaggagttcagacgagcttatgaagctgcacgggcggcgcatctccatccgtgcgaggtagccctacat

SEQ ID NO: 214378 - DNA, 879 bp, Artificial Sequence
  derived and/or modified sequence
atgggtttccccgccgccgcgctactgtgcgcattgtgctgcggattactcgctcctgctgcacgtgccgggtactcggaagagcggtgcagttggcgagggtctggtctgacacaagagcccggctcggtgggccagctggccctggcatgtgccgaaggtgccgtggaatggctgtatccggccggcgctctgcgactgactctgggggggccggaccctcgagcacggcctggtattgcctgtctgaggcctgtacggcccttcgccggagcacaggtttttgctgagcgtgctggaggcgcactggagctgctgttggcagaggggcccggtcccgccggcggcaggtgcgtccgatggggcccacgagaacggagagccctctttctgcaggctaccccccaccaggacataagccggagggtggcagcgtttaggtttgaacttcgtgaggacggacgacctgagctgccacctcaggcccatggccttggcgtggatggcgcctgtagaccctgctcggatgcagaactcctgttagcggcctgtacatctgacttcgtcatccacggcatcattcatggggtcactcacgatgtagagctccaggagtccgtaatcacagttgtggccgcaagggtgctgcgccagactccaccgctcttccaagccgggcgttcaggagatcagggactgacctccatcaggactccattgaggtgcggcgtgcaccctggaccaggtacctttctcttcatgggctggtctcgcttcggagaagcacgacttggctgtgctcctagatttcaggagtttaggcgggcctatgaggccgccagggcagcccacctacacccatgcgaagtggcgctgcac

SEQ ID NO: 214379 - DNA, 879 bp, Artificial Sequence
  derived and/or modified sequence
atggggtttccggcagccgcacttttgtgcgcactttgttgcggccttcttgcccctgcagcgcgcgcgggatactcggaagaacgctgcagctggaggggatcgggactcacccaggaaccaggatcggtcggccaactggcacttgcgtgtgcagagggtgcggtggaatggctctacccagctggggcacttcgccttactctcggcgggccagatcctcgtgcaaggcccggaattgcttgtctccgccccgtgaggcctttcgccggagcccaggtgttcgcagaacgggctgggggtgccctggagctgcttcttgccgaaggcccggggcctgcgggaggtaggtgtgtgagatggggaccacgggaaagaagggcgctgttccttcaggcaacccctcaccaagatatctcccggagagtcgcggccttccgcttcgaactgcgggaggatggcagacctgagcttcctccccaagcccacggtcttggtgtggatggtgcctgccgcccttgttcggacgcagaactgcttctggcagcatgcacttcagattttgtgattcatggcattattcacggagtgacgcatgatgtcgaacttcaagaatcagttattaccgtggtcgcagcgcgcgtcctgcgccagactcctccactgttccaagccggccgtagcggcgaccaagggcttacgtctataaggactcctctgagatgtggagtgcacccaggaccaggtacctttctcttcatgggctggtcgagattcggggaggccagattgggctgtgcgccgaggtttcaggaattcagaagagcatatgaagccgcaagggcggcccatctgcatccatgtgaggtggctctccat

SEQ ID NO: 214380 - DNA, 879 bp, Artificial Sequence
  derived and/or modified sequence
atggggttcccagctgcagcgcttttatgcgccctgtgctgcggtctgctggcacctgccgccagagccgggtattcagaagaacgatgctcttggaggggctctggcctgactcaggagcccggttctgtgggacagctggctctcgcatgtgccgaaggagcagtcgaatggttatacccggccggggcactgagactgacactcggaggtcccgacccgagggctcggccagggattgcttgcctgcgcccagttaggccattcgctggcgctcaggtgttcgccgagcgggccggaggcgccctggaacttctcctcgccgaaggtcctgggccggcaggcgggcggtgcgtgcgttggggacccagagaacgccgggccctcttcctacaggccactcctcaccaggacatctcccgcagagtcgccgcattccgattcgagctgcgcgaggacggtcgcccagagctccctccacaggcacacggactaggggtggacggcgcctgtcgaccgtgtagtgacgcagaactgctgctagcagcctgcacctctgacttcgtgattcacggtattattcacggagttacccacgatgtagaacttcaggagtccgtgatcaccgtggtcgccgcacgcgtgcttcgacaaaccccccctttattccaggccggacggagtggcgaccaaggtcttacatccattagaacacctctcagatgtggggtacatcctggcccaggtactttcctctttatgggctggtctaggttcggggaagctagacttggctgcgctcctaggttccaggagttccgcagggcgtacgaggccgcacgagccgcgcacctgcatccctgtgaagttgctctacac

SEQ ID NO: 214381 - DNA, 879 bp, Artificial Sequence
  derived and/or modified sequence
atgggctttccagcagccgctctgttgtgtgccctgtgttgcgggctgctggcaccggccgcgagggccggttacagtgaggagcgttgttcctggagaggcagtggcttgactcaggaaccagggtccgtcggccagctggccttggcttgcgccgaaggagccgtcgaatggctgtatcctgccggcgcactgcgactgactctggggggcccagatcctagagctcggcccgggattgcttgccttcgtcctgtcaggcctttcgctggggcacaggtctttgcagagagagcgggaggtgcgctggaactgcttctggctgagggacctggacccgctggtgggaggtgtgtgcggtggggtccaagagaacgacgggcgctttttcttcaggccacgccacaccaggacatctcccgacgcgtggctgctttccgatttgagctgcgcgaagacgggaggcctgaactacccccacaggcacatggtttaggggtggacggagcctgtcgcccatgtagtgacgccgaacttctactcgccgcctgcacctccgatttcgttatacatggaattatccacggcgtgacgcacgatgtcgaactccaggagtcagtaataacagtagtcgccgcgagggtgctgcgccagaccccacccctcttccaggctgggaggagtggtgaccaaggactgacttctatccggacgcccctgagatgcggagtgcacccaggccctggcacattcctgtttatggggtggtcacggttcggggaggcacgccttggttgtgcgcctagattccaagagtttaggcgtgcatacgaggccgccagagccgctcacctccacccctgtgaggttgccttgcac

SEQ ID NO: 214382 - DNA, 879 bp, Artificial Sequence
  derived and/or modified sequence
atgggattccctgccgccgcgctcctgtgtgccctgtgctgtggcttgcttgcgccggccgcgcgcgcaggatactccgaagagaggtgcagctggagaggctccggcttgactcaagaaccaggctcggtggggcagttggcattggcatgcgcagaaggagccgtggaatggctgtaccctgcgggggcactccggctgaccctgggcggtcccgacccacgtgcccgcccgggtattgcttgtctgcggccggtcagaccatttgcgggtgcacaagtgttcgcggaaagggcaggaggggcactggaattgctgctggctgaaggccctggtccggccggtggacgctgcgtgcggtgggggccaagggagcgccgcgcgcttttcctgcaggccaccccgcatcaagatatctcccgccgcgtcgcggcgttccggttcgagctgcgcgaagatggccgcccggaactgccgccgcaggcacacggcctcggcgtggacggcgcatgcaggccctgctccgatgcggagttgctgcttgccgcctgcacctcagatttcgtgatccatggcatcattcacggcgttactcatgacgttgaactgcaggagtccgtcatcacggtggtggcagcgcgcgtgctccgacagaccccgccgctctttcaggccggacgatcaggagatcaaggacttaccagcattcgcacccccctccgctgcggggtgcacccgggaccgggaacgtttctgtttatgggatggagccggttcggtgaggccagactcggctgcgccccaagattccaggaattcagacgcgcatacgaagctgcgcgggcggcacaccttcatccttgcgaagtggcgctgcat

SEQ ID NO: 214383 - DNA, 879 bp, Artificial Sequence
  derived and/or modified sequence
atgggctttccagcagcagctttgctctgtgctctgtgctgtggcctcctcgcgccggccgctcgggctgggtactcagaagagagatgtagctggcgagggtccggcctgacccaagagccagggtcggtaggccaactggccctagcatgcgctgaaggcgcagtggagtggctttacccagccggcgccctgagattgaccctgggaggaccagatccccgagctcgacctggtatcgcctgtctgcgcccagtccgacctttcgcaggtgcacaggtcttcgcggaacgtgcaggcggcgctttggaacttttacttgcagagggccccggcccggctgggggacgatgcgtacgttggggacctcgagagaggagggccctgttcttgcaagcaactcctcaccaagacattagccggagggttgcagcctttcgattcgaattaagggaggatggaagaccagagcttccaccacaggctcacggccttggagtggatggagcctgtaggccatgtagtgacgccgaattattgctggctgcatgcacctcggacttcgtaatacatggcatcatccacggagtaacccacgatgtagagttacaggaaagtgtcatcacagtggtggccgcccgggtgttgagacagacacctcctttgttccaggctggtcgctctggggatcagggtttgactagcatcagaacccctctgaggtgcggggtgcaccccgggcctggcactttcctcttcatggggtggagccgatttggagaggccagactgggatgcgctccccgattccaagaatttcgacgtgcatacgaggctgcccgggctgcccacttgcatccatgcgaagtggccctgcat

SEQ ID NO: 214384 - DNA, 879 bp, Artificial Sequence
  derived and/or modified sequence
atgggattcccggcagcggcactcctctgcgcattgtgttgtggactgctggcgcctgctgcccgcgcaggatactcggaggaaagatgctcctggcgggggtctgggctcactcaggagccgggatccgtcgggcaattggctctggcgtgcgccgaaggtgccgtcgaatggctgtatccggcgggagcccttaggcttaccctgggcggaccagacccaagagcccgcccgggtatcgcctgcctgcgtccggtgcgccctttcgccggggcgcaggtctttgcggaacgggctggcggcgccctggagttgctgctcgcggaagggccgggaccggcaggcggacgatgtgtacggtggggaccgcgcgaaaggagagccctgttcctgcaagctactccgcatcaggatatttcacggagggtggcagctttcagattcgaactgcgcgaagatggcaggccagagcttccgccccaggcgcacggactcggagtggatggagcgtgtcgcccctgctcagacgcagagctcctcctggccgcctgtacgtccgacttcgtgattcacggtatcatacatggagtgactcacgacgtcgaactccaggagtccgtgatcaccgtggtcgccgctcgggtcctcaggcagaccccaccattgttccaagctggtagaagcggtgaccaagggcttacctccatcagaactcctttgcggtgcggggtccaccctggaccgggcacctttctctttatgggctggagcagattcggagaagcgaggttggggtgcgccccaagattccaggaatttaggagggcctacgaggccgcccgggccgcccacctgcatccgtgcgaagtcgcccttcat

SEQ ID NO: 214385 - DNA, 879 bp, Artificial Sequence
  derived and/or modified sequence
atgggattccctgctgcagctttgctctgcgctctgtgttgtgggctgcttgcccccgctgcacgagcaggatactctgaggaaagatgctcctggagggggagcggcctgacccaggagcctgggagcgtagggcagctggctctcgcgtgtgccgagggcgcagttgagtggctctacccagctggcgccttgagactgactctgggtgggcctgatcctagagcaagaccgggtatcgcctgtctgcggcccgtaaggccttttgctggggctcaggtcttcgctgaaagggctgggggagccctggagttgctactcgccgaaggtccaggcccagcaggagggaggtgtgttcgatgggggccccgggagcggcgggccctttttctccaggccacgccacaccaggacatctctcgtcgcgtcgccgccttcaggtttgagctgagggaggacgggcgcccagagctgccgccccaggctcacggcctgggcgtggacggcgcatgtcgtccatgtagcgatgccgagctgctgcttgcagcctgtacatcagatttcgtgattcacggcatcatccacggagtgactcatgatgtcgagctgcaggagtctgttattactgtagtagctgcaagggtgctgcgtcagacacctcccctttttcaagccggacggagtggggatcaggggctgaccagcatccggacccccttgcgatgcggagtgcaccccgggcccggtacttttttattcatgggctggagccgatttggggaggccaggttgggttgcgcccctcgctttcaggagtttcgtagagcttacgaagcagcccgggctgcacacctgcatccctgtgaggttgctttacat

SEQ ID NO: 214386 - DNA, 879 bp, Artificial Sequence
  derived and/or modified sequence
atgggattcccggcagccgccctgctgtgcgcgctgtgctgcggtctgctcgcccctgctgcgcgcgcgggctattcggaggagaggtgttcgtggcgcggatccggacttacccaagagcctgggtcagtcggacagctcgcgctggcatgcgctgagggcgccgtggagtggctctacccggccggcgcacttagactcaccctgggaggaccagatccgcgcgcccgccctgggatcgcctgcctccggccggtccgcccgttcgctggagcccaagttttcgcggagcgggccggtggcgcgctggagctgcttctcgccgagggaccaggacccgcagggggcaggtgtgttcgctggggaccccgggaacggcgcgcactctttcttcaggcgacgccacatcaggatatcagccggcgcgtggccgcattccggtttgagctgagagaggacggcagaccggagctgccaccgcaggcccacgggctcggagtggacggggcgtgtagaccatgctcagacgcggagttgctgctggccgcgtgtacctcggactttgtgatccacgggatcatccacggagtgactcacgatgtggaactccaagaatccgtgatcactgtggtcgccgctagagtcctgcgacagactcccccgctgttccaggcagggagatccggtgaccaaggactcacttccatcaggactcccctccggtgcggagtccatccgggccctggaaccttcttgttcatgggttggtccagattcggcgaggcacggcttggatgcgccccgagattccaggagttcagaagagcctacgaagccgcaagggccgcccatctccacccgtgcgaagtcgctctgcac

SEQ ID NO: 214387 - DNA, 879 bp, Artificial Sequence
  derived and/or modified sequence
atggggtttcccgctgccgccctcctctgtgccctatgctgtgggttactggcccctgccgccagagctggatactccgaggaaagatgttcttggagagggtctgggctcactcaggaacctgggtcagttgggcagctcgccttggcttgtgcagaaggagcagtcgaatggctttatcccgccggagctctgcgcctgacactgggggggcctgaccccagagcccgccccgggatagcctgtttgcgccccgtcaggcctttcgctggggctcaggtttttgccgaacgagccgggggagcactggaactcctactggcggaagggcctggaccggccggggggcgctgcgttcgatgggggcccagggaaaggagagccttattcctccaggctacacctcaccaggatatatccaggagagtggcagcatttaggttcgagctcagggaagatggacgacccgaactccctccacaggcccatggacttggagttgatggagcctgccggccctgctctgacgccgaactcctgctagccgcatgtacatctgatttcgttatacacggaatcatccatggggttactcacgatgttgaacttcaggaatctgtcattacagtggtagccgcacgggtcttaagacagactcctccattattccaggccggacggagtggagaccaggggctgacttctataagaacaccactgcggtgtggagtgcacccaggaccaggaacttttctatttatggggtggtctcgcttcggagaggcccggctcggatgtgccccccggttccaggaatttaggcgggcatacgaagctgcaagagcagctcaccttcatccatgcgaagtagctttgcat

SEQ ID NO: 214388 - DNA, 879 bp, Artificial Sequence
  derived and/or modified sequence
atgggtttcccagcagccgcactgttgtgtgccctttgctgtggtttgctggcacccgcagcccgcgcaggatactcagaagaaaggtgttcctggagagggtcgggacttactcaggaacctggatcagtcggtcagctggcccttgcatgtgcagagggtgccgtggagtggctttatccagcaggcgcactgagactcactctgggtggtccagaccctagggcacgcccagggattgcatgcttgcgacccgtgcggccttttgcaggcgcccaggttttcgcagagagagcaggtggagcacttgaactcctccttgccgaggggcctggtcccgccggtggcaggtgcgtgaggtgggggcctagagaaagacgcgccctcttcctccaagcgacccctcatcaggatatctcccggagagtcgctgcgtttcgatttgaattgcgggaggatggacgaccggagcttccccctcaggcccacggactgggggtggatggagcttgccgtccatgtagcgacgcagagctcttgcttgccgcgtgcacctcggattttgtgatccatggaattatccacggggtgacccatgacgtggaacttcaggaaagcgtcattactgtggttgcggcaagagtgttgcgacagacccctccgctgtttcaagccggtcgttcaggtgatcaagggctcacgtcgatcagaacccccttgcgctgtggtgtccacccgggtccaggcacctttctgttcatggggtggtcgcgcttcggagaagcgcgtcttggctgcgcaccccgctttcaggaatttaggcgagcatacgaagcagcacgcgctgcgcaccttcatccttgtgaggtcgcattgcat

SEQ ID NO: 214389 - DNA, 879 bp, Artificial Sequence
  derived and/or modified sequence
atgggttttccggctgctgctttgctctgcgctttgtgttgtgggcttctcgcccccgcagcacgcgccggatatagcgaggaaaggtgctcctggagggggtccggtctgactcaggaacctggatctgtgggacagctggccctggcatgcgcagagggcgcggtggaatggctgtatcccgcgggcgctttgcgacttactctcgggggccccgacccccgcgcgcgacccggaatagcatgcttgcggccagtcaggccattcgcaggtgctcaagtgtttgcagagagagctggaggcgctcttgaactcctgttggccgagggcccaggaccagctggcggtcgatgcgtccgctgggggccacgagaacgccgagcactgttcctgcaagccacaccgcaccaggatatctcacgaagagtcgccgcattcaggttcgagctgcgcgaggacggcagacctgaattgccccctcaggcgcatggtctgggagttgacggcgcttgcagaccctgttccgatgcggaactgctgctggcagcctgtacatcagactttgtcatacacggcattatccacggagtgactcatgacgtcgagttgcaggaatctgtgattaccgtggtggcggctagggtactgcgccagacacccccactcttccaagcaggcaggagtggagatcaggggctgacgagcatacgcaccccccttcgctgcggggtgcaccctgggcctgggacttttctgtttatgggctggtccaggtttggggaggcccggctgggatgcgccccgcggttccaggagtttcgcagggcttacgaagcggctagagctgcacatctccatccctgtgaagtggcactgcac

SEQ ID NO: 214390 - DNA, 879 bp, Artificial Sequence
  derived and/or modified sequence
atggggtttccggcagcagcacttctgtgtgcactgtgttgtggcttgcttgcccctgcagcaagagcggggtactcggaggaaagatgttcctggaggggcagtggtctgacccaggaacccggcagcgtgggtcagctcgcactggcctgtgcagaaggggcggtcgaatggctttatcccgcgggagccctgaggctgactctgggaggccctgatcctagagctcgtcccgggattgcatgccttaggcctgtccggcctttcgcgggagcacaggtgtttgcggaacgggccggcggagcactcgagctccttcttgcagaaggtcccggtcctgcgggaggacggtgcgtgcgctgggggccgagagaaaggcgtgcgcttttcttgcaggctacccctcatcaggatatatcccgccgggtcgccgcatttcgctttgagctgcgagaagatggtaggccagaactcccaccacaggcacacggtcttggcgtggacggagcatgtcgaccttgctcggatgcagaacttctgctggctgcttgcaccagcgacttcgtgattcacgggattattcatggggtgactcatgatgtggaactgcaagaatccgtgatcactgtcgtggcagcgagagtgctgcggcagaccccgccccttttccaagcgggacggtccggagatcaaggtcttaccagcataagaactccacttagatgcggcgtccatcctggacctggtacttttctgttcatgggatggtcacgtttcggagaagcccgcctgggatgtgcacccagatttcaggaattccgtcgggcatacgaggccgcaagagccgcccaccttcatccttgtgaagtggcacttcac

SEQ ID NO: 214391 - DNA, 879 bp, Artificial Sequence
  derived and/or modified sequence
atgggcttcccagctgccgctctactatgcgccttatgctgcggcctacttgcccctgccgcaagagctggatactccgaggaacgttgctcttggcgtgggtcaggactcactcaggagcctggctctgtcggccaactcgcccttgcctgtgcagagggcgctgtggagtggctatatcctgccggggccttgcgtctgactttgggagggcctgatcctcgagccagaccaggcatcgcttgtctcagacccgtacgtccttttgcaggggctcaggtgttcgcagaacgggctgggggcgctctggaactgttgctggccgagggtcctgggcctgccggagggagatgtgttagatgggggccccgagaaagacgcgcacttttcctgcaggcgacaccacatcaggatatatctagaagggttgccgcctttcgtttcgagctgagggaagacggtagaccagaattgccgccgcaagcgcatgggctcggtgtggacggcgcctgccgcccgtgcagcgacgctgaactccttctggcggcctgcacatccgactttgtgatccacggcataatccacggagtaacccatgacgtggaattgcaggagtccgtgattaccgtggtggctgcccgagtgctcagacaaaccccacccctattccaggcaggacgaagcggcgaccagggcctgaccagcatcagaactcccctccgttgtggcgttcaccccgggcctggcacttttttattcatgggttggtcccgattcggcgaggccagactggggtgtgcacccagattccaggaattccgaagggcctacgaagcggctcgggcggcccacctccacccctgtgaggtcgctctgcac

SEQ ID NO: 214392 - DNA, 879 bp, Artificial Sequence
  derived and/or modified sequence
atggggtttccagctgcggcactgctgtgtgcactgtgttgcggtctgctcgctccagcagctagggccggctactcagaggagagatgctcctggcgtggaagtggcttaacccaggagcccggatccgtgggccagctggcccttgcgtgtgctgagggcgccgttgagtggttgtaccccgcgggcgccctcaggttgacgctcggaggacctgacccaagggctcgacccgggattgcctgcttgcgtccagttcgcccttttgccggcgcccaggtgttcgcagagcgagccggcggagccctggaactgttgctggctgagggccccggacctgccggaggaagatgcgtacgttgggggccccgcgaaaggcgcgcgctcttcctgcaagccacacctcatcaggacatctctcgaagagttgccgcattccggtttgagttacgcgaggacggacggccagagctgcctccccaggcacacgggttgggcgtggacggcgcttgtcgcccatgtagcgacgctgagctcctgctggcggcctgcaccagcgacttcgtcatccacgggattatacatggcgttactcacgatgtggagctccaggaatccgtgataactgtcgtggctgcccgggtgctgcggcaaactccgcctctttttcaggcgggacgtagtggtgaccagggcctgactagcatacgcacgcccctgaggtgtggcgtgcacccaggccccggtacatttctgttcatggggtggtcgagattcggtgaagctcgtctagggtgtgccccacgattccaggaatttaggagggcatacgaggctgccagagctgcccatctccatccttgcgaagtagctcttcac

SEQ ID NO: 214393 - DNA, 879 bp, Artificial Sequence
  derived and/or modified sequence
atgggctttcccgccgccgctctcctgtgtgccctgtgttgcggcctgctagccccggccgcccgggctggctacagcgaggaaaggtgctcatggagaggaagtggcctgacacaggagccaggctcagtgggacagctggccctcgcatgtgcagaaggcgcagtcgaatggctgtatcccgcgggggccctccgattaacactaggcggacctgatcccagagcaagaccgggaatcgcatgtctccggcctgtcagacctttcgccggagctcaggtgttcgccgagcgcgccgggggagcgctggagctgttgctggcggagggtcccgggcctgccggagggaggtgtgtgcgctgggggccacgtgagcgccgcgccctgtttctgcaggcaaccccgcatcaggacataagccgaagagtcgctgcttttcgctttgaactaagagaggatgggcgccctgagcttccaccccaggcgcacgggctgggcgtggatggagcttgtcgaccttgtagtgacgccgagctcttactagccgcatgtacgtctgacttcgtgatacatgggatcatacacggcgttactcatgacgtggagcttcaggaaagtgtgatcaccgtggttgcagccagagtgcttcggcagaccccacctttgttccaagctggtaggagcggcgaccagggcctcacctccatcagaactcccctaaggtgcggagttcatcctgggcccggcactttcttatttatggggtggagccgattcggggaagctaggttgggttgcgcacctcggttccaagaatttcgaagggcttacgaggccgccagagcggctcacctccacccttgcgaggtcgccctgcac

SEQ ID NO: 214394 - DNA, 879 bp, Artificial Sequence
  derived and/or modified sequence
atgggcttcccggctgcagccctgttgtgtgctctctgctgtggcttactggcccccgcagcaagggctggctacagtgaagagcgttgctcttggcgaggttcagggctgacacaggaacccggctcggtcggccaattggctttggcctgcgctgagggagcagtagagtggttatacccagctggcgccttgagacttactttaggtggccccgacccccgggctcgtcctggcatcgcctgtttgcggcccgtgcgccccttcgccggagcccaggtgtttgccgaaagagcgggaggggcattagagctgctcctggccgagggccccggccctgctggcggcaggtgcgtacggtggggacccagggagcgccgtgccctctttctacaggctactcctcatcaggacatatcgagaagagtggcagcctttcgttttgagctgcgcgaggacgggcgcccagaactgccgccacaggcccacggccttggcgtggacggggcatgtaggccttgttccgacgccgagctgttgttggccgcttgtacttctgacttcgtgattcacggaatcatacacggcgtgacgcacgatgtggagctccaagaaagcgtgatcactgtggtggccgctcgtgtgcttcggcagacaccccctttgttccaggctggacgatctggggatcaggggctgacctcaattaggacaccacttcgttgcggggttcatccaggccccgggacattcctctttatgggttggagtaggttcggggaagccagactggggtgcgcacccaggttccaggagtttcgccgggcctatgaggctgctagagcagcacacttgcacccctgcgaagtggcgttgcat

SEQ ID NO: 214395 - DNA, 879 bp, Artificial Sequence
  derived and/or modified sequence
atgggattccctgccgctgcactgctttgcgcgctctgttgtgggttgctcgcacctgcagcccgtgccggatactccgaagagcgctgttcgtggagagggagcggacttactcaagagcctggttcggtgggccaactggcactggcatgtgcggagggagcagtggaatggctttacccagcgggtgctcttcgtcttacgcttggggggcccgacccccgggcccgtccaggaatcgcatgtcttagacctgtacggccctttgccggagcacaggtgtttgcagaaagggccggaggcgcactcgaactgctgctcgcggagggacctggacctgccggtggacggtgcgttcgttggggacctcgtgaacgccgagctctgtttctgcaagcaaccccacatcaggatatttcaagacgggtggccgcttttcgattcgagttgcgggaggacgggcgtccagaactgccgccccaggcacacggcctgggagtcgatggtgcgtgccggccctgtagcgacgcggaacttcttttggcagcctgtacctcagatttcgtgattcacggtattatccatggagtgactcatgatgtagagttgcaagaatcggtcattaccgtggtggccgcacgcgtgcttcggcagactcctcctctctttcaagcaggacgatccggtgatcaagggctcacctctatcagaactccccttcggtgcggggtgcatcccggacccggtacctttctgtttatggggtggtccagattcggcgaggcacgacttggttgcgcaccgcggttccaggaatttagaagagcgtacgaagcagcacgagccgcgcatctgcacccttgtgaggtggcactccat

SEQ ID NO: 214396 - DNA, 879 bp, Artificial Sequence
  derived and/or modified sequence
atggggttccccgccgctgctctgttgtgcgccctctgctgtggtttactggcccctgcagctcgcgcagggtattccgaagaaagatgctcgtggcgtggatccggcctgacgcaggaacccgggtctgttggtcaactagccttggcctgtgcagaaggggctgtcgagtggctgtatcccgccggggctttaaggctcacgcttggaggaccggatccaagggccaggcccggcattgcttgcttgcggccggtcaggccgttcgccggtgctcaagttttcgctgaaagagctggcggagccctcgagctgctgcttgccgagggtcccggcccggcagggggccgatgtgtccggtgggggccaagagaaaggagagctcttttcctgcaggccaccccacatcaagatatctctcggcgggtagcagcgttcagattcgagctacgcgaggacggtaggcctgagctgcccccccaggcacacggcctgggagttgatggcgcatgccgcccgtgttccgatgccgaactgctgctggctgcctgcacttccgactttgtgatacacggaatcatccacggtgtgacacacgatgttgaattgcaagaaagcgtgatcacggtggttgccgccagggttttgaggcaaacccctccgctctttcaagctggcagatcaggcgatcagggccttacctctattcgaacccctctcaggtgcggcgttcatccagggccagggaccttcctctttatgggctggtctaggtttggcgaagccaggctaggctgtgcgccgaggttccaggagtttagacgcgcttacgaagcagctagagctgcgcatttgcacccgtgcgaggtagccttgcac

SEQ ID NO: 214397 - DNA, 879 bp, Artificial Sequence
  derived and/or modified sequence
atgggctttccagccgccgctctgttgtgcgcgctgtgctgcggcctgctcgccccggctgcgagagcaggatactcagaagaaaggtgcagttggagaggatctggactcacccaagagccaggttcagtgggtcaactcgccctggcgtgtgccgaaggcgctgtggagtggctgtatccagctggagcgctgagactgacactcggaggcccggacccccgcgctaggccaggcatagcgtgcctgaggccggtcaggcccttcgcaggcgcccaggtgtttgctgaaagagctggaggcgcactggagctccttctggctgaaggcccaggaccagccggaggtagatgcgttaggtggggcccgcgcgagaggagagctctcttcttgcaggccacgccgcaccaggacatttcaagacgcgttgcggctttccgcttcgagctgagagaagacggcaggccggagctgccaccccaagcccatggcttgggcgtggacggtgcctgccgcccctgttccgacgctgaactcctgctggccgcgtgtaccagcgacttcgtgattcacggaatcatccacggagtgacacacgatgtggaacttcaggagtccgtgattaccgtagttgccgctagggtcctgaggcagactcctcctctttttcaagccggcaggagtggcgatcagggcctgacatctatccgcacccccttgaggtgtggcgtccaccccggccctggcacatttctgtttatgggctggagcagattcggcgaggctagacttggatgcgccccaagattccaagaattcagaagagcctacgaggccgccagggcagctcacctccacccctgcgaagttgcgctgcat

SEQ ID NO: 214398 - DNA, 879 bp, Artificial Sequence
  derived and/or modified sequence
atggggtttcccgctgctgcccttttgtgcgctctgtgttgtggactgttagcgcccgcagcacgagcaggctacagtgaggagaggtgctcctggagaggaagcgggctcacacaagaaccaggcagtgtgggccagttagctctcgcatgcgccgagggcgccgtcgagtggctctatcccgcgggtgctctgcgcctgactctgggaggtcccgaccctagagccagacctgggatcgcgtgcctgcggcccgtccgaccattcgctggtgcacaggtttttgccgaaagagcagggggcgcactagaactgctgctggccgagggacccggaccagccggcggccggtgtgtgcggtggggacccagggaacggagggccctgtttttacaagctaccccccaccaggatatatcgcgaagagtagccgcctttcgctttgagctccgggaggatgggaggccagagctccccccccaggcccacggcttaggagtggacggtgcctgtcgcccttgttccgacgcggagctcttgctcgccgcctgcacctctgacttcgtaattcacgggattattcatggagtaacgcatgatgtagagctgcaggaaagcgtgattaccgtggtagctgcccgggtcctcaggcagacccctccgctttttcaggcaggacgatcgggcgatcagggcttgacttctattcgcacgcccctgcgatgcggagtccacccaggacctggaaccttcttgtttatgggctggtcccgctttggagaagctcgcctgggttgcgccccacgcttccaagagttcagacgcgcttatgaggcggctagggccgcccacctgcatccttgcgaagtggcgctgcat

SEQ ID NO: 214399 - DNA, 879 bp, Artificial Sequence
  derived and/or modified sequence
atgggattcccagccgctgccttgttgtgcgcgctttgctgcggtctccttgctccagctgctcgtgccggttacagcgaagagagatgcagttggagaggcagcggacttactcaagaaccaggttctgttggtcagttagccctggcttgcgctgaaggcgctgttgaatggttataccctgcaggtgccctcaggctcactttagggggacctgatccacgtgcaaggcctggtattgcttgcctcaggcctgtaagaccttttgcaggggcccaagtcttcgctgagagggcgggcggagcccttgaacttcttcttgctgagggtccgggcccggctggaggtagatgtgtccgatggggcccaagagagcgtagagccctttttttacaggctaccccgcatcaagatatatcaaggagagtggctgcttttagattcgaactgcgtgaagacggaagaccagaactgccaccacaggcccatggcttgggagttgatggggcgtgcaggccttgcagtgatgccgagttgttgcttgccgcctgtacatcggattttgtgatacatggtataatacacggagttactcatgatgtcgaactccaggagagcgtgattacagtggtggctgctcgtgttcttaggcaaaccccgcctctttttcaagctggcagatcaggggatcagggactcacgtccataaggacacctcttaggtgtggagtgcatccgggccctggcactttccttttcatgggatggtccagattcggcgaggcacgattgggttgtgctccacgattccaagaattccggcgtgcatatgaggccgcccgcgccgcccaccttcatccatgcgaggtcgccttgcat

SEQ ID NO: 214400 - DNA, 879 bp, Artificial Sequence
  derived and/or modified sequence
atggggttcccggcggcggccctgctctgcgccctctgttgcgggctgctggccccagcggctagagctggatacagcgaagagaggtgttcgtggaggggctcgggcctcactcaggaaccggggtccgtcggacagctcgcactggcctgtgcggagggtgccgtggagtggctctacccggctggtgcgctgcggcttactcttggaggacccgatccgcgcgcaaggcccggaatcgcgtgcctccgcccggtccgtccgttcgccggagcacaggtgttcgccgagagagccggaggcgcactggaactcctgctcgcggagggtccgggcccggcaggaggacgttgcgtgcggtgggggcctcgagaaagacgggcgctgttcctgcaggcaaccccgcaccaagatatctcaagacgggtcgccgcatttcgctttgaattgagagaggacggtaggccggaactgcctcctcaggcccatgggctgggagtggatggagcgtgtagaccttgctccgatgccgagctgctccttgccgcgtgcacctcagacttcgtcatccacgggatcatccacggagtgacccacgacgtcgagcttcaagaatcggtcatcaccgtggtcgccgcccgcgtcctgagacaaactccgccactgttccaggctggacgcagcggtgaccaaggcttgacgtccatcaggacccccctgcgctgcggagtgcaccccggaccgggcaccttcctgtttatgggatggtcgagattcggagaggcgagactcggatgcgcaccaagatttcaggaattccgcagagcatacgaggccgcccgcgccgcccacctgcatccgtgcgaggtcgcgcttcac

SEQ ID NO: 214401 - DNA, 879 bp, Artificial Sequence
  derived and/or modified sequence
atgggtttcccagccgctgctcttctctgcgctctttgttgtggacttctggcaccagcagctagagccggctacagcgaggaacgctgctcttggaggggttctggccttacacaggaacctggctcagtcggccagctggccttggcttgtgccgagggagcagttgaatggctgtacccagcaggtgctctgcgtcttactctcggaggcccagaccccagggcacgtcccggcatcgcatgtcttcgccctgtcaggccctttgccggagcacaggtgttcgccgaaagagccggaggagctctggagcttctcctcgctgagggtcctggtcccgccggcggcaggtgtgtcagatggggcccaagagagcgtcgtgctctttttctgcaggcaaccccccaccaggatatcagcagacgtgttgccgcctttcgctttgagctccgtgaggatggcagaccagaactgcccccccaagcccatggcctcggagtggatggcgcctgtagaccatgctctgacgctgaactcttgctggctgcctgcacttccgatttcgttattcatggcatcattcacggtgtaacccatgacgtagaactgcaggagagtgtgattactgtggtagctgccagggtgctgagacagacacctccactgttccaggccggcaggtcaggagaccagggcctcaccagtattcgtactccactccgttgtggcgtacatcccggacccggaactttcctgttcatgggatggtctaggttcggtgaagctagattgggatgcgctccacgctttcaggagttcaggagagcatatgaagcagcaagggccgcacatctgcacccctgcgaagtggcactgcat

SEQ ID NO: 214402 - DNA, 879 bp, Artificial Sequence
  derived and/or modified sequence
atggggtttccagccgccgctctgctctgtgcactctgttgtggcctccttgcgcctgccgcccgtgcaggatattccgaggaacgatgctcctggaggggaagcggcctgacccaagaaccagggtcggtgggccaactcgccctggcatgcgcagaaggagccgtcgagtggttgtaccccgcgggagcactgcggcttacccttggcggccctgatccaagagctagaccaggaattgcatgcctgcgtcccgtgcggccatttgccggcgcccaagtgtttgccgagcgcgcaggaggagcgctggagctgcttttggcggaaggtcctggcccagcaggtggtcggtgtgtgcggtgggggccgagggaaaggcgtgccctgttcctccaggcaactcctcatcaggatatcagccgacgggtggctgcgtttcgctttgaactcagagaagatggtcgacctgaattgccgcctcaagcacatggactcggagtcgatggcgcatgtagaccttgttcagatgcggaacttctgcttgccgcatgtaccagtgactttgtgatccacggaataatccatggagttactcatgacgttgaactccaagaatccgtgatcaccgtggtcgcagctcgtgtcctccgacagacccctccgctcttccaggcagggagaagcggagatcaaggtctgacttcaattagaacccctctgcgctgtggcgtgcacccgggaccgggaactttcctgttcatgggatggtccagatttggagaggcacgtctgggatgtgcacctcggttccaagaattccgaagagcctacgaggcagccagagccgcacacctgcatccctgtgaagtggccctgcat

SEQ ID NO: 214403 - DNA, 879 bp, Artificial Sequence
  derived and/or modified sequence
atgggattcccagccgccgctttgctttgtgcgctttgttgcgggcttctggcccctgcagcaagagcaggatactcggaggagcgctgttcctggagaggctcgggcctgacccaggaacctggctcggtggggcaactggcgctggcatgcgctgaaggtgcagtggaatggctttaccccgcaggtgcgctccgccttaccctgggtgggcccgatccccgcgcaaggcctggcatcgcatgtcttagaccggtccgtccctttgcaggtgcacaggtgtttgcagaacgggcaggtggggctcttgagcttctgctggcggaaggtccaggacccgccgggggacggtgtgtccgctggggcccacgggaacggagagcactttttctccaggcaaccccacatcaggacatttcccgacgggtcgcagcttttcggtttgaacttcgcgaggacggccgacctgagttgcctccacaagcacacggactgggagtggacggggcatgtaggccgtgttcagacgcagaattgcttcttgcagcttgcacctctgattttgtcatccatggtatcattcacggtgtcacgcacgatgtggaactccaggagagcgtgattactgtggttgccgccagagtcctgcgacaaaccccaccactgtttcaagccggacgctcaggtgatcaaggtcttaccagcattagaacccctctgaggtgtggagtgcatcctggacctggaacctttctgttcatgggctggagcagatttggggaagcaagactgggatgcgctccacgattccaagaatttcgccgggcctacgaagctgctagggcagcccacctgcatccatgcgaggtggcactccat

SEQ ID NO: 214404 - DNA, 879 bp, Artificial Sequence
  derived and/or modified sequence
atgggatttccggccgccgcccttctttgtgccctgtgttgcggactgctggcgccggccgcacgcgcgggctattcggaggagcgctgctcctggcgcggctccggactcacccaagaaccgggatcagtgggccagctggcactggcctgcgcggaaggcgccgtcgaatggctgtacccagccggagcactgagactcactctgggtggcccagacccgagggcgcggccgggcatcgcctgcctccgcccggtccgtccgtttgccggggcacaagtctttgcggaaagagccgggggtgccctcgaactgctcctggccgaaggccctggaccagccgggggacggtgcgttcgctggggaccccgggaacggcgggcgctcttccttcaggctaccccgcaccaggacatcagcagacgcgtcgccgcctttcgcttcgagttgcgggaagatggacggccagaactgcctccacaggcgcacgggcttggtgtggatggcgcttgcagaccgtgttctgatgctgaacttctgctggcggcttgtaccagcgatttcgtcatccacggaatcatccacggagtgacccatgacgtcgaactgcaggaaagcgtgattacggtggtcgccgcacgggtgcttcgccagaccccgcccttgttccaggcggggcgctcgggagatcaaggcctcacgtctatcaggactcctctgagatgcggagtgcatccaggaccgggaacctttctcttcatgggatggtcgagatttggagaagccaggctgggttgcgcaccgcggttccaggagttcagacgggcgtacgaggctgcccgggccgcacacctgcatccgtgtgaggtcgcactccat

SEQ ID NO: 214405 - DNA, 879 bp, Artificial Sequence
  derived and/or modified sequence
atgggcttccccgcagctgcgctcctgtgcgccctatgttgcggcctgctggcccctgccgcccgggctggatactccgaagagcggtgctcttggagaggctccggcctgacgcaggagccaggtagcgtggggcagctggcccttgcctgtgcagagggagcagtcgagtggttgtaccccgctggtgcactgaggctgaccttgggcggccctgacccacgggcacgtccagggattgcgtgcctccggccagtgcgccccttcgctggggcccaggtattcgctgagcgagctggcggcgccctcgaattgttgctggctgaaggtcccggccccgccggagggaggtgtgtacgatgggggccccgcgagcggagggccctgtttctccaggctactccccaccaggatatctcccgcagagtcgccgcctttcgattcgagctgagggaggatggtagacccgagctcccccctcaggcacatggcctgggggtagatggagcatgcagaccttgttccgatgcggagttgcttctggccgcgtgtaccagcgacttcgtgatccacggcatcattcacggggtgactcatgatgttgaactgcaggagagcgtgataaccgtggtcgctgcgagagttctcagacaaacaccaccgctgttccaggctgggcgctctggcgatcaaggtctgaccagtattcgaacacctttacgctgcggagttcaccctgggcccggcactttccttttcatgggctggagccggtttggtgaggccagactgggctgcgcgcccagatttcaagagtttcgccgtgcctacgaggcagctagggcggcccacctgcacccttgtgaggtcgccttgcac

SEQ ID NO: 214406 - DNA, 879 bp, Artificial Sequence
  derived and/or modified sequence
atgggattcccggctgctgcgctcctctgcgcgctctgctgcggactgctggcgcctgcagcccgggccgggtactccgaagagagatgctcctggagaggaagcggactcacccaggaacctgggtcagtgggccaactcgctctggcatgcgccgagggagccgtcgagtggctgtacccggctggcgcgctccggctcacgctcgggggccctgacccacgcgcccgaccaggcatcgcgtgtcttagaccggtgcgcccgtttgctggagcccaagtgttcgcagaacgggccggaggggcgcttgaattgctgctggctgaaggtccgggccctgccggaggccgctgcgtgcgttggggcccgcgggaacgccgcgcactctttctgcaagctaccccacaccaggatatcagcagacgggtggcggcttttaggttcgaacttagagaagatggaaggccggagctgccgccgcaagcgcacggtctgggcgtcgacggtgcttgcagaccgtgcagcgacgccgaactcctcttggcggcttgcacctcagactttgtgattcacggaatcatccatggtgtcacccacgatgtggaattgcaagagtcggtcatcaccgtcgtggcagcccgcgtcctgcgccaaactccaccgctgttccaggcgggacgctccggagatcaagggctgactagcatccgcactccgctccggtgcggggtgcatccgggacctggcaccttcctcttcatgggatggtccagatttggagaagccagactgggatgtgcaccgcgattccaggagttccggcgggcctacgaagcagcccgagctgcacatctccatccctgcgaggtggcactgcac

SEQ ID NO: 214407 - DNA, 879 bp, Artificial Sequence
  derived and/or modified sequence
atggggttccccgcagcagcccttctgtgcgcattgtgctgtggactgctggccccggctgctcgggccggctacagcgaagaaagatgctcgtggcgggggtccgggctgacccaggaaccaggctcggtgggacagctggcgcttgcatgcgcagagggagctgtcgagtggctgtacccggctggggcactgcgcctgacgctgggaggtccagaccctagagctcggccgggcatcgcgtgccttcgtccggtgcgcccttttgcgggagctcaagtgttcgctgaacgggcaggaggggctctcgagctgcttctggccgagggccctggcccggccggtggaaggtgtgtgcggtgggggcctagagaacgccgagccttgttcttgcaagctactcctcatcaggacatctcacgccgggtggcggctttcagatttgagctccgagaagatggccgcccagaactgccgccacaggcccacggactcggagtcgatggagcctgccgaccgtgttcggacgccgaactgctgctcgctgcttgcactagcgacttcgtgatccacgggatcattcacggtgtcactcatgatgtggagctgcaggagtccgtcatcaccgttgtggcggcgagagtgctccggcagaccccgccgctttttcaagctggacgaagcggagatcagggattgacctcaatccggactccactcaggtgtggcgtccaccccggccctggaaccttcctgtttatgggctggtcccgcttcggagaggcaaggctcggatgcgcgccgcgctttcaagaattccgccgggcttacgaggccgcgcgggcggcacatctgcacccgtgcgaagtggcactgcac

SEQ ID NO: 214408 - DNA, 879 bp, Artificial Sequence
  derived and/or modified sequence
atgggttttccagcagcagccctgctttgtgctctttgttgtggccttctggctcccgcagctcgcgccggatactcggaagagcgctgtagctggcgcggatccgggcttactcaagagcctggatcagtgggccaacttgcactggcctgcgcagaaggtgcagttgagtggctgtaccctgcaggggctctgagattgacccttggaggtccggatccgagagccagaccggggattgcgtgtcttagacctgtgaggcctttcgcaggagcacaagtgttcgcagagcgggcaggaggagcactggaattgctgcttgcagaagggcctggacctgcaggaggccggtgcgtgcgatggggaccccgggaaagacgcgcgctttttctgcaagccacccctcatcaagatatttccagacgggtcgccgctttcagatttgaacttagagaggacggtcgacccgaactgcctcctcaagcacatggccttggcgtggatggagcgtgtcgcccgtgttccgatgcggaactgctcctggcggcctgtacctctgactttgtcatccatggaattatccacggagtcacccacgacgtggaattgcaggaatctgtcatcactgtcgtcgccgccagagtgttgagacagactccacctctctttcaggcaggacgttcaggcgatcagggtcttacgtcaattagaacccccttgcgttgtggggtgcaccctggtccaggtacctttcttttcatgggatggtcgcggtttggcgaggcgcgccttggatgcgcacccagatttcaggagtttcgccgggcatacgaagcagcacgggcggcacatcttcatccctgtgaagtggccctgcat

SEQ ID NO: 214409 - DNA, 879 bp, Artificial Sequence
  derived and/or modified sequence
atgggctttcccgctgcagctctgttgtgcgccctctgttgtggactgctagcgccagcagcacgggctggttattctgaggagaggtgctcctggaggggctcagggttaactcaggagcccgggtcggtagggcagcttgccctggcctgtgctgagggtgccgttgagtggctgtatcctgctggcgctctgaggctcaccctgggcggaccagacccaagggcacgccccggaattgcatgcttgcgccctgtgcgaccatttgcaggcgcccaagttttcgcggagagggcaggcggcgccttagagctcctcctggcggagggacccggccctgctggcggccggtgcgtacgctgggggccccgggagaggcgtgcactgttcctacaggctactccccaccaagatatcagcagaagagtggctgcttttcggtttgagcttagagaagacgggcgacccgaactgcccccccaggcgcacggcttgggagtcgatggggcctgcaggccgtgctccgatgccgagcttctccttgctgcttgcacttctgatttcgtaatccatggtattatccatggagtgacgcacgatgtggagctgcaggaaagtgttatcaccgtcgttgcagccagggtgctaaggcagactccacccctgtttcaggccggtcggtctggtgatcaaggattaacgtccatccgtacaccgttaagatgtggcgttcatcccggacccggtacctttttgttcatgggatggtctcgttttggagaagcccggctggggtgcgcacctcggttccaagaattccggagggcttatgaggccgccagggcggcacacctgcatccctgcgaggtcgctctgcat

SEQ ID NO: 214410 - DNA, 879 bp, Artificial Sequence
  derived and/or modified sequence
atggggttcccggcagcggccctcctttgtgcgctgtgttgtggactcctggcgccagccgcgcgcgcaggctactcggaagagcgctgttcgtggcgcggatccgggctcactcaagaaccgggatccgtgggacaactggctctcgcttgcgccgaaggagccgtggaatggctgtacccggcaggcgctctgcgcctcaccctgggaggacctgacccgagggcccgccctggcatcgcctgcctgcgaccggtgcggccgttcgccggagcccaggtctttgcagagcgggctggcggagcactggagctgctgctggccgagggtccagggcctgcaggtggccggtgcgtgcggtggggtcctagagagcggcgcgcactcttccttcaggccactccgcaccaggacatttcgaggcgcgtcgcggcctttcggttcgaactgcgggaagatggacgcccggagctgccaccccaagcccacggcctgggcgtggatggagcttgccgcccctgtagcgacgccgagttgctgctcgctgcctgtaccagcgacttcgtcatccacgggatcattcacggtgtcacccatgatgtggagctccaggagtcggtgattaccgtcgtggccgcccgcgtgctccggcagactccgccactgttccaggctgggcgctccggagatcaaggactgacctctatcagaactccactgcgctgtggagtgcatccgggaccgggaaccttcttgttcatggggtggtcgcgttttggagaggctagactcggatgcgcgccgagatttcaggaatttcgcagggcatacgaggctgctagggcagcacatctccacccgtgcgaagtggcactgcac

SEQ ID NO: 214411 - DNA, 879 bp, Artificial Sequence
  derived and/or modified sequence
atgggattccctgccgcagccctcctgtgcgcgctgtgttgtggcctcctcgcgccagcggcaagggccggatattcagaggagcgctgctcttggagagggtcaggtctgacccaggagcctgggtcagtgggccaattggcactggcgtgcgctgaaggtgctgtcgagtggctttaccccgctggtgccttgcggcttaccttaggaggccctgaccctagggccagaccggggatcgcctgccttaggccggtacgcccgtttgctggggcccaggtctttgctgaaagagccgggggggcacttgagctgttgctggcggagggtcccggaccagccggcggacgatgtgtgcgctggggcccccgggagcgccgagctttgttcctgcaggcaaccccccatcaagacatatctaggcgcgtggccgcattccggttcgagttgagagaagacggaagacccgagctgccaccccaggcgcacggcttgggcgtggacggcgcatgcaggccttgtagtgatgccgaacttctgctcgcggcctgcacctccgattttgttatccacggcatcatccacggggtcacccacgacgttgaactccaggaatctgtcatcaccgtggtcgctgcaagagtcctgagacagacacctcctctgtttcaggctggacgcagtggagaccaagggctgacctctatcagaactcccctcaggtgtggagtgcatcctgggcctggaacatttttgttcatgggctggtcacgatttggcgaagccagactgggttgcgccccaagattccaagagttcaggagggcttacgaggctgcccgggcagctcaccttcatccctgcgaagtggcacttcat

SEQ ID NO: 214412 - DNA, 879 bp, Artificial Sequence
  derived and/or modified sequence
atgggctttccagccgccgctctgctctgtgccttgtgctgtggcttgctggcccctgcagcacgtgctgggtactccgaggaacgttgcagctggcgagggagcggactaacccaggagcccggatctgttgggcagttagccctagcttgcgccgaaggagctgtagagtggctgtatcccgcgggtgcattgcgactgaccttgggcggaccagatccaagagctcgccccggcatcgcctgtctgagaccagtccgccctttcgccggagcacaggtattcgctgaacgggcaggtggggctttggaattactcctcgctgaagggcctggccctgcaggaggtcggtgcgttcgctggggacctcgtgaaagaagagccctatttctgcaggccaccccccatcaggatattagcaggcgcgtggccgcctttcgctttgagctgagagaagatggccgcccggagctgccccctcaggcgcacggtcttggcgtcgacggggcctgccgcccgtgttctgatgcagaactgctcctcgccgcctgtacttctgacttcgtgatccatggcataatccacggggtgacccatgatgttgagttgcaagaaagcgtcattaccgtcgttgccgctcgcgtcctccggcagactcctccactttttcaagcgggaaggagcggggatcagggactgacaagcatccggactccactgagatgcggggtgcaccccggccccggtacattcctatttatgggatggagcaggtttggagaggcacgccttgggtgtgctccaagattccaagagttccgcagggcctatgaagccgcccgtgctgcccacctgcacccctgcgaagtggccctgcat

SEQ ID NO: 214413 - DNA, 879 bp, Artificial Sequence
  derived and/or modified sequence
atgggctttcctgcagccgcactcctgtgcgccctgtgctgtggcctgctggcaccggccgctagagcaggatattccgaagaaaggtgcagctggagaggatccggactgacccaggaaccaggctccgtgggacagctggccctggcttgcgccgagggagcggtggaatggttgtatcctgctggagcattgcgccttactttgggtggccctgacccaagggctcggccaggcatcgcctgtctaaggccagtaaggcccttcgctggagctcaggtgtttgccgagagggccggcggagccctggaacttctgctcgccgaaggtcccggaccggccggcggccgctgcgttaggtggggacctcgagagaggcgggcactgttcctgcaagccactccacaccaggacattagcagaagagtggccgcgttccggttcgaacttagggaggatggaaggccggaacttccccctcaggcacatggcttgggcgtagacggagcctgccgcccttgttcagatgctgaactcctgctcgcggcctgcaccagcgacttcgtcatccacggcatcattcatggggtcacccacgacgtggagctccaggaatccgtcatcactgtggttgctgcaagggtgctcagacagactccccctctgttccaagcgggaaggtctggagaccagggcctcactagcatccggacccctctgaggtgcggcgtccaccctggccccggcaccttcttgtttatgggttggagcagatttggagaggctagattgggctgtgctcctaggttccaggagttccgcagagcttacgaggcggctagggctgcacaccttcatccatgcgaggtagccctgcat

SEQ ID NO: 214414 - DNA, 879 bp, Artificial Sequence
  derived and/or modified sequence
atgggatttcctgccgcggcactgctgtgtgccctgtgttgcggcctgttagcacctgcggcgcgagcaggatacagtgaggaacgctgcagctggagaggaagtggacttacacaagagccgggatcagttggtcaattagcgcttgcttgcgccgaaggtgctgtagaatggttgtatccggcaggagctcttagacttaccttgggggggcctgacccaagagcacgcccggggatcgcctgtttaagacctgtacggcctttcgcaggagcacaggtgtttgccgaacgagcaggcggagctttggaactgctcttagcggagggaccaggcccggcgggcgggcgttgcgttagatgggggcctcgcgaacgcagagctttatttctccaagccactccgcatcaagatatttcacgacgcgttgcggcatttcgatttgaactgcgcgaagatggcagacctgagctgccgccgcaggcgcatggattaggagtcgacggtgcgtgtcgcccttgtagcgacgcagagttgttattggccgcttgcacatctgattttgttatacacggcatcatccatggcgtgacgcatgacgtcgaattacaggaatctgtgatcacagttgttgccgcacgcgtgctccgtcaaaccccgccattattccaagcaggaagatccggcgaccagggtctaacatcaatccggaccccgcttcgttgcggagtccatccgggcccgggaacatttctgtttatgggatggtctcgtttcggagaagcacgactcgggtgcgctccgaggtttcaggagtttcgaagagcctatgaagcagctagagcagcccatttgcatccttgtgaggtggctttgcat

SEQ ID NO: 214415 - DNA, 879 bp, Artificial Sequence
  derived and/or modified sequence
atgggattccccgctgccgctctgctgtgtgcactctgctgtggcctcctggctcctgccgcaagagctggttacagcgaggagagatgttcttggcgggggtctggtctcactcaggagcctggctcagttggacagctggccctggcctgtgcagaaggtgccgtggaatggctttacccagccggcgcccttcgcctgaccttgggaggacccgaccctagagcccggcctggtatcgcgtgcttgcgccccgtccgcccatttgccggtgctcaggtgtttgcggaacgggccggaggggccctcgagcttctgctcgcggagggccccgggccagccggaggacggtgcgtgcgatggggtcctcgggaacggcgggctcttttcctgcaggcaacgccccaccaggacatttcacggagagtcgcggcgtttaggttcgagctccgagaagacggtcggcctgaactcccaccacaggcccacgggttgggggtcgacggagcctgtcgaccatgcagcgacgccgaactgctgctggccgcttgtacatcagacttcgttattcacggcatcatccacggcgttacgcacgatgtcgaattgcaggagagcgtgattactgttgtggccgccagagtacttcggcagactccaccactgttccaggcaggcagatcaggtgaccaaggtctgacttccatcaggacccctctgcggtgtggggtccatcccggccccggaacattcctttttatggggtggagtcggtttggagaggccagattgggttgtgctccccggttccaggagtttcgaagagcctatgaggccgcaagagctgcacatctgcatccctgcgaggtggccctccac

SEQ ID NO: 214416 - DNA, 879 bp, Artificial Sequence
  derived and/or modified sequence
atgggctttccagccgctgcgcttctctgtgccttatgctgcgggctacttgctccggctgctcgcgcgggttatagtgaggaacgatgtagctggagagggtccggcctgacacaggaaccaggctcggtgggtcaattagctctggcttgcgccgagggtgccgtggagtggctttacccagccggggctctgcgcctcacgctaggggggcctgaccctcgcgcgcgaccgggcattgcctgtctgaggcccgtcagacctttcgccggtgcacaggtgtttgcggagagagccggaggcgctttagaactgcttctggccgaaggacccggacccgcaggcggtcgatgcgtgaggtggggccctagggagcgacgggccctgttcctgcaggccacaccgcatcaggacataagccggcgggtggcggcttttagattcgagctacgggaggacgggcggcctgagttgccacctcaggcgcatggcctgggagtagacggggcatgccggccttgttccgatgccgagctgctgctagccgcttgcacaagcgacttcgttatccacggcattatccatggggtgacccacgatgtcgagttgcaggagtcagtcattacagttgtggcggcccgggtccttagacagacaccccctctgttccaagctggacggtctggcgatcaggggttaacaagcattagaacaccactgagatgtggcgtccacccagggcctggcacctttttgttcatgggctggagcagattcggggaggccagattaggatgtgctcctaggtttcaggagtttcgaagagcttacgaagctgccagagctgcccacttgcacccctgcgaggtggctttacac

SEQ ID NO: 214417 - DNA, 879 bp, Artificial Sequence
  derived and/or modified sequence
atggggtttcccgctgctgctttgctctgcgcgctctgttgcggtctgctcgcacctgcggctcgagccggttactccgaggagcgatgtagttggcgtggttctggactgacacaggagcctggctctgtgggtcagctggccctcgcatgcgcagaaggagcggtggagtggctgtacccggccggcgccctccgcctgaccttaggtggacctgacccccgagcgaggcccggtatcgcatgtctgagaccggtgagaccatttgcaggtgcccaggtcttcgccgagagagctgggggggccttggagctgctgctggctgagggaccaggcccagctgggggcaggtgtgtgaggtggggtcccagggagcgcagggctctgtttctgcaggcgaccccgcaccaggatatcagtcgccgggtagccgcatttcgcttcgagcttagagaagatggcaggccagagctgcctcctcaagcacatggcttgggcgtggacggagcctgtaggccctgctctgatgctgagttgctgcttgctgcgtgtaccagcgacttcgtgatccacggcattatccatggagttacccatgacgtggaactccaggagagcgttattaccgtggtcgccgctcgggtccttaggcagaccccccccctgttccaggcaggacgatccggagatcaggggctaacctctatcaggacacctcttcgttgtggcgttcacccaggacccgggacttttctctttatggggtggagccgtttcggtgaagcacggctggggtgtgccccgagatttcaagaattcaggcgagcgtacgaagcggccagggcagcccatctccatccctgcgaagtggcattgcat

SEQ ID NO: 214418 - DNA, 879 bp, Artificial Sequence
  derived and/or modified sequence
atgggattcccagctgctgcgctcctttgtgcgttgtgctgcgggctgctggccccagcggctcgcgcaggctatagcgaagaaaggtgtagttggcgaggcagcgggctgactcaggaaccaggaagcgtcggccaactggcccttgcctgcgccgagggagctgtggagtggttgtacccagccggcgctctgagactgacactggggggcccggacccgcgagcccggccaggtattgcctgtctgcgacctgtgcgcccattcgcgggcgcccaggtttttgcggagcgagcgggaggagcattggagctgttgttggccgagggccccggtcctgctggcggccggtgtgtccgatggggacctcgggagcggagggcactgttcctccaggctaccccgcatcaggatatcagtcgacgggtagccgcgtttcgattcgaactgagagaagatggtcgccccgagctcccaccccaggcgcatggtcttggggtggacggagcgtgcaggccgtgctcagatgcagaattgctgctcgccgcttgtacttcagattttgtcattcatggcatcatccacggggtcactcatgacgttgagctgcaggagtccgtgattaccgtggtagcggctagggtcctcagacagacgcctcctctcttccaagccggacggagcggggaccaggggcttaccagcatccggacccctctccgctgcggggttcaccctggaccgggcaccttcctgtttatgggttggtcccgcttcggtgaggccagattggggtgtgcgccgcggtttcaggagtttaggagagcatatgaagctgccagggcagcccacctccacccctgtgaagtcgccctccat

SEQ ID NO: 214419 - DNA, 879 bp, Artificial Sequence
  derived and/or modified sequence
atgggcttccccgcggccgccttgttgtgcgcgttgtgttgcggcctgctggctccagccgcgcgcgccggatactcagaagaaagatgttcgtggagaggatcaggactgacccaggaacctggctcggtgggacagcttgcgctggcgtgcgctgaaggagcagtcgagtggctgtacccggctggagcactgaggctcactctgggaggaccggatccgcgcgcgcgacctgggatcgcatgccttcggccggttcgcccattcgcgggcgcccaggtctttgcggagcgggcgggcggagcgctcgaactgctgctggctgagggcccgggtcctgcgggtgggcggtgcgtgcgttggggaccgagagaacggcgggccctgttcctgcaggctactccgcatcaagacatttcgaggcgggtcgctgctttccgcttcgagctgcgagaagatggaaggcctgaactcccccctcaagcccatggactcggcgtcgacggggcctgtcggccgtgcagcgacgcagaattgttgctggctgcatgcacctccgatttcgtgatccatggtattatccatggagtcacccatgacgtggagttgcaggaatcagtgatcaccgtggtggcggcacgcgtcctgaggcaaacgcccccgctctttcaggcaggacgctcgggggaccaaggactgacctcaatccgcactccgcttaggtgcggcgtgcatcctggaccgggcactttcctgttcatgggctggtcaagatttggagaggcccgcctgggttgtgctcccagattccaagaatttcgcagagcctacgaggcggcccgagccgcccacttgcacccctgcgaagtcgcgctccat

SEQ ID NO: 214420 - DNA, 879 bp, Artificial Sequence
  derived and/or modified sequence
atgggcttccccgcagctgccctactttgcgcattgtgctgtggactgttggcccccgcagcacgagccgggtattctgaagagcgttgctcttggagaggctccgggctgactcaggaaccaggcagcgtgggccagctggccctcgcctgtgccgagggagccgtggaatggctctaccctgcaggtgcgttgagactcacgttaggtggccccgaccctcgagcacgcccaggcatcgcctgtctccgcccagtccggccttttgccggcgcccaggtctttgccgagcgggctggcggggcccttgagctcctcctggctgaaggtccgggacccgcgggtggcagatgcgttcgatggggcccccgggaaagaagggccttgttcttacaggccacccctcatcaggatatcagtagacgcgtggctgcctttcggttcgaactacgtgaggacggtagacccgaactgcccccgcaggcacatggccttggcgttgacggtgcttgtagaccatgctctgatgccgagcttctcctggcggcgtgcaccagcgattttgtgatccacgggattatccacggagtgacccacgacgtggaactgcaggaaagtgtcatcacggtagtggccgccagagtactgagacagactcctccactgttccaggctggacgtagtggcgaccagggactgacaagcatccgcacaccccttcggtgcggagtgcatcccggacccggtacgttcttattcatgggttggtcccgctttggtgaagctaggcttgggtgcgcccccagattccaagagtttcgacgggcctacgaagcggcccgcgccgctcacctccacccttgcgaggtcgccttgcac

SEQ ID NO: 214421 - DNA, 879 bp, Artificial Sequence
  derived and/or modified sequence
atgggatttccggccgctgcacttttgtgcgcactctgctgtggcctcctcgccccggccgccagggccggatacagcgaagaacggtgctcgtggcggggatccggattgactcaagagccgggctcggtgggtcagctcgccctggcgtgcgccgagggtgcagtcgagtggctgtacccagcgggtgcccttcggctcactctgggcgggcccgatccaagagcgaggccgggaatcgcctgtcttaggccggtgcgcccgttcgccggagcgcaagtgttcgccgagagggccgggggcgcgctcgaactgctgctcgccgaagggcccggtccggcgggaggcaggtgcgtgcgctggggaccccgggaacgccgcgccctcttcctgcaggcaaccccgcaccaagacatctcacggcgggtcgctgcctttcggttcgaacttagagaggacgggcggccggaattgcctccgcaagcccacggccttggcgtggacggagcttgccggccttgctcagacgctgagctgctcctcgcagcgtgcacttccgatttcgtcattcacggaattatccatggagtgacgcatgatgtcgaactccaggaatcagtgattactgtggttgcggctcgtgtcctgcgccagactcctcctctgtttcaagcgggacggtcgggcgaccagggtctgacttccatcagaactccgctccgctgcggggtgcatcccgggccaggaacttttctcttcatgggatggtcgcgcttcggggaggctagactgggctgcgcaccgcggttccaagagtttcggcgcgcctacgaggccgcacgggccgcacacctgcatccgtgcgaggtcgccctccac

SEQ ID NO: 214422 - DNA, 879 bp, Artificial Sequence
  derived and/or modified sequence
atggggtttcccgcagccgcgctgctctgcgctttgtgctgtggcctgttagcacctgccgccagggccggctattcggaggagcgctgtagttggcgaggaagtggtttaacccaagagcccggaagtgtgggtcaactcgccctggcttgtgccgagggagcagtagaatggctgtaccctgctggggccctcaggctcacgctaggggggcctgatccccgagcccgaccaggtatcgcatgcttgcggccagtgcggccgtttgctggggcgcaggtgttcgccgagcgagccggaggggctctggagttgctactcgccgaaggccctgggcccgccggtggccggtgtgtacggtggggccctagggagcgcagggcactctttcttcaggccactccccaccaggatatctcccggcgtgtggctgcattcaggttcgagctgagggaggacggtcgccctgaactacctccacaggctcatggactgggggtggacggtgcgtgcaggccatgtagtgatgctgaacttctgctcgccgcctgcaccagcgattttgtcatccatgggatcattcacggtgtgacccacgacgtggagctgcaagagagtgtgattacagttgtggcagcacgggttctaagacagacccccccactgtttcaagccggacgctccggcgaccagggcctgaccagcatccggacgcctctgcggtgcggcgtgcatcccggcccgggaacctttctttttatgggatggagtcggtttggcgaggcgcgccttggctgcgcccccaggttccaggaatttcggcgtgcctacgaggccgccagggccgcccatctgcatccgtgcgaggtggccttacac

SEQ ID NO: 214423 - DNA, 879 bp, Artificial Sequence
  derived and/or modified sequence
atgggattcccagctgccgcgctcctgtgtgcactgtgttgcggtttgctggcgccggcagcccgggcgggatactcagaagaacgctgctcctggcgggggtcgggtctgacccaggaacctggatccgtgggacagttggcgcttgcgtgcgctgagggagcggtggagtggctttatccggccggagcccttaggctcacgctgggaggcccagatccccgcgctcgcccaggcatagcatgcctccggcctgtccgaccttttgcgggagcccaagtctttgctgagcgcgccggaggagcgctcgagcttctgctggcggaagggccgggaccggctggagggaggtgcgtgcgctggggcccacgcgaaagaagagcgctgttcctccaggcaactccgcaccaggatatctccaggcgcgtggccgctttcagattcgaactcagagaagatggtagaccagaacttccgcctcaggctcacggactgggtgtggacggcgcgtgccgcccgtgttcagacgcagaactcctgctggccgcatgcacttccgatttcgtgatccatggtatcatccacggggtcactcacgatgtggagttgcaggaatcagtcattactgtggtggcggcacgcgttctgagacagaccccgcccctgtttcaagcggggagatccggagatcagggcttgacctcgatcagaactccattgcgctgtggtgtgcatcctggcccgggaaccttccttttcatgggatggtcgcgcttcggcgaagctcggctgggatgcgccccacgcttccaggagttccggcgggcctacgaggctgcacgcgctgcccacctgcacccgtgcgaagtggcgctccat

SEQ ID NO: 214424 - DNA, 879 bp, Artificial Sequence
  derived and/or modified sequence
atgggttttccagcggctgcattgttgtgcgctctttgttgcggtctgctcgcacctgcggcccgtgccgggtactcggaagaacgatgctcttggcgtggatcgggcctgacgcaagaaccgggaagcgtgggacagctggccctggcgtgtgccgagggagcagtggaatggctctaccctgcgggtgcccttcgcttgactctgggaggacccgacccacgggcacggcccggcattgcttgtcttaggcctgtgcgtcctttcgctggtgcacaggtgtttgcagaacgagcaggaggtgcgcttgaactgctgctggcggaaggcccaggccctgcaggtggtcggtgtgtgcgatggggtcctcgggagcggagggccctttttctgcaagcaactccacatcaggacatttcccgccgggtggctgcatttcgctttgaactccgggaggatggaaggcctgagcttccgccacaggctcatgggcttggtgtcgatggagcttgcagaccttgttccgacgcggaactccttctggccgcatgcactagcgacttcgtcattcatggtataatccacggagtgactcatgatgtcgagcttcaggaaagcgttatcaccgtagtggcagcaagggtcctgaggcagaccccaccgctcttccaggccgggcgatcgggagatcagggcctgacctcgatccggactccactccgctgcggagtccatcccggtcccgggacgttcctgtttatgggatggagcagatttggcgaggcaagattgggatgcgcaccaagatttcaggaatttcggcgggcatatgaagccgcaagagcagcccacctgcatccatgtgaggtggcactgcat

SEQ ID NO: 214425 - DNA, 879 bp, Artificial Sequence
  derived and/or modified sequence
atgggattccctgctgccgcactgttgtgtgcactttgttgtgggcttctggcccctgcagcaagagcagggtactccgaagaacgttgctcgtggcggggatccggacttacccaggagccaggaagcgtcggacaactggcactggcatgcgcagaaggtgcagtggaatggctttaccctgcaggagcacttcgcctcacccttggcgggcccgatcctcgcgcaagacctggcattgcctgtctccgacccgtccggccttttgccggagcccaggttttcgccgaacgcgctggaggagccctcgagctgctgctcgcggagggaccagggcctgctggagggaggtgcgtgcgctggggacctcgggaaagaagggcactgtttctgcaagcaactcctcaccaagatatttcccggcgtgtggcagcgtttcgatttgaacttagggaggacggcagaccagagcttccaccacaggcgcatggcctgggtgtggatggcgcctgtcggccatgtagcgatgccgagcttctgcttgcagcctgtacttccgatttcgttatacacgggatcatccatggtgtgacccacgacgtggaacttcaggaatcggtgattaccgtggtcgcggcacgagtgcttcggcaaactcctccactgtttcaagccggcagatcgggggatcaaggtctgacttccattcggacccctctgcgctgtggtgtgcatccagggcctggaacttttctgtttatgggatggtcccgctttggggaagcaaggctgggatgtgccccgcgctttcaggaatttaggagggcctacgaagcagcacgtgcggctcatctccatccttgtgaggtggccctgcat

SEQ ID NO: 214426 - DNA, 879 bp, Artificial Sequence
  derived and/or modified sequence
atgggatttccggctgctgccctgctgtgcgcactgtgctgtggcctgctcgccccggcagcacgcgccgggtactccgaagaaagatgctcgtggcgaggatccggcttgactcaggagccaggctccgtgggacaactggctctcgcctgcgccgaaggagcagtggaatggctgtacccagccggagccctgcgcctgactctcggaggaccggatccacgcgcgcggccaggaatcgcatgccttcgcccggtgcggccgttcgctggggcgcaagtctttgccgagcgcgcgggcggggccctggagctgttgctggcagaaggaccggggcccgccggtggacggtgcgtgcgctggggaccacgagaacgcagagctctgttcctgcaggcgactccgcaccaggacatctcgagacgggtagcggccttcagattcgagctccgcgaggacggacggcccgagctgccccctcaggcgcacggcctgggcgtggatggtgcttgccgcccgtgctcagacgcagagcttctgctggcagcttgcacgtcagacttcgtcatccacggaattatccatggtgtgacccatgacgtcgaactccaggaaagcgtgatcactgttgtggctgcgcgcgtgctgagacagacccctccactcttccaggccggccgctcgggagatcagggactgacctcgatccgcactccgctgagatgcggagtccacccaggacctggcaccttcctctttatgggatggtcgcggttcggagaagccagactgggatgtgccccaagattccaggaattccgccgcgcctacgaggccgcccgcgcagcgcatctccacccttgtgaggtcgcgctgcac

SEQ ID NO: 214427 - DNA, 879 bp, Artificial Sequence
  derived and/or modified sequence
atgggctttcctgcagcagctttactctgtgctttgtgctgtgggctgctcgccccggctgcccgggctgggtacagtgaagaaagatgttcctggcgaggcagtggcctcacccaggaacctgggtcggtggggcagctggccctggcctgcgcagagggggcggtggagtggttatatccagcaggtgccctgcgactcaccttgggtgggcctgatccgagggcacggccgggaattgcctgcctccgaccagtgaggcccttcgctggcgctcaggttttcgctgagcgcgccgggggagctctcgagctcctgctggctgaagggcccggcccggcaggcgggcgttgtgtccgttggggacctagggagcggcgggccctgttcttgcaggcaaccccacaccaggatataagcagacgggtcgccgcattccgtttcgagcttcgtgaggatggcaggccagaactcccccctcaggcacatggcttaggagtggacggtgcttgccggccatgcagtgatgcagagttactcctggccgcttgcactagtgacttcgtgatccacggaatcatccacggggtgacccatgacgtggaactgcaggagtccgtcatcactgtggtggccgcccgtgtgcttaggcagacacctcccctcttccaggcaggccggtctggtgaccagggcttgactagcataagaaccccactccgctgcggggtgcatcctgggcctggaacatttttatttatggggtggtcacgcttcggagaggctcggcttggctgtgccccacggttccaggaatttaggagggcctacgaggcagctcgggcggcacatctccatccctgcgaagtagctcttcat

SEQ ID NO: 214428 - DNA, 879 bp, Artificial Sequence
  derived and/or modified sequence
atgggcttcccagctgccgctctgctgtgcgcgctgtgctgtgggttacttgctccagctgcccgggctgggtattccgaagaaaggtgttcctggcggggctcaggtttgactcaggaaccaggttccgtgggccagctggctctggcatgcgcagagggggccgtcgagtggctttatcctgctggggccctgcgcctgacactcggtgggcctgaccctcgggccaggcctggtattgcgtgcctgcggccggtgcgaccatttgctggggctcaggtcttcgccgaaagggctggcggcgcactggagctgctcttagccgaggggccagggccggcgggtggtcgctgtgtgaggtggggtccaagagaacgccgtgcccttttcctgcaggcgaccccacaccaggacatcagcaggagggtagccgccttcagatttgaactgagagaggatggacggcccgagctgccccctcaggcacacgggttaggggtggacggagcctgtcgtccatgctcggatgcagagctgttgctggctgcgtgcaccagtgacttcgtgatccacggtatcattcacggagtgacgcatgacgtggaacttcaggaatcagtaattacggtggtagcggccagagtcctgagacaaacaccacctttgtttcaagccggtcgttctggagaccaggggctgacgtctattcggaccccactgcgatgcggtgtccaccccggcccgggaacttttctctttatgggatggtcccggttcggcgaagcgaggctcggatgcgctcccaggttccaagagttcagaagggcctacgaagccgcccgggccgcacatttacatccctgtgaggtggccctgcac

SEQ ID NO: 214429 - DNA, 879 bp, Artificial Sequence
  derived and/or modified sequence
atgggctttcctgcagctgcgctcctttgtgccctgtgttgcgggctacttgcacctgccgcccgagcaggctactccgaggagcgatgttcatggcgcggctctggcctgacacaggaacctggctccgtgggccagctggccctggcctgcgcagaaggggcagtggagtggttgtaccccgctggtgcactcaggctcactctgggcggtccagatccgagggccagacctggaatagcttgtttgcggccagtgcgacctttcgccggggcccaagtgttcgctgaaagggctgggggagcactggagttactgcttgccgaaggtccagggcctgccgggggcagatgcgttagatggggaccacgagaacgccgcgccctgtttcttcaggcaaccccccatcaggatattagccgaagagtcgcggcgtttagattcgaactacgggaagatggacgccccgagttacctccccaggcgcacggcctgggggtagacggtgcctgccggccctgctctgacgcagagctgttattggcggcatgtacctcagacttcgttattcacggtatcatccatggtgtaacccacgacgttgagctccaagaatccgtaatcaccgtggtggcggcccgggtgctgcgccaaacacccccactgttccaagcaggcagatccggtgatcagggtctcacaagtattcggacccctctcagatgcggagtgcaccccggtcccggaacttttctctttatggggtggtcaaggttcggggaggcacggctaggctgcgctccaaggtttcaggagttcaggcgggcctatgaggccgcgcgcgccgcacatctccatccctgtgaggtggccctccac

SEQ ID NO: 214430 - DNA, 879 bp, Artificial Sequence
  derived and/or modified sequence
atgggattcccagctgcagcacttctttgcgctctttgctgcgggttgttagcacctgcagcccgtgcaggatattccgaggagcgatgttcttggcgaggttctgggctgacacaagagccaggatccgtaggacagttagctctcgcatgcgcggagggtgccgtggagtggctttacccggctggcgcattgcgtttgactcttggaggaccggatccaagagcacgcccaggtattgcttgccttcgaccagtcagaccatttgcaggcgctcaagttttcgcagagcgagcgggaggagctctcgagctcctattggcagaaggaccaggaccagcgggaggccgttgcgttagatggggacctcgcgagagacgcgctttattcctccaagctactccacatcaagatatctcacgaagagttgccgcgttccgattcgaacttcgtgaagatggtcgaccagagttgccacctcaagctcatggcctcggagttgatggagcgtgtcgtccttgttcagacgctgagctcttgcttgcagcatgtacgtcagatttcgtcattcacggaattattcacggggttactcatgatgtcgaactgcaggaatctgttattacagtggttgcagctcgggttctacgtcagacgccaccacttttccaggcgggtcgaagtggggaccaaggattgacgagtattagaactccattacgatgtggagtgcacccgggaccgggaactttccttttcatgggttggagtcggttcggggaggcaagacttggatgtgcaccaagattccaagaattccgtagagcctacgaggcagcacgtgctgcacatctgcatccatgcgaggtagcgttgcat

SEQ ID NO: 214431 - DNA, 879 bp, Artificial Sequence
  derived and/or modified sequence
atgggcttcccggccgcggccctgctgtgcgctctctgctgcggactgctggccccggcggccagagcaggctactcggaggaaaggtgcagctggcgcggctcgggtctgacccaggagcctggatccgtcggccagctcgcactcgcgtgtgccgaaggcgccgtcgagtggctgtaccctgctggagcccttcgactcacccttgggggcccagatcctcgcgcccggcctggaattgcctgtctcagaccggtaagaccctttgccggagctcaggtttttgctgaacgcgcaggaggggccctggagcttttgctggcagaaggcccaggcccagcaggaggaagatgcgtgcggtgggggccgcgagaaaggcgggccctcttcctgcaagcgaccccgcaccaggacatctcccgccgggtcgccgctttcagattcgaactccgcgaggacggacggccggagctgccacctcaggcccatggactcggagtggatggcgcctgtagaccctgttccgacgctgagttgctcctggcagcctgcaccagcgacttcgtcatccatggaatcatccatggagtgacccacgacgtcgaacttcaagaatccgtgatcactgtggtggccgcacgggtgttgaggcagactccacctctgtttcaggctggtcgctcgggagatcagggactgacctcgatccggactcccctccgctgcggcgtgcatccgggccccggtaccttcctcttcatggggtggtcaaggttcggagaagctcgcctcggatgcgcccctcgctttcaagagttccgacgcgcctacgaagctgctcgcgctgcccacctgcatccatgcgaagtcgccctccac

SEQ ID NO: 214432 - DNA, 882 bp, Artificial Sequence
  derived and/or modified sequence
atgggcttccccgccgccgccctgctgtgcgccctgtgctgcggcctgctggcccccgccgccagagccggctacagcgaggagagatgcagctggagaggcagcggcctgacccaggagcccggcagcgtgggccagctggccctggcctgcgccgagggcgccgtggagtggctgtaccccgccggcgccctgagactgaccctgggcggccccgaccccagagccagacccggcatcgcctgcctgagacccgtgagacccttcgccggcgcccaggtgttcgccgagagagccggcggcgccctggagctgctgctggccgagggccccggccccgccggcggcagatgcgtgagatggggccccagagagagaagagccctgttcctgcaggccaccccccaccaggacatcagcagaagagtggccgccttcagattcgagctgagagaggacggcagacccgagctgcccccccaggcccacggcctgggcgtggacggcgcctgcagaccctgcagcgacgccgagctgctgctggccgcctgcaccagcgacttcgtgatccacggcatcatccacggcgtgacccacgacgtggagctgcaggagagcgtgatcaccgtggtggccgccagagtgctgagacagaccccccccctgttccaggccggcagaagcggcgaccagggcctgaccagcatcagaacccccctgagatgcggcgtgcaccccggccccggcaccttcctgttcatgggctggagcagattcggcgaggccagactgggctgcgcccccagattccaggagttcagaagagcctacgaggccgccagagccgcccacctgcacccctgcgaggtggccctgcactag

SEQ ID NO: 214433 - DNA, 882 bp, Artificial Sequence
  derived and/or modified sequence
atgggcttccctgctgctgccctcctctgcgccctttgctgtggactgctcgcacctgccgcccgggccgggtacagtgaagagcgctgctcatggagaggttctggcctaacccaggaacccggcagcgtggggcagctagccctagcatgcgccgagggcgctgtcgaatggctgtatcctgcgggggctctccgcctgactctcggggggcccgaccccagagcaaggcccggaatcgcatgcttgagaccagtaaggccttttgcaggcgcccaagtcttcgctgaaagggcggggggggcgctcgagcttctccttgcggaagggcctggtcccgcaggcggccgctgcgtcagatggggccctcgagagcggagagcacttttccttcaggccacccctcatcaagacattagccgccgcgtagctgcttttaggttcgagctgagagaggatggtaggccagagctgcccccgcaggctcacggcttgggcgtggatggggcttgccggccctgtagtgacgctgagctcctcctcgccgcgtgtacttccgattttgtgatccatggcattatccatggggtgacgcacgacgtcgaattgcaggagtctgttatcaccgttgttgctgcccgcgttcttcgtcagacaccacctctctttcaggccgggcgctctggcgaccaggggctgacgagtattcgcacccctttgaggtgcggtgtgcacccaggtcccggcacatttctgtttatgggatggagtaggttcggtgaagctagactcggctgtgcgccccgtttccaggaattccggagggcctatgaagctgcccgggccgcccatctgcacccctgcgaggtagctctccattag

SEQ ID NO: 214434 - DNA, 882 bp, Artificial Sequence
  derived and/or modified sequence
atgggcttccctgctgctgccctgctgtgtgccctgtgctgcggcctgctggccccagctgcccgggccggctacagcgaggagcgctgctcctggaggggcagcggcctgacccaggagcccggctctgtgggccagctggccctggcctgtgccgagggcgctgtggagtggctgtacccagctggggccctgcggctgaccctgggcggccctgacccccgggcccggcccggcatcgcctgcctgcggcctgtgcggccctttgctggggcccaggtgtttgctgagagagctggaggagccctggagctgctgctggccgagggccctggccctgctgggggccgctgtgtgcgctggggcccccgggagcggcgggccctcttcctgcaggccaccccccaccaggacatcagcagaagagtggccgccttccgctttgagctgcgggaggatggccggcctgagctgcccccccaggcccacggcctgggcgtggatggagcctgccggccctgcagtgatgctgagctgctgctggccgcctgcaccagtgactttgtgattcatggcatcatccatggagtgacccatgatgtggagctgcaggagagcgtcatcaccgtggtggccgcccgggtgctgcggcagaccccacccctcttccaggccggccgcagcggggaccagggcctgaccagcatccgcacccccctgcgctgtggggtgcaccctggccctggcaccttcctgttcatgggctggagcagatttggagaggcccggctgggctgtgccccccgcttccaggagttccggcgggcctatgaagctgcccgggccgcccacctgcacccctgtgaggtggccctgcactag

SEQ ID NO: 214435 - DNA, 882 bp, Artificial Sequence
  derived and/or modified sequence
atgggcttccccgccgccgccctgctgtgcgccctgtgctgcggcttgctggcccctgccgctcgcgcgggctatagcgaggagaggtgtagctggaggggcagcggactgactcaagagccaggctcagttggccagctggcccttgcctgtgctgaaggcgcagtcgagtggctctacccggctggtgctctgcggttgacactcggagggccagatccccgcgcccgacccgggatagcatgtctcagacccgtccggccgttcgcgggcgcccaggtgtttgccgaacgcgccggaggagctctggaacttttgttagccgagggcccgggacccgctggcggtagatgcgtgcggtgggggccccgcgagagacgggcactgttcctgcaagcgacgccacaccaggatatctcccgacgggtcgccgcatttaggttcgagcttcgagaagacggccggccagaactcccacctcaagcgcatggccttggcgttgatggagcttgtaggccttgtagtgatgcagagcttttgctcgcagcatgcacttccgattttgtgattcatggcattatccacggagtaacccatgatgtcgagctgcaggaatccgtgatcaccgtagtcgctgctcgggtcctgcgccagacgcctccgttgtttcaagccggaaggtcaggcgaccagggcctgacaagcatacgcacgcccctgagatgtggagtgcacccaggccccggcacgttcctgttcatgggatggagcaggttcggagaagcaagacttggttgcgccccccgcttccaagagtttcgacgagcttacgaggccgccagagccgcccatctgcacccatgcgaagttgcgctgcattag

SEQ ID NO: 214436 - DNA, 882 bp, Artificial Sequence
  derived and/or modified sequence
atgggattcccagccgcagcactcctctgcgcactctgctgcggacttctggccccagcagctagggccggatacagcgaagaacgctgtagctggcgcggatcgggtctaactcaagaaccaggcagcgtaggacagttagctttagcttgcgctgaaggtgcggtcgaatggttgtacccggctggcgcattgagattaacactgggcggacctgatcccagagcaagaccaggtatagcctgccttagacctgtgcgcccatttgcaggggcacaggttttcgccgagcgggcaggcggagcccttgagctcctcctggcagaagggccaggcccagctggagggaggtgtgtgcgatggggacctcgtgaaaggcgagcattgtttctgcaggccacaccccatcaggatatttcgagacgtgtggcagcctttcgtttcgaattacgtgaggacggtagacccgagctaccacctcaggcacacggcctcggggtagacggggcttgcagaccttgttccgatgccgagctgctgctggccgcttgtacgagcgacttcgtcattcacgggattatccacggagtgacccatgacgttgagctccaggagagcgtgattactgttgtggctgccagggtcttgagacagacaccgccattgttccaggcagggaggtccggtgaccaaggactgacctccattcgaacccccctgcgctgcggcgttcatccagggccagggaccttcctctttatggggtggtcgcgttttggtgaagctcggctaggatgcgcaccgcgatttcaggaatttcgtcgcgcatacgaggcggcaagggctgcccacctgcacccttgtgaggtcgcattgcattag

SEQ ID NO: 214437 - DNA, 3169 bp, Artificial Sequence
  derived and/or modified sequence
tccaaggcggccccggcgctggggctgcgcggcaggcggagcggccgcgggcttgggggcttcgccggggccgggcggccggcgcccccggctgctcccgccgccgcccggacccgcgccccgccggggcagcggtggtgagagccccgactccccggacgccgcccgccgtgccatggggttcccggccgcggcgctgctctgcgcgctgtgctgcggcctcctggccccggctgcccgcgccggctactccgaggagcgctgcagctggaggggcagcggcctcacccaggagcccggcagcgtggggcagctggccctggcctgtgcggagggcgcggttgagtggctgtacccggctggggcgctgcgcctgaccctgggcggccccgatcccagagcgcggcccggcatcgcctgtctgcggccggtgcggcccttcgcgggcgcccaggtcttcgcggagcgcgcagggggcgccctggagctgctgctggccgagggcccgggcccggcagggggccgctgcgtgcgctggggtccccgcgagcgccgggccctcttcctgcaggccacgccgcaccaggacatcagccgccgcgtggccgccttccgctttgagctgcgcgaggacgggcgccccgagctgcccccgcaggcccacggtctcggcgtagacggtgcctgcaggccctgcagcgacgctgagctgctcctggccgcatgcaccagcgacttcgtaattcacgggatcatccatggggtcacccatgacgtggagctgcaggagtctgtcatcactgtggtggccgcccgtgtcctccgccagacaccgccgctgttccaggcggggcgatccggggaccaggggctgacctccattcgtaccccactgcgctgtggcgtccacccgggcccaggcaccttcctcttcatgggctggagccgctttggggaggcccggctgggctgtgccccacgattccaggagttccgccgtgcctacgaggctgcccgtgctgcccacctccacccctgcgaggtggcgctgcactgaggggctgggtgctggggaggggctggtaggagggagggtgggcccactgctttggaggtgatgggactatcaataagaactctgttcacgcaagctgctgtggacctggtctcctgtgtccagcccagccttgggcctgcctcgcagctgtgaggatggctccaattcctgcctcctggcgggagactgaggctcaggggaatggtatcttgttcaagaccatttggcaactgagagggagagcagatgtcaggaggagctacacccacattccggggaggggccgctgctgggtggggggcacgtggggacctgcactcatgcaagcttctgctctgctgcacccaccagccccgtccttgcccgcacccttgcctgcttccctggctggctcccacttgcctcccgtgccaggtgcttctggggctcagcaggagaggaaaggggcagaggggcatagggtccctcgggtacggtgggggcaggcgggcgcacagcgctccggctctgagccaggcctgtgagggaaggggctgcaggctggcagggtgccgacttcccccatggctgctgtgagcccgcagagtcatccttggccccgtcccgcccttggggaagaatgggcccctctgtcctcaggccccttcgacgtgctgagcatccagacgtggcgaggagcccgaagggtgtggggtcccctctgcagggtcctgcttgttgcctgtttccggcgggcggggtgcacaatggggtctctaaggaccgtttcccgccactggccccattgtcactgtctccgccttcctcctcggcctttcagccgcataaagggccagtgaggtttgggacagccacagcccaaggctccgaggctaaaagcccctgggtgggggtgttccaggacacctggccctgtgtgagctgcctcctctcaccccaacccctcggatcctgggaaagagacagccatggctcaagggccagggacccctgggctgagccccagaaatggctttccattctcgcctgggccggggtgggggtggaggccagaggccctgcccaggcagatgaagcccccagctttcaagggggaaactgaggctgtgtgagggacacagctgtgcagggcccacaaacacggtcctttctctaggttagcggatgcagatgcctgatgagtgccatgccctctgtggacacctggggaggggggtcacctccagcgccgccctgggacttccactgcacgtgcaagagacttaccctttcacacagatcacctgcctgccgcagggctgatgaggatgggtgaggagcgcagccactgggtgtcatgcactgtgggggttctcccaccttctgcccctcctcaggttccttgctgcttctctcctctcccaactgtggcacgctgagggctcaggcacaggaccgctcctctggggcagcctccaataacccttggacaacctccactttttcatcttcagccctgaccactccctggggcccatagccttacatccatctgcccccagcccaaacacttctgcaaacactagaaaaggaggtagcccgtgtgccctcctgcaccgcctcctccactcctgtcttggagaggctttcccgtgggccgagcaacccccttacctttggcacttgccctgattctctggccagcttcctacaacctctccttttcagccacacccaagtccacctgttcacaaacaccctgggctgggccctggccgaaccctggcttctacctacctgtctcaggaagtgcctgagccttgcacctacagaccctcccagagaaagccctggctttgcaaccagctgtcttctcatgagacacagggccacaggagcaccacggtgcccaaatgggtcttggagcattagaccaggggcttcatgcctgccctggggacaggtggccaaagtggcatgggagatagggagacagtgtgggtgagcaggtgggcaggagctacaggagcctggggcctgtggatcacagacaccgccaggcaagtgccagttcacacaggtacaggtggctgcagagtgcccaaaggccaagcagcagagtgcctggtgtgg

SEQ ID NO: 214438 - DNA, 1103 bp, Artificial Sequence
  derived and/or modified sequence
cgggcttgggggcttcgccggggccgggcggccggcgcccccggctgctcccgccgccgcccggacccgcgccccgccggggcagcggtggtgagagccccgactccccggacgccgcccgccgtgccatggggttcccggccgcggcgctgctctgcgcgctgtgctgcggcctcctggccccggctgcccgcgccggctactccgaggagcgctgcagctggaggggcagcggcctcacccaggagcccggcagcgtggggcagctggccctggcctgtgcggagggcgcggttgagtggctgtacccggctggggcgctgcgcctgaccctgggcggccccgatcccagagcgcggcccggcatcgcctgtctgcggccggtgcggcccttcgcgggcgcccaggtcttcgcggagcgcgcagggggcgccctggagctgctgctggccgagggcccgggcccggcagggggccgctgcgtgcgctggggtccccgcgagcgccgggccctcttcctgcaggccacgccgcaccaggacatcagccgccgcgtggccgccttccgctttgagctgcgcgaggacgggcgccccgagctgcccccgcaggcccacggtctcggcgtagacggtgcctgcaggccctgcagcgacgctgagctgctcctggccgcatgcaccagcgacttcgtaattcacgggatcatccatggggtcacccatgacgtggagctgcaggagtctgtcatcactgtggtggccgcccgtgtcctccgccagacaccgccgctgttccaggcggggcgatccggggaccaggggctgacctccattcgtaccccactgcgctgtggcgtccacccgggcccaggcaccttcctcttcatgggctggagccgctttggggaggcccggctgggctgtgccccacgattccaggagttccgccgtgcctacgaggctgcccgtgctgcccacctccacccctgcgaggtggcgctgcactgaggggctgggtgctggggaggggctggtaggagggagggtgggcccactgctttggaggtgatgggactatcaataagaactctgttcacgcaa

SEQ ID NO: 214439 - DNA, 162 bp, Artificial Sequence
  derived and/or modified sequence
gccacccaggacctgcagttcagaatcagaagacccagaccccccgccagaggcagaggcggcgagaccagaagctgcgacctgggcagatgccacctgaagggcctggacctgctggaggccagaaccgccgaggaggacggcgagagaaacgccagatag

SEQ ID NO: 214440 - DNA, 882 bp, Artificial Sequence
  derived and/or modified sequence
atgggctttcctgctgcagctcttctgtgtgcactgtgttgtggcctgctcgcacccgccgcacgggctgggtacagcgaggagcgttgcagctggagagggagcgggttaacacaagagcctggatctgtgggccagctggcactggcctgcgccgaaggagccgtggagtggctctatcctgccggggcactccgcctgaccctgggcggcccagaccctcgagcgagacctggcatcgcgtgtctgaggcctgtgagaccattcgcaggcgcccaggtgttcgctgagcgcgcgggaggggctcttgaactcctcctcgctgaaggacccggtcctgcagggggcagatgcgtacgctggggccctagagaacgccgggccctgttcctgcaggccacacctcaccaggatatatcacgacgggtcgccgccttccggttcgagctgcgagaggacgggcgacccgagttaccaccccaggcgcacgggttgggcgtagacggggcatgtaggccctgctcagacgcagagctgcttctcgcagcctgtacttcggattttgtgatacacggcatcatccacggagtgacacacgacgtggagttgcaagagtcggtcatcaccgtcgtggcagctcgggtattacgccagaccccacctctgtttcaggccggaaggtctggggatcagggtcttactagtatccggacccccctccgctgcggagtccatcccggccccggcaccttcctgttcatgggatggagtcggttcggcgaggcccgcctgggttgtgccccaagattccaagagttccgacgcgcgtatgaggccgcgcgcgctgcccacctgcacccatgcgaggtggctctgcactag

SEQ ID NO: 214441 - DNA, 882 bp, Artificial Sequence
  derived and/or modified sequence
atgggcttccccgccgccgccctgctgtgcgccctgtgctgcggcctgctggctccggctgccagagcaggctattcagaggaacgctgctcctggaggggaagtgggctgacgcaggagcctggatctgtgggacagcttgccctcgcctgtgccgagggggccgttgaatggttataccccgctggcgctctgagactaacgttgggcggtcccgatcctcgggccagacccggcatagcatgcctgcgcccagtccggccgtttgccggcgcacaagtgtttgctgaaagggccggaggagcactggaactcttgctagctgaaggccccggaccagctggagggcgctgtgtgcgctggggtcctcgggagcgccgggctctgtttctacaggccaccccacaccaggacatctcacgtagggtggcagcatttcggttcgagctcagagaggatggacgtccggagctgccaccgcaggcccatggattgggcgtagacggcgcatgcaggccgtgttccgatgccgaactattacttgcagcttgcacctctgactttgtgatccatggcatcatacacggagtcacgcacgacgtggagttgcaggaatctgtgatcacagtggtcgcagctcgggtattgcggcagacaccaccccttttccaggctggtaggtctggcgaccagggccttacctcgatcagaaccccactgaggtgtggcgtccatccgggcccgggaacgttcctgtttatgggatggagcagattcggtgaagcccgcttgggctgtgcacccagattccaggaatttagacgagcatacgaggccgccagagcagcgcatctgcacccatgcgaggttgccctacattag

SEQ ID NO: 214442 - DNA, 882 bp, Artificial Sequence
  derived and/or modified sequence
atgggattccccgctgctgcattgctgtgcgcactctgctgtggccttttagcccctgccgctagagcaggttactccgaggagcgctgctcgtggaggggttccggattgactcaggaacctggctcagtcggacaattggctttggcatgtgcagagggagccgtggaatggctgtaccccgctggcgcattgagactaacacttggcggacccgacccgagagccagaccaggcatcgcttgcctccggccagtaagaccattcgccggtgcccaggtctttgcggagagggcgggtggagccctggagttgcttctggcagaggggcctggacctgcaggcggacgatgcgtgaggtggggccctcgtgagaggcgtgcacttttcctacaggccaccccacatcaggacatatccagacgtgtggcagcattcagattcgagctgagggaagacggtcggccagaattaccccctcaagcccacgggctcggcgtcgatggagcatgcagaccatgctccgatgctgagttgttgttggctgcatgcacgtccgatttcgtcatccatggtataatccatggagtgacccacgatgtcgaactgcaggaaagtgtgataacagtggtggcagctcgagtcttacggcagacgccgccactgtttcaggccggtcgcagtggcgaccaaggattgacttctattcgcacacccttgcgttgcggtgtgcaccccggacctggcacttttttgttcatgggctggagtcggttcggagaagctagactgggttgcgctccaagattccaagagttccgcagagcttatgaggccgctagggccgctcatctccatccatgcgaagtcgcactgcattag

SEQ ID NO: 214443 - protein, 737 aa, Artificial Sequence
  derived and/or modified sequence
MPGKLLWGDIMELEAPLEESESQKKERQKSDRRKSRHHYDSDEKSETRENGVTDDLDAPKAKKSKMKEKLNGDTEEGFNRLSDEFSKSHKSRRKDLPNGDIDEYEKKSKRVSSLDTSTHKSSDNKLEETLTREQKEGAFSNFPISEETIKLLKGRGVTYLFPIQVKTFGPVYEGKDLIAQARTGTGKTFSFAIPLIERLQRNQETIKKSRSPKVLVLAPTRELANQVAKDFKDITRKLSVACFYGGTSYQSQINHIRNGIDILVGTPGRIKDHLQSGRLDLSKLRHVVLDEVDQMLDLGFAEQVEDIIHESYKTDSEDNPQTLLFSATCPQWVYKVAKKYMKSRYEQVDLVGKMTQKAATTVEHLAIQCHWSQRPAVIGDVLQVYSGSEGRAIIFCETKKNVTEMAMNPHIKQNAQCLHGDIAQSQREITLKGFREGSFKVLVATNVAARGLDIPEVDLVIQSSPPQDVESYIHRSGRTGRAGRTGICICFYQPRERGQLRYVEQKAGITFKRVGVPSTMDLVKSKSMDAIRSLASVSYAAVDFFRPSAQRLIEEKGAVDALAAALAHISGASSFEPRSLITSDKGFVTMTLESLEEIQDVSCAWKELNRKLSSNAVSQITRMCLLKGNMGVCFDVPTTESERLQAEWHDSDWILSVPAKLPEIEEYYDGNTSSNSRQRSGWSSGRSGRSGRSGGRSGGRSGRQSRQGSRSGSRQDGRRRSGNRNRSRSGGHKRSFD

SEQ ID NO: 214444 - protein, 711 aa, Artificial Sequence
  derived and/or modified sequence
MPGKLLWGDIMELEAPLEESESQKKERQKSDRRKSRHHYDSDEKSETRENGVTDDLDAPKAKKSKMKEKLNGDTEEGFNRLSDEFSKSHKSRRKDLPNGDIDEYEKKSKRVSSLDTSTHKSSDNKLEETLTREQKEGAFSNFPISEETIKLLKGRGVTYLFPIQVKTFGPVYEGKDLIAQARTGTGKTFSFAIPLIERLQRNQETIKKSRSPKVLVLAPTRELANQVAKDFKDITRKLSVACFYGGTSYQSQINHIRNGIDILVGTPGRIKDHLQSGRLDLSKLRHVVLDEVDQMLDLGFAEQVEDIIHESYKTDSEDNPQTLLFSATCPQWVYKVAKKYMKSRYEQVDLVGKMTQKAATTVEHLAIQCHWSQRPAVIGDVLQVYSGSEGRAIIFCETKKNVTEMAMNPHIKQNAQCLHGDIAQSQREITLKGFREGSFKVLVATNVAARGLDIPEVDLVIQSSPPQDVESYIHRSGRTGRAGRTGICICFYQPRERGQLRYVEQKAGITFKRVGVPSTMDLVKSKSMDAIRSLASVSYAAVDFFRPSAQRLIEEKGAVDALAAALAHISGASSFEPRSLITSDKGFVTMTLESLEEIQDVSCAWKELNRKLSSNAVSQITRMCLLKGNMGVCFDVPTTESERLQAEWHDSDWILSVPAKLPEIEEYYDGNTSSNSRQSRQGSRSGSRQDGRRRSGNRNRSRSGGHKRSFD

SEQ ID NO: 214445 - DNA, 2214 bp, Artificial Sequence
  derived and/or modified sequence
atgcccgggaaactactctggggagatatcatggagctggaggccccactggaggaaagcgaatctcagaagaaggaacgacagaagagcgaccggaggaaatctcggcaccattacgatagcgacgaaaaatccgagactcgggagaatggggtcacagatgatctggacgctccgaaagctaaaaagagtaagatgaaagagaaactcaatggagatacggaagaaggttttaacagactgagcgacgagttctccaaatctcataaaagtagaagaaaagatctgcctaacggagatattgatgagtatgaaaaaaagagcaagagggtatcttcattggacacaagcacccacaaatcttccgataataaactggaagaaacgctgacccgtgaacagaaagaaggggctttcagcaactttccaataagtgaggaaacgattaaactgctgaaaggcaggggcgtgacttatctgtttccaatacaagtcaagacctttggaccagtgtacgagggtaaggacctgattgcccaggctagaaccggcaccggaaagactttcagcttcgccattcccctcatcgagagattgcagcggaaccaggagacaatcaaaaagagcaggagccctaaggtgctggtccttgctccaacacgagagctcgcaaatcaagttgcgaaagatttcaaggatattacccggaagctgagcgtggcctgtttttacggagggactagttaccaatcacagatcaaccacatcagaaacggtattgatattctcgtgggcacacccggtaggattaaggatcatctccaaagcgggagactagacctgtccaagcttcgccacgtggtcctggacgaggtggatcagatgttggacctgggcttcgcggagcaggtggaggacattatacatgagtcttataagactgatagcgaggacaacccacaaactctccttttttccgctacttgccctcaatgggtatataaggtggcaaagaagtatatgaaaagtcgctacgaacaggttgacctggttggtaagatgacccagaaagctgccaccacggtagaacatctcgctatccagtgtcactggtctcagagacctgcagtgatcggtgacgtgttgcaagtgtactccggcagtgagggaagggctattatattttgtgagactaagaagaatgtaacagaaatggctatgaatccccatatcaaacagaatgcccaatgtttgcatggagacattgctcagtcccagcgcgagattacccttaagggattccgcgagggaagttttaaagttctggtggcgaccaatgttgccgctcgcggacttgacattccagaggtggatctcgtgattcagtcctctccgccccaggatgtggaatcttacatccaccggagcggccggaccggtagggccggcagaaccggaatttgcatttgtttttaccaacctcgcgagagagggcagctgaggtatgttgagcagaaggcggggattacctttaagagagtgggggtccccagcactatggatctggtgaagtccaagtcaatggacgccattaggagtctcgcttcagtcagctacgcagcagtggacttctttcgaccttctgctcaaagactaatcgaggaaaagggggcggttgatgcgctcgctgcggccctggctcatatttccggcgcgagttcctttgaacccaggagtctgatcacaagtgacaaggggttcgtcaccatgaccctggaatcccttgaggagatccaggatgtgagttgcgcctggaaggaactgaaccgcaagctctcatcaaatgctgtgtcacagattacgaggatgtgcctccttaaaggtaacatgggagtgtgttttgatgtgcccacaaccgaatccgaaaggctgcaggccgaatggcacgactcagattggatactgtccgtgcccgccaaattgcccgaaattgaagagtattacgatgggaataccagcagtaactctcggcagagatccggatggagttccggcaggtcaggccgatccgggcgctcagggggacgatctggtggacgcagcgggagacagagtcgacagggcagcagatcgggttctcgacaggatggtaggcggcgctccgggaatcggaatagaagtcgttcaggaggccataagagatcttttgactag

SEQ ID NO: 214446 - DNA, 2136 bp, Artificial Sequence
  derived and/or modified sequence
atgccaggcaagctcctttggggcgacatcatggaactggaggctcctctggaggaaagtgagagtcaaaagaaggagcgccagaaaagcgaccggagaaagtctcgtcatcactacgactccgatgagaaatcggaaacacgggagaacggcgtgaccgatgatttagacgcccccaaagccaaaaagagtaaaatgaaggaaaaactgaacggcgacactgaggaaggctttaaccgcctctctgatgagtttagcaagtcacataaatcccgccgaaaagacctgcccaacggggatatagatgagtatgagaagaaatccaaacgcgtctcctccttggacactagcacccacaagagctctgacaacaagctggaggagaccctgactagggagcaaaaggagggggctttctccaatttccctatctctgaagaaaccatcaagctgctaaaagggagaggagttacttacctcttcccaatccaagtgaagaccttcggacctgtctatgagggtaaggacttgatcgcgcaggccaggacaggtaccggcaaaacattctccttcgctattccactgatcgagagactgcagcggaatcaagagactataaagaagtctaggagtccaaaggtcctggtgttggctcccacgcgagaacttgctaatcaagtggccaaagacttcaaggacatcacccgtaagttgtctgtagcatgtttctacgggggcacatcttaccagagccagattaaccatattcggaatggtatagatatcttagttggaacacccggccgcatcaaagatcacctgcagagtggcaggctggatttaagtaaactgaggcacgtggtactggatgaggtggatcagatgctcgacctgggattcgcagagcaagtcgaagacattatccacgaatcctacaagacagattccgaagataatccacagaccctgcttttctccgccacatgcccgcagtgggtttacaaggtggccaaaaaatatatgaaaagccggtacgagcaggtcgacctggttggcaagatgacacagaaggctgccactacagtcgagcatctggccattcaatgccattggtcccaaaggcctgctgtgattggagacgttctacaggtttacagcggttccgaggggagggccatcattttttgcgaaacaaagaaaaacgttacagagatggccatgaatccacacattaaacagaacgcccagtgcctgcacggagacattgcccagagccaacgcgagatcacgctaaaagggtttcgtgaaggttctttcaaggtccttgttgcaaccaacgtggctgctagaggtctggatatccccgaagtggatcttgttatccagagcagccctccccaggacgtggaaagttatattcatcggagcggccggaccgggagagccggccgaacaggcatttgtatttgcttttatcagccgagggagagagggcagctgcggtacgtggaacagaaagcaggcattacctttaaacgggtcggcgtgccttcaaccatggatttagtgaaaagcaaatctatggatgccattagaagcctcgctagcgtgagttacgctgctgtcgatttcttccgccccagcgcgcagagattgatagaagaaaaaggggctgtggacgcgcttgccgccgcccttgcccatatctccggcgcatcatcttttgagccgcgctctctgatcaccagtgacaaggggttcgtcactatgacccttgagtccctggaagaaatccaagacgtgagttgcgcctggaaggagctgaatcgtaagctgtcttcaaacgctgtcagtcagattacacgcatgtgtctcctgaaaggcaacatgggcgtctgtttcgatgtgccaacaacagaatcagagcggctgcaagccgagtggcacgacagcgattggatcctgtcggtcccagcaaagcttccggaaatagaagagtactatgatgggaataccagctcaaattctaggcagagtcggcagggctcccgctcgggatcccggcaagacggccggagaagaagcggcaataggaatagatctagaagcggggggcacaaaagaagttttgactag

SEQ ID NO: 214447 - DNA, 2214 bp, Artificial Sequence
  derived and/or modified sequence
atgcctgggaagctgctgtggggagacatcatggagctggaggcccccctggaggagagcgagagccagaagaaggagcggcagaagagtgacaggaggaagagccgccaccactatgacagtgatgagaagtctgagaccagagaaaatggagtgacagatgacctggatgcccccaaggccaagaagagcaagatgaaggagaagctgaatggagacacagaggagggcttcaaccggctgagtgatgagttcagcaagagccacaagagcaggaggaaggacctgcccaacggggacattgatgaatatgagaagaagagcaagagggtgagcagcctggacaccagcacccacaagagcagtgacaacaagctggaggagaccctgacccgggagcagaaggagggcgccttcagcaacttccccatcagcgaggagaccatcaagctgctgaagggccggggcgtgacctacctgttccccatccaggtgaagaccttcggccctgtgtatgagggcaaggacctgattgcccaggccaggactggaacaggcaagaccttctcctttgccatccccctcatcgagcggctgcagaggaaccaggagaccatcaagaagagccgcagccccaaggtgctggtgctggcccccacccgggagctggccaaccaggtggccaaggacttcaaggacatcaccaggaagctgtctgtggcctgcttctacggcggcaccagctaccagagccagatcaaccacatcagaaatggcatcgacatcctggtgggcaccccaggccgcatcaaggaccacctgcagagcggccgcctggacctgagcaagctgcggcacgtggtgctggatgaggtggaccagatgctggacctgggctttgctgagcaggtggaggacatcatccacgagagctacaagacagacagcgaggacaacccccagaccctgctcttcagcgccacctgcccccagtgggtgtacaaggtggccaagaagtacatgaagagccgctatgagcaggtggacctggtgggcaagatgacccagaaggccgccaccaccgtggagcacctggccatccagtgccactggagccagaggcctgctgtgattggagatgtgctgcaggtgtacagcggcagcgagggccgggccatcatcttctgtgagaccaagaagaatgtgacagagatggccatgaacccccacatcaagcagaatgcccagtgcctgcatggagacatcgcccagagccagcgggagatcaccctgaagggcttccgggagggcagcttcaaggtgctggtggccaccaacgtggccgcccggggcctggacatccctgaggtggacctggtgatccagagcagccccccccaggatgtggagagctacatccacaggagcggccgcacaggccgggccggccgcacaggcatctgcatctgcttctaccagccccgggagcggggccagctgcgctacgtggagcagaaggccggcatcaccttcaagagggtgggcgtgcccagcaccatggacctggtgaagagcaagtccatggatgccatccgcagcctggcctctgtgtcctatgctgctgtggacttcttccggcccagcgcccagaggctgattgaggagaagggagctgtggatgccctggccgccgccctggcccacatcagcggggccagcagctttgagcccaggagcctcatcaccagtgacaagggctttgtgaccatgaccctggagagcctggaggagatccaggatgtgtcctgtgcctggaaggagctgaacaggaagctgagcagcaatgctgtgtcccagatcaccaggatgtgcctgctgaagggcaacatgggcgtgtgctttgatgtgcccaccacagaaagtgagcggctgcaggccgagtggcatgacagcgactggatcctgtctgtgcctgccaagctgcctgagattgaggagtactatgatggcaacaccagcagcaacagccggcagaggagcggctggagcagcggccgcagcggccgcagcggccgcagcggcggccgcagcggcggccgcagcggccggcagagccggcagggcagccgcagcggcagccggcaggacggcagaagaagaagtggcaacagaaacagaagccgcagcggcggccacaagaggagctttgattag

SEQ ID NO: 214448 - DNA, 2136 bp, Artificial Sequence
  derived and/or modified sequence
atgcctgggaagctgctgtggggagacatcatggagctggaggcccccctggaggagagcgagagccagaagaaggagcggcagaagagtgacaggaggaagagccgccaccactatgacagtgatgagaagtctgagaccagagaaaatggagtgacagatgacctggatgcccccaaggccaagaagagcaagatgaaggagaagctgaatggagacacagaggagggcttcaaccggctgagtgatgagttcagcaagagccacaagagcaggaggaaggacctgcccaacggggacattgatgaatatgagaagaagagcaagagggtgagcagcctggacaccagcacccacaagagcagtgacaacaagctggaggagaccctgacccgggagcagaaggagggcgccttcagcaacttccccatcagcgaggagaccatcaagctgctgaagggccggggcgtgacctacctgttccccatccaggtgaagaccttcggccctgtgtatgagggcaaggacctgattgcccaggccaggactggaacaggcaagaccttctcctttgccatccccctcatcgagcggctgcagaggaaccaggagaccatcaagaagagccgcagccccaaggtgctggtgctggcccccacccgggagctggccaaccaggtggccaaggacttcaaggacatcaccaggaagctgtctgtggcctgcttctacggcggcaccagctaccagagccagatcaaccacatcagaaatggcatcgacatcctggtgggcaccccaggccgcatcaaggaccacctgcagagcggccgcctggacctgagcaagctgcggcacgtggtgctggatgaggtggaccagatgctggacctgggctttgctgagcaggtggaggacatcatccacgagagctacaagacagacagcgaggacaacccccagaccctgctcttcagcgccacctgcccccagtgggtgtacaaggtggccaagaagtacatgaagagccgctatgagcaggtggacctggtgggcaagatgacccagaaggccgccaccaccgtggagcacctggccatccagtgccactggagccagaggcctgctgtgattggagatgtgctgcaggtgtacagcggcagcgagggccgggccatcatcttctgtgagaccaagaagaatgtgacagagatggccatgaacccccacatcaagcagaatgcccagtgcctgcatggagacatcgcccagagccagcgggagatcaccctgaagggcttccgggagggcagcttcaaggtgctggtggccaccaacgtggccgcccggggcctggacatccctgaggtggacctggtgatccagagcagccccccccaggatgtggagagctacatccacaggagcggccgcacaggccgggccggccgcacaggcatctgcatctgcttctaccagccccgggagcggggccagctgcgctacgtggagcagaaggccggcatcaccttcaagagggtgggcgtgcccagcaccatggacctggtgaagagcaagtccatggatgccatccgcagcctggcctctgtgtcctatgctgctgtggacttcttccggcccagcgcccagaggctgattgaggagaagggagctgtggatgccctggccgccgccctggcccacatcagcggggccagcagctttgagcccaggagcctcatcaccagtgacaagggctttgtgaccatgaccctggagagcctggaggagatccaggatgtgtcctgtgcctggaaggagctgaacaggaagctgagcagcaatgctgtgtcccagatcaccaggatgtgcctgctgaagggcaacatgggcgtgtgctttgatgtgcccaccacagaaagtgagcggctgcaggccgagtggcatgacagcgactggatcctgtctgtgcctgccaagctgcctgagattgaggagtactatgatggcaacaccagcagcaacagccggcagagccggcagggcagccgcagcggcagccggcaggacggcagaagaagaagtggcaacagaaacagaagccgcagcggcggccacaagaggagctttgattag

SEQ ID NO: 214449 - DNA, 2214 bp, Artificial Sequence
  derived and/or modified sequence
atgcccggcaagctgctgtggggcgacatcatggagctggaggccccactggaggagtcagagagccagaaaaaggagcggcaaaaaagcgataggaggaagagcagacaccattacgactccgatgagaagagtgagacaagagagaacggagtgacagacgatctggatgcccccaaagcaaagaaatcaaagatgaaagagaagctgaacggggatacagaagaagggtttaataggctgagcgacgagttctctaagtcccacaagtctaggcgcaaggatctaccaaatggagacattgacgagtacgaaaaaaagtcaaagagagttagctccctggatacctcaacccacaaatcatccgacaataagctggaagagaccctaactcgtgaacagaaagagggcgctttctccaatttccctataagcgaggaaaccattaaactcctgaagggtagaggagtgacctatcttttcccaatacaggttaagacctttggccctgtgtacgaaggaaaggatctgattgcacaggctagaaccggcacaggcaagacttttagcttcgccattccgctgatcgagagattgcagagaaatcaggagacaataaagaaaagcaggtcccctaaggtgttggtgctcgcccctactagagaacttgctaaccaggtcgcaaaggacttcaaggacatcactaggaaactgagcgtggcttgcttctacgggggcacatcctatcaaagccagatcaatcacataaggaacgggatagacatcctcgtgggcaccccaggacggataaaggaccacctgcagtctggaagactggacctttccaaacttaggcatgtcgtactagacgaggtggaccagatgttggacctcggcttcgcggagcaggtggaggatatcatccacgagtcttataaaactgattcagaagacaacccacagacccttcttttttcagcgacctgcccacagtgggtgtataaagtggcgaagaagtacatgaagagcaggtacgaacaggtggacctggtgggaaaaatgactcagaaggctgcaactacggtggagcacctcgctatacagtgccactggtcccaaaggccggccgtgattggtgatgtgctacaggtgtatagcgggtcggaaggccgagctatcattttctgcgagactaagaaaaacgtgaccgagatggctatgaaccctcatatcaaacagaacgctcagtgcttgcacggtgacatagctcagtcacagcgggagatcactttgaaaggatttcgcgaggggtctttcaaggtattggtggcgactaatgtggctgctcgtgggcttgatatcccagaagtggatttggttatacagtcttctccgccccaggatgtcgaatcctacatccacaggagtggcaggacagggagggctggaaggacaggaatctgcatttgtttttaccagcccagggaaagaggacagctccggtatgtggaacagaaagctggcattacatttaaacgggtcggcgtaccttcaaccatggatctagtgaagtccaaaagtatggacgctatccgtagtctcgcttccgtcagctatgccgcagtggacttctttagacccagcgcacagaggttaatcgaggagaagggagcagtggatgccttggccgccgcgcttgctcacatttcgggggccagctcattcgagccgaggagtctcattacctccgacaaaggtttcgtcaccatgactctggagagcttagaggaaatccaggacgtctcgtgcgcctggaaagaactgaacaggaaactctcgtccaatgccgtgagtcagatcacgagaatgtgtctgctcaagggaaacatgggagtttgctttgatgtgcctacaaccgagtcagagcgattacaagccgagtggcatgacagtgattggattttatcagttcccgctaagttgcccgagatcgaggaatattatgacggaaacacaagctcaaattcacggcagcggagcggttggtcctctggacgatcgggcaggtctggaaggtctggcggccggagcggcggcaggagcggacggcaatctagacagggatcccggagcgggtcacggcaggatggccggaggaggagtggcaatcggaatcgaagcagaagcggcgggcacaagcggtctttcgattag

SEQ ID NO: 214450 - DNA, 2136 bp, Artificial Sequence
  derived and/or modified sequence
atgcccggcaagctgctgtggggcgacatcatggagctggaggcccctctggaagaatcagaatcacagaagaaagagaggcagaaatcagataggaggaagtccagacaccattacgatagtgacgagaagtcagagacacgagaaaatggcgtcacggatgatttagacgccccgaaggccaagaagagcaagatgaaggaaaagcttaatggcgacaccgaagaggggtttaataggctttccgatgagtttagtaagtcccacaaatctcgccgcaaagatctccctaatggtgatatcgacgagtacgaaaagaagtcaaaacgagtaagttcgctagatacttctacacacaaatcgagcgacaacaaactggaagaaacactgacgcgagagcaaaaagagggcgcattcagcaactttccgatctcagaggaaacaatcaaactgctcaagggaaggggcgtaacatacctcttccctatccaagtcaagactttcggacctgtgtatgagggcaaagatttgattgcgcaagccaggacgggtactggaaaaaccttctcctttgcgattccactcatcgagagactgcaaagaaaccaagaaacaatcaagaagagcagatctcccaaagtcctggtgctggcccccacaagggaactcgccaaccaagtcgcaaaagattttaaagatattacccgcaaattgtctgtggcttgcttttacggcggcacatcatatcagagccagatcaatcacatccggaatgggattgatatcctggtggggaccccggggagaatcaaggatcatctccagtcaggccggctcgacttgagcaagctgagacacgtcgtcctcgacgaggtggaccagatgcttgatctcgggtttgccgagcaagtggaggatattatccatgaatcatacaaaactgattcagaagataatccacagactctcctctttagcgccacatgcccgcagtgggtttacaaggtcgcaaaaaagtacatgaaatcccggtacgagcaggtcgaccttgttggcaaaatgacccaaaaggctgccactacagtggaacacttggccatccagtgtcattggagccagcggccggccgtaattggcgacgtgttgcaagtgtactccggcagtgagggaagggcgatcatcttttgcgaaactaagaaaaatgttaccgagatggctatgaacccccacatcaagcaaaatgcccagtgcctacatggagacattgcacagtcccagcgggaaatcaccttgaaggggttccgggaggggtcttttaaggtgctagtcgcgaccaatgttgcagcccggggtttggatatccctgaagttgacctagtgatccagagtagcccacctcaagacgtggagagctacatacaccgctcaggtaggaccggtagggcaggtcgcactggtatatgtatttgtttttatcagccacgggagagaggccagctgaggtacgtggaacaaaaggctggcatcacttttaagagagtgggcgtgccgagcacaatggacttagtgaagtccaaatccatggacgcgataaggtcgcttgcatctgtcagctacgccgccgtggacttctttaggccaagtgctcaaagactgatcgaagaaaagggtgctgtcgatgctcttgcggccgcactagcacacatctcaggcgcttcatccttcgagcctcggtccttgattacttccgataaaggtttcgtcactatgaccctcgaatctctggaagaaattcaagacgtgtcatgtgcatggaaggagctcaaccgaaaactcagtagtaacgccgttagtcagattaccaggatgtgcctgcttaaaggcaacatgggggtatgtttcgacgtgcctactaccgaaagcgagcgcctgcaggcagagtggcatgactccgactggatcctcagtgtgcctgccaaactgcccgagatcgaggagtattatgatggcaatacatcaagcaattcccggcaatcaagacaaggatcgaggtccggaagtaggcaggatgggcgccggaggagcggcaaccgaaacagatctcggagtggcggtcacaaacggagctttgactag

SEQ ID NO: 214451 - DNA, 2214 bp, Artificial Sequence
  derived and/or modified sequence
atgccaggcaaacttctctggggagacatcatggagctggaggctcctctggaagagagcgagtcgcagaagaaggaacgccagaagtccgaccgccgaaaatccaggcatcactatgacagcgacgaaaagtccgaaacccgagagaatggtgtgactgacgaccttgatgcgccaaaagcaaaaaaatctaagatgaaggaaaagctgaacggcgatacagaggaggggttcaaccggctgagcgatgagttctctaagtcacataagagtagacgcaaggacctgcctaacggcgacatcgacgagtacgaaaagaagagcaagcgtgtctcaagcctggacacatccacacacaaaagcagcgataacaagttggaggaaactctcacccgcgagcagaaggagggagctttttcgaacttcccaatatccgaggagactattaaacttcttaaagggcgtggagtcacatacctttttcctattcaggtgaagaccttcgggcctgtgtatgaaggtaaagatctaatcgcacaggccaggactggaactggcaagactttctcgtttgctatacccctaatagaaaggctgcagaggaaccaagagactatcaagaaaagtaggtccccaaaagtactggtgcttgcaccaacaagagagctggcaaaccaggtggcgaaggacttcaaagatatcacaagaaaactgagcgtagcgtgcttctacggtggtacatcctaccagtcccagataaaccatatcaggaatggcatagacattctggtgggaacaccaggacgcatcaaggaccacctgcagtctggacgactggatctttctaagctcagacatgtggtgctcgacgaagtggatcaaatgctagatcttggattcgcagagcaagtggaggacataattcatgagagctacaaaacggactcagaagacaatccccagactctcctgttctccgccacatgcccacaatgggtctataaggtggcaaagaagtatatgaaatcgaggtacgagcaagtggacttggtcggcaagatgacccaaaaagctgccactaccgtagaacacctcgcaatccaatgccactggtcccagagacctgcagtcattggagacgtcctgcaggtctattccggttcagaggggcgtgccattattttttgtgaaaccaagaagaacgtaactgagatggcaatgaacccccatatcaagcagaacgcgcagtgtcttcacggcgatattgcccagtcccagagggagatcactctgaagggcttccgcgaagggtcttttaaggttctggtagcgaccaacgtggctgcaagaggcctggacataccagaagttgacctggtaatacagtctagccctccacaggacgttgagtcttacatccaccgttctggcaggacagggagagccggtcgcaccgggatttgtatttgcttttaccagccccgtgagagggggcagttaagatatgtcgagcaaaaggcaggtattactttcaagagagttggtgtgcctagcacgatggacttagtaaaatccaagagcatggacgcaattcgcagcttagcctctgtctcctacgctgcagtggatttctttagaccaagtgcccagaggctcatcgaagaaaaaggagcagttgacgccttggctgcagccctcgcccacatttcgggcgcaagttctttcgaacctagaagcctcatcacctctgataagggctttgttacgatgactttggaatctctggaagaaatacaggatgtttcatgcgcctggaaagaactgaacagaaagctgagcagtaacgctgtctctcagataacgaggatgtgcctcctgaagggcaatatgggcgtctgttttgatgtccccaccacagaatcagagcggctgcaggcagagtggcacgattctgattggattttgagcgtacccgcaaagctccccgagattgaggagtactacgacggaaataccagctccaacagcagacagcggagcggctggtcttccgggaggtccggccgtagtggcaggtctggaggacgatccggcggtcggagcggacgacagagcaggcaagggtcacgatctgggtctcgccaggatggaaggagacgctccggaaaccggaatcggtcccgttcgggcggtcacaagaggtcgttcgactag

SEQ ID NO: 214452 - DNA, 2136 bp, Artificial Sequence
  derived and/or modified sequence
atgcctggaaaactgctatggggcgatattatggagcttgaggcaccgctggaggaatctgagtcccagaagaaagaacggcagaagagcgacagaaggaagagtcgtcaccactatgattctgacgagaagtccgaaactcgggagaatggcgtcacagacgatctggacgccccaaaagcaaagaagtctaagatgaaggaaaagctaaacggagacacagaggaaggctttaataggttgtcggacgagttctctaagagtcacaagtcacgccgtaaggaccttccaaatggggatatcgatgagtacgaaaaaaaaagcaagcgagtgtcctccctggacactagcacccacaagagcagtgacaataagctcgaggagacattaacaagagagcaaaaagagggggcttttagtaactttcccatctccgaggaaactatcaaattgctgaaggggcgtggagtcacataccttttcccgattcaggtcaaaaccttcggccctgtttacgaaggcaaggatctcatcgctcaggccaggacagggaccgggaagacattttcctttgccatacccctgattgagaggctacagcgcaaccaagaaacaatcaaaaagagccgatcacctaaggtgcttgtgttggccccaacaagggagctggccaaccaggtggcaaaggactttaaagatatcacaaggaagttgtccgtcgcatgtttctacgggggaactagctatcagagccagatcaaccatatcagaaatggaattgatattttagtcggaacgcctggtcggataaaagaccaccttcagtcaggaaggcttgacctgtcaaagctccgccacgtcgtgcttgacgaagttgaccaaatgctggatctaggtttcgctgaacaggtggaggacattatccatgagagctacaagaccgacagcgaagataatccccagacgttgttgtttagcgctacgtgtccccagtgggtctacaaagtcgctaaaaaatacatgaagagtcgatatgagcaggtggatcttgttggtaaaatgacccagaaagctgcaacgactgtggagcacttggctattcagtgccattggtcacagaggcccgctgtcatcggagacgtgttgcaggtgtactccggaagcgaaggaagagcgataatcttctgcgaaaccaagaaaaatgttaccgaaatggccatgaatccccatattaaacagaatgctcagtgcctccacggcgatattgcccaaagtcaacgcgaaattaccctaaagggatttcgagagggatctttcaaagttttggtggctactaacgttgctgcgagaggattggatatcccggaggtcgatctggttatccaatcatcgccaccccaggacgtggagagctacattcaccggtcagggcgtactggtagggccggacgcaccgggatttgcatctgcttctaccaaccacgcgagcgtgggcagctccgctatgttgaacagaaggctggcataacattcaagagggtgggagtaccctccacaatggaccttgtcaagagcaaaagtatggacgcaatacgaagcctagccagcgtgtcctacgctgccgtggatttctttcggccatctgcccaaaggttaatcgaagagaaaggagcagtcgacgccctggctgcagccttggcccacatttctggggcttctagcttcgaaccacgatctctcataacatccgacaagggatttgtaaccatgaccctggaaagccttgaggaaatccaggatgtgagctgcgcctggaaggaactgaaccgcaaactatcctctaacgctgtgagccaaattacaagaatgtgtctcttgaagggcaacatgggggtgtgtttcgatgttcccacaacggaatctgagagactgcaggctgaatggcacgatagcgattggatcctgtccgtgcctgccaaactgccagagatcgaggaatattacgacggtaacactagctccaattcaagacagtcacgccagggctcaaggtcgggttcaaggcaagatgggcgtaggaggtccgggaatcggaatcgcagtcggagtggcggacacaagcggagcttcgactag

SEQ ID NO: 214453 - DNA, 2538 bp, Artificial Sequence
  derived and/or modified sequence
gcatggccaaggccgggcggccgccttgcccccgcttcctttcacgctgtcgctgcccgtaggtggttgtggccactgtgcccggagggaggcggcggtggccagtaatgcctgggaaactcctctggggggacattatggagctggaagcacccttggaggagtccgagagccagaagaaggagaggcaaaagagtgacagaaggaagtcaaggcaccattatgactcggatgagaaatcagaaacaagagaaaatggtgttacagatgacctggatgctcccaaggccaaaaaatctaaaatgaaagagaagctaaatggagacactgaagaaggatttaatagactttcagatgaattctccaaatctcataagtcaagaagaaaagatctaccaaatggagatatagatgaatatgaaaaaaaatcaaagcgagtatcatctttagatacttctactcataaatcaagtgataataaactagaggagaccttaacacgtgaacagaaagaaggagccttctccaattttcctatttctgaagagactataaagcttctgaaaggtcgaggggtaacatatctctttcctattcaagttaagacctttggtcctgtatatgaaggaaaagatttaatagctcaagcacggacaggaacaggaaagacattctcttttgccatccccttaattgaaagactccaaagaaatcaagaaacaattaaaaaaagccgctcaccaaaggtacttgttttggctccaacaagggaactggcaaaccaagtagccaaagacttcaaagatataactaggaaactcagcgtggcgtgtttttatggtggaacatcatatcaaagccaaattaatcatattcgaaatggtattgacatcttggttggaacacctggtcgtatcaaagaccatctgcagagtggccgattggatctttctaaactgcgacatgttgtgcttgatgaagtggatcagatgttagatttaggtttcgctgaacaagttgaagatattattcatgaatcctacaaaactgattctgaagacaatcctcagactttacttttttctgcaacttgcccacagtgggtatacaaagttgcaaaaaaatacatgaaatccagatatgaacaggttgaccttgttggaaaaatgactcaaaaggctgcaactactgtggaacatttggccatccagtgtcattggtctcagaggccagcagttattggagatgtccttcaagtctacagtgggtctgaagggagggctattattttctgtgagaccaagaagaatgtaactgaaatggccatgaatccacacataaaacagaatgcccagtgtttacatggggacattgcacagtcacaaagagaaattacactaaaaggcttcagagaaggtagttttaaagttttggtggcaaccaatgtggctgcccgtggtttggacattcctgaagttgacctggtgattcaaagttctcctcctcaggatgttgagtcctatatccatcgctctggacgcacaggtagagctggacggacagggatttgtatatgtttttatcaaccaagagaaagaggtcaactaagatatgtggaacaaaaagcaggaattacttttaaacgtgtaggtgttccttctacaatggatttagttaaatctaaaagcatggatgccatcaggtctctggcttccgtttcttacgctgctgttgattttttccgaccatcagctcagagactgatagaagagaaaggtgcagtggatgcattggctgcagctttagcccacatttctggtgcatcaagctttgaaccacgatctttgatcacctctgataaggggtttgtgaccatgactctggaaagcctagaggaaatacaggatgtcagctgtgcttggaaagaacttaacagaaagctgagtagtaatgcagtgtctcagattaccagaatgtgcctcctgaaaggaaatatgggtgtttgctttgatgttcctacaactgagtcagaaaggttacaggcagagtggcatgattccgactggatactctcagtgccagccaaattacctgaaattgaagaatattatgatggaaacacatcttctaattccagacagaggagtggctggtcaagtggtcgatcaggccggtcaggccggtcaggtggtcgatctggcggccggtcaggtagacagagtcgacaaggaagtcgctcaggaagtcgacaagatggtagaagacgaagtgggaatagaaatcgatcaagaagtgggggccacaaacggagttttgactgagtatttgatagttaatctaccagtgtgagcttgcctatttctgcctaatcatgtacattatccaccaaaaattaggtcatcatagttgaggtatgtgtctgctatttgcaaagaagttggtcgtatttttttaaaaagtatttcacaagaatggaacaaatctacttatccagttatacctttgaataaaaaaacctccttttattgtctcttttca

SEQ ID NO: 214454 - DNA, 2417 bp, Artificial Sequence
  derived and/or modified sequence
cacgctgtcgctgcccgtaggtggttgtggccactgtgcccggagggaggcggcggtggccagtaatgcctgggaaactcctctggggggacattatggagctggaagcacccttggaggagtccgagagccagaagaaggagaggcaaaagagtgacagaaggaagtcaaggcaccattatgactcggatgagaaatcagaaacaagagaaaatggtgttacagatgacctggatgctcccaaggccaaaaaatctaaaatgaaagagaagctaaatggagacactgaagaaggatttaatagactttcagatgaattctccaaatctcataagtcaagaagaaaagatctaccaaatggagatatagatgaatatgaaaaaaaatcaaagcgagtatcatctttagatacttctactcataaatcaagtgataataaactagaggagaccttaacacgtgaacagaaagaaggagccttctccaattttcctatttctgaagagactataaagcttctgaaaggtcgaggggtaacatatctctttcctattcaagttaagacctttggtcctgtatatgaaggaaaagatttaatagctcaagcacggacaggaacaggaaagacattctcttttgccatccccttaattgaaagactccaaagaaatcaagaaacaattaaaaaaagccgctcaccaaaggtacttgttttggctccaacaagggaactggcaaaccaagtagccaaagacttcaaagatataactaggaaactcagcgtggcgtgtttttatggtggaacatcatatcaaagccaaattaatcatattcgaaatggtattgacatcttggttggaacacctggtcgtatcaaagaccatctgcagagtggccgattggatctttctaaactgcgacatgttgtgcttgatgaagtggatcagatgttagatttaggtttcgctgaacaagttgaagatattattcatgaatcctacaaaactgattctgaagacaatcctcagactttacttttttctgcaacttgcccacagtgggtatacaaagttgcaaaaaaatacatgaaatccagatatgaacaggttgaccttgttggaaaaatgactcaaaaggctgcaactactgtggaacatttggccatccagtgtcattggtctcagaggccagcagttattggagatgtccttcaagtctacagtgggtctgaagggagggctattattttctgtgagaccaagaagaatgtaactgaaatggccatgaatccacacataaaacagaatgcccagtgtttacatggggacattgcacagtcacaaagagaaattacactaaaaggcttcagagaaggtagttttaaagttttggtggcaaccaatgtggctgcccgtggtttggacattcctgaagttgacctggtgattcaaagttctcctcctcaggatgttgagtcctatatccatcgctctggacgcacaggtagagctggacggacagggatttgtatatgtttttatcaaccaagagaaagaggtcaactaagatatgtggaacaaaaagcaggaattacttttaaacgtgtaggtgttccttctacaatggatttagttaaatctaaaagcatggatgccatcaggtctctggcttccgtttcttacgctgctgttgattttttccgaccatcagctcagagactgatagaagagaaaggtgcagtggatgcattggctgcagctttagcccacatttctggtgcatcaagctttgaaccacgatctttgatcacctctgataaggggtttgtgaccatgactctggaaagcctagaggaaatacaggatgtcagctgtgcttggaaagaacttaacagaaagctgagtagtaatgcagtgtctcagattaccagaatgtgcctcctgaaaggaaatatgggtgtttgctttgatgttcctacaactgagtcagaaaggttacaggcagagtggcatgattccgactggatactctcagtgccagccaaattacctgaaattgaagaatattatgatggaaacacatcttctaattccagacagagtcgacaaggaagtcgctcaggaagtcgacaagatggtagaagacgaagtgggaatagaaatcgatcaagaagtgggggccacaaacggagttttgactgagtatttgatagttaatctaccagtgtgagcttgcctatttctgcctaatcatgtacattatccaccaaaaattaggtcatcatagttgaggtatgtgtctgctatttgcaaagaagttggtcgtatttttttaaaaagtatttcacaagaatggaacaaatctacttatccagttatacctttgaataaaaaaacctccttttattgtctcttttc

SEQ ID NO: 214455 - DNA, 2214 bp, Artificial Sequence
  derived and/or modified sequence
atgcccggcaagctgctgtggggcgacatcatggagctggaggcccccctggaggagagcgagagccagaagaaggagagacagaagagcgacagaagaaagagcagacaccactacgacagcgacgagaagagcgagaccagagagaacggcgtgaccgacgacctggacgcccccaaggccaagaagagcaagatgaaggagaagctgaacggcgacaccgaggagggcttcaacagactgagcgacgagttcagcaagagccacaagagcagaagaaaggacctgcccaacggcgacatcgacgagtacgagaagaagagcaagagagtgagcagcctggacaccagcacccacaagagcagcgacaacaagctggaggagaccctgaccagagagcagaaggagggcgccttcagcaacttccccatcagcgaggagaccatcaagctgctgaagggcagaggcgtgacctacctgttccccatccaggtgaagaccttcggccccgtgtacgagggcaaggacctgatcgcccaggccagaaccggcaccggcaagaccttcagcttcgccatccccctgatcgagagactgcagagaaaccaggagaccatcaagaagagcagaagccccaaggtgctggtgctggcccccaccagagagctggccaaccaggtggccaaggacttcaaggacatcaccagaaagctgagcgtggcctgcttctacggcggcaccagctaccagagccagatcaaccacatcagaaacggcatcgacatcctggtgggcacccccggcagaatcaaggaccacctgcagagcggcagactggacctgagcaagctgagacacgtggtgctggacgaggtggaccagatgctggacctgggcttcgccgagcaggtggaggacatcatccacgagagctacaagaccgacagcgaggacaacccccagaccctgctgttcagcgccacctgcccccagtgggtgtacaaggtggccaagaagtacatgaagagcagatacgagcaggtggacctggtgggcaagatgacccagaaggccgccaccaccgtggagcacctggccatccagtgccactggagccagagacccgccgtgatcggcgacgtgctgcaggtgtacagcggcagcgagggcagagccatcatcttctgcgagaccaagaagaacgtgaccgagatggccatgaacccccacatcaagcagaacgcccagtgcctgcacggcgacatcgcccagagccagagagagatcaccctgaagggcttcagagagggcagcttcaaggtgctggtggccaccaacgtggccgccagaggcctggacatccccgaggtggacctggtgatccagagcagccccccccaggacgtggagagctacatccacagaagcggcagaaccggcagagccggcagaaccggcatctgcatctgcttctaccagcccagagagagaggccagctgagatacgtggagcagaaggccggcatcaccttcaagagagtgggcgtgcccagcaccatggacctggtgaagagcaagagcatggacgccatcagaagcctggccagcgtgagctacgccgccgtggacttcttcagacccagcgcccagagactgatcgaggagaagggcgccgtggacgccctggccgccgccctggcccacatcagcggcgccagcagcttcgagcccagaagcctgatcaccagcgacaagggcttcgtgaccatgaccctggagagcctggaggagatccaggacgtgagctgcgcctggaaggagctgaacagaaagctgagcagcaacgccgtgagccagatcaccagaatgtgcctgctgaagggcaacatgggcgtgtgcttcgacgtgcccaccaccgagagcgagagactgcaggccgagtggcacgacagcgactggatcctgagcgtgcccgccaagctgcccgagatcgaggagtactacgacggcaacaccagcagcaacagcagacagagaagcggctggagcagcggcagaagcggcagaagcggcagaagcggcggcagaagcggcggcagaagcggcagacagagcagacagggcagcagaagcggcagcagacaggacggcagaagaagaagcggcaacagaaacagaagcagaagcggcggccacaagagaagcttcgactag

SEQ ID NO: 214456 - DNA, 2136 bp, Artificial Sequence
  derived and/or modified sequence
atgcccggcaagctgctgtggggcgacatcatggagctggaggcccccctggaggagagcgagagccagaagaaggagagacagaagagcgacagaagaaagagcagacaccactacgacagcgacgagaagagcgagaccagagagaacggcgtgaccgacgacctggacgcccccaaggccaagaagagcaagatgaaggagaagctgaacggcgacaccgaggagggcttcaacagactgagcgacgagttcagcaagagccacaagagcagaagaaaggacctgcccaacggcgacatcgacgagtacgagaagaagagcaagagagtgagcagcctggacaccagcacccacaagagcagcgacaacaagctggaggagaccctgaccagagagcagaaggagggcgccttcagcaacttccccatcagcgaggagaccatcaagctgctgaagggcagaggcgtgacctacctgttccccatccaggtgaagaccttcggccccgtgtacgagggcaaggacctgatcgcccaggccagaaccggcaccggcaagaccttcagcttcgccatccccctgatcgagagactgcagagaaaccaggagaccatcaagaagagcagaagccccaaggtgctggtgctggcccccaccagagagctggccaaccaggtggccaaggacttcaaggacatcaccagaaagctgagcgtggcctgcttctacggcggcaccagctaccagagccagatcaaccacatcagaaacggcatcgacatcctggtgggcacccccggcagaatcaaggaccacctgcagagcggcagactggacctgagcaagctgagacacgtggtgctggacgaggtggaccagatgctggacctgggcttcgccgagcaggtggaggacatcatccacgagagctacaagaccgacagcgaggacaacccccagaccctgctgttcagcgccacctgcccccagtgggtgtacaaggtggccaagaagtacatgaagagcagatacgagcaggtggacctggtgggcaagatgacccagaaggccgccaccaccgtggagcacctggccatccagtgccactggagccagagacccgccgtgatcggcgacgtgctgcaggtgtacagcggcagcgagggcagagccatcatcttctgcgagaccaagaagaacgtgaccgagatggccatgaacccccacatcaagcagaacgcccagtgcctgcacggcgacatcgcccagagccagagagagatcaccctgaagggcttcagagagggcagcttcaaggtgctggtggccaccaacgtggccgccagaggcctggacatccccgaggtggacctggtgatccagagcagccccccccaggacgtggagagctacatccacagaagcggcagaaccggcagagccggcagaaccggcatctgcatctgcttctaccagcccagagagagaggccagctgagatacgtggagcagaaggccggcatcaccttcaagagagtgggcgtgcccagcaccatggacctggtgaagagcaagagcatggacgccatcagaagcctggccagcgtgagctacgccgccgtggacttcttcagacccagcgcccagagactgatcgaggagaagggcgccgtggacgccctggccgccgccctggcccacatcagcggcgccagcagcttcgagcccagaagcctgatcaccagcgacaagggcttcgtgaccatgaccctggagagcctggaggagatccaggacgtgagctgcgcctggaaggagctgaacagaaagctgagcagcaacgccgtgagccagatcaccagaatgtgcctgctgaagggcaacatgggcgtgtgcttcgacgtgcccaccaccgagagcgagagactgcaggccgagtggcacgacagcgactggatcctgagcgtgcccgccaagctgcccgagatcgaggagtactacgacggcaacaccagcagcaacagcagacagagcagacagggcagcagaagcggcagcagacaggacggcagaagaagaagcggcaacagaaacagaagcagaagcggcggccacaagagaagcttcgactag

SEQ ID NO: 214457 - protein, 188 aa, Artificial Sequence
  derived and/or modified sequence
MANSGCKDVTGPDEESFLYFAYGSNLLTERIHLRNPSAAFFCVARLQDFKLDFGNSQGKTSQTWHGGIATIFQSPGDEVWGVVWKMNKSNLNSLDEQEGVKSGMYVVIEVKVATQEGKEITCRSYLMTNYESAPPSPQYKKIICMGAKENGLPLEYQEKLKAIEPNDYTGKVSEEIEDIIKKGETQTL

SEQ ID NO: 214458 - protein, 127 aa, Artificial Sequence [sequence omitted]

SEQ ID NO: 214459 - DNA, 567 bp, Artificial Sequence
  derived and/or modified sequence
atggctaacagcgggtgcaaggatgttaccggaccagatgaagagtcttttttgtacttcgcttatgggagcaatctcctgaccgagcgaatccacttacgaaatccaagcgctgcatttttttgcgtcgcgcggctccaggatttcaagttggactttggaaactctcagggaaagacctcgcagacctggcacggtggtatcgccaccatattccagagccctggagacgaagtctggggagtagtgtggaaaatgaacaaaagtaatcttaactccctggacgaacaggagggtgtcaaaagcggaatgtatgtagtcattgaggtgaaggtggcaacacaggagggcaaagagatcacctgtcgatcttacttgatgacaaattatgagtccgctcctcctagcccacagtataaaaagattatctgcatgggggcaaaagagaacggcctccctcttgaatatcaggaaaagcttaaggccattgagcccaacgactacacaggtaaggtttccgaagagatcgaagacattattaagaaaggggaaacccagaccttatag

SEQ ID NO: 214460 - DNA, 384 bp, Artificial Sequence
  derived and/or modified sequence
atgttcaacccgatccaccatttggactactataaaaagacccttccttctgaactgaactggttggggcagatgtggttgaaatttgggtgctctggtttccgccaggagggtgtgaaaagcggtatgtatgttgttatcgaggtgaaagttgcaacacaggaaggaaaggagattacttgtcgttcatatctgatgacaaattacgagtccgcccccccctcccctcaatataagaagatcatatgcatgggtgccaaggagaatggcctgcccctggagtaccaagagaagttaaaggcgatcgagccaaacgactacacaggtaaggtttccgaggaaatagaagacatcatcaaaaagggagaaacgcaaacgctctag

SEQ ID NO: 214461 - DNA, 1173 bp, Artificial Sequence
  derived and/or modified sequence
acgcttcccgccagtcccctaaccctgaggctgccgcgcggcggtcactgcgccggggtagtgggccccagtgttgcgctctctggccgttccttacactctgcttcaggctccagtgcaggggcgtagtgggatatggccaactcgggctgcaaggacgtcacgggtccagatgaggagagttttctgtactttgcctacggcagcaacctgctgacagagaggatccacctccgaaacccctcggcggcgttcttctgtgtggcccgcctgcaggattttaagcttgactttggcaattcccaaggcaaaacaagtcaaacttggcatggagggatagccaccatttttcagagtcctggcgatgaagtgtggggagtagtatggaaaatgaacaaaagcaatttaaattctctggatgagcaagaaggggttaaaagtggaatgtatgttgtaatagaagttaaagttgcaactcaagaaggaaaagaaataacctgtcgaagttatctgatgacaaattacgaaagtgctcccccatccccacagtataaaaagattatttgcatgggtgcaaaagaaaatggtttgccgctggagtatcaagagaagttaaaagcaatagaaccaaatgactatacaggaaaggtctcagaagaaattgaagacatcatcaaaaagggggaaacacaaactctttagaacataacagaatatatctaagggtattctatgtgctaatataaaatatttttaacacttgagaacagggatctgggggatctccacgtttgatccattttcagcagtgctctgaaggagtatcttacttgggtgattccttgtttttagactataaaaagaaactgggataggagttagacaatttaaaaggggtgtatgagggcctgaaatatgtgacaaatgaatgtgagtaccccttctgtgaacactgaaagctattctcttgaattgatcttaagtgtctccttgctctggtaaaagatagatttgtagctcacttgatgatggtgctggtgaattgctctgctctgtctgagatttttaaaaatcagcttaatgagagtaatctgcagacaattgataataacattttgaaaattggaaagatggtatactgtttttagaggaataaacgtatttgtggtttaa

SEQ ID NO: 214462 - DNA, 1645 bp, Artificial Sequence
  derived and/or modified sequence
actttacctcacttgtgaaggagaaagagccatcctctctacctttgttctaggtggatattctcttgctgtcagaacaccatccatttttgtagcccaaagaacaatgtttccatagtataaagttgaaaaaaaaaacaaactatattgaagcctctttaaagacaagataaatacagagagttatgttaggagtataacaagtaatattatgtctcaggccttctaattgaaatgctaagctaagcttacttttttttttttgtaacggagtctcgctcttgttgcccaggctagagtgcaatggcgtgatctcggctcaccccaacctctgcctcccgggttccagtgattctcccgcctcagcctcccgagtagctgggattacaggcatgcaccaccatgtcggactaattttttgtgtgttttttttttagtagagacaaggtttctccatgttggtcaggctggcctcgaactcctgacctcagatgatccacccacctcggcctcccaaagtgctaggattacaggtgtgagccactgcacccggcctttttttttttctttttgagatggagtcttgctgtctcccagcctggattgccacagtgcaatctcggctcactgcaacctccacctcccgtgatccacctcagcctcccaaagtgctgggattacagatgtgagccaccgtacccagcctaaatgctaagcttacttttgatgtggtaaatttatatattctctatcccaaatacatagggagcaagtatgttcagatgtagttaaatgtttaatcccatacaccatcttgactattataaaaagaccttacccagtgagctaaattggctaggtcaaatgtggttaaaatttggctgttctggtttcaggcaagaaggggttaaaagtggaatgtatgttgtaatagaagttaaagttgcaactcaagaaggaaaagaaataacctgtcgaagttatctgatgacaaattacgaaagtgctcccccatccccacagtataaaaagattatttgcatgggtgcaaaagaaaatggtttgccgctggagtatcaagagaagttaaaagcaatagaaccaaatgactatacaggaaaggtctcagaagaaattgaagacatcatcaaaaagggggaaacacaaactctttagaacataacagaatatatctaagggtattctatgtgctaatataaaatatttttaacacttgagaacagggatctgggggatctccacgtttgatccattttcagcagtgctctgaaggagtatcttacttgggtgattccttgtttttagactataaaaagaaactgggataggagttagacaatttaaaaggggtgtatgagggcctgaaatatgtgacaaatgaatgtgagtaccccttctgtgaacactgaaagctattctcttgaattgatcttaagtgtctccttgctctggtaaaagatagatttgtagctcacttgatgatggtgctggtgaattgctctgctctgtctgagatttttaaaaatcagcttaatgagagtaatctgcagacaattgataataacattttgaaaattggaaagatggtatactgtttttagaggaataaacgtatttgtggttt

SEQ ID NO: 214463 - DNA, 567 bp, Artificial Sequence
  derived and/or modified sequence
atggccaacagcggctgcaaggatgtgacaggcccagatgaggagagcttcctgtactttgcctacggcagcaacctgctgacagagcgcatccacctgaggaaccccagcgctgccttcttctgtgtggcccggctgcaggacttcaagctggactttggaaacagccagggcaagaccagccagacctggcatggaggcatcgccaccatcttccagagccctggagatgaggtgtggggcgtggtgtggaagatgaacaagagcaacctgaacagcctggatgagcaggagggcgtgaagagcggcatgtatgtggtgattgaggtgaaggtggccacccaggagggcaaggagatcacctgccgcagctacctgatgaccaactatgagagcgccccacccagcccccagtacaagaagatcatctgcatgggcgccaaggaaaatggcctgcccctggagtaccaggagaagctgaaggccatcgagcccaatgactacacaggcaaggtgtctgaggagattgaggacatcatcaagaagggggagacccagaccctgtag

SEQ ID NO: 214464 - DNA, 384 bp, Artificial Sequence
  derived and/or modified sequence
atgttcaaccccatccaccacctggactactacaagaagaccctgcccagcgagctgaactggctgggccagatgtggctgaagtttggctgcagcggcttccggcaggagggcgtgaagagcggcatgtatgtggtgattgaggtgaaggtggccacccaggagggcaaggagatcacctgccgcagctacctgatgaccaactatgaaagtgccccacccagcccccagtacaagaagatcatctgcatgggcgccaaggaaaatggcctgcccctggagtaccaggagaagctgaaggccatcgagcccaatgactacaccgggaaggtgtctgaggagattgaggacatcatcaagaagggggagacccagaccctgtag

SEQ ID NO: 214465 - DNA, 567 bp, Artificial Sequence
  derived and/or modified sequence
atggccaacagcggctgcaaggacgtgaccggccccgacgaggagagctttctgtacttcgcctacggttctaatctcctcacagaacgaattcacctgaggaatcctagcgcagcctttttttgcgtcgctcgcctgcaagatttcaagcttgattttggaaactctcaggggaagacaagtcaaacctggcacggtggaattgcaacaatattccagagcccaggggatgaggtgtggggcgtggtctggaaaatgaataagagtaatctgaattcacttgacgaacaggaaggcgtgaaaagcgggatgtacgtcgtgattgaagttaaggtcgccacccaggaggggaaagagataacctgccgatcctatctgatgacaaattacgaatccgcgccccccagcccacagtacaagaaaattatctgtatgggggctaaagagaatggcttgcctctggagtatcaggaaaagctcaaggcgattgagcccaacgattataccggcaaggtgtctgaagaaattgaagatattattaagaaaggagagacccagactctttag

SEQ ID NO: 214466 - DNA, 384 bp, Artificial Sequence
  derived and/or modified sequence
atgttcaaccccatccaccacctggactactacaagaagaccctgccctcagagttgaattggctcggccagatgtggttgaagtttgggtgttcgggctttaggcaggagggtgtgaagagtgggatgtacgttgtcattgaagttaaagtggcaactcaggaaggcaaagagatcacatgtcgctcctacctgatgacaaattatgagtccgcacccccttccccacagtacaagaagataatttgcatgggagctaaggaaaacggcctgccactggaataccaggagaaactcaaagccattgaacccaacgactacacaggaaaggtatcagaagagatcgaggacattattaaaaaaggcgagacccagaccctgtag

SEQ ID NO: 214467 - DNA, 567 bp, Artificial Sequence
  derived and/or modified sequence
atggccaactccggatgtaaagacgtgaccggccctgatgaggagtcctttttgtactttgcatacgggtctaacttactcaccgagaggatacacttaagaaatccaagtgccgctttcttttgcgtagcacgcctgcaggattttaaactcgattttggcaactcacagggcaagacgtcacaaacatggcatggaggcattgcaaccatcttccagtcgcccggagacgaagtgtggggtgtggtctggaagatgaacaagtctaacttaaactctctggatgagcaagagggcgtgaaaagcgggatgtacgtcgtaatcgaggttaaggtggccacccaggagggaaaggagatcacctgtcgtagctacctcatgactaactacgaatcagcacccccttctccacagtataaaaaaattatatgcatgggcgcaaaggagaacggacttccattggagtaccaggaaaaactaaaagccatcgagcctaacgattacactggcaaagtgtcagaggagatcgaggacatcatcaaaaagggcgagactcagacattgtag

SEQ ID NO: 214468 - DNA, 384 bp, Artificial Sequence
  derived and/or modified sequence
atgtttaatccaatccatcacttagactactataaaaaaacgctcccctccgaattgaactggctggggcagatgtggcttaagtttggctgtagtggtttccgccaagagggagtaaaaagcggtatgtatgttgtgatcgaggtaaaggtagccacacaggagggcaaggagatcacatgccgctcgtatcttatgacgaactatgagagtgcacctccttctccccagtataagaaaataatatgtatgggcgctaaggagaacggcctgcctctggagtaccaggaaaaacttaaggccatcgagcctaatgattataccgggaaggtgagcgaagagattgaggatatcattaagaagggcgagacacagacactttag

SEQ ID NO: 214469 - DNA, 567 bp, Artificial Sequence
  derived and/or modified sequence
atggccaacagcggctgcaaggacgtgaccggccccgacgaggagagcttcctgtacttcgcctacggcagcaacctgctgaccgagagaatccacctgagaaaccccagcgccgccttcttctgcgtggccagactgcaggacttcaagctggacttcggcaacagccagggcaagaccagccagacctggcacggcggcatcgccaccatcttccagagccccggcgacgaggtgtggggcgtggtgtggaagatgaacaagagcaacctgaacagcctggacgagcaggagggcgtgaagagcggcatgtacgtggtgatcgaggtgaaggtggccacccaggagggcaaggagatcacctgcagaagctacctgatgaccaactacgagagcgccccccccagcccccagtacaagaagatcatctgcatgggcgccaaggagaacggcctgcccctggagtaccaggagaagctgaaggccatcgagcccaacgactacaccggcaaggtgagcgaggagatcgaggacatcatcaagaagggcgagacccagaccctgtag

SEQ ID NO: 214470 - DNA, 384 bp, Artificial Sequence
  derived and/or modified sequence
atgttcaaccccatccaccacctggactactacaagaagaccctgcccagcgagctgaactggctgggccagatgtggctgaagttcggctgcagcggcttcagacaggagggcgtgaagagcggcatgtacgtggtgatcgaggtgaaggtggccacccaggagggcaaggagatcacctgcagaagctacctgatgaccaactacgagagcgccccccccagcccccagtacaagaagatcatctgcatgggcgccaaggagaacggcctgcccctggagtaccaggagaagctgaaggccatcgagcccaacgactacaccggcaaggtgagcgaggagatcgaggacatcatcaagaagggcgagacccagaccctgtag

SEQ ID NO: 214471 - protein, 118 aa, Artificial Sequence
  derived and/or modified sequence
MEEKYGGDVLAGPGGGGGLGPVDVPSARLTKYIVLLCFTKFLKAVGLFESYDLLKAVHIVQFIFILKLGTAFFMVLFQKPFSSGKTITKHQIIGSLKIPGRKEFKDKKLNDPRKLVGN

SEQ ID NO: 214472 - DNA, 357 bp, Artificial Sequence
  derived and/or modified sequence
atggaagaaaagtacggaggagacgtgctggctggtcctggtggaggcggaggcctgggtcctgttgacgtcccctcggcacgactaacgaagtatatagtgctcctgtgcttcacgaagtttctgaaggccgtcggcctctttgagagctatgacctgctgaaggctgtacacatcgttcagttcatcttcattctgaagctgggaacggcattttttatggtgctctttcagaaacccttctcatctggcaaaacaatcactaagcaccagattattggatctctcaaaattcctgggcgaaaggagttcaaagacaagaagctgaatgatcctcgcaagctggtgggaaactag

SEQ ID NO: 214473 - DNA, 357 bp, Artificial Sequence
  derived and/or modified sequence
atggaggagaagtatggaggagatgtgctggccggccctgggggcggcggcggcctgggccctgtggatgtgcccagcgcccggctgaccaagtacatcgtgctgctgtgcttcaccaagttcctgaaggctgtgggcctgtttgagagctatgacctgctgaaggctgtgcacatcgtgcagttcatcttcatcctgaagctgggcacagccttcttcatggtgctcttccagaagcccttcagcagcggcaagaccatcaccaagcaccagatcatcggcagcctgaagatccctggcaggaaggagttcaaggacaagaagctgaatgaccccaggaagctggtgggcaactag

SEQ ID NO: 214474 - DNA, 357 bp, Artificial Sequence
  derived and/or modified sequence
atggaggagaagtacggcggcgacgtgctggccggccccggcggcggcgggggcctgggccccgtcgacgtgccatctgcccggctgactaaatatatcgttttgttgtgttttacaaaatttctcaaggcggttggcctctttgaatcttacgacctgctgaaagccgtgcatatcgtgcagttcatttttattctgaagcttggaaccgcattctttatggtacttttccagaagccatttagtagtggaaaaactattacgaagcaccagataattggaagtctgaagatccctggcagaaaggaattcaaggataaaaagctgaatgacccacgcaagttagtggggaactag

SEQ ID NO: 214475 - DNA, 357 bp, Artificial Sequence
  derived and/or modified sequence
atggaagagaagtatggcggtgacgtactggccggtcccggaggcggagggggtctgggaccagtcgacgttccatctgcgaggcttaccaaatatatagtgttgctgtgttttacaaaatttctgaaagccgtgggattgttcgagtcctacgatctcttaaaggccgtccatattgttcaattcattttcattctgaagcttggcacagccttctttatggttctctttcagaagccttttagttcaggaaagacaatcaccaagcatcagataatcggcagcctcaaaatccctggcaggaaagaatttaaagacaagaaattgaacgatcctagaaagctcgtgggcaattag

SEQ ID NO: 214476 - DNA, 1317 bp, Artificial Sequence
  derived and/or modified sequence
gcctgatgacgtggcttggcaacgtccctaccgccgctgcttcccgggaacctggcgccgccggaactgatcgcggcctagtcccgacgcgtgtgtgctagtgagccggagccggcgacggcggcagtggcggcccggcctgcaggagcccgacggggtctctgccatgggggagtgacgcgcctgcacccgctgttccgcggcagcggcgagacatgaggagaccccgcgacaggggcagcggcggcggctcgtgagccccgggatggaggagaaatacggcggggacgtgctggccggccccggcggcggcggcggccttgggccggtggacgtacccagcgctcgattaacaaaatatattgtgttactatgtttcactaaatttttgaaggctgtgggacttttcgaatcatatgatctcctaaaagctgttcacattgttcagttcatttttatattaaaacttgggactgcattttttatggttttgtttcaaaagccattttcttctgggaaaactattaccaaacaccagataattggatcactaaaaattcctggtagaaaagaatttaaagacaaaaagttaaatgatcctaggaaactagtgggaaactgagaaatcataaaattgtactctgaagaaaaagatttcaaaatctaccagcagacaagaatatagataatggaaaacagaatactgtcctttttttttttctttctttttttgagaaagagtcttgctccatcgcccaggctgcagtgcagtgacacgatcttgtctcactgcaacctctgcctcccgggttcaagcgattctcctgcctcagcctcctgagtagctggaattacaggcacccaccaccacacccagctcatttttgtatttttagtagagacggggcttcattcaccacattggccagcctggtcttgaactcctgacctcaggtgatctgcctgcctcggcctcacaaagtgctaggattacaggcatgagccacagcacccggcccagaataagaatactgtcttggaaatctagacttagtcaagggatcttatgttttctatttacaaaatatgtaatgatttcacctttaaaatatttgttattattatctttctgtattttatttaaaatttggatatatagcaaaatatatgtgactgaaatttttaatttttttgtttccatttatagtggatcaaaatatttaaacatgcagttgctgggtgtattatttcactcttgtggttttttggcctcactctttgtggaccactaaggtaaataaaaatgcatattttgaa

SEQ ID NO: 214477 - DNA, 357 bp, Artificial Sequence
  derived and/or modified sequence
atggaggagaagtacggcggcgacgtgctggccggccccggcggcggcggcggcctgggccccgtggacgtgcccagcgccagactgaccaagtacatcgtgctgctgtgcttcaccaagttcctgaaggccgtgggcctgttcgagagctacgacctgctgaaggccgtgcacatcgtgcagttcatcttcatcctgaagctgggcaccgccttcttcatggtgctgttccagaagcccttcagcagcggcaagaccatcaccaagcaccagatcatcggcagcctgaagatccccggcagaaaggagttcaaggacaagaagctgaacgaccccagaaagctggtgggcaactag

SEQ ID NO: 214478 - protein, 326 aa, Artificial Sequence
  derived and/or modified sequence
MKQDASRNAAYTVDCEDYVHVVEFNPFENGDSGNLIAYGGNNYVVIGTCTFQEEEADVEGIQYKTLRTFHHGVRVDGIAWSPETRLDSLPPVIKFCTSAADMKIRLFTSDLQDKNEYKVLEGHTDFINGLVFDPKEGQEIASVSDDHTCRIWNLEGVQTAHFVLHSPGMSVCWHPEETFKLMVAEKNGTIRFYDLLAQQAILSLESEQVPLMSAHWCLKNTFKVGAVAGNDWLIWDITRSSYPQNKRPVHMDRACLFRWSTISENLFATTGYPGKMASQFQIHHLGHPQPILMGSVAVGSGLSWHRTLPLCVIGGDHKLLFWVTEV

SEQ ID NO: 214479 - protein, 51 aa, Artificial Sequence
  derived and/or modified sequence
MKQDASRNAAYTVDCEDYVHVVEFNPFENGDSGNLIAYGGNNYVVIGTCTF

SEQ ID NO: 214480 - DNA, 981 bp, Artificial Sequence
  derived and/or modified sequence
atgaaacaggacgcttccagaaacgccgcttatactgtcgattgcgaagactacgtgcacgtggtggagttcaatcctttcgagaatggggactccggcaacctcatcgcatacgggggtaataattatgtggtgattggtacgtgcaccttccaagaagaggaggcagacgttgaagggatccagtataagacgctccgcaccttccatcatggcgtcagagtggacgggatagcatggagtcccgagacacgactcgattctttacctcctgtgatcaaattttgtaccagtgcggctgacatgaaaataaggttgtttaccagcgacctgcaagataaaaatgaatacaaagtgctggaggggcataccgacttcatcaacggactggtgtttgatcccaaagaaggtcaggaaatcgcctctgtgtctgatgatcacacttgtcggatctggaacctcgaaggcgtccagacagcacattttgtcctgcactcccctggcatgtcggtgtgctggcatcccgaggaaacatttaagctaatggtcgcggagaagaatggcaccatccgtttttatgatctcctggcacagcaggccatcctctccctcgaaagcgaacaggtcccactaatgtcagctcattggtgcttgaagaatactttcaaggtcggggccgtggccggcaatgactggctgatctgggatataactcggagctcttaccctcagaacaagcggccagtgcatatggatagagcctgtctctttcgatggagtactatttccgaaaacctgttcgctacgaccgggtatcctggtaaaatggcttcacagttccagattcatcaccttggacacccacaaccaattttaatggggagcgtggcagttgggagcggtttaagctggcatcgtaccctaccactgtgcgtgataggaggcgaccataagctcctgttctgggtgactgaggtgtag

SEQ ID NO: 214481 - DNA, 156 bp, Artificial Sequence
  derived and/or modified sequence
atgaagcaggacgcctccagaaatgctgcctatactgtggactgtgaagactacgtgcacgtcgtggaatttaatccgttcgaaaatggtgactcgggcaatctgattgcatatgggggaaacaactacgttgtgattggtacatgcactttctag

SEQ ID NO: 214482 - DNA, 981 bp, Artificial Sequence
  derived and/or modified sequence
atgaaacaggatgccagccgcaatgcagcttatactgtggattgtgaagactacgtgcatgtggtcgagtttaacccgttcgaaaatggggactctgggaacctgatcgcctacggcggcaacaattatgtcgttattggtacgtgtactttccaggaagaggaggctgacgtcgagggtatccagtacaaaacactacgtacctttcaccatggcgtgagggtggatggcatcgcctggtcacctgagacaagactggacagccttccccctgtgataaagttctgtacgtctgccgcagacatgaaaattcgcctgtttacctcagacctgcaagacaagaacgaatataaggtgcttgaaggacacaccgattttatcaacggactcgtcttcgaccccaaagaggggcaagaaatcgctagtgtgagcgatgaccatacgtgtcgcatctggaacttggagggagtccagacagcccattttgtacttcactccccgggaatgagcgtgtgttggcatccggaggagactttcaagctgatggttgcagagaagaacgggacgataagattctatgatttactcgctcagcaggctatcctctcactcgagtcagagcaggtgccactgatgtctgctcactggtgcttgaagaacacattcaaggtaggcgctgtggctgggaacgattggttgatttgggatataacccgctcatcctaccctcaaaataaacggcccgtccacatggacagagcctgtctgtttaggtggagtacgatctccgagaatctcttcgctactaccggataccctggcaaaatggcctcccagtttcaaattcaccacctcggccacccccagccgattctcatggggagtgtcgccgtggggtctggcctgtcgtggcaccgcactttaccactttgcgtaattggaggggaccacaagctgttgttctgggtgaccgaggtttag

SEQ ID NO: 214483 - DNA, 981 bp, Artificial Sequence
  derived and/or modified sequence
atgaagcaggatgccagcagaaatgctgcctacacagtggactgtgaggactatgtgcacgtggtggagttcaacccctttgaaaatggagacagcggcaacctgattgcctacggcggcaacaactacgtggtgattggcacctgcaccttccaggaggaggaggctgatgtggagggcatccagtacaagaccctgcggaccttccaccacggcgtgcgggtggatggcatcgcctggagccctgagacccggctggacagcctgccccctgtgatcaagttctgcaccagcgctgctgacatgaagatccgcctcttcaccagtgacctgcaggacaagaatgagtacaaggtgctggagggccacacagacttcatcaatggcctggtgtttgaccccaaggagggccaggagatcgcctctgtgtctgatgaccacacctgccgcatctggaacctggagggcgtgcagacagcccactttgtgctgcacagccctggcatgtctgtgtgctggcaccctgaggagaccttcaagctgatggtggccgagaagaatggcaccatccgcttctatgacctgctggcccagcaggccatcctgagcctggagagcgagcaggtgcccctgatgtctgcccactggtgcctgaagaacaccttcaaggtgggcgctgtggccggaaatgactggctgatctgggacatcaccaggagcagctacccccagaacaagaggcctgtgcacatggaccgggcctgcctcttccgctggagcaccatcagcgagaacctgtttgccaccaccggctacccaggcaagatggccagccagttccagatccaccacctgggccacccccagcccatcctgatgggctctgtggccgtgggcagcggcctgtcctggcacaggaccctgcccctgtgtgtgattggaggagaccacaagctgctcttctgggtgacagaggtgtag

SEQ ID NO: 214484 - DNA, 156 bp, Artificial Sequence
  derived and/or modified sequence
atgaagcaggatgccagcagaaatgctgcctacacagtggactgtgaggactatgtgcacgtggtggagttcaacccctttgaaaatggagacagcggcaacctgattgcctacggcggcaacaactacgtggtgattggcacctgcaccttctag

SEQ ID NO: 214485 - DNA, 981 bp, Artificial Sequence
  derived and/or modified sequence
atgaagcaggacgccagccggaacgccgcctacaccgtggactgcgaagattacgtacatgtagtcgagtttaacccttttgagaacggcgatagcggcaatcttatagcttatggaggaaataattacgtggtgatcgggacctgcacgttccaagaagaagaggctgacgtagaagggatccagtacaaaactctgcggacttttcatcatggcgtgcgcgtggacggcatcgcctggtcaccggaaacacggctggacagcttgccccccgtgattaagttctgcacaagcgctgccgacatgaaaattaggctcttcaccagcgacctgcaagacaagaatgaatacaaggtgttggaaggtcacactgactttataaatggtcttgttttcgatccaaaggagggccaggaaatcgctagcgtttctgacgatcacacttgccggatctggaacctggagggcgtgcagacagcccacttcgttttgcattccccaggcatgagtgtttgctggcacccagaagagacattcaagttgatggtcgcagaaaagaacgggactatccgcttctatgacttgctagcccagcaggcgatcctctcccttgagtcagagcaggtaccgctgatgtctgcccactggtgtttgaagaataccttcaaagtgggggcagttgctggtaatgactggctgatctgggatataacccggagcagttacccgcagaacaagaggccagttcacatggatcgagcctgcttgttccgttggtcgaccatcagcgaaaatctgttcgcgacaactgggtaccctgggaaaatggcctctcagttccagatccatcatcttgggcacccgcagcccattcttatggggtctgtggctgtggggagcggcctttcctggcataggactctgccactgtgcgtgatcggaggtgatcataaactccttttctgggttactgaagtgtag

SEQ ID NO: 214486 - DNA, 156 bp, Artificial Sequence
  derived and/or modified sequence
atgaagcaggacgccagccggaacgccgcctacaccgtggactgcgaggattatgtgcatgtggtcgagttcaaccctttcgagaatggggatagcggaaatctaatcgcgtatgggggcaataactatgttgtgatcggcacatgtactttctag

SEQ ID NO: 214487 - DNA, 981 bp, Artificial Sequence
  derived and/or modified sequence
atgaagcaggacgccagccggaacgccgcctacaccgtggactgcgaggattatgtgcatgttgtggagtttaatccatttgagaacggagactctggtaatctgatcgcatatgggggtaataattatgttgtgattgggacctgcacattccaggaggaggaagcagatgttgaggggatccagtataagactctgcggacattccatcatggtgttcgggtggatggcatcgcctggtctcctgagaccaggctggacagcctcccaccggtgatcaagttctgcaccagcgccgcggacatgaaaattcgattgtttactagtgatctccaggataagaatgagtataaggtcctggagggacatactgactttattaatggactggtgttcgatccgaaggaaggccaagaaattgcctccgtgtcagacgaccacacgtgtcggatctggaatttagagggggtgcagacagcgcacttcgtcctccacagtcctggcatgtccgtctgttggcacccagaggagacatttaaattgatggtggcagagaaaaacgggaccataagattctacgacctactcgctcagcaagcaattctgtccctggagagtgagcaggtgccactgatgagcgcgcactggtgcctgaagaacacctttaaggtgggcgcggtggccggaaatgactggttgatctgggacatcacacggtctagctaccctcagaacaagaggccagtccatatggatcgggcttgtttgtttcgttggtccaccataagcgaaaacctcttcgctacaactggttacccaggcaagatggcctctcagttccaaattcaccatctcggtcacccccagcctatcctgatgggcagcgttgcagtcggcagcgggttgtcctggcacaggaccctgccactttgcgtcatcggtggagatcataaacttctgttttgggtgactgaggtgtag

SEQ ID NO: 214488 - DNA, 1203 bp, Artificial Sequence
  derived and/or modified sequence
tttcgtgaccttgtccagtagaaggctatttaattttcacaactgcttgaattttgacatacaagatgaagcaagatgcctcaagaaatgctgcctacactgtggattgtgaagattatgtgcatgtggtagaatttaatccctttgagaatggggattcaggaaacctaattgcatatggtggcaataattatgtggtcattggcacgtgtacgtttcaggaagaagaagcagacgttgaaggcattcagtataaaacacttcgaacatttcaccatggagtcagggttgatggcatagcttggagcccagagactagacttgattcattgcctccagtaatcaaattttgtacttcagctgctgatatgaaaattagattatttacttcagatcttcaggataaaaatgaatataaggttttagagggccataccgatttcattaatggtttggtgtttgatcccaaagaaggccaagaaattgcaagtgtgagtgacgatcacacctgcaggatttggaacttggaaggagtgcaaacagctcattttgttcttcattctcctggcatgagtgtgtgctggcatcctgaggagacttttaagctaatggttgcagagaagaatggaacaatccggttttatgatcttttggcccaacaggctattttatctcttgaatcagaacaagtgccattaatgtcagcacactggtgcttaaaaaacaccttcaaagttggagccgttgcaggaaatgattggttaatttgggatattactcggtccagttatcctcaaaataagagacctgttcacatggatcgagcctgcttattcaggtggtccacaattagtgaaaatctgtttgcaaccactggttatcctggcaaaatggcaagccagtttcaaattcatcatttaggacaccctcagcccatcctcatgggttctgtagccgttggatctggactgtcctggcatcgaactctccctctgtgtgtaattggaggagaccacaagctgttgttttgggtgactgaagtataaagtgttttctgtaccttagattcacaaactttgtatttttagtacatattttgaagaatttctatagtacatattttgaagaatttttatatcaaatataccgtatactttagaaaatgtctcagttgcttttattaaataaaatgttgatggtttg

SEQ ID NO: 214489 - DNA, 645 bp, Artificial Sequence
  derived and/or modified sequence
tattttaatttttaagttccgggatacgtgtgcgggacgtgcaggtttattacaaaggtaaaacgtgtgctatggtggtttgcacacccatcacctaggtattaagctccacatgcattagctatttatcctgatgctctccctccgcccaaccccctgaacattatttttatatcacacattttggtactccttaacaacagatcctgtattttctatctgtttatattatagcccttttcacgttgagtcataactatccctaaactgtggtctccttcaagccaggaggctgtttttttcttcattagcgctggttctccacacacaatgaagtcttccaaatcctggccctgcttatgagcttggcaagttagttaacctactgaagcctcagtttctccatctacaaaatggagaccagagtttcgtgaccttgtccagtagaaggctatttaattttcacaactgcttgaattttgacatacaagatgaagcaagatgcctcaagaaatgctgcctacactgtggattgtgaagattatgtgcatgtggtagaatttaatccctttgagaatggggattcaggaaacctaattgcatatggtggcaataattatgtggtcattggcacgtgtacgtttc

SEQ ID NO: 214490 - DNA, 1286 bp, Artificial Sequence
  derived and/or modified sequence
aagcagagccacagcgcgtcgcggcagcccccaaggaagaccagcctgcctctggtcggttcctggcgctctgcgtttcgtgaccttgtccagtagaaggctatttaattttcacaactgcttgaattttgacatacaagatgaagcaagatgcctcaagaaatgctgcctacactgtggattgtgaagattatgtgcatgtggtagaatttaatccctttgagaatggggattcaggaaacctaattgcatatggtggcaataattatgtggtcattggcacgtgtacgtttcaggaagaagaagcagacgttgaaggcattcagtataaaacacttcgaacatttcaccatggagtcagggttgatggcatagcttggagcccagagactagacttgattcattgcctccagtaatcaaattttgtacttcagctgctgatatgaaaattagattatttacttcagatcttcaggataaaaatgaatataaggttttagagggccataccgatttcattaatggtttggtgtttgatcccaaagaaggccaagaaattgcaagtgtgagtgacgatcacacctgcaggatttggaacttggaaggagtgcaaacagctcattttgttcttcattctcctggcatgagtgtgtgctggcatcctgaggagacttttaagctaatggttgcagagaagaatggaacaatccggttttatgatcttttggcccaacaggctattttatctcttgaatcagaacaagtgccattaatgtcagcacactggtgcttaaaaaacaccttcaaagttggagccgttgcaggaaatgattggttaatttgggatattactcggtccagttatcctcaaaataagagacctgttcacatggatcgagcctgcttattcaggtggtccacaattagtgaaaatctgtttgcaaccactggttatcctggcaaaatggcaagccagtttcaaattcatcatttaggacaccctcagcccatcctcatgggttctgtagccgttggatctggactgtcctggcatcgaactctccctctgtgtgtaattggaggagaccacaagctgttgttttgggtgactgaagtataaagtgttttctgtaccttagattcacaaactttgtatttttagtacatattttgaagaatttctatagtacatattttgaagaatttttatatcaaatataccgtatactttagaaaatgtctcagttgcttttattaaataaaatgttgatggtttgaaaaatta

SEQ ID NO: 214491 - DNA, 981 bp, Artificial Sequence
  derived and/or modified sequence
atgaagcaagatgcaagtaggaatgcggcttataccgtggattgtgaagattacgtgcacgtcgtcgagttcaatccattcgaaaacggcgatagcggcaatctgatagcctatggcggaaataactatgtggtgatagggacgtgtaccttccaggaggaggaagcagatgtcgagggcatccagtataaaacactgcgcaccttccatcatggtgttcgcgtcgatggcatcgcatggtctccagagacaaggctggattcattgcctccggtgataaagttctgcacttctgctgcggatatgaagattcggttgtttaccagcgatcttcaggacaaaaatgagtacaaggtcttggaggggcacactgatttcatcaacggactcgtgtttgaccctaaggagggccaggagattgctagtgtcagtgatgaccacacatgtaggatttggaacttagagggcgtgcagaccgcacacttcgtgctgcatagcccgggtatgtcggtatgctggcacccagaagagacattcaaattaatggtcgccgagaagaatgggacaatccgcttttacgaccttctcgcgcagcaagctatcctaagcctagagtcagaacaggtgccgctgatgtcggctcactggtgcttgaagaacacgttcaaagtcggagctgtcgccggtaatgattggctgatttgggatataacaagatcaagctacccccagaataaaaggccagtccatatggacagggcctgtctcttccgctggtctactattagtgagaatctattcgccacaaccggctatcccggaaagatggctagtcagttccaaatccatcacctcggccacccacagccaatactaatggggtctgtggcggttggctccggtttgtcatggcatcggactctcccgctgtgcgtcatcgggggtgatcacaaactgctgttttgggttaccgaagtttag

SEQ ID NO: 214492 - DNA, 156 bp, Artificial Sequence
  derived and/or modified sequence
atgaaacaggacgccagccgaaacgcggcatacacagtcgactgcgaagactacgttcacgtcgtcgagtttaatccttttgagaacggtgattctggaaatttaattgcctacggcggaaacaattatgtcgtcatcggaacctgcacattctag

SEQ ID NO: 214493 - DNA, 981 bp, Artificial Sequence
  derived and/or modified sequence
atgaaacaggatgcttctcggaatgccgcttatactgtagattgtgaagattatgttcatgtcgttgagtttaacccatttgagaatggcgattctggtaaccttatcgcgtacggaggaaacaactatgtggtaatcgggacttgcactttccaagaggaggaagccgacgtcgaaggaattcagtacaagacactccggacctttcatcacggcgttcgggtggatggcatagcttggtctcccgaaacgcgtctggattccttgcccccagtgattaagttctgcacaagtgcagctgacatgaagatccgcctatttacatctgatctgcaggataaaaatgagtataaagtgcttgaggggcatacagatttcattaatggtctggtcttcgacccgaaggaggggcaggaaattgcaagcgtatcagatgatcacacttgcaggatctggaatctcgagggcgtgcagaccgcccactttgttctccacagtccaggtatgtcagtctgctggcatccagaagagaccttcaaactgatggtggccgagaagaacggtaccatacgtttttatgacctcctggcacagcaggctattctgtccttagaatccgagcaagtaccattgatgagcgcacactggtgtctgaagaatacgttcaaagttggcgcagtggccggaaacgattggttgatctgggatataactagaagttcatacccccagaataagcgacccgtgcatatggaccgcgcatgcctcttcagatggtctactatcagtgagaacctcttcgcaacgactgggtaccccggaaaaatggcctctcaattccagattcaccatctcggacacccacagcctattctgatggggagcgtggctgtgggatccggcctgtcatggcacagaactctccctctttgcgtgatcgggggtgatcataaactgctattctgggtgacagaggtctag

SEQ ID NO: 214494 - DNA, 981 bp, Artificial Sequence
  derived and/or modified sequence
atgaagcaggacgccagcagaaacgccgcctacaccgtggactgcgaggactacgtgcacgtggtggagttcaaccccttcgagaacggcgacagcggcaacctgatcgcctacggcggcaacaactacgtggtgatcggcacctgcaccttccaggaggaggaggccgacgtggagggcatccagtacaagaccctgagaaccttccaccacggcgtgagagtggacggcatcgcctggagccccgagaccagactggacagcctgccccccgtgatcaagttctgcaccagcgccgccgacatgaagatcagactgttcaccagcgacctgcaggacaagaacgagtacaaggtgctggagggccacaccgacttcatcaacggcctggtgttcgaccccaaggagggccaggagatcgccagcgtgagcgacgaccacacctgcagaatctggaacctggagggcgtgcagaccgcccacttcgtgctgcacagccccggcatgagcgtgtgctggcaccccgaggagaccttcaagctgatggtggccgagaagaacggcaccatcagattctacgacctgctggcccagcaggccatcctgagcctggagagcgagcaggtgcccctgatgagcgcccactggtgcctgaagaacaccttcaaggtgggcgccgtggccggcaacgactggctgatctgggacatcaccagaagcagctacccccagaacaagagacccgtgcacatggacagagcctgcctgttcagatggagcaccatcagcgagaacctgttcgccaccaccggctaccccggcaagatggccagccagttccagatccaccacctgggccacccccagcccatcctgatgggcagcgtggccgtgggcagcggcctgagctggcacagaaccctgcccctgtgcgtgatcggcggcgaccacaagctgctgttctgggtgaccgaggtgtag

SEQ ID NO: 214495 - DNA, 156 bp, Artificial Sequence
  derived and/or modified sequence
atgaagcaggacgccagcagaaacgccgcctacaccgtggactgcgaggactacgtgcacgtggtggagttcaaccccttcgagaacggcgacagcggcaacctgatcgcctacggcggcaacaactacgtggtgatcggcacctgcaccttctag

SEQ ID NO: 214496 - protein, 149 aa, Artificial Sequence
  derived and/or modified sequence
MEKEETTRELLLPNWQGSGSHGLTIAQRDDGVFVQEVTQNSPAARTGVVKEGDQIVGATIYFDNLQSGEVTQLLNTMGHHTVGLKLHRKGDRSPEPGQTWTREVFSSCSSEVVLNTPQPSALECKDQNKQKEASSQAGAVSVSTPNAGL

SEQ ID NO: 214497 - protein, 121 aa, Artificial Sequence
  derived and/or modified sequence
MEKEETTRELLLPNWQGSGSHGLTIAQRDDGVFVQEVTQNSPAARTGVVKEGDQIVGATIYFDNLQSGEVTQLLNTMGHHTVGLKLHRKGDRSPEPGQTWTREVFSSCSSEVVLNTPQPSA

SEQ ID NO: 214498 - DNA, 450 bp, Artificial Sequence
  derived and/or modified sequence
atggagaaggaggagaccacccgggagctgctcctgccaaattggcaagggagcggatcacacggactcacaatcgcacaaagggacgatggggtgttcgtgcaggaggtcactcagaattcacccgcggcgcgaaccggcgtagtgaaggaaggcgaccaaatcgttggcgcaaccatctacttcgataatttgcagagtggggaagtgacacagctcctaaacacaatgggacatcacacagttggactgaagctgcaccgcaagggggaccgatcccctgagcctgggcagacatggacgcgcgaggtcttttccagctgcagtagtgaagtagttctgaatactccgcagccatccgccctggagtgcaaggaccagaacaagcagaaagaggctagttcacaagctggcgccgtgtccgtgtcaacaccgaatgccggcctgtag

SEQ ID NO: 214499 - DNA, 372 bp, Artificial Sequence
  derived and/or modified sequence
atggagaaggaagagaccacccgggagctgcttctgcccaactggcagggctcgggctctcatggtctgaccattgcccaacgtgacgacggggtctttgtgcaagaggtgacccagaattccccagccgctagaactggcgtggtgaaagaaggcgatcagatcgtaggggcaacaatctacttcgacaaccttcagtccggcgaagttacccagctgttgaatactatgggccaccataccgtaggccttaaattgcataggaaaggagatcgatcacccgaacccggacaaacatggactagggaggtattcagtagctgttcctccgaggtcgtcctcagcggtgacgatgaagagtaccagcgatag

SEQ ID NO: 214500 - DNA, 261 bp, Artificial Sequence
  derived and/or modified sequence
atggagaaggaagaaaccactagggagctcttactcccaaactggcagggcagtggctctcatgggctcactattgcccagcgggacgacggcgtgtttgtgcaggaggtgacccagaacagccctgccgcgcgtactggcgttgttaaagaaggcgaccagattgtcggtgccacaatctactttgataatctgcagagcggcgaggtgacccaacttctgaacacaatggggcaccataccgtgggtctgaagctgtag

SEQ ID NO: 214501 - DNA, 366 bp, Artificial Sequence
  derived and/or modified sequence
atggagaaagaagaaacgacacgggagctgcttctgcccaactggcagggcagtggctcgcacggactcacgatagcacagcgcgatgacggcgtcttcgtccaggaagtgactcagaacagccccgcggctaggaccggtgtggtaaaagagggggatcagatcgtgggtgcgacaatttactttgacaatctccaaagcggggaggtcacacaactgctgaataccatggggcaccacaccgtagggttaaaattgcataggaaaggcgatagatctcctgaaccaggccaaacctggaccagggaggtgttttcctcatgctcctccgaggttgtgttaaataccccgcaaccctctgcctag

SEQ ID NO: 214502 - DNA, 450 bp, Artificial Sequence
  derived and/or modified sequence
atggagaaggaggagaccacccgggagctgctgctgcccaactggcagggcagcggcagccacggcctgaccatcgcccagagagatgatggagtgtttgtgcaggaggtgacccagaacagccctgctgccaggactggagtggtgaaggagggggaccagatcgtgggcgccaccatctactttgacaacctgcagagcggggaggtgacccagctgctgaacaccatgggccaccacacagtgggcctgaagctgcacaggaaaggagacaggagccctgagcccggccagacctggacccgggaggtgttcagcagctgcagcagcgaggtggtgctgaacaccccccagcccagcgccctggagtgcaaggaccagaacaagcagaaggaggccagcagccaggccggggctgtgtctgtgtccaccccaaatgccggcctgtag

SEQ ID NO: 214503 - DNA, 372 bp, Artificial Sequence
  derived and/or modified sequence
atggagaaggaggagaccacccgggagctgctgctgcccaactggcagggcagcggcagccacggcctgaccatcgcccagagagatgatggagtgtttgtgcaggaggtgacccagaacagccctgctgccaggactggagtggtgaaggagggggaccagatcgtgggcgccaccatctactttgacaacctgcagagcggggaggtgacccagctgctgaacaccatgggccaccacacagtgggcctgaagctgcacaggaaaggagacaggagccctgagcccggccagacctggacccgggaggtgttcagcagctgcagcagcgaggtggtgctgtctggagatgatgaggagtaccagaggtag

SEQ ID NO: 214504 - DNA, 261 bp, Artificial Sequence
  derived and/or modified sequence
atggagaaggaggagaccacccgggagctgctgctgcccaactggcagggcagcggcagccacggcctgaccatcgcccagagagatgatggagtgtttgtgcaggaggtgacccagaacagccctgctgccaggactggagtggtgaaggagggggaccagatcgtgggcgccaccatctactttgacaacctgcagagcggggaggtgacccagctgctgaacaccatgggccaccacacagtgggcctgaagctgtag

SEQ ID NO: 214505 - DNA, 366 bp, Artificial Sequence
  derived and/or modified sequence
atggagaaggaggagaccacccgggagctgctgctgcccaactggcagggcagcggcagccacggcctgaccatcgcccagagagatgatggagtgtttgtgcaggaggtgacccagaacagccctgctgccaggactggagtggtgaaggagggggaccagatcgtgggcgccaccatctactttgacaacctgcagagcggggaggtgacccagctgctgaacaccatgggccaccacacagtgggcctgaagctgcacaggaaaggagacaggagccctgagcccggccagacctggacccgggaggtgttcagcagctgcagcagcgaggtggtgctgaacaccccccagcccagcgcctag

SEQ ID NO: 214506 - DNA, 450 bp, Artificial Sequence
  derived and/or modified sequence
atggagaaggaggagaccacccgggagctgctgctgcccaactggcagggatcaggatctcatggactgacaattgcccagcgcgacgacggagtctttgtacaggaggtgactcaaaactcccccgcggctagaacaggtgtggtcaaagagggagaccagattgtcggggccacaatctacttcgacaacctgcagtccggggaggtaacgcagctcttgaatactatgggccaccataccgtagggctaaaacttcacagaaaaggcgataggtcaccagagccaggccagacctggacccgcgaagtcttttccagttgtagttcggaggtcgtgctcaatactccgcagcctagcgctctggaatgcaaagatcagaacaagcagaaggaagcttctagccaggcaggagccgtgagtgtcagcacacctaacgccgggctgtag

SEQ ID NO: 214507 - DNA, 372 bp, Artificial Sequence
  derived and/or modified sequence
atggagaaggaggagaccacccgggagctgctgctgcccaactggcagggatctggatcccatggcttaaccattgcacaaagagatgatggtgtcttcgtccaggaggtgactcagaattcacctgctgctcggacaggggtggtaaaggaaggcgatcaaatcgtaggggctaccatatattttgataacctccagtctggggaggtcacgcaactcttgaacactatgggtcaccacactgtgggactaaaactgcatagaaaaggtgatcgtagccctgagcccggccagacctggaccagggaggtctttagttcatgctcatccgaggtcgtcctctccggagacgatgaggagtatcagcgttag

SEQ ID NO: 214508 - DNA, 261 bp, Artificial Sequence
  derived and/or modified sequence
atggagaaggaggagaccacccgggagctgctgctgcccaactggcagggcagtgggtcacacggactaactatcgctcaacgggatgacggagtgtttgtgcaggaggtgactcagaatagccctgcagcccgcaccggagtggttaaggaaggagatcagattgtgggtgcaactatttattttgacaatctgcagtccggtgaggtgactcagctgctcaacactatggggcaccataccgtcggattgaaattgtag

SEQ ID NO: 214509 - DNA, 366 bp, Artificial Sequence
  derived and/or modified sequence
atggagaaggaggagaccacccgggagctgctgctgcccaactggcaggggtctggcagtcacggcctgacaatcgctcagcgagacgatggggtgttcgtgcaagaagtgacacagaatagcccggctgccagaacgggtgtggtaaaggaaggagatcaaattgtcggagctaccatatatttcgacaacctgcagtcaggtgaggttacacagcttctgaatactatgggtcatcacactgttggtctgaaattacacagaaaaggagaccggtcacctgaaccaggccagacttggaccagggaagtgttctcttcctgttcatctgaagttgtcttaaatacccctcaaccatccgcttag

SEQ ID NO: 214510 - DNA, 1024 bp, Artificial Sequence
  derived and/or modified sequence
agctgctctgccgcggggactgcaccgcccgccctgccagacccgcccggaacggggctcgtcgccgccagtagccgcagcaccgcagccttgggcctcgcgccggctatggccgtgccctggggctgagccctcaggttgtgaccgagattcccgacgagagagactgaggggaagagaggaaggaggggcgggctcctggcaaggcattcgctcctgagcggaatcctgcaaagatggagaaggaggagacaacccgggagctgctgctgcccaactggcagggtagtggctcccacgggctgaccatcgcccagagggacgacggcgtctttgtgcaggaggtgacgcagaactcccctgcggcccgcactggggtggtcaaggagggggaccagattgtgggtgccaccatctactttgacaacctgcagtcgggtgaggtgacccagctgctgaacaccatggggcaccacacggtgggcctgaagctgcaccgcaagggggaccgctctcccgagcctggccagacctggacccgtgaagtcttcagctcctgcagctctgaagtggttctgaacacaccacagccatcagcactggaatgcaaagaccagaacaaacagaaggaagccagcagccaagccggggcagtttcagtctccaccccaaatgcaggactgtagaagcggccaggaagaaaaccaccccctcttaaggttgtttttgtgaccgttctttggagcattgttctaaaaatgggaaattacatattgctgtgccaagggcaacaaacacctgcagttaaaggaataccttccgcgaggcggcttttcggagcatgcatgtttatagctccagccaggccagaccgagggctgctgcataagccctgcttggtgcatttctttacttgcaaggggacagagtgtgggcttaggtttgggactagagggggctttggcaactatggtgctcaggtgattatccttcgctcgtttatccaataaacatttatcaagca

SEQ ID NO: 214511 - DNA, 568 bp, Artificial Sequence
  derived and/or modified sequence
agctgcgctcgctggaaccctgcgctccagcggtgcgcgccaggagagggggcccgaagcgaggtctcgcctagagttggaaaggcagcgtgcttagggttgtgaccgagattcccgacgagagagactgaggggaagagaggaaggaggggcgggctcctggcaaggcattcgctcctgagcggaatcctgcaaagatggagaaggaggagacaacccgggagctgctgctgcccaactggcagggtagtggctcccacgggctgaccatcgcccagagggacgacggcgtctttgtgcaggaggtgacgcagaactcccctgcggcccgcactggggtggtcaaggagggggaccagattgtgggtgccaccatctactttgacaacctgcagtcgggtgaggtgacccagctgctgaacaccatggggcaccacacggtgggcctgaagctgcaccgcaagggggaccgctctcccgagcctggccagacctggacccgtgaagtcttcagctcctgcagctctgaagtggttctgagcggggatgatgaggagtaccagcgcat

SEQ ID NO: 214512 - DNA, 450 bp, Artificial Sequence
  derived and/or modified sequence
atggagaaagaggaaaccactagagagctgttacttcctaattggcaggggtctggcagccatgggctgaccatagcccagcgcgacgacggtgtgttcgttcaggaggtgacccagaattccccggctgccaggaccggcgtcgtcaaagagggggaccagatcgtcggtgccactatttacttcgacaatctccagtctggtgaagtcacacagttgcttaacactatggggcaccacacagttggcttaaagttgcaccgaaagggagatcgatctcccgaacccggacagacgtggactagggaggtcttctcttcttgttcaagtgaggtagtgttaaacacaccgcagccatctgccctagagtgtaaggaccaaaataagcagaaggaagcaagctctcaggctggggctgtctctgtttcgacccccaacgccggactgtag

SEQ ID NO: 214513 - DNA, 372 bp, Artificial Sequence
  derived and/or modified sequence
atggagaaggaggagactactagggaactgttgttaccaaattggcaagggagtgggagtcatggattgactattgcccagagggacgatggagtattcgtacaggaggtgactcagaacagtcccgctgcccgtacaggagtagtgaaggaaggcgaccaaattgttggggctacaatatattttgataacttgcagagtggagaggtcacacaactgcttaacaccatgggtcaccataccgttggcctgaaattgcaccgcaaaggagatcgctcccctgagccaggtcagacttggactcgagaggtcttcagcagctgctcatctgaggtggtgctgtcgggggacgatgaggaatatcagcggtag

SEQ ID NO: 214514 - DNA, 261 bp, Artificial Sequence
  derived and/or modified sequence
atggagaaagaggaaaccacgagggagcttttactccccaattggcaaggctctgggagccacggattaactatcgctcagcgtgacgacggggtttttgttcaggaagtgacccagaactccccagctgccaggactggggtggtgaaagaaggagaccagatagtcggggctacaatttattttgataacctccagtccggcgaagtgacccagctgctcaacacgatgggacatcacactgttgggctgaagctgtag

SEQ ID NO: 214515 - DNA, 366 bp, Artificial Sequence
  derived and/or modified sequence
atggagaaggaagagacgactcgggagttgctgctccccaactggcaggggagcgggtcacacggcctaacaattgcccagagagatgatggtgtgtttgttcaggaagtgacacagaactctcctgccgctaggactggcgtcgtgaaagaaggagatcaaatagtgggggctacgatttatttcgacaacctgcaaagcggagaagtgacacagctactaaacaccatgggacaccataccgtcgggctgaagctgcaccggaaaggcgacaggagtccagagcctggacagacttggacgagggaggtattctccagttgtagttcagaagtggtcctcaatactcctcagccgtccgcctag

SEQ ID NO: 214516 - DNA, 579 bp, Artificial Sequence
  derived and/or modified sequence
aagagccgcctccgcgcacgggggcccggccactcggagctgctctgccgcggggactgcaccgcccgccctgccagacccgcccggaacggggctcgtcgccgccagtagccgcagcaccgcagccttgggcctcgcgccggctatggccgtgccctggggctgagccctcaggttgtgaccgagattcccgacgagagagactgaggggaagagaggaaggaggggcgggctcctggcaaggcattcgctcctgagcggaatcctgcaaagtggaaggacgtgagacgaattaccccacccccaacacctcacctggcagatggagaaggaggagacaacccgggagctgctgctgcccaactggcagggtagtggctcccacgggctgaccatcgcccagagggacgacggcgtctttgtgcaggaggtgacgcagaactcccctgcggcccgcactggggtggtcaaggagggggaccagattgtgggtgccaccatctactttgacaacctgcagtcgggtgaggtgacccagctgctgaacaccatggggcaccacacggtgggcctgaagct

SEQ ID NO: 214517 - DNA, 584 bp, Artificial Sequence
  derived and/or modified sequence
gggcttggcgtgggaggagggctaagctgcgctcgctggaaccctgcgctccagcggtgcgcgccaggagagggggcccgaagcgaggtctcgcctagagttggaaaggcagcgtgcttagggttgtgaccgagattcccgacgagagagactgaggggaagagaggaaggaggggcgggctcctggcaaggcattcgctcctgagcggaatcctgcaaagatggagaaggaggagacaacccgggagctgctgctgcccaactggcagggtagtggctcccacgggctgaccatcgcccagagggacgacggcgtctttgtgcaggaggtgacgcagaactcccctgcggcccgcactggggtggtcaaggagggggaccagattgtgggtgccaccatctactttgacaacctgcagtcgggtgaggtgacccagctgctgaacaccatggggcaccacacggtgggcctgaagctgcaccgcaagggggaccgctctcccgagcctggccagacctggacccgtgaagtcttcagctcctgcagctctgaagtggttctgaacacaccacagccatcagca

SEQ ID NO: 214518 - DNA, 450 bp, Artificial Sequence
  derived and/or modified sequence
atggagaaggaggagaccaccagagagctgctgctgcccaactggcagggcagcggcagccacggcctgaccatcgcccagagagacgacggcgtgttcgtgcaggaggtgacccagaacagccccgccgccagaaccggcgtggtgaaggagggcgaccagatcgtgggcgccaccatctacttcgacaacctgcagagcggcgaggtgacccagctgctgaacaccatgggccaccacaccgtgggcctgaagctgcacagaaagggcgacagaagccccgagcccggccagacctggaccagagaggtgttcagcagctgcagcagcgaggtggtgctgaacaccccccagcccagcgccctggagtgcaaggaccagaacaagcagaaggaggccagcagccaggccggcgccgtgagcgtgagcacccccaacgccggcctgtag

SEQ ID NO: 214519 - DNA, 372 bp, Artificial Sequence
  derived and/or modified sequence
atggagaaggaggagaccaccagagagctgctgctgcccaactggcagggcagcggcagccacggcctgaccatcgcccagagagacgacggcgtgttcgtgcaggaggtgacccagaacagccccgccgccagaaccggcgtggtgaaggagggcgaccagatcgtgggcgccaccatctacttcgacaacctgcagagcggcgaggtgacccagctgctgaacaccatgggccaccacaccgtgggcctgaagctgcacagaaagggcgacagaagccccgagcccggccagacctggaccagagaggtgttcagcagctgcagcagcgaggtggtgctgagcggcgacgacgaggagtaccagagatag

SEQ ID NO: 214520 - DNA, 261 bp, Artificial Sequence
  derived and/or modified sequence
atggagaaggaggagaccaccagagagctgctgctgcccaactggcagggcagcggcagccacggcctgaccatcgcccagagagacgacggcgtgttcgtgcaggaggtgacccagaacagccccgccgccagaaccggcgtggtgaaggagggcgaccagatcgtgggcgccaccatctacttcgacaacctgcagagcggcgaggtgacccagctgctgaacaccatgggccaccacaccgtgggcctgaagctgtag

SEQ ID NO: 214521 - DNA, 366 bp, Artificial Sequence
  derived and/or modified sequence
atggagaaggaggagaccaccagagagctgctgctgcccaactggcagggcagcggcagccacggcctgaccatcgcccagagagacgacggcgtgttcgtgcaggaggtgacccagaacagccccgccgccagaaccggcgtggtgaaggagggcgaccagatcgtgggcgccaccatctacttcgacaacctgcagagcggcgaggtgacccagctgctgaacaccatgggccaccacaccgtgggcctgaagctgcacagaaagggcgacagaagccccgagcccggccagacctggaccagagaggtgttcagcagctgcagcagcgaggtggtgctgaacaccccccagcccagcgcctag

SEQ ID NO: 214522 - protein, 239 aa, Artificial Sequence
  derived and/or modified sequence
MQDPNADTEWNDILRKKGILPPKESLKELEEEAEEEQRILQQSVVKTYEDMTLEELEDHEDEFNEEDERAIEMYRRRRLAEWKATKLKNKFGEVLEISGKDYVQEVTKAGEGLWVILHLYKQGIPLCALINQHLSGLARKFPDVKFIKAISTTCIPNYPDRNLPTIFVYLEGDIKAQFIGPLVFGGMNLTRDELEWKLSESGAIMTDLEENPKKPIEDVLLSSVRRSVLMKRDSDSEGD

SEQ ID NO: 214523 - DNA, 720 bp, Artificial Sequence
  derived and/or modified sequence
atgcaagatccaaacgcggacacagaatggaatgatatcctccgtaaaaaaggcatcctgcccccaaaagagagcctgaaagaattagaagaggaagctgaagaggagcagcgaattctgcagcagtccgtggtgaagacgtacgaggatatgacactcgaggagttagaagatcacgaagatgaattcaatgaagaagatgagagagccattgagatgtatcggagaagacggctagccgaatggaaagccactaagctgaagaacaagttcggagaagtgctcgagatctcggggaaagattacgttcaggaggtcacaaaggcgggtgagggcctttgggttatcctccacctctataagcaagggattcctctgtgcgctcttataaatcagcacctcagcggcctagcacgcaaattcccagatgttaagttcatcaaggccatttcaacgacctgtatccctaactaccccgaccgtaacctgcccacaatctttgtgtacttggaaggggatataaaagcacagtttattggcccgctcgttttcggcggtatgaacctgacacgcgatgaactggaatggaagctatctgaatctggcgcaattatgacggacctggaggaaaaccctaaaaagcccatcgaggacgtgttactcagttccgtgcgcaggagcgtcctgatgaagcgagactcagattctgaaggcgactag

SEQ ID NO: 214524 - DNA, 720 bp, Artificial Sequence
  derived and/or modified sequence
atgcaggaccccaatgctgacacagagtggaatgacatcctgaggaagaagggcatcctgccccccaaggagagcctgaaggagctggaggaggaggccgaggaggagcagaggatcctgcagcagagcgtggtgaagacctatgaggacatgaccctggaggagctggaggaccatgaagatgagttcaatgaggaggatgagcgggccatcgagatgtacagaagaagaaggctggccgagtggaaggccaccaagctgaagaacaagtttggagaggtgctggagatcagcggcaaggactatgtgcaggaggtgaccaaggccggggagggcctgtgggtgatcctgcacctgtacaagcagggcatccccctgtgtgccctgatcaaccagcacctgagcggcctggccaggaagttcccagatgtgaagttcatcaaggccatcagcaccacctgcatccccaactacccagacaggaacctgcccaccatctttgtgtacctggagggggacatcaaggcccagttcatcggccccctggtgtttggaggcatgaacctgaccagagatgagctggagtggaagctgtctgagagcggggccatcatgacagacctggaggagaaccccaagaagcccattgaagatgtgctgctgagctctgtgagaagatctgtgctgatgaagagggacagcgacagcgagggggactag

SEQ ID NO: 214525 - DNA, 720 bp, Artificial Sequence
  derived and/or modified sequence
atgcaggaccccaacgccgacaccgagtggaacgacatcctgcggaagaaagggatcctgcctcccaaagagagtttgaaggaactcgaggaagaagctgaggaggagcagcggatccttcaacaaagtgtggttaagacctacgaagatatgactctggaagaattggaggaccatgaggacgagttcaatgaagaggatgagagagctattgagatgtaccgccgccgtcgactagcagaatggaaggccactaagctcaaaaataagtttggggaagtgttggagatcagcggtaaagactatgtccaggaggtgacaaaggcaggagagggcctgtgggttatcctgcatctatataagcagggcatccctctgtgtgccctgattaaccagcatctctctggtctggcgcgtaagttccccgacgtgaagttcataaaggcgattagtacaacttgtatacccaactaccctgatcgcaacttaccaaccatatttgtgtatctagagggagatatcaaagcccagttcatcgggccgctggtgtttggcggcatgaatttgacccgagatgagctcgaatggaagctatctgaaagcggagccattatgacagacctggaagagaacccaaagaagcccattgaagacgtgctcctgtcctcagtaaggcggagcgtcttgatgaagcgcgactcagatagcgaaggcgactag

SEQ ID NO: 214526 - DNA, 1337 bp, Artificial Sequence
  derived and/or modified sequence
gtctttacaggtttgggccggcagctggaaaaggcacacggccccgggctcctcctccacccagccccacccctcctccgctgaagaccagccctaataaggcagccaccagaattagaaccaggtcaagtgcactccgagcaggacagtaggcagatcctatctggcgcatgcgaacgcttctgtgccagttccttgaagagcaggcgcagactcaaggctgttgcttccgcccttactccccgccgctcgtccctgggcggggcgaaggctgggctgggggaagaggcgtggcggcgctgtgcgcgtgcacaaaagagagctgaggggcgggggcgctgcggcacagctggtttgagcaactgaactggaaacaagatgcaggaccccaacgcagacactgaatggaatgacatcttacgcaaaaagggtatcttaccccccaaggaaagtctgaaagaattggaagaggaggcagaagaggagcagcgcatcctccagcagtcagtggtgaaaacatatgaagatatgactttggaagagctggaggatcatgaagacgagtttaatgaggaggatgaacgtgctattgaaatgtacagacggcggagactggctgagtggaaagcaactaaactgaagaataaattcggagaagttttggagatctcagggaaggattatgttcaagaagttaccaaagctggcgagggcttgtgggtcatcttgcacctttacaaacaaggaattcccctctgtgccctgataaatcagcacctcagtggacttgccaggaagtttcctgatgtcaaatttatcaaagccatttcaacaacctgcatacccaattatcctgataggaatctgcccacgatatttgtttacctggaaggagatatcaaggctcagtttattggtcctctggtgtttggcggcatgaacctgacaagagatgagttggaatggaaactgtctgaatctggagcaattatgacagacctggaggaaaaccctaagaagccgattgaagacgtgttgctgtcctcagtgcggcgctctgtcctcatgaagagggacagcgattccgagggtgactgaggctacagcttctatcacatgccgaactttcttgtgacaaattgtctggattttttaaaaaaggaaaaagcaagaatgaatccttgtggtttttagttttgtataaattatgtttcaaatctttacattttggaaataatcattgctggagattctgttaaatattttggaactctttttttttttaaattatagtatttcctctaaaaaaaattaaaaccagccatttgtatggcaaa

SEQ ID NO: 214527 - DNA, 720 bp, Artificial Sequence
  derived and/or modified sequence
atgcaagatcctaatgccgacacagaatggaatgatatactgcgaaagaagggcatactgcctccaaaggaatccttgaaagagctcgaggaagaagccgaggaggagcagcgtattcttcagcagtctgtggtgaagacttacgaagacatgactctggaggaacttgaagaccacgaggacgaattcaatgaggaagacgagagggctatcgagatgtacagacggaggcggctggccgaatggaaggctacgaaactgaagaataaatttggggaagtattagagatcagcggaaaagactacgtgcaggaagtcaccaaggccggagagggcctgtgggttattttacatctttataagcaaggcatacccctgtgcgccctcataaatcagcatctgtctgggctggcgagaaagtttccggacgtgaagtttataaaagccattagcaccacatgcataccaaattacccagataggaatctccccacaatatttgtgtatctcgagggcgacattaaagcacagtttattgggccactggtgttcgggggtatgaacttgactcgagacgagctggagtggaaactctccgaatctggcgctatcatgaccgatctagaagaaaatccgaagaagcccattgaggacgtgttattaagctctgtgaggcgttctgtgctgatgaagcgtgactcagatagcgagggtgattag

SEQ ID NO: 214528 - DNA, 720 bp, Artificial Sequence
  derived and/or modified sequence
atgcaggaccccaacgccgacaccgagtggaacgacatcctgagaaagaagggcatcctgccccccaaggagagcctgaaggagctggaggaggaggccgaggaggagcagagaatcctgcagcagagcgtggtgaagacctacgaggacatgaccctggaggagctggaggaccacgaggacgagttcaacgaggaggacgagagagccatcgagatgtacagaagaagaagactggccgagtggaaggccaccaagctgaagaacaagttcggcgaggtgctggagatcagcggcaaggactacgtgcaggaggtgaccaaggccggcgagggcctgtgggtgatcctgcacctgtacaagcagggcatccccctgtgcgccctgatcaaccagcacctgagcggcctggccagaaagttccccgacgtgaagttcatcaaggccatcagcaccacctgcatccccaactaccccgacagaaacctgcccaccatcttcgtgtacctggagggcgacatcaaggcccagttcatcggccccctggtgttcggcggcatgaacctgaccagagacgagctggagtggaagctgagcgagagcggcgccatcatgaccgacctggaggagaaccccaagaagcccatcgaggacgtgctgctgagcagcgtgagaagaagcgtgctgatgaagagagacagcgacagcgagggcgactag

SEQ ID NO: 214529 - DNA, 636 bp, Artificial Sequence
  derived and/or modified sequence
atgactacagagacatttgtgaaggatatcaaaccgggcctgaaaaatctaaacctgatcttcatcgtgctggagactgggcgggtgaccaaaacgaaagatgggcatgaagtgcgcacgtgtaaggtagccgacaaaaccggtagcataaatatctcggtgtgggatgacgtgggtaatctcatacaaccgggagatatcatacggctgacaaaggggtatgcctccgttttcaaaggttgtcttaccctttacaccggacgagggggtgatcttcagaagatcggggaattttgtatggtatattctgaagtccccaatttcagtgagccaaatccagaatattctacccagcaggctcccaacaaagcagtgcagaacgacagcaacccatcagcatcccaacccaccaccgggccaagcgccgcgagcccagcgagtgaaaatcagaatggtaatggattgagcgcaccacccggtcccggtggggggcctcaccctccacacactccatcccaccccccctcgaccagaatcacaaggtcgcagcctaaccacactcctgctggccccccggggccaagcagcaatcccgtttccaacggcaaagaaacccgtaggtcaagcaagcggtag

SEQ ID NO: 214530 - DNA, 636 bp, Artificial Sequence
  derived and/or modified sequence
atgacaaccgagacctttgtgaaggacattaagcccggattaaaaaacttgaatctgatcttcattgttctggagaccggacgagtgaccaaaactaaagatgggcacgaggtgagaacatgcaaggtggcagacaagaccggaagtattaatatctcagtctgggatgatgtcgggaatcttatccagccgggggatatcatccggcttacaaagggatatgcttccgtattcaaaggctgcctgaccctgtacactggaaggggtggcgacctacagaaaattggggagttttgtatggtgtacagtgaggtgccaaacttcagtgaaccgaaccctgagtattctactcaacaggccccaaataaagccgtacaaaatgacagcaacccaagcgcttcccagccaaccaccgggccttctgccgcaagtccagcatccgagaaccagaacggcaatggacttagtgccccccccggtccaggaggtggtccccatcctccacatactccctcccaccctccctccacaaggatcacacggagccagcccaaccacacacccgctggtcccccgggtccctcttcgaatccggtctctaatggcaaggaaacaagaaggtcttcaaagagatag

SEQ ID NO: 214531 - DNA, 636 bp, Artificial Sequence
  derived and/or modified sequence
atgacaaccgagacctttgtaaaagacataaaacccggactaaagaacttgaacttgatctttatcgtactggagacaggacgagtgaccaagaccaaggacgggcacgaggtgagaacttgtaaggtcgccgacaaaaccgggagtattaacataagcgtatgggatgatgtgggcaaccttattcagcctggcgacattatacgcctgaccaaaggctacgcaagtgtctttaagggttgcctgacactgtataccggacgtggcggagatctgcaaaagattggggagttttgtatggtgtattcagaagtcccaaatttctctgagcctaaccccgagtattcgacacagcaagcacctaataaggcggtgcagaacgattccaacccatccgccagccagcctacaacgggcccttcggctgcttcaccagcctctgaaaaccaaaacgggaatggactgtcagcccctccaggacctggagggggcccccacccaccccatacaccctcacatccccctagcactaggattaccagatcccagcctaaccacacccccgcaggcccccccggcccgtcaagtaaccccgttagcaacggcaaggaaactaggcggtcttctaagcgatag

SEQ ID NO: 214532 - DNA, 459 bp, Artificial Sequence
  derived and/or modified sequence
atgacaaccgagacattcgtgaaagacatcaaacccggcctgaagaacttgaacctgatcttcattgtgttagaaacggggagggtcacgaaaaccaaagacggccacgaagtgaggacatgtaaggtagcagataaaacagggtcaataaatatttccgtgtgggatgatgtaggtaatcttattcagcctggcgacattattcggttgaccaaaggctacgcctccgtgttcaagggttgcctaacattgtacacagggcgcggcggagatctccagaagatcggtgagttttgtatggtttacagtgaggtgcctaactttagtgagcctaatcctgagtattcaacacaacaggcacccaataaagctgtgcagaacgacagcaaccccagcgccagtcaacccacaacggggcccagcgcagccagtccagcttctgagaatcagaacggctag

SEQ ID NO: 214533 - DNA, 435 bp, Artificial Sequence
  derived and/or modified sequence
atgacgacagaaacattcgtgaaagacatcaagccaggattgaagaatctgaacttgatctttattgtgcttgaaacaggccgcgtgacaaaaaccaaagatggacacgaggtgaggacatgtaaagtggcagacaagacaggctctatcaatattagcgtctgggacgatgtcggaaacttgatccaacccggtgacattatccggctgacaaagggatacgccagcgtctttaagggttgtctgaccttatataccggtcggggaggagacctccagaagataggagaattttgcatggtgtattctgaggtacccaattttagtgagcccaacccagaatactcgactcagcaggcgcccaataaagcagttcagaacgattctaatccctctgcgagccagcccactacgggaccatcggcagccagctag

SEQ ID NO: 214534 - DNA, 636 bp, Artificial Sequence
  derived and/or modified sequence
atgaccacagagacctttgtgaaggacatcaagccaggcctgaagaacctgaacctgatcttcatcgtgctggagaccggccgggtgaccaagaccaaggatggccacgaggtgaggacctgcaaggtggccgacaagacaggcagcatcaacatctctgtgtgggatgatgtgggcaacctgatccagcccggggacatcatccggctgaccaagggctacgccagcgtcttcaagggctgcctgaccctgtacacaggccggggcggggacctgcagaagattggagagttctgcatggtgtacagcgaggtgcccaacttcagcgagcccaaccctgagtacagcacccagcaggcccccaacaaggctgtgcagaatgacagcaaccccagcgccagccagcccaccaccggccccagcgctgccagccctgccagcgagaaccagaatggaaatggcctgagcgcccctcctggccctgggggcggcccccaccccccccacacccccagccacccccccagcacccgcatcaccaggagccagcccaaccacaccccagctggccccccaggccccagcagcaaccctgtgtccaatggcaaggagacccggcgcagcagcaagaggtag

SEQ ID NO: 214535 - DNA, 459 bp, Artificial Sequence
  derived and/or modified sequence
atgaccacagagacctttgtgaaggacatcaagccaggcctgaagaacctgaacctgatcttcatcgtgctggagaccggccgggtgaccaagaccaaggatggccacgaggtgaggacctgcaaggtggccgacaagacaggcagcatcaacatctctgtgtgggatgatgtgggcaacctgatccagcccggggacatcatccggctgaccaagggctacgccagcgtcttcaagggctgcctgaccctgtacacaggccggggcggggacctgcagaagattggagagttctgcatggtgtacagcgaggtgcccaacttcagcgagcccaaccctgagtacagcacccagcaggcccccaacaaggctgtgcagaatgacagcaaccccagcgccagccagcccaccaccggccccagcgctgccagccctgccagcgagaaccagaatggatag

SEQ ID NO: 214536 - DNA, 435 bp, Artificial Sequence
  derived and/or modified sequence
atgaccacagagacctttgtgaaggacatcaagccaggcctgaagaacctgaacctgatcttcatcgtgctggagaccggccgggtgaccaagaccaaggatggccacgaggtgaggacctgcaaggtggccgacaagacaggcagcatcaacatctctgtgtgggatgatgtgggcaacctgatccagcccggggacatcatccggctgaccaagggctacgccagcgtcttcaagggctgcctgaccctgtacacaggccggggcggggacctgcagaagattggagagttctgcatggtgtacagcgaggtgcccaacttcagcgagcccaaccctgagtacagcacccagcaggcccccaacaaggctgtgcagaatgacagcaaccccagcgccagccagcccaccaccggccccagcgctgccagctag

SEQ ID NO: 214537 - DNA, 636 bp, Artificial Sequence
  derived and/or modified sequence
atgaccaccgagaccttcgtgaaggacatcaagcccggcctgaagaatctcaacctcatatttatcgtgcttgaaacagggagggtgactaagaccaaggatgggcacgaggttcgaacttgcaaggtggccgacaaaaccggcagcataaatattagcgtgtgggatgatgtgggaaatctgatacagcctggggatatcatacggctcaccaagggttacgcttcggtcttcaagggttgtttaactctctataccggacgaggcggcgatttgcagaagatcggagagttctgcatggtgtacagcgaggtccccaacttctcggaaccaaaccccgaatacagcacccagcaggcacccaacaaagccgtgcagaacgatagcaacccatccgcttctcagcctactacaggcccgtctgctgcctctcccgcctccgagaatcagaatggaaacggtttgtcagccccaccagggcccggcggtggacctcatcccccacacacaccttcacaccctccatctacccggattacacgaagccagcccaaccacacccctgccggaccacccggcccctcctccaacccagtcagcaacggaaaggagaccaggaggtcttctaagaggtag

SEQ ID NO: 214538 - DNA, 636 bp, Artificial Sequence
  derived and/or modified sequence
atgaccaccgagaccttcgtgaaggacatcaagcccggcctgaagaatctaaacttgatttttattgttctggaaactggacgtgtgaccaagacaaaggatgggcacgaggtgcgtacgtgtaaggtggccgataagaccgggagcattaacataagtgtctgggacgacgtcggcaacctgattcagccaggtgatatcataaggctcaccaaaggatacgcttccgtgtttaagggttgtcttaccctgtacaccgggcgcggtggtgacctgcagaaaataggggaattttgcatggtatacagcgaggtacccaatttttcagagcccaatcccgagtattcaacacaacaggcacccaataaggctgtacagaatgactcaaatccaagtgctagccaacccacgaccggaccttcagcagcgtcccctgcttcggaaaaccaaaacgggaacggcttgagtgcacctccgggtcctggcggcggtcctcatccacctcataccccaagccatccccctagcactagaataacacggtcccagcctaaccacacacccgccggaccgcccggccccagcagtaacccggtttccaatggaaaagaaactcgtcgctcctccaagaggtag

SEQ ID NO: 214539 - DNA, 636 bp, Artificial Sequence
  derived and/or modified sequence
atgaccaccgagaccttcgtgaaggacatcaagcccggcctgaagaatcttaaccttatctttatagttctggaaactggaagggttaccaagacgaaggatggacacgaggtgcggacctgcaaggtggcagataaaacaggttccattaacatcagtgtgtgggacgatgtggggaatctcatacagcccggggatatcattcggctgacgaagggatatgcctctgtgtttaaaggttgcttaactctatacaccgggaggggaggggatttgcagaagattggtgagttctgcatggtgtacagtgaggttccaaactttagcgagcctaatcccgaatacagtactcagcaggcccctaacaaagcggttcagaacgattccaaccctagtgcctcccaaccaactactgggccctctgccgcttcaccagcgtccgagaaccagaacggcaatgggctctccgccccccctggccctgggggcggaccccatccgccacatacccccagtcatcccccatcaaccaggatcactcgctcccagcctaaccatacaccagccggaccccctggtccctcctcaaatcccgttagcaacgggaaagagactagaaggagctcgaaaagatag

SEQ ID NO: 214540 - DNA, 459 bp, Artificial Sequence
  derived and/or modified sequence
atgaccaccgagaccttcgtgaaggacatcaagcccggcctgaagaacctgaacttgatatttatcgtactcgagacaggaagggtgactaaaacaaaagatggacatgaagttagaacatgcaaagtagcggacaaaaccggctctattaacattagtgtttgggatgacgtaggcaatctgatccaaccgggcgatatcattcgcttaacaaagggttatgccagcgtctttaagggctgcctgactctgtatacggggaggggaggcgatctccaaaagatcggggagttttgcatggtgtactccgaagttcccaatttctccgagcccaaccccgaatactccacacagcaagcccctaataaggccgtgcagaacgattctaacccgtcagccagccagcccaccaccgggccctcagcggcctcgcccgccagtgagaaccagaatggctag

SEQ ID NO: 214541 - DNA, 435 bp, Artificial Sequence
  derived and/or modified sequence
atgaccaccgagaccttcgtgaaggacatcaagcccggcctgaagaatctgaaccttatcttcatcgtcctggaaactggccgggtgaccaaaacaaaagacggacacgaggttcgcacgtgtaaagtggctgacaaaactggcagcatcaacatttcggtttgggatgacgttggcaacctgatccagccaggcgacattattcggttaacgaaaggctatgcgtctgtgttcaaggggtgcctgactctctacacaggccgaggcggggacctacaaaagatcggtgagttctgcatggtgtactcagaggtgccgaatttctctgagcccaaccctgagtattcaacacagcaggccccaaataaggccgtgcagaatgatagtaatcccagtgcttcacagcctaccactggacccagtgctgccagctag

SEQ ID NO: 214542 - DNA, 636 bp, Artificial Sequence
  derived and/or modified sequence
atgactactgagactttcgtgaaggatatcaagccaggattaaaaaacctcaaccttattttcattgtgcttgagacggggagggttaccaaaaccaaggacggtcacgaggtgaggacgtgtaaagtggcagataagacaggctcgatcaatatcagcgtgtgggacgacgtggggaatcttatccaacccggagacatcattaggcttacaaaggggtatgcttcagtgttcaagggatgcctgaccctgtacactgggaggggtggcgatctacaaaagataggcgaattttgtatggtgtactccgaagtgcctaattttagtgagccaaaccctgagtacagtacacagcaggctcctaacaaggcggtgcagaatgattctaatcctagcgctagccagcccactaccggaccctccgcggctagtcccgcttccgagaatcagaatgggaacggcctatccgctccgcctggccctggaggcggaccccaccctccccacaccccctctcatccacccagcaccaggattactagaagtcagcctaatcataccccagccggaccaccgggtcctagttccaatcctgtgtccaatggaaaggagacgcgacgctcctccaaaaggtag

SEQ ID NO: 214543 - DNA, 636 bp, Artificial Sequence
  derived and/or modified sequence
atgaccacggaaacgtttgtaaaagacatcaagcctggcctgaagaaccttaatcttatctttatcgtgttggagacaggacgcgtcactaagactaaggatggacatgaggtgcggacttgcaaggtagccgacaaaactggttccatcaatattagcgtgtgggatgacgtgggcaacctaatccagcccggtgacatcatacggctgacgaaggggtacgcgagtgtctttaaaggatgcctcacgttatacacaggtcggggtggtgatttacagaagataggggagttttgcatggtatactcagaggtgccaaatttcagtgaacccaatcctgagtacagcacacagcaggctcctaacaaggccgtgcaaaacgactccaaccctagcgccagccaacccaccaccggtccgagcgcagccagtccagcgtcggaaaatcaaaacggaaatgggctaagcgcccctccaggtcccggaggtggacctcacccaccccatacgcctagtcaccctcctagtactagaattacccggagtcaacctaaccacacgccagccggacccccaggcccaagttctaatcccgtctctaatggcaaggaaactaggcggagcagcaaaaggtag

SEQ ID NO: 214544 - DNA, 636 bp, Artificial Sequence
  derived and/or modified sequence
atgactacggagacttttgtaaaggacatcaagccgggattgaaaaacctcaaccttattttcatcgtcctggaaacaggtcgagttaccaaaacgaaggacgggcatgaagtgcgaacatgcaaggtagccgacaagacgggctcaatcaacatttctgtgtgggatgatgtgggtaacttgatacagcccggagacataatacgactgacaaaggggtacgcctccgtgttcaagggctgtttgacattgtatacggggagaggaggagacctgcagaaaatcggagagttttgcatggtctacagcgaggtgcccaacttttctgagcccaaccccgagtatagtacacagcaagctcctaacaaggcagtgcaaaatgactctaacccttccgcatctcaacctactaccggaccttcagccgcatcccccgctagcgagaaccagaacggcaacgggctgagtgcccctccgggacctggagggggtcctcatcccccacacaccccctcgcatcctccgagcaccaggataactcgctcccagccaaaccacactccagccggaccacctggaccctctagtaaccccgttagtaatgggaaggagactcggcgttcttcaaagagatag

SEQ ID NO: 214545 - DNA, 459 bp, Artificial Sequence
  derived and/or modified sequence
atgacgactgaaacctttgtgaaagatattaagcctggactaaagaatttaaatttgatcttcatcgttcttgaaacaggcagggtgacgaagacgaaggacggacatgaggtcagaacctgcaaagtggccgataagactgggtccataaacatatctgtttgggacgacgtcggcaatctgatacagcccggtgatatcatcagattgacgaaaggctacgcctctgtgttcaaaggctgtctcactctatacacgggtcggggtggcgacctgcagaagattggggagttctgtatggtgtactcggaggtcccgaatttctccgagcccaacccagaatacagtacccaacaggctcctaataaggccgtccaaaacgattcaaacccgtctgcaagtcaaccaaccacaggaccttccgctgcgagcccagcctccgagaatcagaacgggtag

SEQ ID NO: 214546 - DNA, 435 bp, Artificial Sequence
  derived and/or modified sequence
atgacgactgagactttcgtgaaggatatcaaacccggtcttaaaaacttaaacctaatttttatcgtacttgaaactggcagagtgacaaagactaaggacggccatgaggttcgaacatgtaaggtagccgataaaacgggatctatcaacattagcgtgtgggacgacgttgggaacttgattcagccgggagacattataaggctgaccaaaggttatgcctctgtgttcaaggggtgtttgaccctctacaccggcagaggtggtgacttgcagaagatcggcgagttttgtatggtgtattccgaagtacctaacttttctgaaccaaaccccgaatactctacacagcaggctcccaataaggcagtgcagaatgactctaatccgtctgccagtcagcccacgactggtcccagcgcagcttcttag

SEQ ID NO: 214547 - DNA, 636 bp, Artificial Sequence
  derived and/or modified sequence
atgaccaccgagaccttcgtgaaggacatcaagcccggcctgaagaacctgaacctgatcttcatcgtgctggagaccggcagagtgaccaagaccaaggacggccacgaggtgagaacctgcaaggtggccgacaagaccggcagcatcaacatcagcgtgtgggacgacgtgggcaacctgatccagcccggcgacatcatcagactgaccaagggctacgccagcgtgttcaagggctgcctgaccctgtacaccggcagaggcggcgacctgcagaagatcggcgagttctgcatggtgtacagcgaggtgcccaacttcagcgagcccaaccccgagtacagcacccagcaggcccccaacaaggccgtgcagaacgacagcaaccccagcgccagccagcccaccaccggccccagcgccgccagccccgccagcgagaaccagaacggcaacggcctgagcgccccccccggccccggcggcggcccccaccccccccacacccccagccacccccccagcaccagaatcaccagaagccagcccaaccacacccccgccggcccccccggccccagcagcaaccccgtgagcaacggcaaggagaccagaagaagcagcaagagatag

SEQ ID NO: 214548 - DNA, 459 bp, Artificial Sequence
  derived and/or modified sequence
atgaccaccgagaccttcgtgaaggacatcaagcccggcctgaagaacctgaacctgatcttcatcgtgctggagaccggcagagtgaccaagaccaaggacggccacgaggtgagaacctgcaaggtggccgacaagaccggcagcatcaacatcagcgtgtgggacgacgtgggcaacctgatccagcccggcgacatcatcagactgaccaagggctacgccagcgtgttcaagggctgcctgaccctgtacaccggcagaggcggcgacctgcagaagatcggcgagttctgcatggtgtacagcgaggtgcccaacttcagcgagcccaaccccgagtacagcacccagcaggcccccaacaaggccgtgcagaacgacagcaaccccagcgccagccagcccaccaccggccccagcgccgccagccccgccagcgagaaccagaacggctag

SEQ ID NO: 214549 - DNA, 435 bp, Artificial Sequence
  derived and/or modified sequence
atgaccaccgagaccttcgtgaaggacatcaagcccggcctgaagaacctgaacctgatcttcatcgtgctggagaccggcagagtgaccaagaccaaggacggccacgaggtgagaacctgcaaggtggccgacaagaccggcagcatcaacatcagcgtgtgggacgacgtgggcaacctgatccagcccggcgacatcatcagactgaccaagggctacgccagcgtgttcaagggctgcctgaccctgtacaccggcagaggcggcgacctgcagaagatcggcgagttctgcatggtgtacagcgaggtgcccaacttcagcgagcccaaccccgagtacagcacccagcaggcccccaacaaggccgtgcagaacgacagcaaccccagcgccagccagcccaccaccggccccagcgccgccagctag

SEQ ID NO: 214550 - protein, 234 aa, Artificial Sequence
  derived and/or modified sequence
MSSEVSARRDAKKLVRSPSGLRMVPEHRAFGSPFGLEEPQWVPDKECRRCMQCDAKFDFLTRKHHCRRCGKCFCDRCCSQKVPLRRMCFVDPVRQCAECALVSLKEAEFYDKQLKVLLSGATFLVTFGNSEKPETMTCRLSNNQRYLFLDGDSHYEIEIVHISTVQILTEGFPPGGGNARATGMFLQYTVPGTEGVTQLKLTVVEDVTVGRRQAVAWLVAMHKAAKLLYESRDQ

SEQ ID NO: 214551 - DNA, 705 bp, Artificial Sequence
  derived and/or modified sequence
atgagcagcgaggtgagcgccagaagagacgccaagaagctggtgagaagccccagcggcctgagaatggtgcccgagcacagagccttcggcagccccttcggcctggaggagccccagtgggtgcccgacaaggagtgcagaagatgcatgcagtgcgacgccaagttcgacttcctgaccagaaagcaccactgcagaagatgcggcaagtgcttctgcgacagatgctgcagccagaaggtgcccctgagaagaatgtgcttcgtggaccccgtgagacagtgcgccgagtgcgccctggtgagcctgaaggaggccgagttctacgacaagcagctgaaggtgctgctgagcggcgccaccttcctggtgaccttcggcaacagcgagaagcccgagaccatgacctgcagactgagcaacaaccagagatacctgttcctggacggcgacagccactacgagatcgagatcgtgcacatcagcaccgtgcagatcctgaccgagggcttcccccccggcggcggcaacgccagagccaccggcatgttcctgcagtacaccgtgcccggcaccgagggcgtgacccagctgaagctgaccgtggtggaggacgtgaccgtgggcagaagacaggccgtggcctggctggtggccatgcacaaggccgccaagctgctgtacgagagcagagaccagtag

SEQ ID NO: 214552 - DNA, 705 bp, Artificial Sequence
  derived and/or modified sequence
atgagcagtgaggtgtctgcacggagggacgcaaagaagcttgttaggagcccctccggacttagaatggtccccgagcaccgagcctttgggtcgccttttggtctggaggagccccaatgggtccccgacaaggagtgtcgcaggtgtatgcaatgtgatgcgaaattcgactttctgacccgcaagcaccactgccggagatgcggcaagtgtttctgtgaccgatgctgctcacagaaggtgccactgcggcgtatgtgtttcgtcgaccctgtcagacagtgtgccgaatgtgccctggtcagccttaaagaggcagagttctatgataagcagctgaaggtactgctgtccggcgcaacttttctggtgacctttggtaacagcgagaaacctgaaaccatgacctgtcggctctcgaataatcaacggtacctgtttttggacggagactcgcattacgagatcgagatcgtgcacatctctactgtacagatattgacggaaggcttcccaccaggcggcggaaacgcaagagcgacaggaatgttcttacagtataccgtgccagggactgagggcgtgactcagctcaaactgactgttgtggaggacgtcaccgtaggtagaaggcaggccgttgcatggctggtagcaatgcacaaagcagcaaagcttttgtacgaatcaagggatcagtag

SEQ ID NO: 214553 - DNA, 705 bp, Artificial Sequence
  derived and/or modified sequence
atgagcagcgaggtgtctgccaggagagatgccaagaagctggtgcgcagccccagcggcctgaggatggtgcctgagcaccgggccttcggcagccccttcggcctggaggagccccagtgggtgcctgacaaggagtgccgccgctgcatgcagtgtgatgccaagtttgacttcctgaccaggaagcaccactgcagaagatgtgggaagtgcttctgtgaccgctgctgcagccagaaggtgcccctgcggaggatgtgctttgtggaccctgtgcggcagtgtgccgagtgtgccctggtgtccctgaaggaggccgagttctatgacaagcagctgaaggtgctgctgagcggggccaccttcctggtgacctttggaaacagcgagaagccagagaccatgacctgccgcctgagcaacaaccagcgctacctgttcctggatggagacagccactatgaaattgaaattgtgcacatcagcacagtgcagatcctgacagagggcttccccccaggcggcggcaatgcccgggccaccggcatgttcctgcagtacacagtgcctggaacagaaggagtgacccagctgaagctgactgtggtggaggatgtgacagtgggccggcggcaggccgtggcctggctggtggccatgcacaaggccgccaagctgctgtatgagagccgggaccagtag

SEQ ID NO: 214554 - DNA, 705 bp, Artificial Sequence
  derived and/or modified sequence
atgagcagcgaggtgagcgcccggcgggacgccaagaagctggtgcgcagtcccagcggtctccggatggttcccgagcaccgtgccttcggaagtcccttcggtcttgaggagccccagtgggttcccgacaaggaatgtcgcaggtgcatgcagtgtgatgcaaagttcgactttctaacacggaaacaccactgcaggagatgtgggaagtgtttctgcgatcgctgctgttcgcagaaggtgcccctgcgaagaatgtgtttcgtggacccagtacggcagtgcgccgaatgcgccctcgtttcgctgaaagaggcagagttttacgacaagcaattaaaggtgctcctatcgggagcaacctttctggtaactttcggcaacagtgagaaaccagagacgatgacctgcaggctgtctaacaaccagaggtacctgtttctggacggcgactcgcactacgaaattgaaatcgtacacatctctacagtgcaaatcctgactgagggtttccctccaggaggcgggaatgcccgggcaactgggatgttcctgcagtacacagtgcccgggactgaaggcgttacacagctgaaactaactgttgtggaagacgtaacagtgggtcgcagacaggcagtagcctggctggtggctatgcacaaagcagccaagctcctttacgaatctcgagatcaatag

SEQ ID NO: 214555 - DNA, 705 bp, Artificial Sequence
  derived and/or modified sequence
atgagctctgaagtgtctgcccgtcgagacgccaagaaacttgtgagaagtcctagtggcctcagaatggtgcctgagcatcgagcatttggctctccgttcggactggaggaacctcagtgggtgccagataaggagtgccgtagatgcatgcaatgtgacgccaaatttgatttcctgacccgaaagcatcattgtaggagatgcggaaaatgcttttgtgacagatgctgctctcagaaggtccccttgagacggatgtgtttcgtggaccccgtaagacagtgtgctgagtgtgcattggtttctttaaaggaggccgaattttatgataaacagcttaaggtgctcctctcaggcgcaacctttctcgtcacctttggcaacagtgagaaacccgaaacaatgacctgtagattgtccaataatcagcgatacctgtttctggacggcgattcgcattacgagatagaaattgtacacattagcaccgtgcaaatcctgaccgagggattcccccctggaggtggtaacgctagggccaccggaatgttcctgcaatatacagtgccgggaacagagggagttacacagctcaaactgactgtggtggaagacgtgacagtggggaggcggcaggccgtggcctggctggtggcgatgcacaaggccgcaaagctcctgtacgagagcagagatcagtag

SEQ ID NO: 214556 - DNA, 1383 bp, Artificial Sequence
  derived and/or modified sequence
gcggggccgctggccgagaggctgaggcggcgtcatgtcctccgaggtgtccgcgcgccgcgacgccaagaagctggtgcgctccccgagcggcctgcgcatggtgcccgaacaccgcgccttcggaagcccgttcggcctggaggagccgcagtgggtcccggacaaggagtgtcggagatgtatgcagtgtgacgccaagtttgactttctcaccagaaagcaccactgtcgccgctgcgggaagtgcttctgcgacaggtgctgcagccagaaggtgccgctgcggcgcatgtgctttgtggaccccgtgcggcagtgcgcggagtgcgccctcgtgtccctcaaggaggcggagttctacgacaagcagctcaaagtgctcctgagcggagccaccttcctcgtcacgtttggaaactcagagaaacctgaaactatgacttgtcgtctttccaataaccagagatacttgtttctggatggagacagccactatgaaatcgaaattgtacacatttccaccgtgcagatcctcacagaaggcttccctcctggaggaggcaacgcacgggccacaggcatgttcctgcagtatacagtgccggggacggagggtgtgacccagctgaagctgacagtggtggaggacgtgactgtgggcaggaggcaggcggtggcgtggctagtggccatgcacaaggctgccaagctcctctatgaatctcgggaccagtaactctacgtggggctgagcttggagtacgtgtggtcaccaggactgagtcgcttggaacagcagagcctgctccttgcgtaccacagggattaatcctgcttgtgctgggaaatgcaactcactcatgtatttggagaaacaggagtgttcacttatctagtgcaatatgttcacagtttattaatgctttaaacagcttcatgttttagaatttgtgtattgtcaatacttaattgggggtgggagagactgagctacactactgctaaactatttttagcataatatataccatttttatgagttcgcaggtctactagaaggttctggcccatcaatattcatttcatttaattcttccacagaaccagtttgggcagtaggaactcaggcttctggtctgcagtggagcctgttcgcctctaatagccagtttacagcacttgccttagcctgtttcacagacttgtccacttaccttgtcactaatttggggcttctgggctgtgagtgatcctttgatacttcaccaaggggaacgtgggggctttgtgttttgtacttttcactcactatttcactttattaagatgactgtacagcaatttgtatataaagcttatgattaaaaactattttgaaca

SEQ ID NO: 214557 - protein, 881 aa, Artificial Sequence
  derived and/or modified sequence
MAADKGPAAGPRSRAAMAQWRKKKGLRKRRGAASQARGSDSEDGEFEIQAEDDARARKLGPGRPLPTFPTSECTSDVEPDTREMVRAQNKKKKKSGGFQSMGLSYPVFKGIMKKGYKVPTPIQRKTIPVILDGKDVVAMARTGSGKTACFLLPMFERLKTHSAQTGARALILSPTRELALQTLKFTKELGKFTGLKTALILGGDRMEDQFAALHENPDIIIATPGRLVHVAVEMSLKLQSVEYVVFDEADRLFEMGFAEQLQEIIARLPGGHQTVLFSATLPKLLVEFARAGLTEPVLIRLDVDTKLNEQLKTSFFLVREDTKAAVLLHLLHNVVRPQDQTVVFVATKHHAEYLTELLTTQRVSCAHIYSALDPTARKINLAKFTLGKCSTLIVTDLAARGLDIPLLDNVINYSFPAKGKLFLHRVGRVARAGRSGTAYSLVAPDEIPYLLDLHLFLGRSLTLARPLKEPSGVAGVDGMLGRVPQSVVDEEDSGLQSTLEASLELRGLARVADNAQQQYVRSRPAPSPESIKRAKEMDLVGLGLHPLFSSRFEEEELQRLRLVDSIKNYRSRATIFEINASSRDLCSQVMRAKRQKDRKAIARFQQGQQGRQEQQEGPVGPAPSRPALQEKQPEKEEEEEAGESVEDIFSEVVGRKRQRSGPNRGAKRRREEARQRDQEFYIPYRPKDFDSERGLSISGEGGAFEQQAAGAVLDLMGDEAQNLTRGRQQLKWDRKKKRFVGQSGQEDKKKIKTESGRYISSSYKRDLYQKWKQKQKIDDRDSDEEGASDRRGPERRGGKRDRGQGASRPHAPGTPAGRVRPELKTKQQILKQRRRAQKLHFLQRGGLKQLSARNRRRVQELQQGAFGRGARSKKGKMRKRM

SEQ ID NO: 214558 - DNA, 2646 bp, Artificial Sequence
  derived and/or modified sequence
atggccgcagataaggggccggccgccggccctagatcgagggccgccatggctcagtggagaaagaaaaaagggctgcgaaagaggcggggcgctgccagtcaggcccgcggaagcgactcggaggatggcgaattcgaaattcaggctgaggatgacgcacgcgcacgtaagctcggacctggcaggccgctgccaacatttcctacctccgagtgcactagcgatgtggaacccgacactagggagatggtgagggcccaaaacaagaaaaaaaagaagagcgggggctttcagagcatggggctgagctacccagtttttaaaggaattatgaaaaaaggctacaaggtccccacaccaatccagaggaagactatacctgtgatccttgatggcaaggatgtagttgcgatggcacgcacgggaagcgggaaaaccgcatgtttcctgctccccatgttcgagcgtcttaagactcactccgctcagacgggagcgagggcgctcatacttagccctacgcgagaacttgcgctgcagaccttaaagttcactaaggagcttggaaagtttacaggccttaagacggcacttatccttgggggagataggatggaggaccaattcgcagctctacatgaaaatcccgacattattattgccactccagggcgtctggtccatgtggccgtggaaatgtctctgaagcttcagtcggtggaatatgtcgtatttgatgaagccgaccggctttttgagatggggttcgcagagcaactccaggaaattatcgcccgattgcctggcggccatcagacagtgttattctcagccactctgccaaagcttcttgtagaattcgccagggctggattgactgagcccgttctcattcggctcgacgtcgatacgaagctcaatgagcaactgaagacatcattcttcctggtgcgtgaagacacaaaggccgctgttctcctgcatcttctgcataacgtggtacgtccccaggatcagacagttgtgttcgtggccactaagcatcacgccgagtacctgaccgagctcctgactactcagagagtctcttgcgcccatatctattctgccctcgatcccacggctcggaagataaatctggcaaaattcactctgggaaaatgttcgactttgatagtgacagacctggccgctcgggggctcgatatcccgctcctggacaacgtgatcaactatagctttcctgccaagggcaaattatttctgcatcgggtgggccgagtggccagagccggtcgtagcggaactgcctatagcctcgtcgcaccagacgagatcccctatctcctggatctccatctgttcttaggccgcagtctgacgctggctcgcccactaaaggagcctagcggggtggcgggggtggatggtatgctcggcagggtgccacaatccgttgttgacgaagaggacagtggcttgcagtcgactcttgaagccagtctcgaactgagaggtctggcaagggtcgctgacaatgctcagcagcagtatgtccgctccaggccggcccccagtcccgaatccataaagcgcgccaaggagatggatctggtgggtctgggccttcaccctttattctcatcaaggttcgaggaagaggaactccagcgtttaagactcgtggactctataaaaaattatcgtagtcgcgccaccatcttcgaaatcaacgcaagctctagagacctatgctcacaggtgatgagagccaagcgccagaaagaccgcaaagctattgcacgatttcaacagggacagcagggccgacaggagcaacaggaagggccagtgggcccagctccctctcgacccgccctacaagagaaacagcccgaaaaggaggaggaggaggaggctggggaaagcgtcgaagacattttctctgaagtggttggacgcaagcgccagcgctccggaccaaatcggggagccaagcggcgtagagaggaggcccgccagagggatcaagagttttacatcccataccgccccaaggattttgactctgagagaggcctgtctatctccggagaaggtggtgctttcgagcaacaggctgccggcgctgtgctggacctgatgggtgacgaggcccaaaacctgacccgcggacggcagcagttgaaatgggatcggaagaagaagcgtttcgtcggccagtcagggcaggaggataagaagaaaatcaagacagaaagcggccgatacatttcctcctcttacaagcgtgacctgtaccagaaatggaagcagaagcaaaaaatcgacgatcgcgattccgacgaggagggggcttcagatcgtcggggccctgagcgaagaggcggaaagagggacagagggcagggcgccagcaggccacatgctcccggaaccccagcgggtagagttaggccagagctcaaaacaaagcagcagattctgaagcaacgcagacgggcacagaagttgcactttctccagcgcgggggcctcaaacagctgtccgcccgcaatcgcaggcgtgtacaggagctccagcagggcgcttttggcaggggggcgagaagcaaaaaaggtaagatgcgcaagcgtatgtag

SEQ ID NO: 214559 - DNA, 2646 bp, Artificial Sequence
  derived and/or modified sequence
atggctgctgacaagggccctgctgctggccccaggagcagagctgccatggcccagtggaggaagaagaagggcctgaggaagagaagaggagctgccagccaggcccggggcagtgacagtgaagatggagaatttgagatccaggctgaagatgatgcccgggccaggaagctgggccctggccggcccctgcccaccttccccaccagcgagtgcaccagtgatgtggagccagacacccgggagatggtgcgggcccagaacaagaagaagaagaagagcggcggcttccagagcatgggcctgagctaccctgtgttcaagggcatcatgaagaagggctacaaggtgcccacccccatccagaggaagaccatccctgtgatcctggatggcaaggatgtggtggccatggccaggacaggcagcggcaagacagcctgcttcctgctgcccatgtttgagcggctgaagacccacagcgcccagacaggagcccgggccctgatcctgagccccacccgggagctggccctgcagaccctgaagttcaccaaggagctgggcaagttcaccggcctgaagacagccctgatcctgggcggggacaggatggaggaccagtttgctgccctgcatgaaaatccagacatcatcatcgccaccccaggccgcctggtgcacgtggccgtggagatgagcctgaagctgcagagcgtggagtatgtggtgtttgatgaagctgaccggctgtttgagatgggctttgctgagcagctgcaggagatcatcgcccggctgcccggcggccaccagacagtgctcttcagcgccaccctgcccaagctgctggtggagtttgcccgggccggcctgacagagcctgtgctgatccggctggatgtggacaccaagctgaatgagcagctgaagaccagcttcttcctggtgcgggaggacaccaaggctgctgtgctgctgcacctgctgcacaacgtggtgcggccccaggaccagacagtggtgtttgtggccaccaagcaccacgccgagtacctgacagagctgctgaccacccagagggtgtcctgtgcccacatctacagcgccctggaccccacagccaggaagatcaacctggccaagttcaccctgggcaagtgcagcaccctgattgtgacagacctggccgcccggggcctggacatccccctgctggacaacgtcatcaactacagcttccctgccaagggcaagctgttcctgcaccgggtgggccgggtggcccgggccggccgctctggaacagcctacagcctggtggccccagatgagatcccctacctgctggacctgcacctgttcctgggccgcagcctgaccctggcccggcccctgaaggagcccagcggcgtggccggcgtggatggcatgctgggccgggtgccccagagcgtggtggatgaagaagattctggcctgcagagcaccctggaggccagcctggagctgcggggcctggcccgggtggccgacaatgcccagcagcagtatgtgcgcagcaggcctgcccccagccctgagagcatcaagagggccaaggagatggacctggtgggcctgggcctgcaccccctcttcagcagcagatttgaggaggaggagctgcagaggctgcggctggtggacagcatcaagaactaccgcagccgggccaccatctttgagatcaatgccagcagccgggacctgtgcagccaggtgatgagggccaagaggcagaaggacaggaaggccatcgcccgcttccagcagggccagcagggccggcaggagcagcaggagggccctgtgggccctgcccccagcaggcctgccctgcaggagaagcagcctgagaaggaggaggaggaggaggccggggagagcgtggaggacatcttcagcgaggtggtgggcaggaagaggcagaggagcggccccaacagaggagccaagagaagaagagaggaggcccggcagagggaccaggagttctacatcccctaccggcccaaggactttgattctgagcggggcctgagcatcagcggggagggcggggcctttgagcagcaggccgccggggctgtgctggacctgatgggagatgaggcccagaacctgacccggggccggcagcagctgaagtgggacaggaagaagaagagatttgtgggccagagcggccaggaggacaagaagaagatcaagacagaaagtggccgctacatcagcagcagctacaagagggacctgtaccagaagtggaagcagaagcagaagattgatgaccgggacagtgatgaggagggcgccagtgaccggcggggccctgagaggagaggaggcaagagggaccggggccagggcgccagccggccccacgcccctggcaccccagctggccgggtgcggcctgagctgaagaccaagcagcagatcctgaagcagaggcggcgggcccagaagctgcacttcctgcagagaggaggcctgaagcagctgagcgccaggaacagaagaagagtgcaggagctgcagcagggcgccttcggccgcggggcccggagcaagaagggcaagatgaggaagaggatgtag

SEQ ID NO: 214560 - DNA, 2646 bp, Artificial Sequence
  derived and/or modified sequence
atggccgccgacaagggccccgccgccggcccccggagccgggccgcaatggcccagtggcggaagaagaaggggcttagaaagaggcgcggggcggcctcacaggccaggggcagcgattctgaggatggtgagtttgagatacaggcggaagatgacgctcgggctcgaaagctgggccctgggagaccactgcctacctttcccacatcggaatgtacgtcagatgtggaaccagatactagagaaatggttcgtgcgcagaataagaaaaaaaaaaagtcgggcggattccagagtatgggcctgagctatcctgtttttaaaggcattatgaaaaagggctacaaggtgcctacccctatccagcgtaaaaccattcccgtcattctggacggcaaagacgtggttgcaatggctcggacaggcagcgggaagacggcatgtttcctgcttcctatgtttgaacggctcaaaactcattccgcccagactggggccagagccctaatcttgtctcccacacgagagctggcactccagaccctgaagttcactaaagaactcggcaagtttacaggtcttaagacagctctgattctcggcggtgatagaatggaagaccagttcgcggctcttcacgagaatcctgacataattatagccactcccggccggttagtccatgttgcagtcgaaatgagtctaaagctccaaagtgtcgagtacgtcgtatttgacgaagcggaccgtctgtttgaaatgggattcgccgagcagcttcaggaaattatcgccagactgcccggaggtcaccagactgtcctcttttcagctacattaccaaagctcttggttgagttcgccagagctggactgacggaacccgtgcttattcggctggacgtagacaccaaactgaacgagcagctgaaaacgtccttttttctggtacgagaggacaccaaggccgcggtgctactgcatctgctacataacgttgttcggccgcaggatcagactgtcgttttcgtggctacaaagcaccacgcggaataccttactgaactgcttacaacccagcgcgtctcttgcgcacatatctattctgcactggacccaactgcccgcaagattaacctggctaagttcacgctgggaaagtgttcaactctaatcgttactgatctcgctgcgcgagggctcgacatcccactactggacaatgtgatcaattatagttttccagccaagggtaagttattcttgcatcgggtgggtagggtagcacgcgcagggcgcagcggcacagcctactcactggtggctcccgacgagattccatacctcctcgatcttcacctttttcttggtcgctctctaaccttagctagaccgttaaaggaaccttctggcgtggccggggttgacggcatgctcggtagggtcccacagtctgttgtagacgaggaggactctggcctgcaaagcactttagaagcaagcctcgaattaaggggacttgcacgggttgccgataatgcccagcagcagtatgtgaggtcacgccccgcaccctctccagaaagcattaaacgcgccaaggaaatggacttggtaggtttgggcctgcaccccctgttctccagtcggttcgaggaagaggagctacagcggctgcgactagttgacagtataaagaattatagatcaagagccacaatcttcgaaattaacgcaagttccagagacctgtgttcccaggtgatgagagctaaacgccagaaggacagaaaggcaatcgccagattccagcagggccaacaggggcgtcaggaacagcaagagggaccagttgggcccgctcctagccgacctgccttgcaggagaaacagcctgaaaaagaagaggaggaagaggccggcgaatctgtggaggacatcttttctgaagttgttggcaggaagaggcagcgcagcgggcctaaccggggcgcgaagcgacggagggaggaggcccgccaacgagaccaggaattttatatcccatatcgacccaaggacttcgattccgaacggggactctccatctccggcgaaggaggcgcttttgagcagcaggccgcgggagcagtcctggacctcatgggcgatgaagcccagaacctaacaaggggacgccagcaactgaagtgggatcgtaagaagaagcgcttcgtgggacagtctggacaggaagacaagaagaagattaagactgagtcaggtcggtacatttctagctcttataaacgagatttgtatcagaaatggaaacagaaacagaagatcgatgaccgggactctgatgaagagggagcttctgacagacgggggcctgagagacgcggcgggaagcgcgatagagggcagggagcgagccgaccccatgctccaggtacccctgcgggcagggtgcgcccagagctcaagacaaagcagcagatccttaagcagcggaggagggcacagaaactgcattttttacagagaggcggactgaagcagctgtccgctaggaataggcgcagagtccaggagctgcagcaaggagccttcggcaggggagcacggtccaagaagggaaagatgaggaagagaatgtag

SEQ ID NO: 214561 - DNA, 2646 bp, Artificial Sequence
  derived and/or modified sequence
atggcggctgataagggcccagctgccggtccacgttcccgagcggcaatggcccagtggaggaagaagaaaggccttaggaagcggcgtggcgctgcttcccaggcgcgaggctccgattccgaggacggcgaatttgaaatccaggctgaagatgatgctagggccagaaagctggggccagggagacctttacccaccttccctactagtgagtgcacttctgacgtcgaaccggatacgcgggagatggttcgagcccagaataagaagaagaaaaaaagcggcggtttccagtccatggggttgtcttaccctgtgttcaagggcatcatgaagaaggggtataaggtgcccacgcctatccagagaaaaactattcccgtaatcctggacggaaaagacgtagtggccatggcccgaaccggatcaggaaagaccgcctgcttcttattaccaatgttcgagcggctgaagacccactcggcacaaacaggcgcacgcgctctgatcttatctcccactcgggaactcgccctccaaaccttaaagttcaccaaagagctcggcaaatttactggactcaagactgcactaattcttggaggtgatcgaatggaagaccagtttgccgctctgcatgagaaccccgatatcataatcgcgactcccggtcgccttgtgcacgttgcggtagagatgtctttaaagctgcaaagtgttgaatacgtcgtgtttgacgaagcggatcggctcttcgagatggggttcgctgagcagctccaagagatcatcgcgagacttccagggggacaccagaccgtgttattttctgccaccctgcccaagctgctggtggagtttgctcgggcaggcctaactgagcctgtcttgattcgcttagatgtcgatactaagttaaacgagcagcttaagacttcttttttcctggtgagagaagataccaaggctgctgtcttgctgcatcttttgcacaacgtggtcaggccccaagaccaaaccgtcgttttcgtggcgacgaaacatcacgctgaatacctcaccgaactattgacaacccagcgcgtgagctgcgcccatatttattctgccttagaccctaccgctcgtaagatcaacctcgctaaatttactttagggaagtgctcgacacttatagtgaccgatctcgccgcaagagggttagacattccgttactcgataacgtgataaattattcgtttccggcaaaaggcaagctgtttttgcatcgagtgggtagggtggcacgcgctggcagatccggtactgcttattcccttgtggctcccgacgagattccttatctgctggatctgcaccttttcttgggacgtagtctcacccttgcccgacctttaaaagaaccttctggcgtggcaggcgtggatggaatgctgggacgcgtcccccagtccgtggtcgacgaggaggactcaggattacagtccacattggaagccagccttgaactgcgaggactggcgagagtggctgacaatgcccagcagcagtacgtgaggtcccgcccagctcccagtcctgagtcaatcaaaagggctaaggagatggatctggtgggcttaggactccaccccctgttctcatccagattcgaggaggaggagctgcagaggctgcgcctcgtagactcaatcaagaattatagaagccgagctacaatatttgagattaatgcctcgtccagggacttgtgcagccaagtgatgcgcgcaaaacggcagaaggatcggaaagccatcgcaaggttccagcagggacaacagggccgacaggaacagcaggagggcccagttggaccagccccatcaagaccagctttgcaagagaagcaacctgagaaggaagaggaggaagaagccggtgagtcagtagaagatattttcagtgaagtcgtcgggaggaaaagacagagaagtggacccaataggggagccaagagacgtagggaggaggccaggcagagggatcaggagttctacataccataccgaccgaaagactttgattctgagcggggtttatccattagcggagaaggtggggctttcgaacagcaggcagccggtgctgtcctggacctgatgggagacgaagcccagaatttaactcggggaagacaacaacttaaatgggacagaaagaagaagaggtttgtcggccagagcgggcaggaggacaaaaagaagataaagactgagagtggcaggtacattagcagttcttacaagagggacctctaccaaaaatggaagcaaaagcagaaaattgatgatcgagactctgacgaggaaggagcctcagacagacgcggacctgagagaaggggcggtaaaagagacagagggcagggagcaagccgaccacatgcgccaggtactccggcagggagagttcgaccagagctgaaaactaaacagcaaatcttaaagcagaggcgacgggcacagaagctgcattttttgcagcggggaggactgaagcagctgtccgcacgaaaccggcgtagagtccaagaacttcaacagggagcttttggcagaggagctaggtctaaaaaaggtaaaatgcgaaagagaatgtag

SEQ ID NO: 214562 - DNA, 2646 bp, Artificial Sequence
  derived and/or modified sequence
atggccgccgacaagggccccgccgccggccccagaagcagagccgccatggcccagtggagaaagaagaagggcctgagaaagagaagaggcgccgccagccaggccagaggcagcgacagcgaggacggcgagttcgagatccaggccgaggacgacgccagagccagaaagctgggccccggcagacccctgcccaccttccccaccagcgagtgcaccagcgacgtggagcccgacaccagagagatggtgagagcccagaacaagaagaagaagaagagcggcggcttccagagcatgggcctgagctaccccgtgttcaagggcatcatgaagaagggctacaaggtgcccacccccatccagagaaagaccatccccgtgatcctggacggcaaggacgtggtggccatggccagaaccggcagcggcaagaccgcctgcttcctgctgcccatgttcgagagactgaagacccacagcgcccagaccggcgccagagccctgatcctgagccccaccagagagctggccctgcagaccctgaagttcaccaaggagctgggcaagttcaccggcctgaagaccgccctgatcctgggcggcgacagaatggaggaccagttcgccgccctgcacgagaaccccgacatcatcatcgccacccccggcagactggtgcacgtggccgtggagatgagcctgaagctgcagagcgtggagtacgtggtgttcgacgaggccgacagactgttcgagatgggcttcgccgagcagctgcaggagatcatcgccagactgcccggcggccaccagaccgtgctgttcagcgccaccctgcccaagctgctggtggagttcgccagagccggcctgaccgagcccgtgctgatcagactggacgtggacaccaagctgaacgagcagctgaagaccagcttcttcctggtgagagaggacaccaaggccgccgtgctgctgcacctgctgcacaacgtggtgagaccccaggaccagaccgtggtgttcgtggccaccaagcaccacgccgagtacctgaccgagctgctgaccacccagagagtgagctgcgcccacatctacagcgccctggaccccaccgccagaaagatcaacctggccaagttcaccctgggcaagtgcagcaccctgatcgtgaccgacctggccgccagaggcctggacatccccctgctggacaacgtgatcaactacagcttccccgccaagggcaagctgttcctgcacagagtgggcagagtggccagagccggcagaagcggcaccgcctacagcctggtggcccccgacgagatcccctacctgctggacctgcacctgttcctgggcagaagcctgaccctggccagacccctgaaggagcccagcggcgtggccggcgtggacggcatgctgggcagagtgccccagagcgtggtggacgaggaggacagcggcctgcagagcaccctggaggccagcctggagctgagaggcctggccagagtggccgacaacgcccagcagcagtacgtgagaagcagacccgcccccagccccgagagcatcaagagagccaaggagatggacctggtgggcctgggcctgcaccccctgttcagcagcagattcgaggaggaggagctgcagagactgagactggtggacagcatcaagaactacagaagcagagccaccatcttcgagatcaacgccagcagcagagacctgtgcagccaggtgatgagagccaagagacagaaggacagaaaggccatcgccagattccagcagggccagcagggcagacaggagcagcaggagggccccgtgggccccgcccccagcagacccgccctgcaggagaagcagcccgagaaggaggaggaggaggaggccggcgagagcgtggaggacatcttcagcgaggtggtgggcagaaagagacagagaagcggccccaacagaggcgccaagagaagaagagaggaggccagacagagagaccaggagttctacatcccctacagacccaaggacttcgacagcgagagaggcctgagcatcagcggcgagggcggcgccttcgagcagcaggccgccggcgccgtgctggacctgatgggcgacgaggcccagaacctgaccagaggcagacagcagctgaagtgggacagaaagaagaagagattcgtgggccagagcggccaggaggacaagaagaagatcaagaccgagagcggcagatacatcagcagcagctacaagagagacctgtaccagaagtggaagcagaagcagaagatcgacgacagagacagcgacgaggagggcgccagcgacagaagaggccccgagagaagaggcggcaagagagacagaggccagggcgccagcagaccccacgcccccggcacccccgccggcagagtgagacccgagctgaagaccaagcagcagatcctgaagcagagaagaagagcccagaagctgcacttcctgcagagaggcggcctgaagcagctgagcgccagaaacagaagaagagtgcaggagctgcagcagggcgccttcggcagaggcgccagaagcaagaagggcaagatgagaaagagaatgtag

SEQ ID NO: 214563 - DNA, 4377 bp, Artificial Sequence
  derived and/or modified sequence
ccttctgcgttcccagcgcgcggcccgaatggcggccgacaagggcccggcggctggacctcggtcgcgagctgccatggcccagtggaggaagaagaaagggctccggaagcgccgaggcgcggcctcccaggcccgcggcagcgactcggaggacggcgagtttgagatccaggcggaagatgacgcccgggcccggaagctgggacctggaagacccctgcccaccttccccacctcggaatgcacctcggatgtggagccggacacccgggagatggtgcgtgcccagaacaagaagaagaagaagtctggaggcttccagtccatgggcctgagctacccggtgttcaaaggcatcatgaagaaggggtacaaggtgccaacacccatccagaggaagaccatcccggtgatcttggatggcaaggacgtggtggccatggcccggacgggcagtggcaagacagcctgcttcctcctcccaatgttcgagcggctcaagacccacagtgcccagaccggggcccgcgccctcatcctctcgccgacccgagagctggccctgcagaccctgaagttcactaaggagctaggcaagttcactggcctcaagactgccctgatcctgggtggagacaggatggaagaccagtttgcagccctgcacgaaaatcccgacataattattgccacgcccggacggttggtgcatgtggctgtggaaatgagcctgaagctgcagagtgtggaatacgtggtgttcgatgaagctgaccggctttttgaaatgggtttcgcagagcagctgcaggagatcatcgcccgcctccccgggggccaccagacggtgctgttctccgccacgctgcccaaactgctggtggaatttgcccgggctggcctcacggagcccgtgctcatccggcttgacgtggataccaagctcaacgagcagctgaagacctccttcttcctcgtgcgggaggacaccaaggctgccgtgctgctccacctgctgcacaacgtggtgcggccccaggaccagaccgtggtgtttgtggccacgaagcaccacgccgagtacctcactgagctgctgacgacccagcgggtgagctgcgcccacatctacagtgccctagacccgacagcccgcaagatcaatctcgccaaattcacgcttggcaagtgctccactctcattgtgactgacctggccgcccgaggcctggacatcccgctgctggacaatgtcatcaactacagcttccccgccaagggcaaactcttcctgcaccgcgtgggccgtgtggctcgggctggccgaagtggcacagcctactccttggtggcccctgatgaaatcccctacctgctggatctgcacctgttcctgggccgctccctcaccctcgcccgacccctcaaggagccctcaggtgtggccggtgtggatggcatgctgggtcgggtgccacagagtgtggtggacgaggaggacagtggtctgcagagcaccctggaggcatcgctggagctacggggcctggcccgcgttgctgataacgcccagcagcagtatgtgcgctcacgcccggcgccctcgcctgagtccatcaagagggccaaggagatggaccttgtggggctgggcctgcaccccctcttcagctcgcgttttgaggaggaggagctgcagcggctgaggctggtggacagcataaagaactaccgctcccgggcgactatctttgagatcaacgcctccagccgagacctgtgcagccaggtgatgcgcgccaagcggcagaaggaccgcaaggccatcgcccgcttccagcagggacagcaggggcggcaggagcagcaggagggcccagtgggcccagccccgagccgcccagcactgcaggagaagcagcctgagaaggaggaggaggaggaggcgggagagagtgtggaggacattttctcagaggtcgtgggccggaagcggcagcggtcaggacccaacaggggagccaagaggcggagggaggaggcccggcagcgggaccaggaattctacatcccctaccggcccaaggactttgacagcgagcggggcctgagcatcagcggggaagggggagcctttgagcagcaggcagctggcgctgtcctggacttgatgggggatgaagcccagaacctgacgaggggccggcagcagctcaagtgggaccgtaagaagaagcggtttgtgggacagtcaggacaggaagacaagaagaagattaagacagagagcggccgctacatcagcagctcctacaagcgagacctctatcagaagtggaaacagaaacagaaaattgatgatcgtgactcggacgaagaaggggcatctgaccggcgaggcccagagcgaagaggtgggaagcgagaccgtggccaaggtgcatcccggccccacgccccaggcacccctgcaggccgagtccgcccggaactcaagaccaagcagcagatcctgaagcagcggcgccgggcccagaagctgcacttcctgcagcgtggtggcctcaagcagctctctgcccgcaaccgccgccgcgtccaggagctgcagcagggcgccttcggccggggtgcccgctccaagaagggcaagatgcggaagaggatgtgaggaccaggacccagccccgtggctccttgattggccttagggtgggcatcagcagacgttcccgtgcaccactgtgtgcctggccctgtgctgggcactgggggcactccctgcaggagccatcatctgtgaaaaggagcactgtatggccacagaagggcagcagctgcgtcagcctaagacagagacatttgaacagggccttgaagggtgtgcaggagttcgccagcaaagccaggcaggccaagacttgagttggcaactcagctgctgctgcttccatgtgttctgggttcagaggtcatggctgcaccggtcagagccctgagtgcctcagggtttggcaatggaatttttaatgtaataaatctttattgagcactgctggtggccaggagtgcggtctacttggggaactggaatggagagacccaggtactaaaatcccagctaacgtggcagaggagttgcgggtctcctgagggtgagttctgctgccttgtccatttagcgatgaggaaagtgaagctcagagcacaaaccaggtgccagaggcgggagttggtcccccttcctcccactggacatggttgcagctgggagtgggctgggggaggggaacaggatgcccagcccagggggcaaggacacagctgctcccctctggctatgaagaggttaacgcggcccctccacacctggaggtcagaacctggcctgtcctctgtcttcttgccacccaccccctgtttgaggttctgagaaggtcaagggcagccccagcagctggattctcaggctgggcccctcacctggcagagtccatagtggagggggccttggtgatctctcatctagcatggaccctgttctgagacctgacaaagagttttttttcatgccccaaccaccctggcagggagggcctggtctgatctcattttagaggcagttgccccacacatagccccttgaccttcccatcacctcctcatcagggcctgcatttatggagtgcttgctatgtgcccctcatggcaggcccacagcactctgaacaggcacagccctcccatcttcccaatgaggaaacggattcaggaagagccactcagtccacaccccattggaaatgtgggccctcctatctcagggtctctcaggggttccctctcccgctgctcacctgtgtcagggctaggaggcaggggctgcaggctcagcctgacccaggccggccagcatggcagagaggtcctgcatgaacagcttcacctgggggggcccagcacgaagtcacatcccagccccagagtcactgtccagcccccacccctcaacacgcgggggaggccgaaaggtagggcggggactggagatcccctcattaaaagaacagtgatgatggtggttcccagaggtggtgactgagatcctaaaccgttctgggttttgaaagcctcaggccaaccttcccaactgctgcgtgagcagacaccttcacagcttcctcgctgctgtcacctgcactatccaattagtattttcatttacatcaatcagctttattttcttgtaactggatcagtcatattcattggtttgtgacctactcttatctccgtgggtggctctccttttgttttaattaacttctttatgaatatgaacttaataaataccatggatccattgtaaaaact

SEQ ID NO: 214564 - protein, 299 aa, Artificial Sequence
  derived and/or modified sequence
MELLSALSLGELALSFSRVPLFPVFDLSYFIVSILYLKYEPGAVELSRRHPIASWLCAMLHCFGSYILADLLLGEPLIDYFSNNSSILLASAVWYLIFFCPLDLFYKCVCFLPVKLIFVAMKEVVRVRKIAVGIHHAHHHYHHGWFVMIATGWVKGSGVALMSNFEQLLRGVWKPETNEILHMSFPTKASLYGAILFTLQQTRWLPVSKASLIFIFTLFMVSCKVFLTATHSHSSPFDALEGYICPVLFGSACGGDHHHDNHGGSHSGGGPGAQHSAMPAKSKEELSEGSRKKKAKKAD

SEQ ID NO: 214565 - DNA, 900 bp, Artificial Sequence
  derived and/or modified sequence
atggagctgctgagcgccctgagcctgggcgagctggccctgagcttcagcagagtgcccctgttccccgtgttcgacctgagctacttcatcgtgagcatcctgtacctgaagtacgagcccggcgccgtggagctgagcagaagacaccccatcgccagctggctgtgcgccatgctgcactgcttcggcagctacatcctggccgacctgctgctgggcgagcccctgatcgactacttcagcaacaacagcagcatcctgctggccagcgccgtgtggtacctgatcttcttctgccccctggacctgttctacaagtgcgtgtgcttcctgcccgtgaagctgatcttcgtggccatgaaggaggtggtgagagtgagaaagatcgccgtgggcatccaccacgcccaccaccactaccaccacggctggttcgtgatgatcgccaccggctgggtgaagggcagcggcgtggccctgatgagcaacttcgagcagctgctgagaggcgtgtggaagcccgagaccaacgagatcctgcacatgagcttccccaccaaggccagcctgtacggcgccatcctgttcaccctgcagcagaccagatggctgcccgtgagcaaggccagcctgatcttcatcttcaccctgttcatggtgagctgcaaggtgttcctgaccgccacccacagccacagcagccccttcgacgccctggagggctacatctgccccgtgctgttcggcagcgcctgcggcggcgaccaccaccacgacaaccacggcggcagccacagcggcggcggccccggcgcccagcacagcgccatgcccgccaagagcaaggaggagctgagcgagggcagcagaaagaagaaggccaagaaggccgactag

SEQ ID NO: 214566 - DNA, 900 bp, Artificial Sequence
  derived and/or modified sequence
atggaactcttgtcggctctgtccttgggagaactcgcgctgtctttctctcgggtgccattatttcccgtcttcgacctatcctattttatagtatcaattctgtatctcaaatacgagcccggtgccgtggagctgagccgcaggcaccctatcgcttcctggctgtgcgccatgctgcactgcttcggaagctatatcctggcagacctgcttctgggcgagcccctcattgattacttcagcaataatagcagcattctcctggcctctgcggtctggtacctgatcttcttttgtccacttgatctgttttacaaatgtgtctgttttctgcctgtcaagttgatcttcgttgccatgaaagaagtggtgcgggtacgaaagattgcagtcggaatccaccacgcgcaccaccactaccatcatggatggtttgtgatgatcgcgactggttgggttaagggctccggcgtagccctaatgtctaattttgaacagttgctgcgcggtgtttggaagcctgagactaatgaaatcttgcacatgagtttccctaccaaggccagcctttacggcgctatcctctttaccctgcagcagactagatggctaccagtatccaaagcctccctcatcttcatatttactttgtttatggtgtcatgtaaggtgtttctgactgccactcattcacactccagtccttttgatgcgctagagggctacatctgcccagtgctgttcggctccgcctgcggtggagatcaccatcacgataatcacggcggcagccattctggggggggcccaggcgcccagcattcagcaatgccagccaaatctaaagaagagctttcagaaggtagcagaaagaagaaagccaagaaggccgattag

SEQ ID NO: 214567 - DNA, 900 bp, Artificial Sequence
  derived and/or modified sequence
atggagctgctgagcgccctgagcctgggggagctggccctgtccttcagccgggtgcccctcttccctgtgtttgacctgagctacttcatcgtgtccatcctgtacctgaagtatgagcctggagctgtggagctgagccgccgccaccccatcgcctcctggctgtgtgccatgctgcactgcttcggcagctacatcctggccgacctgctgctgggggagcccctgattgactacttcagcaacaacagcagcatcctgctggccagcgctgtgtggtacctgatcttcttctgccccctggacctcttctacaagtgtgtgtgcttcctgcctgtgaagctgatctttgtggccatgaaggaggtggtgcgggtgaggaagattgctgtgggcatccaccacgcccaccaccactaccaccacggctggtttgtgatgattgccaccggctgggtgaagggcagcggcgtggccctgatgagcaactttgagcagctgctgcggggcgtgtggaagccagagaccaatgagatcctgcacatgtccttccccaccaaggccagcctgtatggagccatcctcttcaccctgcagcagacccgctggctgcctgtgtccaaggccagcctcatcttcatcttcaccctcttcatggtgtcctgcaaggtgttcctgacagccacccacagccacagcagcccctttgatgccctggagggctacatctgccctgtgctgtttggaagtgcctgtggcggggaccaccaccacgacaaccacggcggcagccacagcggcggcggccctggggcccagcacagcgccatgcctgccaagagcaaggaggagctgtctgagggcagcaggaagaagaaggccaagaaggctgactag

SEQ ID NO: 214568 - DNA, 900 bp, Artificial Sequence
  derived and/or modified sequence
atggagctgctgagcgccctgagcctgggcgagctggccctgagcttctccagagtccctctattcccagtgtttgacttatcttactttatcgtgtccatcctttacctgaaatacgaacctggcgctgtggagctttcacgccgacatccgattgcgtcctggttgtgtgccatgctgcattgcttcgggtcatatatccttgcagacctgctcctgggggagcctcttatagattacttctctaacaacagttcaatactgctggcatccgccgtgtggtacctcatattcttctgtcctcttgatttgttctataagtgtgtgtgttttctcccggttaagctgatctttgtcgcaatgaaggaagtggtcagggtgaggaagatcgcagtggggattcaccacgcacaccaccactatcatcatggttggtttgtcatgatcgctactgggtgggtcaagggctccggagtggctctaatgagcaacttcgagcaactgctgaggggggtctggaaacccgagaccaacgagatcctccacatgagctttcctacaaaagcctcgttatacggagctattttgtttacacttcagcagactcgatggctcccagtctctaaggcctcgctgatttttatctttactctgttcatggtgagctgtaaggtttttctgaccgccacacactcgcacagttcaccgttcgatgcgctagaagggtatatttgtcccgtcttatttggttctgcttgcggaggggaccatcatcacgacaaccacgggggtagccactcaggcggcggacctggcgctcagcacagcgctatgccagccaaatctaaggaggagctgtctgagggatctcggaagaagaaagctaagaaagccgattag

SEQ ID NO: 214569 - DNA, 900 bp, Artificial Sequence
  derived and/or modified sequence
atggaattactgagcgccctgtcgctcggagaattggccctctccttctctagggtgccactttttcccgtgttcgatctgtcgtactttatagtgtctatactctacctcaagtatgaacctggagcagttgaactgtctagacgacaccctatcgcttcctggctgtgtgccatgctgcattgttttggttcctacatactagccgacctcctcctaggcgagccattaattgattatttctcgaacaactcctccatcctgctggcaagcgctgtgtggtacctgatatttttttgtcccctggacctgttctataaatgtgtctgcttcctgcccgttaaactaattttcgtggctatgaaagaggtggtaagagttcgcaagatcgctgtgggtattcaccacgcccaccaccactaccaccacgggtggttcgtgatgatcgctacaggatgggtcaagggctctggagtggcacttatgtccaattttgaacagcttcttagaggggtatggaagccagagactaacgaaatcctccatatgagtttccctacgaaagcttcactctacggtgcaattctcttcacacttcagcaaacccgctggctccccgtgtctaaggctagtctgatcttcatctttaccctgttcatggtgagctgcaaggtgttcctcacagccacccacagccatagtagccccttcgacgccctcgaagggtacatttgtccagtcttgttcggaagcgcctgcggcggagaccaccatcacgacaaccatggcggatctcacagcggaggcggtcccggagctcaacactcagccatgccagcaaagtccaaagaagaactcagcgaaggctctagaaagaaaaaggctaaaaaggctgattag

SEQ ID NO: 214570 - DNA, 1623 bp, Artificial Sequence
  derived and/or modified sequence
agctgcgggggcgcagtcgccgggccgcgggcggcgggacggacgaggccggggccccgggtggcacccggcaggcgggcaggcgggcgccatggagctgctctcggcgctgagcctgggcgaactggcgctcagcttctcgcgggtgccgctcttccccgtcttcgacctcagttacttcatcgtctccatcctctacctcaagtatgagccaggagcagtcgaactgtcccggcgccaccccatcgcgtcctggctgtgcgccatgctgcattgcttcgggagctacatcctggctgatctgctccttggggagccactgatcgattacttcagcaacaactccagcatcctgctggcctcagctgtctggtacttgattttcttctgccccctggacctcttctacaagtgtgtctgcttcctgcctgtgaaactcatcttcgtggccatgaaggaggtggtgcgagtccgcaagatcgcggtgggcatccatcacgcccatcaccactaccaccacgggtggttcgtcatgattgcaactgggtgggtcaaaggttctggtgtcgccctcatgtccaactttgagcagctgctccgaggggtctggaagccagagaccaacgagatcctgcacatgtctttccccaccaaggccagcctgtatggagccatcctcttcaccctccagcagacccgctggctcccagtgtccaaagccagcctcatcttcatcttcaccttgttcatggtgtcctgtaaggtgtttctgacagccacccactcacacagctccccctttgatgccctggagggctacatctgccccgtgctgtttggttcggcctgcgggggtgaccatcaccacgacaaccatggtgggtcccacagcggtggtgggccaggagctcagcattcggccatgcccgccaagtccaaggaggagttgagcgagggctccaggaagaagaaggccaagaaggcggattagggggtggcccaaggggcaccggggagaggacccggacccaggaccctctgagctgggaggcttcctgcgctcagatctatcctttcctggccttgacttccccatctgcaaatcagggtcattggctcaccctccagggctgatgtgggggttgagatatggggatgaggatgaagaacttttgtagaaatcggggttccctctttctctctgccaggaccccatagagtcacagcttttggaggggttcacagaatcctggcagcagctccagtcaagaatgtcactggttggcatgatattcttagttgtatttttccttctttaaaattgcatcttgaccaggcacagtggctcatgcctataatcctagcactttgggaggccgaggcgggcagatcacctgaggtcaggagttcaagaccagcttggccaacatggtgaaaccccatctctaccaaaaatacaaaaattagccagacgtggtggtgcacgcctttaatcccagctactcgggaggctgaggcaggagaatcacatgaatccaggaggtggaggttgcagtgagctgagatcttcccactgcactccagcctggccaataagacctgtctccagcaagaccctgtctc

SEQ ID NO: 214571 - protein, 234 aa, Artificial Sequence
  derived and/or modified sequence
MPHRKERPSGSSLHTHGSTGTAEGGNMSRLSLTRSPVSPLAAQGIPLPAQLTKSNAPVHIDVGGHMYTSSLATLTKYPDSRISRLFNGTEPIVLDSLKQHYFIDRDGEIFRYVLSFLRTSKLLLPDDFKDFSLLYEEARYYQLQPMVRELERWQQEQEQRRRSRACDCLVVRVTPDLGERIALSGEKALIEEVFPETGDVMCNSVNAGWNQDPTHVIRFPLNGYCRLNSVQDVL

SEQ ID NO: 214572 - DNA, 705 bp, Artificial Sequence
  derived and/or modified sequence
atgccccacagaaaggagagacccagcggcagcagcctgcacacccacggcagcaccggcaccgccgagggcggcaacatgagcagactgagcctgaccagaagccccgtgagccccctggccgcccagggcatccccctgcccgcccagctgaccaagagcaacgcccccgtgcacatcgacgtgggcggccacatgtacaccagcagcctggccaccctgaccaagtaccccgacagcagaatcagcagactgttcaacggcaccgagcccatcgtgctggacagcctgaagcagcactacttcatcgacagagacggcgagatcttcagatacgtgctgagcttcctgagaaccagcaagctgctgctgcccgacgacttcaaggacttcagcctgctgtacgaggaggccagatactaccagctgcagcccatggtgagagagctggagagatggcagcaggagcaggagcagagaagaagaagcagagcctgcgactgcctggtggtgagagtgacccccgacctgggcgagagaatcgccctgagcggcgagaaggccctgatcgaggaggtgttccccgagaccggcgacgtgatgtgcaacagcgtgaacgccggctggaaccaggaccccacccacgtgatcagattccccctgaacggctactgcagactgaacagcgtgcaggacgtgctgtag

SEQ ID NO: 214573 - DNA, 705 bp, Artificial Sequence
  derived and/or modified sequence
atgccgcaccgcaaggagcgcccgagcgggtctagtctgcacactcatgggtccacaggaaccgcagagggtggcaacatgtcgcgcctgtccttgacacgcagtcctgtgagccctttggccgcccagggtataccacttcccgctcagctcactaaaagtaacgccccagtccatatagatgtgggagggcacatgtatacctcatccctggcaactctaaccaagtatcccgatagtcgcatttctaggctcttcaatgggactgaacccatagtcctggatagtttaaagcagcactactttatagatagagacggtgaaattttccggtacgtgctctcctttttacggactagcaaactactgctgcctgacgacttcaaagatttttcactgctttatgaggaggcaaggtattatcagctgcagcctatggtccgtgagctggaacggtggcaacaggagcaggagcagcgtcgtcgttcaagagcatgcgattgcctagtagtgcgggtcactcctgatctgggagaacgcattgcactctcaggagagaaggcgctcattgaagaagtgttccctgaaactggagacgtcatgtgcaactctgtgaatgcaggatggaatcaggatccaacccacgtgatccgttttccccttaacgggtactgtcggctgaattccgtgcaagatgttctgtag

SEQ ID NO: 214574 - DNA, 705 bp, Artificial Sequence
  derived and/or modified sequence
atgccccacaggaaggagcggcccagcggcagcagcctgcacacccacggcagcactggaacagctgagggcggcaacatgagccggctgagcctgaccaggagccctgtgagccccctggccgcccagggcatccccctgcctgcccagctgaccaagagcaatgcccctgtgcacattgatgtgggcggccacatgtacaccagcagcctggccaccctgaccaagtacccagacagccgcatcagccgcctcttcaatggaacagagcccatcgtgctggacagcctgaagcagcactacttcatcgacagagatggagagatcttccgctacgtgctgtccttcctgcggaccagcaagctgctgctgcctgatgacttcaaggacttcagcctgctgtatgaggaggcccgctactaccagctgcagcccatggtgcgggagctggagcgctggcagcaggagcaggagcagaggagaagaagccgggcctgtgactgcctggtggtgcgggtgaccccagacctgggggagagaattgccctgagcggggagaaggccctgattgaggaggtgtttcctgagactggagatgtgatgtgcaacagcgtgaatgccggctggaaccaggaccccacccacgtgatccgcttccccctgaatggctactgccgcctgaacagcgtgcaggatgtgctgtag

SEQ ID NO: 214575 - DNA, 705 bp, Artificial Sequence
  derived and/or modified sequence
atgccccaccggaaggagcggcccagcggcagcagcctgcacacccacggtagtacagggacagccgagggtggcaacatgagcaggctcagcctgactcgttcgccagtgagtccactagccgcccagggaattcctctcccggcccagctgaccaaatcaaacgcccccgttcacattgacgtggggggccacatgtacaccagcagtcttgctacacttaccaagtatcccgattccaggatttcaagactgtttaacggaaccgagcccattgttttagatagtctgaaacagcattattttattgacagggatggcgagatcttcagatacgtactgtcgttccttaggaccagtaaactgctgctgcctgatgatttcaaggacttttcattgctctacgaagaggccagatactaccagcttcagcctatggtacgcgagttagagaggtggcagcaggaacaggagcagaggcggaggtctcgcgcatgcgactgtctggttgtgagagtcactccagaccttggagagaggatcgcccttagcggagaaaaggcgctgatcgaagaagtctttcctgagacgggtgatgttatgtgtaattctgtgaacgcaggatggaatcaggaccctacccacgttattcgattcccactgaatggctactgtcggctcaattccgtccaggatgtgctttag

SEQ ID NO: 214576 - DNA, 4934 bp, Artificial Sequence
  derived and/or modified sequence
gggggcgagagagaaagtaactccaggacgagaccggagcgacccgcgcagcgagcataggcggcgaagctgcgcccggcgcccgagaccggcagctgcgtggggcgggggctgcgcccgagcccgatctgccggctccgagcagtggtctcggaaagagggtcgtggtcccgcacggatgcgcttgttgggagaaaccttggagattcacggcaaggcgtaaagcctggggcttccaacgatactctgggcagggatggaagcctagatgcctcaccgcaaggagcggccgagcgggtcctcgcttcacacacacggcagcaccggcaccgcggagggaggaaacatgtcccggctgtctctcacccggtcgcctgtgtctcccctggctgcccagggcatccccctgccagcccagctcaccaagtccaatgcacctgtgcacatcgatgtgggcggccacatgtacaccagcagcctggccacgctcaccaagtaccctgactccaggataagccgcctcttcaatggcactgaacccatcgtcctggacagtttgaagcaacattatttcattgaccgggatggggagattttccgctacgtcctgagcttcctgcggacgtccaagctgctgcttccggatgactttaaggacttcagtctgctgtacgaggaggcgcgctactatcagctccagcccatggtgcgcgagctggagcgctggcagcaggagcaggagcagcggcgccgcagccgggcctgtgactgcctggtggtgcgcgtcacgcccgacttgggcgagcggatcgcactcagcggcgagaaggccctcatcgaggaggtcttccccgagaccggagacgtcatgtgcaactccgtcaacgccggctggaaccaggaccccacgcacgtcatccgcttcccgctcaatggctactgccggctcaactcggtacaggatgttctataaaaatggcccagagtattttcaacaaagcgtgcttcatttgacacccagagtctgactttggattcgaactaaacccaggcaacaggcgaggcaggacagaggctgagtggaaaggtggtctggagccccttccctctccctgctgacctgggagtcgcaggcacccaccagctgccaagagaatccctggaccggctcttcctggatgggtccaagaattggacagctcagatggagtgagggcctattttccaacagctcttcgcagacccaagagcttggcacatttccgggttagggtggaatgggctttgcagggaagagggccccctgtgcacgcattccacagcctgtcggtcagaacttgctagttgcaggagacgggtgttacacgcagtcatcagacctcaccctcacagaggcacaaacccacatagttgtggacgcctgcagagactcaaatattgagaggacttctcctttttctctccctccagagctcccacgagctgatgcacccccaggcttcaaaccacctggaatgcacagctcagggaagctggtggatgcctagaggctgaaggacagggaactctccattattggggcaggactcagggaggacacttggggccatgtgtctggagagagggcataggttacaccctacagaataaagaagggacccaaagcctctttttgcctcccggaatcaaggccctgagggcagcaggatggtggcctgggtggggtcgtccaactaggtttgctaacctgaggggtcactgggcctggccacttctgtccctctggtggtggaacccagcacgtggttctgtagggacctttgtcagtgagcaagactgagatcgtcacaggagaaggtgcccttgctggctgccccagcaggcacccacctccctgccaggccaagccaggtgtcctcttgcagcttggccttgatgacctctgtttcttcctgggcaggtcctggagcggctgttccagaggggtttcagcgtggctgcgtcctgtgggggcggtgtggactcctcccagttcagcgagtatgtgctttgccgggaggagcggcggccgcagcccacccccactgctgttcgaatcaagcaggaacccctggactaggccctgcttcagtgcccacctgggcccccccagggacctggaaacagtgctggggagttctgcctgtgtatacttggccgtgggcatgagaccgagggtgaggctggagggtccaaagctggcccagcgagcaccagggtcccaggtgtcatggcaacagaacgtgggatgctggaggcatgcctgcagaaggactgttgatgcgacccaaagatacagcggtgggatctctgctgccagctctcccagcccctcagcttcgcagcctggcgcagcatcctctgaggccccggggcctgttggggcggggttggaagagccgtctgcagctacttcagaggagctgtttatccctctccacgcggggcagactctggcgggtctcctagcgtccgagagatggcttattttctacagtatttaaaatggatgcagccctaactgcaaaagtcagagaggctgacaaggaccaatgcttctttatctggtgctcagttctcagtcagacgtgcagcatggctgcagggtggaccagctgcctggcattcaggcccagatgcctgcagggctggggctctcgggacagatgcagggatgtgtgctgcagggctgctgggaggagagtggtgggggcctgagggctgagtgattctgtaaccacctgagaccttcacgtttgctgccgttgggggctcaggctgcactccccgggtcacctgacctgctgcccaggggcttccagtcctgtctgtgtggactggcacctgggctgctggagaagtctcctcccgttcggaccagcctcagggctgcacgttacctcaggaatgggccccaccatgaaggggcccatctgtcagcagcgtcttctaggtccccagctcagggagccatccccagctccagttttctcatgcgaatatgcacagttttaattcacgttgttacactagcctgccgatgagacccagacacaggcagacctggcgctcttgacccctgattccagtgaggactggccctgaggagtccttgcagacctgctgcctcccccacgacaggcccaaagatggaccccccctggccttgtgacagctccccaagtgttctccggtggagaaactgcagaggactggtgggcggggctccccagccatcaccatcctgtgtacaatggctgtagacttgtatatggctcctttaatattgtaaagatgctgatgtacaattgtcgtgcatttgtgtgaacacattgcgttcccagtccatgccataaatgatgctctcaagcaaaagactggaggctctgtcctgtgcagaagcagcagccagactcccgcattcgatgttgtgcagggaggtttgggggcggaacggattcctcccttggatccttcagttcccatcgaggaataacccgcagcagtggtggaggaaggtcagtggctgggtcctgagcttggtgttatttattgcatttgggtgcctgtcccctcagggcagcacagattctgaattctgattcacagtccctagccagatgggaactgggaaagagacagaaggcgtctgggtgcttttgaaccctgtctcaaatgtttgggattttctctctcactattctttggttggggatgatgtcctctttagacccccacgtaatggtatgagaaggtggcaggcagtggctcagccagccagggggcaccaagtcatgcagccagcgtgagacctgcagttcacctaagcacagaacgagatctcagtatgcctccatgtaaacagattcacataggcctccaatttcaatgagaccttttgcattttttctcaaagcccttatgttctaacccatgagaaccattttacctgccctctaagggccaccagcttcgacctgcctcaggggacagcagcacagaccagtggctccctgtccaaggccgcagagcagacgccatcccactgtacaatcgaatttgctggacaaacttgataggtttctctgcttagcaacgagcctatagttagttggcacatctgcgttttggcatctgaggctcccatctgagtggaggagaaagtgttgtgtttattagcaggaagtcttgtgaaaacagctcgctgctgtgtatgtttatggatttttctgatataacagccagcatggttaccgagtggtagagattctcgaacattctcaaactctctttttgggtaaatgattgtgctaaaaataaaatttattaataaagaaggggaaaaaggagtaactctacctgactaaatgttactctaatttatttatttctttactaattaagtaaaaccaggaagtatgattttacatcaaccagagaatttctgaatttatagggaaacactatgtccccataatgatgctataattctaatatatctagtccccataaacagtaagtacaaattatcattcctttaaagcatttttacacttcctggaatgagtatattatcagcaatcttttgtcaaatgccagccgtataaatgttacttctgctctttgtaaacctcaaaactcattattcttgattataagcaactggacagaaccatgccaaagcttccccgtttcccaccaaacccctgccagtgagtgcagagaactcgcaaagccacagcaggcggtctcagccaccgtcccgctcacaggggcccaatgccaggtcacaacactaagaatatctttcaaaaaatgtgtcttttttttttttttttttaaagctactgcttgactgttccttagaataaataaaggatattttataaattaca

SEQ ID NO: 214577 - DNA, 705 bp, Artificial Sequence
  derived and/or modified sequence
atgccccaccggaaggaaagaccgagcggaagcagcctgcatacgcatggttccactgggaccgccgaaggagggaacatgtcccgcctctctctgactaggagccccgtgtcacctttggctgcacagggaataccccttccagcccagctgaccaagtccaacgctccagtgcacattgatgtgggaggacacatgtatacaagtagtctggcaaccctcacgaagtatccagacagtcgcatttctcgtcttttcaatggtactgaaccaattgtattagatagtctgaaacagcattattttatagacagggatggggagattttcaggtacgtgctcagttttctgcgcactagtaaacttctcctgccagacgattttaaagatttctcactgttgtatgaagaagcccgatattaccagttacagccgatggtcagggaactggaaaggtggcagcaggaacaggagcagaggagaaggtcacgagcttgcgattgccttgttgtgcgagttacgccagatctgggagagagaatcgcgctgtctggggaaaaagcactcattgaggaagtgttccctgagacgggcgatgtaatgtgtaactctgttaatgctggatggaaccaagaccctacccacgtgattagattccctctcaatggatactgcaggcttaactctgtgcaggatgtcctgtag

SEQ ID NO: 214578 - protein, 854 aa, Artificial Sequence
  derived and/or modified sequence
MASEGPREPESEGIKLSADVKPFVPRFAGLNVAWLESSEACVFPSSAATYYPFVQEPPVTEQKIYTEDMAFGASTFPPQYLSSEITLHPYAYSPYTLDSTQNVYSVPGSQYLYNQPSCYRGFQTVKHRNENTCPLPQEMKALFKKKTYDEKKTYDQQKFDSERADGTISSEIKSARGSHHLSIYAENSLKSDGYHKRTDRKSRIIAKNVSTSKPEFEFTTLDFPELQGAENNMSEIQKQPKWGPVHSVSTDISLLREVVKPAAVLSKGEIVVKNNPNESVTANAATNSPSCTRELSWTPMGYVVRQTLSTELSAAPKNVTSMINLKTIASSADPKNVSIPSSEALSSDPSYNKEKHIIHPTQKSKASQGSDLEQNEASRKNKKKKEKSTSKYEVLTVQEPPRIEDAEEFPNLAVASERRDRIETPKFQSKQQPQDNFKNNVKKSQLPVQLDLGGMLTALEKKQHSQHAKQSSKPVVVSVGAVPVLSKECASGERGRRMSQMKTPHNPLDSSAPLMKKGKQREIPKAKKPTSLKKIILKERQERKQRLQENAVSPAFTSDDTQDGESGGDDQFPEQAELSGPEGMDELISTPSVEDKSEEPPGTELQRDTEASHLAPNHTTFPKIHSRRFRDYCSQMLSKEVDACVTDLLKELVRFQDRMYQKDPVKAKTKRRLVLGLREVLKHLKLKKLKCVIISPNCEKIQSKGGLDDTLHTIIDYACEQNIPFVFALNRKALGRSLNKAVPVSVVGIFSYDGAQDQFHKMVELTVAARQAYKTMLENVQQELVGEPRPQAPPSLPTQGPSCPAEDGPPALKEKEEPHYIEIWKKHLEAYSGCTLELEESLEASTSQMMNLNL

SEQ ID NO: 214579 - protein, 860 aa, Artificial Sequence
  derived and/or modified sequence
PASRRPAAGLRDAASSAPRGMASEGPREPESEGIKLSADVKPFVPRFAGLNVAWLESSEACVFPSSAATYYPFVQEPPVTEQKIYTEDMAFGASTFPPQYLSSEITLHPYAYSPYTLDSTQNVYSVPGSQYLYNQPSCYRGFQTVKHRNENTCPLPQEMKALFKKKTYDEKKTYDQQKFDSERADGTISSEIKSARGSHHLSIYAENSLKSDGYHKRTDRKSRIIAKNVSTSKPEFEFTTLDFPELQGAENNMSEIQKQPKWGPVHSVSTDISLLREVVKPAAVLSKGEIVVKNNPNESVLMPLPILLHVQETLSTELSAAPKNVTSMINLKTIASSADPKNVSIPSSEALSSDPSYNKEKHIIHPTQKSKASQGSDLEQNEASRKNKKKKEKSTSKYEVLTVQEPPRIEDAEEFPNLAVASERRDRIETPKFQSKQQPQDNFKNNVKKSQLPVQLDLGGMLTALEKKQHSQHAKQSSKPVVVSVGAVPVLSKECASGERGRRMSQMKTPHNPLDSSAPLMKKGKQREIPKAKKPTSLKKIILKERQERKQRLQENAVSPAFTSDDTQDGESGGDDQFPEQAELSGPEGMDELISTPSVEDKSEEPPGTELQRDTEASHLAPNHTTFPKIHSRRFRDYCSQMLSKEVDACVTDLLKELVRFQDRMYQKDPVKAKTKRRLVLGLREVLKHLKLKKLKCVIISPNCEKIQSKGGLDDTLHTIIDYACEQNIPFVFALNRKALGRSLNKAVPVSVVGIFSYDGAQDQFHKMVELTVAARQAYKTMLENVQQELVGEPRPQAPPSLPTQGPSCPAEDGPPALKEKEEPHYIEIWKKHLEAYSGCTLELEESLEASTSQMMNLNL

SEQ ID NO: 214580 - DNA, 2565 bp, Artificial Sequence
  derived and/or modified sequence
atggcctcggaagggcctagggaaccagagtctgagggtatcaaactgagcgcagatgtcaagccattcgtcccgcgcttcgctgggctgaacgtggcctggctcgaaagctccgaagcatgtgtcttccccagcagcgctgctacctactaccccttcgtccaggagcctccagtgactgaacagaaaatttatacagaggatatggcatttggcgcatctactttcccgccccagtatctgtctagtgagattaccctccacccgtatgcctacagcccttacacactggacagcacccagaatgtctattcagtacctggtagtcagtatctgtataaccagcccagctgttacaggggctttcagactgtcaaacaccgtaacgagaatacatgtcctttacctcaggagatgaaggctctgtttaagaaaaagacctacgacgagaaaaaaacctacgaccaacagaagttcgacagcgagcgagcagatggaacaatctcctctgagatcaaaagcgcccggggctctcatcacttgtctatttatgccgaaaattcacttaaatctgacggttatcacaagcgtacagacaggaagtcccggatcattgctaagaatgtatcaacttccaaaccagaatttgagttcaccaccctggactttcccgagctgcagggggctgagaacaatatgtccgagattcaaaagcagccaaagtgggggccagttcatagcgtcagtaccgatattagtctgctgcgcgaagtagtgaagccagctgcagttctgagcaagggcgagatcgtggttaagaacaaccccaacgaaagtgtgactgctaacgccgcaactaattccccctcctgcaccagagaactgtcgtggaccccaatgggctacgtagtgagacagaccttatcaaccgagctttctgcagccccaaagaatgtgacgtccatgataaacctgaagaccatcgcctcatccgccgatcctaagaatgtgtctattcctagttcagaggcgctttctagtgacccatcttacaacaaagaaaaacacatcatacaccctacccagaagtcaaaagcctcacagggctccgacctggagcagaatgaggctagccgcaagaacaaaaagaagaaagagaagtcaacctccaaatacgaagtccttacagtacaagagcctcctcgaatagaggacgcagaggaattccctaacctcgctgtcgccagtgagcgtcgagatcgaatcgagactccgaaatttcagtccaaacaacagccgcaggacaacttcaaaaacaacgttaaaaagagccaactgccagtgcagcttgacctgggcggtatgctgaccgcactagagaagaagcagcacagccagcacgccaagcagagttcaaagccagtcgtggtcagcgtaggcgcagtgccggtgttgtctaaggaatgcgccagcggtgagagaggcaggagaatgtcgcaaatgaaaacaccgcataaccccctggactcaagcgcacccctcatgaaaaagggaaagcagcgtgaaattcccaaagccaagaagcctacctcactcaagaaaataatcctgaaggagagacaggagcgaaaacagcggctgcaggagaacgctgtctcccccgcttttacatcagatgatacccaagatggtgaaagcggtggcgatgatcaattcccagagcaggccgagttgagcgggcccgaggggatggacgaactgattagcacaccatctgtagaggataaatcggaggagccccccggcacagagctacagagggacacagaagcctcgcacttggctcccaatcacaccaccttccctaagatccattcaaggcgcttcagggattactgcagccaaatgctgtctaaggaggtggacgcctgtgtcactgacctgcttaaagagctagtgagatttcaggatagaatgtatcagaaggaccctgtcaaagctaagactaaacgccggcttgtgctgggccttagggaagtcctcaagcacctgaagctgaagaaactgaagtgcgtaattatcagtcctaactgcgagaagatccagtcgaagggcgggctggatgatacactgcataccataatcgattatgcctgtgagcagaatatcccttttgtcttcgccctcaacaggaaggcgttggggaggagcttgaacaaggcggttcctgtgagcgtggtgggaatattctcatatgacggggcgcaggatcagtttcataaaatggttgaactcactgttgcagcccgacaggcttacaagactatgttggaaaatgttcagcaagaacttgtgggcgagccacggccccaggctccaccctccctcccaacacagggaccctcttgccccgcagaggacggaccgccggctctgaaggagaaggaggagcctcattacatcgaaatttggaagaaacatctggaggcctattcaggctgcaccttggagttagaggagtcccttgaagctagcacaagtcagatgatgaacttaaacctgtag

SEQ ID NO: 214581 - DNA, 2583 bp, Artificial Sequence
  derived and/or modified sequence
ccggccagtaggcgaccggcagccggcctacgagatgccgctagttctgcccctcgggggatggcctctgaaggcccaagggagcccgagtcagaaggaatcaagctctccgctgatgtcaaaccattcgtgccccgttttgcaggcctgaacgttgcctggctggagagcagcgaagcctgtgtgttccctagctccgccgccacttattatcctttcgtgcaggaacctcccgtgaccgagcaaaagatttacactgaggacatggccttcggtgcctctaccttcccaccacaatatctcagctcagagattacgttacatccttatgcatacagcccttataccctggactccacgcagaacgtatattcggtgcccggctcacagtacctctacaaccaaccctcatgctaccgaggcttccagactgtgaagcacaggaatgagaacacatgccctctgcctcaggaaatgaaggcactgtttaaaaagaagacttacgatgagaagaaaacgtatgatcaacaaaagttcgattctgaacgggccgatggcactattagttcagagataaaaagtgccagaggcagccatcacctgtctatctacgcagaaaacagtttaaagtctgacggataccataagcgaacggatagaaagagtaggatcattgctaagaatgtttctacgtccaagcctgagttcgagtttaccaccctggatttccccgaactacagggcgccgaaaacaacatgtcagagatccagaagcaacctaaatggggccctgtgcattctgtgtcgaccgatattagccttctgcgggaagtcgtcaagcctgcagctgtcctctctaaaggagaaatcgtggtgaaaaataatcccaatgagtccgtcctgatgccgttaccaatacttttacatgtgcaggagactttatctactgagctcagcgcagctcctaaaaacgtgacctctatgatcaacctcaaaacaatagccagctctgccgatcccaaaaacgtgagcattccctcctcagaagctttgtctagcgatcccagctacaataaggagaagcatataattcacccgacccagaagagcaaagcctcacagggatctgatctcgaacaaaatgaggcctctagaaagaataagaagaagaaggaaaagtccacttcaaagtacgaggtgcttacggttcaagagcctcccaggattgaagatgctgaggagtttccaaacctcgccgtggctagcgaacggcgggaccgcattgaaacacctaagttccagtctaagcagcagcctcaggacaattttaagaataacgttaagaagagccagctgccggttcagttggacttaggcgggatgttgacggcactggagaagaagcagcactcccagcatgcaaagcagtcctctaaaccagttgtagtgagcgtgggcgctgttcccgtgctatcaaaagaatgtgcctcaggagagagggggagacgaatgagccagatgaagaccccgcataacccgctcgattcttccgccccattaatgaagaagggaaagcagagagaaatcccgaaagctaagaaacctactagtctcaaaaaaattatcctaaaggaacgtcaggaacggaaacagaggctccaagagaacgccgtttcgcccgcatttacctccgacgatacacaggacggagagtccggaggcgacgaccaatttcccgagcaggcagaactgagcggacctgaggggatggacgaattaatttccaccccgtctgttgaggacaagtccgaagagccgcctggtaccgaactgcagagggatacagaagcctcccatctcgccccaaatcacactacattcccaaaaatacattcccgaagatttagggattattgcagccagatgctgagcaaggaggtggatgcatgcgtgacagatttgctgaaggagctggtgagattccaggacagaatgtatcagaaggaccctgtcaaggcaaaaaccaaacgccggcttgtactggggctgcgtgaggtgctgaaacacctcaaattaaagaaattaaagtgtgtgataattagtccgaactgtgaaaaaattcaatccaaaggaggcctggacgatacgttacacacgatcattgactacgcctgtgagcagaatatccccttcgtttttgctctgaatcggaaggcgctggggcggtctcttaacaaggctgtacccgtctccgttgtcggtatcttcagctacgacggagcccaggaccaatttcataaaatggtcgagcttactgtggctgctagacaggcttacaaaactatgttagagaacgtccagcaggaacttgtgggggaacccagacctcaggcgccaccctccctacctacacaggggcctagctgccctgccgaggacgggcctccagcactcaaagagaaggaggagccccattacatcgagatatggaaaaaacaccttgaggcatactcaggatgtactctcgagctcgaggaatcactggaggcatccacctctcagatgatgaatctgaacctgtag

SEQ ID NO: 214582 - DNA, 2565 bp, Artificial Sequence
  derived and/or modified sequence
atggccagcgagggcccccgggagcctgagagcgagggcatcaagctgtctgcagatgtgaagccctttgtgcccaggtttgctggcctgaatgtggcctggctggagagcagcgaggcctgtgtgttccccagcagcgctgccacctactacccctttgtgcaggagccccctgtgacagagcagaagatctacacagaggacatggcctttggagccagcaccttccccccccagtacctgagcagcgagatcaccctgcacccctatgcctacagcccctacaccctggacagcacccagaatgtgtacagcgtgcccggcagccagtacctgtacaaccagcccagctgctaccggggcttccagacagtgaagcacagaaatgaaaacacctgccccctgccccaggagatgaaggccctcttcaagaagaagacctatgatgagaagaagacctatgaccagcagaagtttgattctgagcgggcagatggcaccatcagcagcgagatcaagagcgcccggggcagccaccacctgagcatctatgcagagaacagcctgaagagtgatggctaccacaagaggacagacaggaagagccgcatcatcgccaagaatgtgtccaccagcaagccagagtttgagttcaccaccctggacttccctgagctgcagggcgctgagaacaacatgtctgagatccagaagcagcccaagtggggccctgtgcacagcgtgtccacagacatcagcctgctgcgggaggtggtgaagccagctgctgtgctgagcaaaggagagatcgtggtgaagaacaaccccaatgaatctgtgacagccaatgctgccaccaacagccccagctgcacccgggagctgtcctggacccccatgggctacgtggtgcggcagaccctgagcacagagctgtctgctgcccccaagaatgtgacctccatgatcaacctgaagaccatcgccagcagcgctgaccccaagaatgtgtccatccccagcagcgaggccctgagcagtgaccccagctacaacaaggagaagcacatcatccaccccacccagaagagcaaggccagccagggcagtgacctggagcagaatgaggccagcaggaagaacaagaagaagaaggagaagagcaccagcaaatatgaggtgctgactgtgcaggagcccccaagaattgaagatgctgaggagttccccaacctggccgtggccagcgagcggcgggaccgcatcgagacccccaagttccagagcaagcagcagccccaggacaacttcaagaacaacgtgaagaagagccagctgcctgtgcagctggacctgggcggcatgctgacagccctggagaagaagcagcacagccagcacgccaagcagagcagcaagcctgtggtggtgtctgtgggcgctgtgcctgtgctgagcaaagaatgtgccagcggggagcggggccgcaggatgagccagatgaagaccccccacaaccccctggacagcagcgcccccctgatgaagaagggcaagcagcgggagatccccaaggccaagaagcccaccagcctgaagaagatcatcctgaaggagcggcaggagaggaagcagaggctgcaggagaatgctgtgtccccagccttcaccagtgatgacacccaggatggagagagcggaggagatgaccagtttcctgagcaggccgagctgagcggccctgagggcatggatgagctgatcagcacccccagcgtggaggacaagtctgaggagcccccaggcacagagctgcagagggacacagaggccagccacctggcccccaaccacaccaccttccccaagatccacagccgccgcttccgggactactgcagccagatgctgagcaaggaggtggatgcctgtgtgacagacctgctgaaggagctggtgcgcttccaggacaggatgtaccagaaggaccctgtgaaggccaagaccaagaggcggctggtgctgggcctgcgggaggtgctgaagcacctgaagctgaagaagctgaagtgtgtgatcatcagccccaactgtgagaagatccagagcaagggcggcctggatgacaccctgcacaccatcattgattatgcctgtgagcagaacatcccctttgtgtttgccctgaacaggaaggccctgggccgcagcctgaacaaggctgtgcctgtgtctgtggtgggcatcttctcctatgatggagcccaggaccagttccacaagatggtggagctgactgtggccgcccggcaggcctacaagaccatgctggagaatgtgcagcaggagctggtgggggagccccggccccaggccccacccagcctgcccacccagggccccagctgcccagcagaagatggccccccagccctgaaggagaaggaggagccccactacatcgagatctggaagaagcacctggaggcctacagcggctgcaccctggagctggaggagagcctggaggccagcaccagccagatgatgaacctgaacctgtag

SEQ ID NO: 214583 - DNA, 2583 bp, Artificial Sequence
  derived and/or modified sequence
ccagccagccggcggcctgctgctggcctgagagatgctgccagcagcgccccccggggcatggccagcgagggcccccgggagcctgagagcgagggcatcaagctgtctgcagatgtgaagccctttgtgcccaggtttgctggcctgaatgtggcctggctggagagcagcgaggcctgtgtgttccccagcagcgctgccacctactacccctttgtgcaggagccccctgtgacagagcagaagatctacacagaggacatggcctttggagccagcaccttccccccccagtacctgagcagcgagatcaccctgcacccctatgcctacagcccctacaccctggacagcacccagaatgtgtacagcgtgcccggcagccagtacctgtacaaccagcccagctgctaccggggcttccagacagtgaagcacagaaatgaaaacacctgccccctgccccaggagatgaaggccctcttcaagaagaagacctatgatgagaagaagacctatgaccagcagaagtttgattctgagcgggcagatggcaccatcagcagcgagatcaagagcgcccggggcagccaccacctgagcatctatgcagagaacagcctgaagagtgatggctaccacaagaggacagacaggaagagccgcatcatcgccaagaatgtgtccaccagcaagccagagtttgagttcaccaccctggacttccctgagctgcagggcgctgagaacaacatgtctgagatccagaagcagcccaagtggggccctgtgcacagcgtgtccacagacatcagcctgctgcgggaggtggtgaagccagctgctgtgctgagcaaaggagagatcgtggtgaagaacaaccccaatgaatctgtgctgatgcccctgcccatcctgctgcacgtgcaggagaccctgagcacagagctgtctgctgcccccaagaatgtgacctccatgatcaacctgaagaccatcgccagcagcgctgaccccaagaatgtgtccatccccagcagcgaggccctgagcagtgaccccagctacaacaaggagaagcacatcatccaccccacccagaagagcaaggccagccagggcagtgacctggagcagaatgaggccagcaggaagaacaagaagaagaaggagaagagcaccagcaaatatgaggtgctgactgtgcaggagcccccaagaattgaagatgctgaggagttccccaacctggccgtggccagcgagcggcgggaccgcatcgagacccccaagttccagagcaagcagcagccccaggacaacttcaagaacaacgtgaagaagagccagctgcctgtgcagctggacctgggcggcatgctgacagccctggagaagaagcagcacagccagcacgccaagcagagcagcaagcctgtggtggtgtctgtgggcgctgtgcctgtgctgagcaaagaatgtgccagcggggagcggggccgcaggatgagccagatgaagaccccccacaaccccctggacagcagcgcccccctgatgaagaagggcaagcagcgggagatccccaaggccaagaagcccaccagcctgaagaagatcatcctgaaggagcggcaggagaggaagcagaggctgcaggagaatgctgtgtccccagccttcaccagtgatgacacccaggatggagagagcggaggagatgaccagtttcctgagcaggccgagctgagcggccctgagggcatggatgagctgatcagcacccccagcgtggaggacaagtctgaggagcccccaggcacagagctgcagagggacacagaggccagccacctggcccccaaccacaccaccttccccaagatccacagccgccgcttccgggactactgcagccagatgctgagcaaggaggtggatgcctgtgtgacagacctgctgaaggagctggtgcgcttccaggacaggatgtaccagaaggaccctgtgaaggccaagaccaagaggcggctggtgctgggcctgcgggaggtgctgaagcacctgaagctgaagaagctgaagtgtgtgatcatcagccccaactgtgagaagatccagagcaagggcggcctggatgacaccctgcacaccatcattgattatgcctgtgagcagaacatcccctttgtgtttgccctgaacaggaaggccctgggccgcagcctgaacaaggctgtgcctgtgtctgtggtgggcatcttctcctatgatggagcccaggaccagttccacaagatggtggagctgactgtggccgcccggcaggcctacaagaccatgctggagaatgtgcagcaggagctggtgggggagccccggccccaggccccacccagcctgcccacccagggccccagctgcccagcagaagatggccccccagccctgaaggagaaggaggagccccactacatcgagatctggaagaagcacctggaggcctacagcggctgcaccctggagctggaggagagcctggaggccagcaccagccagatgatgaacctgaacctgtag

SEQ ID NO: 214584 - DNA, 2565 bp, Artificial Sequence
  derived and/or modified sequence
atggccagcgagggcccccgggagcccgagagcgagggcatcaagctctctgcagacgttaagcccttcgttccccgcttcgccggacttaatgtagcctggttggagtccagtgaggcgtgcgtctttccatcttccgcggccacctactacccatttgtccaggaaccccctgtaactgagcagaagatttacaccgaagatatggcattcggcgcaagtacattccccccacagtacctgtcttctgagattacattacacccatatgcttacagcccttacacgctggattctactcagaacgtatatagcgtcccgggttcccagtacctttacaatcaaccctcatgttaccgtggctttcagactgtcaagcatcggaacgagaacacatgcccacttcctcaggaaatgaaggcattgtttaaaaagaagacttatgacgaaaagaagacgtacgatcagcagaagttcgatagcgagcgtgcagatggtaccatttctagcgaaattaagagcgctcgcggttctcaccatctgtccatttacgccgaaaacagtcttaagtccgacggctaccataaacggacagaccggaaaagtcgcatcatcgctaagaatgttagtacatcaaagcctgaatttgagtttactacgttagattttcctgagcttcagggggccgagaacaacatgagtgaaatacagaagcagccgaagtggggccccgtgcatagcgtgtcaactgatattagcttattgagagaagtagttaagcccgcagctgtactgtctaagggagagattgtggtcaagaataatcctaacgaatctgtgaccgccaacgccgcaaccaactctccctcctgtactcgtgaactgtcatggacacctatggggtatgtagtaagacaaacattgtccacagagcttagtgccgcccccaagaacgtgaccagcatgattaacctcaagacgatcgccagcagcgccgaccctaagaatgtgtctatccccagctccgaagcattatcttccgacccaagttataataaggaaaaacacatcatccatccaacacagaagagcaaagcgagtcaaggtagtgacctggagcagaacgaggccagcagaaaaaataaaaaaaagaaggaaaaaagcactagtaagtacgaagtattgacggtgcaggagccccccaggattgaggacgcagaggagttccctaacttggctgttgctagcgaacggcgggatagaattgagacgcccaagtttcagagtaaacagcaaccccaggacaacttcaagaacaatgtcaaaaagagccagttacctgtccagctggacctgggcgggatgctcaccgctttggagaaaaagcaacactcacagcacgctaaacagagctccaaaccagtggtcgttagtgtgggcgccgtccccgtgctgtccaaagaatgtgcttcgggagagcgggggagaaggatgagccagatgaagaccccacacaatccacttgactcctcggcccctcttatgaaaaaaggaaagcagagggagatcccgaaggccaagaagcccacgtcccttaagaagatcatactgaaggaacgccaggagagaaagcaacgattgcaagaaaacgctgtttccccagcctttacgtccgatgacactcaggatggagagagtggaggcgacgatcaatttcctgagcaggccgagctctccggcccagagggcatggatgagctgatctctaccccttccgtcgaggacaaatccgaagaaccaccaggcactgaactgcagagagacaccgaggcgtcgcatctcgcacccaaccataccacctttccgaagatccactcacgaagatttcgcgattactgttcacaaatgctgtctaaggaggtggacgcttgtgtcacagacctattaaaggagctggtgagatttcaggaccggatgtaccagaaagacccagtgaaagccaagaccaagaggaggctcgttctcggtctacgggaggtgctgaagcaccttaagctcaagaaactcaaatgtgttattatatctcccaattgcgagaagattcagagcaaaggcgggctcgatgatactctccataccataatagattatgcttgtgaacaaaacattccattcgtgttcgcgctcaatcgtaaggccctcggcagaagtctcaacaaagccgtgccagtgtcggtagtgggcatcttttcatatgatggcgctcaagaccagtttcataagatggtcgaactcaccgttgccgcaagacaggcatataagaccatgctcgaaaacgtgcagcaggaactggtcggagagcctaggccacaggcccccccatcactccccacccaagggcctagctgccccgcagaagatggtccgccagctctgaaggagaaggaagagcctcattacatcgaaatttggaagaaacacttggaggcttactccggatgtaccctggagctagaagagagcctggaagcttcgacttcccaaatgatgaatttgaacttgtag

SEQ ID NO: 214585 - DNA, 2583 bp, Artificial Sequence
  derived and/or modified sequence
cccgccagccggcggcccgccgccggcctgcgggacgccgccagctcggccccaaggggcatggcgtcagaaggtccacgggagcccgaatcagagggtataaaactctctgctgacgtgaagccattcgtgcctaggttcgctgggctgaatgttgcatggttggaatccagtgaggcctgtgtgtttccttcatcagccgcaacgtactaccccttcgtgcaggaaccgccagtgaccgaacagaaaatttacacagaggacatggccttcggcgcgtctacgttcccacctcaataccttagctctgaaataacgctgcatccctacgcctactctccttacacgttggactcaacccagaacgtgtactcagtcccagggtcacagtacttatacaaccagccatcctgctatcgagggtttcagacagtcaaacatcgaaatgagaacacttgtccgcttcctcaggaaatgaaggccttgttcaaaaaaaaaacttacgacgagaaaaagacatacgaccagcaaaaatttgattccgaaagggcagacggcactatcagctccgagattaagagtgcgcggggcagccatcacctctccatttatgctgaaaactcactcaaatctgacggctaccacaagcgtactgataggaagagccgaatcattgctaagaacgtttcaacctcaaagcccgagtttgagtttaccacactcgacttccccgaacttcaaggagctgaaaacaacatgtctgagattcagaaacaacctaagtggggtccagtgcactccgtgtcaactgatattagtctgctgcgggaggtcgttaaaccagctgctgtgctgtctaagggtgagatagtggtgaagaataacccaaacgaaagcgtgttgatgccccttcccattctgctccacgttcaggaaaccttgtccaccgagctcagcgcagctcctaaaaatgtgacatccatgattaacttgaaaacgatcgcgtctagcgcagacccgaaaaacgtcagtattccaagttccgaagctctgtcctcagatccgagctataacaaagagaagcacatcattcatcctactcagaagtccaaggcctcgcaggggtcggacttggaacagaacgaagcatcccgcaagaataaaaaaaaaaaggagaaatccacctccaagtacgaagtcctgactgtgcaggaaccccccagaatcgaagacgctgaggagttcccaaatcttgcagtggcaagtgaacgtagggaccgcatcgaaacccctaaatttcaaagtaagcagcaaccccaggataacttcaagaataacgtcaagaaaagccagcttccagttcaactggacctgggcggcatgcttacagcccttgaaaaaaaacagcattcacagcatgctaagcagtcatctaagcccgtcgtggtgtccgtgggtgccgtgcccgtcctgtccaaggagtgtgcatccggcgaacgagggagaaggatgagccaaatgaagacaccccacaatcccctggactccagcgctcccctgatgaagaaaggtaagcaacgcgagatacccaaagcaaaaaagcctaccagtttgaagaaaattattctcaaagagagacaagagcggaagcagcggctccaggagaacgccgtctctcccgcgttcactagtgatgacacgcaggacggcgagtccgggggcgatgatcagttcccagagcaggcggagctctctggccctgaaggaatggatgagctgattagcactccatcagttgaggataagtctgaggaaccacccgggaccgagctgcaacgtgatactgaagcatcacacctggcacccaaccacaccacatttcccaaaattcactcccgtagattcagagactattgcagccagatgctaagcaaggaggttgacgcctgtgtcactgatctgctcaaggagctcgtgaggttccaggacaggatgtaccaaaaggatcctgtgaaagctaagacgaagcgccggctcgtactaggtctccgcgaagtcctcaaacacctgaaacttaagaagctcaaatgcgttattatctctccaaactgcgaaaaaattcaaagcaagggcgggctggatgacacgctgcacaccatcattgattatgcttgcgaacagaacattccatttgtgttcgcgctgaaccgaaaggctctgggcaggagtttaaataaggctgtacccgtatctgtggtcgggattttcagctacgatggcgcccaggaccaatttcacaaaatggttgagctcaccgtagctgcccgccaagcctacaagacaatgctggagaatgtgcagcaggaactcgtaggggagcctcggccccaagcccccccatctctgcccacacaggggccgtcttgcccagccgaggatggacctccagctctaaaggaaaaggaggaaccccactacattgaaatatggaaaaagcaccttgaggcttattctggttgcaccctggagctggaagagtccttagaagctagcacttcacagatgatgaacttgaacctgtag

SEQ ID NO: 214586 - DNA, 2565 bp, Artificial Sequence
  derived and/or modified sequence
atggcttctgaggggccacgggaacctgaatccgagggcatcaagttgagtgctgacgttaaaccgttcgttccgagatttgcagggctcaatgtcgcttggttggagagcagcgaggcgtgcgtgttcccctcatctgccgctacgtactacccttttgtgcaggaaccaccagtaacggagcaaaaaatctacactgaagatatggcgtttggggcatcaacatttcctccccagtacctgtctagcgagatcacattacacccgtatgcgtactctccttatacacttgattctacacagaatgtgtattcggtccccggttcacagtacctgtacaaccagccttcctgctaccggggatttcaaactgtgaagcaccggaacgaaaacacatgccctttgccccaggaaatgaaagcacttttcaagaagaagacctatgatgagaagaagacctacgatcagcagaagtttgattctgagagagctgacggcactatctcttctgagatcaaatccgcgagagggtctcaccatctctccatttatgcagagaactctctcaagtctgatggataccataagagaaccgacagaaagagccgaattatcgccaagaacgtttctacttctaagcctgagttcgaattcaccaccctcgacttccccgagctgcagggggctgaaaataacatgtccgagattcagaagcagcctaagtgggggcctgtgcacagcgtgagtacggacatcagcctgcttcgagaggtagtcaagcccgcagccgtcctttcgaagggcgaaatcgtggtgaaaaataaccccaacgaaagtgtgaccgcgaacgccgctactaacagcccctcctgtacacgagagttatcctggacacccatgggctacgtagttcgtcagacgctgtccactgagctttcagctgcccctaagaatgttacatccatgattaacttgaaaacaatcgcttcttctgcagatcccaagaatgttagtattcccagctccgaagccctgtcttctgatccaagttataacaaggaaaagcatataattcatcccactcagaagagcaaagcatcccagggcagtgacctggagcagaacgaagccagccggaaaaacaagaaaaaaaaagaaaaaagcacaagcaaatatgaagtgctgaccgtacaggagcctccaagaattgaggatgccgaagaatttcccaatctcgcagtggcttctgagagacgggaccggatcgaaaccccgaaattccaaagtaagcagcagccgcaggataactttaagaacaacgtgaaaaagtctcagttgcctgtccagcttgatttgggtggcatgttgacggcccttgaaaaaaagcagcactcccagcatgccaaacagtccagcaagcctgtcgtcgtgtcagtcggtgcagtcccggtgttgagcaaagagtgcgcctccggggagagagggagacgcatgtctcagatgaaaacaccgcacaatccactcgatagttccgcacccctcatgaagaagggcaaacagagagagatcccaaaagccaagaaaccaaccagtctgaagaagatcatcctaaaggaacgtcaggaaaggaagcagagactccaggaaaacgctgtctctcccgcatttacatcagacgatacccaagacggcgagagcggaggcgacgatcagttccccgaacaagccgagctgagcggccctgaagggatggacgagctaatttcgacccccagcgtagaggacaagtctgaggagccccctgggaccgaactacaacgggatactgaagcttcccatttagcacccaatcacaccacctttccaaaaattcattccagaagatttcgggattattgctcccagatgttatcaaaagaggtcgacgcctgtgtgaccgatttgctgaaggaactggtgcggttccaggatagaatgtaccaaaaagatcccgttaaggctaagacaaaaagacggctggtcctgggactgcgggaggtgcttaagcaccttaaacttaagaaactaaagtgtgtgattatttcccccaactgtgagaaaattcagagcaaaggtggtttggacgataccctgcatacaattattgattatgcctgcgagcagaatatcccttttgtgttcgcactcaatcgtaaagcactggggagatcgttaaacaaagccgttcctgtgtcggtagtggggatcttcagctacgatggagcacaggaccaattccacaagatggttgagcttaccgttgctgcgagacaggcctataagacaatgttggagaatgtgcaacaggaacttgtgggagagcctagacctcaggcccctcccagcttgcccacgcaggggcctagctgccctgctgaggacggccctcccgctttgaaagagaaggaggagccccactacatagagatatggaaaaagcacctggaggcttactccggatgtactctggaattggaggaatctttggaagccagcacatctcagatgatgaatcttaacctctag

SEQ ID NO: 214587 - DNA, 2583 bp, Artificial Sequence
  derived and/or modified sequence
cccgcttcaagacggcctgcggctgggttaagggatgctgccagttctgccccaagaggaatggcatccgagggacctagagagcccgagtccgagggcattaaactgtccgccgacgttaagcctttcgtgccacgctttgcaggtctgaatgtcgcgtggctcgagtcatctgaggcttgtgtcttcccttctagcgccgcaacctattaccctttcgtgcaggaacccccagtcactgagcagaagatctacacagaagacatggcatttggcgcttcaacattccccccacagtatctgtcatccgagatcaccctgcacccatatgcatactctccgtataccctagatagcacacagaacgtgtatagtgtgcccggaagtcagtacttgtacaatcaaccatcttgttataggggtttccagactgtcaaacaccgaaacgaaaacacgtgtcccttgccccaggagatgaaggccctgttcaaaaagaagacttacgacgaaaaaaagacttacgaccagcagaagttcgacagtgaaagggcggacgggaccatctcctcagagatcaaaagcgctagaggaagccatcacttgtccatttacgctgagaattctctaaagtctgatggctatcacaagcgaaccgaccggaaatctcgaatcatcgcaaagaatgtgtcaacaagtaaacctgaatttgaatttacaacacttgactttcctgaacttcagggagctgaaaataatatgtccgagattcagaaacagcctaagtggggacctgtgcactccgtttcaacagatatcagtctgctccgcgaggtggtcaaacccgctgctgttttgtccaagggtgaaatcgtagttaaaaacaatccaaatgagtcggtgttgatgcctctcccaatcctgctgcatgttcaggagacgcttagcaccgaactgtccgccgcacccaaaaatgtgactagtatgataaaccttaaaaccatcgccagctcagctgatccaaaaaatgtgagtattccctcctccgaagcattatcctccgatccaagctacaacaaggagaagcacataattcatcccacccagaagtcaaaagcatctcagggctctgatctcgaacagaacgaagccagcaggaaaaataagaaaaaaaaagagaaatccaccagcaaatatgaagtactgaccgtccaagaaccccctaggattgaggatgctgaggagtttcccaacctcgcagtggccagcgagcggagagatcgtattgagactccaaaatttcaatctaaacaacaaccccaggacaattttaagaataatgtgaaaaagagccagctgccagtgcagctggacttagggggtatgctcacggcactcgagaaaaagcagcactcccagcacgcgaagcagtcatccaaaccggtggtggtatcggtgggagctgtgcctgtcctgagcaaggagtgcgccagcggagagcgcggacgcagaatgtcacagatgaagactcctcacaatcccctggatagctctgcacctctcatgaagaaggggaaacagagagagatccctaaagctaaaaaacctaccagtctgaagaagatcatcctgaaggagaggcaagaacggaaacaaagactgcaggagaatgctgtgtctcctgcctttacatccgatgacacacaggatggagagagcggtggggacgatcagtttccagagcaggccgagctgtccggacccgaagggatggatgagctcatctcaaccccctccgtcgaggacaaatcagaggagcctcctgggacagaactccaacgggatacagaggccagtcacttggctccaaaccacaccacattccccaaaatacatagccggaggttcagggactactgctctcagatgctgagcaaagaggtggatgcttgcgtgaccgacctcttaaaagaattagtgcggttccaggaccgtatgtatcagaaggatccggtgaaggctaagaccaagaggcggcttgtcctgggtctgcgagaggttctgaaacatctgaaattgaagaagctgaagtgcgtaattatcagccccaactgcgaaaagatccagtccaaaggcggactcgatgatactctgcacactatcattgactacgcctgtgaacagaatattccctttgtctttgctctgaatcgaaaggctctcggaagatcactcaataaggcagtgccggtctctgttgttggaatattcagttacgatggggctcaggatcagttccacaaaatggtcgagcttacagttgctgcccgacaggcctacaaaaccatgcttgagaatgtgcagcaggagctagttggtgaacctcgcccacaggccccaccctcgctcccaacacaggggccatcctgtccagccgaagacggtccacctgccctcaaggagaaggaggaaccccactatattgagatatggaagaaacacctggaggcctatagtgggtgcactttggaacttgaagagagcctcgaagcatccacgtcccagatgatgaaccttaatctgtag

SEQ ID NO: 214588 - DNA, 3454 bp, Artificial Sequence
  derived and/or modified sequence
gctttgtctgtccggcaagccgacggcccgctgctggcctccgtgacgcggcctcctccgcgcctcgcggcatggcgtcggaggggccgcgggagcccgaaagcgagggcatcaagttatcagcagatgtcaaaccatttgtccccagatttgccgggctcaatgtggcatggttagagtcctcagaagcatgtgtcttccccagctctgcagccacatactatccgtttgttcaggaaccaccagtgacagagcagaaaatatatactgaagacatggcctttggagcttcaacttttccacctcagtatttatcttctgagataactcttcatccatatgcctattctccttatacccttgactccacacagaatgtttactcagtgcctggctcccagtatctttataaccaacccagttgttaccgaggttttcaaacagtgaagcatcgaaatgagaacacatgccctctcccacaagaaatgaaagctctgtttaagaagaaaacctatgatgagaaaaaaacgtatgatcagcaaaagtttgacagtgaaagggctgatggaactatatcatctgagataaaatcagctagaggttcacatcatttgtccatttacgctgagaatagtttgaaatcagatggttaccataagcgaacagacaggaaatccagaatcattgcaaaaaatgtatctacctccaaacctgagtttgaatttaccacactggactttcctgaactgcaaggtgcagagaacaatatgtcagagatacagaagcaacccaagtggggacctgtccactctgtctctaccgacatttctcttctaagagaagtagtaaaaccagctgcagtgttatcaaagggtgaaatagtggtgaaaaataacccaaatgaatctgtaactgctaatgccgctaccaattctccttcatgtacaagagagttatcttggacaccaatgggttatgttgttcgacagacattatctacagaactgtcagcagcccctaaaaatgttacttctatgataaacttaaagaccattgcttcatcagcagatcctaaaaatgttagtataccatcttctgaagctttatcttcggatccttcctacaacaaagaaaaacacattattcatcctacccaaaagtctaaagcatcacaaggtagtgaccttgaacaaaatgaagcctcaagaaagaataagaaaaagaaagaaaaatctacatcaaaatatgaagtcctgacagttcaagagcctccaaggattgaagatgccgaggaatttcccaacctggcagttgcatctgaaagaagagacagaatagagacaccgaaatttcaatctaagcagcagccacaggataattttaaaaataatgtaaagaagagccagcttccagtgcagttggacttggggggcatgctgacagccctggagaagaagcagcactctcagcatgcaaagcagtcctccaaaccagtggtagtctcagttggagcagtgccagtcctttccaaagaatgtgcatcaggggagagaggccgccgcatgagtcaaatgaagaccccgcacaatcccttggactccagcgccccactgatgaagaaagggaagcagagggagatccccaaggccaagaagccaacctcactgaagaagattattttgaaagaacggcaagagagaaagcagcgtctccaagaaaatgctgtgagtccagcttttaccagtgatgacacacaagatggagagagtggtggtgatgaccagtttcccgagcaggcagagctgtcagggccagaggggatggacgaactgatctccactccttcggttgaggacaagtctgaagagccaccaggcacagagctccagagggacacagaggcctcccaccttgctcccaatcacaccaccttccctaagatccacagccgcagattcagggattactgcagccagatgcttagtaaagaagtggatgcttgtgttaccgacctactcaaagaactggtccgtttccaagaccgtatgtaccagaaagatccagtcaaggccaagactaaacgtcgacttgtgttggggttgagggaggttctcaaacacctgaagctcaaaaaactgaaatgtgtcattatttctcccaactgtgagaagatacagtcaaaaggtgggctggatgacactttgcacacaattattgattatgcctgtgagcagaacattccctttgtgtttgctctcaaccgcaaagctctggggcgcagtttgaataaggcagttcctgtcagtgtggtggggatcttcagctatgatggggcccaggatcagttccacaagatggttgagctgacagtggcggcccgacaggcgtacaagaccatgctggagaatgtgcagcaggagctggtgggagagcccaggcctcaggcacctcccagcctacccacacagggccccagctgccctgcagaagatggccccccagccctgaaagaaaaagaagagccacactacattgaaatctggaaaaaacatctggaagcatacagtggatgtaccctggagctagaagaatccttggaggcttcaacctctcaaatgatgaatttgaatttatgagagttcttgcctgtgtgtctgtattttgggtaaggaggggaggtctgaaaaagactttggggctttttcttctgtttttcatgacaatgtaatttgtgtaactgttgaatctggaaattgatcagcattaaagggcacatgaagcagtgtctgcaggcgttcagtgctgcggagcctgttaaaggtcactcagatgtgcaggtgttaatcttctctaaaagcctggtgatacagctctggctttctgagcacactacggatctggaaaatactggaaaatgtgatacttagaatactttggctgctaaggaaacttcctctccattgcagaatagctgagccaagtgagtgagtttgcagaaagcaggtggtgagctcctgcctgctggaggttgccatggagggccattcctgcccggcaacagcaccgtcctgcagggagccacttggcagaagggtgcagggctgctggtgtcagagcaagagggctacagggaaagggccctttctcaggggatgtagcttttttaaaagatttgggaacacttggaggatttgctaaaatgagcctcagaaggaaaattggttttctaacctgtgactttttgaaatgaattattcctttcagtctttatttttcaaagaaacaatgtgtattgaagtacctagatttgtttgataatcaacaaatctttcctttttcaatgaacatattctgaatgtggtttctgtcttagaccaggaggacagagtttgctttcatattttccctgtaagtaagagggcttatttattttaaataaagagtaattattaaa

SEQ ID NO: 214589 - DNA, 3398 bp, Artificial Sequence
  derived and/or modified sequence
ccggcaagccgacggcccgctgctggcctccgtgacgcggcctcctccgcgcctcgcggcatggcgtcggaggggccgcgggagcccgaaagcgagggcatcaagttatcagcagatgtcaaaccatttgtccccagatttgccgggctcaatgtggcatggttagagtcctcagaagcatgtgtcttccccagctctgcagccacatactatccgtttgttcaggaaccaccagtgacagagcagaaaatatatactgaagacatggcctttggagcttcaacttttccacctcagtatttatcttctgagataactcttcatccatatgcctattctccttatacccttgactccacacagaatgtttactcagtgcctggctcccagtatctttataaccaacccagttgttaccgaggttttcaaacagtgaagcatcgaaatgagaacacatgccctctcccacaagaaatgaaagctctgtttaagaagaaaacctatgatgagaaaaaaacgtatgatcagcaaaagtttgacagtgaaagggctgatggaactatatcatctgagataaaatcagctagaggttcacatcatttgtccatttacgctgagaatagtttgaaatcagatggttaccataagcgaacagacaggaaatccagaatcattgcaaaaaatgtatctacctccaaacctgagtttgaatttaccacactggactttcctgaactgcaaggtgcagagaacaatatgtcagagatacagaagcaacccaagtggggacctgtccactctgtctctaccgacatttctcttctaagagaagtagtaaaaccagctgcagtgttatcaaagggtgaaatagtggtgaaaaataacccaaatgaatctgtactaatgccgctaccaattctccttcatgtacaagagacattatctacagaactgtcagcagcccctaaaaatgttacttctatgataaacttaaagaccattgcttcatcagcagatcctaaaaatgttagtataccatcttctgaagctttatcttcggatccttcctacaacaaagaaaaacacattattcatcctacccaaaagtctaaagcatcacaaggtagtgaccttgaacaaaatgaagcctcaagaaagaataagaaaaagaaagaaaaatctacatcaaaatatgaagtcctgacagttcaagagcctccaaggattgaagatgccgaggaatttcccaacctggcagttgcatctgaaagaagagacagaatagagacaccgaaatttcaatctaagcagcagccacaggataattttaaaaataatgtaaagaagagccagcttccagtgcagttggacttggggggcatgctgacagccctggagaagaagcagcactctcagcatgcaaagcagtcctccaaaccagtggtagtctcagttggagcagtgccagtcctttccaaagaatgtgcatcaggggagagaggccgccgcatgagtcaaatgaagaccccgcacaatcccttggactccagcgccccactgatgaagaaagggaagcagagggagatccccaaggccaagaagccaacctcactgaagaagattattttgaaagaacggcaagagagaaagcagcgtctccaagaaaatgctgtgagtccagcttttaccagtgatgacacacaagatggagagagtggtggtgatgaccagtttcccgagcaggcagagctgtcagggccagaggggatggacgaactgatctccactccttcggttgaggacaagtctgaagagccaccaggcacagagctccagagggacacagaggcctcccaccttgctcccaatcacaccaccttccctaagatccacagccgcagattcagggattactgcagccagatgcttagtaaagaagtggatgcttgtgttaccgacctactcaaagaactggtccgtttccaagaccgtatgtaccagaaagatccagtcaaggccaagactaaacgtcgacttgtgttggggttgagggaggttctcaaacacctgaagctcaaaaaactgaaatgtgtcattatttctcccaactgtgagaagatacagtcaaaaggtgggctggatgacactttgcacacaattattgattatgcctgtgagcagaacattccctttgtgtttgctctcaaccgcaaagctctggggcgcagtttgaataaggcagttcctgtcagtgtggtggggatcttcagctatgatggggcccaggatcagttccacaagatggttgagctgacagtggcggcccgacaggcgtacaagaccatgctggagaatgtgcagcaggagctggtgggagagcccaggcctcaggcacctcccagcctacccacacagggccccagctgccctgcagaagatggccccccagccctgaaagaaaaagaagagccacactacattgaaatctggaaaaaacatctggaagcatacagtggatgtaccctggagctagaagaatccttggaggcttcaacctctcaaatgatgaatttgaatttatgagagttcttgcctgtgtgtctgtattttgggtaaggaggggaggtctgaaaaagactttggggctttttcttctgtttttcatgacaatgtaatttgtgtaactgttgaatctggaaattgatcagcattaaagggcacatgaagcagtgtctgcaggcgttcagtgctgcggagcctgttaaaggtcactcagatgtgcaggtgttaatcttctctaaaagcctggtgatacagctctggctttctgagcacactacggatctggaaaatactggaaaatgtgatacttagaatactttggctgctaaggaaacttcctctccattgcagaatagctgagccaagtgagtgagtttgcagaaagcaggtggtgagctcctgcctgctggaggttgccatggagggccattcctgcccggcaacagcaccgtcctgcagggagccacttggcagaagggtgcagggctgctggtgtcagagcaagagggctacagggaaagggccctttctcaggggatgtagcttttttaaaagatttgggaacacttggaggatttgctaaaatgagcctcagaaggaaaattggttttctaacctgtgactttttgaaatgaattattcctttcagtctttatttttcaaagaaacaatgtgtattgaagtacctagatttgtttgataatcaacaaatctttcctttttcaatgaacatattctgaatgtggtttctgtcttagaccaggaggacagagtttgctttcatattttccctgtaagtaagagggcttatttattttaaataaagagtaattatt

SEQ ID NO: 214590 - DNA, 3085 bp, Artificial Sequence
  derived and/or modified sequence
acccagcgcagtgactgcggcccagcccggcgctccccgcagtcggggcggggggactctggcgagcttcccgcgctcttgggaacggatagattgttttaaaggatcctgcgtttttctgaacgtcattctccgctctacgtactcagcattaccactagatggagccctggcgatcgcttgcatcatttttagacccataaaattctcggtgaaaggcatcaagttatcagcagatgtcaaaccatttgtccccagatttgccgggctcaatgtggcatggttagagtcctcagaagcatgtgtcttccccagctctgcagccacatactatccgtttgttcaggaaccaccagtgacagagcagaaaatatatactgaagacatggcctttggagcttcaacttttccacctcagtatttatcttctgagataactcttcatccatatgcctattctccttatacccttgactccacacagaatgtttactcagtgcctggctcccagtatctttataaccaacccagttgttaccgaggttttcaaacagtgaagcatcgaaatgagaacacatgccctctcccacaagaaatgaaagctctgtttaagaagaaaacctatgatgagaaaaaaacgtatgatcagcaaaagtttgacagtgaaagggctgatggaactatatcatctgagataaaatcagctagaggttcacatcatttgtccatttacgctgagaatagtttgaaatcagatggttaccataagcgaacagacaggaaatccagaatcattgcaaaaaatgtatctacctccaaacctgagtttgaatttaccacactggactttcctgaactgcaaggtgcagagaacaatatgtcagagatacagaagcaacccaagtggggacctgtccactctgtctctaccgacatttctcttctaagagaagtagtaaaaccagctgcagtgttatcaaagggtgaaatagtggtgaaaaataacccaaatgaatctgtaactgctaatgccgctaccaattctccttcatgtacaagagagttatcttggacaccaatgggttatgttgttcgacagacattatctacagaactgtcagcagcccctaaaaatgttacttctatgataaacttaaagaccattgcttcatcagcagatcctaaaaatgttagtataccatcttctgaagctttatcttcggatccttcctacaacaaagaaaaacacattattcatcctacccaaaagtctaaagcatcacaaggtagtgaccttgaacaaaatgaagcctcaagaaagaataagaaaaagaaagaaaaatctacatcaaaatatgaagtcctgacagttcaagagcctccaaggattgaagatgccgaggaatttcccaacctggcagttgcatctgaaagaagagacagaatagagacaccgaaatttcaatctaagcagcagccacaggataattttaaaaataatgtaaagaagagccagcttccagtgcagttggacttggggggcatgctgacagccctggagaagaagcagcactctcagcatgcaaagcagtcctccaaaccagtggtagtctcagttggagcagtgccagtcctttccaaagaatgtgcatcaggggagagaggccgccgcatgagtcaaatgaagaccccgcacaatcccttggactccagcgccccactgatgaagaaagggaagcagagggagatccccaaggccaagaagccaacctcactgaagaagattattttgaaagaacggcaagagagaaagcagcgtctccaagaaaatgctgtgagtccagcttttaccagtgatgacacacaagatggagagagtggtggtgatgaccagtttcccgagcaggcagagctgtcagggccagaggggatggacgaactgatctccactccttcggttgaggacaagtctgaagagccaccaggcacagagctccagagggacacagaggcctcccaccttgctcccaatcacaccaccttccctaagatccacagccgcagattcagggattactgcagccagatgcttagtaaagaagtggatgcttgtgttaccgacctactcaaagaactggtccgtttccaagaccgtatgtaccagaaagatccagtcaaggccaagactaaacgtcgacttgtgttggggttgagggaggttctcaaacacctgaagctcaaaaaactgaaatgtgtcattatttctcccaactgtgagaagatacagtcaaaaggtgggctggatgacactttgcacacaattattgattatgcctgtgagcagaacattccctttgtgtttgctctcaaccgcaaagctctggggcgcagtttgaataaggcagttcctgtcagtgtggtggggatcttcagctatgatggggcccaggatcagttccacaagatggttgagctgacagtggcggcccgacaggcgtacaagaccatgctggagaatgtgcagcaggagctggtgggagagcccaggcctcaggcacctcccagcctacccacacagggccccagctgccctgcagaagatggccccccagccctgaaagaaaaagaagagccacactacattgaaatctggaaaaaacatctggaagcatacagtggatgtaccctggagctagaagaatccttggaggcttcaacctctcaaatgatgaatttgaatttatgagagttcttgcctgtgtgtctgtattttgggtaaggaggggaggtctgaaaaagactttggggctttttcttctgtttttcatgacaatgtaatttgtgtaactgttgaatctggaaattgatcagcattaaagggcacatgaagcagtgtctgcaggcgttcagtgctgcggagcctgttaaaggtcactcagatgtgcaggtgttaatcttctctaaaagcctggtgatacagctctggctttctgagcacactacggatctggaaaatactggaaaatgtgatacttagaatactttggctgctaaggaaacttcctctccattgcagaatagctga

SEQ ID NO: 214591 - DNA, 2565 bp, Artificial Sequence
  derived and/or modified sequence
atggccagcgagggccccagagagcccgagagcgagggcatcaagctgagcgccgacgtgaagcccttcgtgcccagattcgccggcctgaacgtggcctggctggagagcagcgaggcctgcgtgttccccagcagcgccgccacctactaccccttcgtgcaggagccccccgtgaccgagcagaagatctacaccgaggacatggccttcggcgccagcaccttccccccccagtacctgagcagcgagatcaccctgcacccctacgcctacagcccctacaccctggacagcacccagaacgtgtacagcgtgcccggcagccagtacctgtacaaccagcccagctgctacagaggcttccagaccgtgaagcacagaaacgagaacacctgccccctgccccaggagatgaaggccctgttcaagaagaagacctacgacgagaagaagacctacgaccagcagaagttcgacagcgagagagccgacggcaccatcagcagcgagatcaagagcgccagaggcagccaccacctgagcatctacgccgagaacagcctgaagagcgacggctaccacaagagaaccgacagaaagagcagaatcatcgccaagaacgtgagcaccagcaagcccgagttcgagttcaccaccctggacttccccgagctgcagggcgccgagaacaacatgagcgagatccagaagcagcccaagtggggccccgtgcacagcgtgagcaccgacatcagcctgctgagagaggtggtgaagcccgccgccgtgctgagcaagggcgagatcgtggtgaagaacaaccccaacgagagcgtgaccgccaacgccgccaccaacagccccagctgcaccagagagctgagctggacccccatgggctacgtggtgagacagaccctgagcaccgagctgagcgccgcccccaagaacgtgaccagcatgatcaacctgaagaccatcgccagcagcgccgaccccaagaacgtgagcatccccagcagcgaggccctgagcagcgaccccagctacaacaaggagaagcacatcatccaccccacccagaagagcaaggccagccagggcagcgacctggagcagaacgaggccagcagaaagaacaagaagaagaaggagaagagcaccagcaagtacgaggtgctgaccgtgcaggagccccccagaatcgaggacgccgaggagttccccaacctggccgtggccagcgagagaagagacagaatcgagacccccaagttccagagcaagcagcagccccaggacaacttcaagaacaacgtgaagaagagccagctgcccgtgcagctggacctgggcggcatgctgaccgccctggagaagaagcagcacagccagcacgccaagcagagcagcaagcccgtggtggtgagcgtgggcgccgtgcccgtgctgagcaaggagtgcgccagcggcgagagaggcagaagaatgagccagatgaagaccccccacaaccccctggacagcagcgcccccctgatgaagaagggcaagcagagagagatccccaaggccaagaagcccaccagcctgaagaagatcatcctgaaggagagacaggagagaaagcagagactgcaggagaacgccgtgagccccgccttcaccagcgacgacacccaggacggcgagagcggcggcgacgaccagttccccgagcaggccgagctgagcggccccgagggcatggacgagctgatcagcacccccagcgtggaggacaagagcgaggagccccccggcaccgagctgcagagagacaccgaggccagccacctggcccccaaccacaccaccttccccaagatccacagcagaagattcagagactactgcagccagatgctgagcaaggaggtggacgcctgcgtgaccgacctgctgaaggagctggtgagattccaggacagaatgtaccagaaggaccccgtgaaggccaagaccaagagaagactggtgctgggcctgagagaggtgctgaagcacctgaagctgaagaagctgaagtgcgtgatcatcagccccaactgcgagaagatccagagcaagggcggcctggacgacaccctgcacaccatcatcgactacgcctgcgagcagaacatccccttcgtgttcgccctgaacagaaaggccctgggcagaagcctgaacaaggccgtgcccgtgagcgtggtgggcatcttcagctacgacggcgcccaggaccagttccacaagatggtggagctgaccgtggccgccagacaggcctacaagaccatgctggagaacgtgcagcaggagctggtgggcgagcccagaccccaggccccccccagcctgcccacccagggccccagctgccccgccgaggacggcccccccgccctgaaggagaaggaggagccccactacatcgagatctggaagaagcacctggaggcctacagcggctgcaccctggagctggaggagagcctggaggccagcaccagccagatgatgaacctgaacctgtag

SEQ ID NO: 214592 - DNA, 2583 bp, Artificial Sequence
  derived and/or modified sequence
cccgccagcagaagacccgccgccggcctgagagacgccgccagcagcgcccccagaggcatggccagcgagggccccagagagcccgagagcgagggcatcaagctgagcgccgacgtgaagcccttcgtgcccagattcgccggcctgaacgtggcctggctggagagcagcgaggcctgcgtgttccccagcagcgccgccacctactaccccttcgtgcaggagccccccgtgaccgagcagaagatctacaccgaggacatggccttcggcgccagcaccttccccccccagtacctgagcagcgagatcaccctgcacccctacgcctacagcccctacaccctggacagcacccagaacgtgtacagcgtgcccggcagccagtacctgtacaaccagcccagctgctacagaggcttccagaccgtgaagcacagaaacgagaacacctgccccctgccccaggagatgaaggccctgttcaagaagaagacctacgacgagaagaagacctacgaccagcagaagttcgacagcgagagagccgacggcaccatcagcagcgagatcaagagcgccagaggcagccaccacctgagcatctacgccgagaacagcctgaagagcgacggctaccacaagagaaccgacagaaagagcagaatcatcgccaagaacgtgagcaccagcaagcccgagttcgagttcaccaccctggacttccccgagctgcagggcgccgagaacaacatgagcgagatccagaagcagcccaagtggggccccgtgcacagcgtgagcaccgacatcagcctgctgagagaggtggtgaagcccgccgccgtgctgagcaagggcgagatcgtggtgaagaacaaccccaacgagagcgtgctgatgcccctgcccatcctgctgcacgtgcaggagaccctgagcaccgagctgagcgccgcccccaagaacgtgaccagcatgatcaacctgaagaccatcgccagcagcgccgaccccaagaacgtgagcatccccagcagcgaggccctgagcagcgaccccagctacaacaaggagaagcacatcatccaccccacccagaagagcaaggccagccagggcagcgacctggagcagaacgaggccagcagaaagaacaagaagaagaaggagaagagcaccagcaagtacgaggtgctgaccgtgcaggagccccccagaatcgaggacgccgaggagttccccaacctggccgtggccagcgagagaagagacagaatcgagacccccaagttccagagcaagcagcagccccaggacaacttcaagaacaacgtgaagaagagccagctgcccgtgcagctggacctgggcggcatgctgaccgccctggagaagaagcagcacagccagcacgccaagcagagcagcaagcccgtggtggtgagcgtgggcgccgtgcccgtgctgagcaaggagtgcgccagcggcgagagaggcagaagaatgagccagatgaagaccccccacaaccccctggacagcagcgcccccctgatgaagaagggcaagcagagagagatccccaaggccaagaagcccaccagcctgaagaagatcatcctgaaggagagacaggagagaaagcagagactgcaggagaacgccgtgagccccgccttcaccagcgacgacacccaggacggcgagagcggcggcgacgaccagttccccgagcaggccgagctgagcggccccgagggcatggacgagctgatcagcacccccagcgtggaggacaagagcgaggagccccccggcaccgagctgcagagagacaccgaggccagccacctggcccccaaccacaccaccttccccaagatccacagcagaagattcagagactactgcagccagatgctgagcaaggaggtggacgcctgcgtgaccgacctgctgaaggagctggtgagattccaggacagaatgtaccagaaggaccccgtgaaggccaagaccaagagaagactggtgctgggcctgagagaggtgctgaagcacctgaagctgaagaagctgaagtgcgtgatcatcagccccaactgcgagaagatccagagcaagggcggcctggacgacaccctgcacaccatcatcgactacgcctgcgagcagaacatccccttcgtgttcgccctgaacagaaaggccctgggcagaagcctgaacaaggccgtgcccgtgagcgtggtgggcatcttcagctacgacggcgcccaggaccagttccacaagatggtggagctgaccgtggccgccagacaggcctacaagaccatgctggagaacgtgcagcaggagctggtgggcgagcccagaccccaggccccccccagcctgcccacccagggccccagctgccccgccgaggacggcccccccgccctgaaggagaaggaggagccccactacatcgagatctggaagaagcacctggaggcctacagcggctgcaccctggagctggaggagagcctggaggccagcaccagccagatgatgaacctgaacctgtag

SEQ ID NO: 214593 - protein, 526 aa, Artificial Sequence
  derived and/or modified sequence
MAALTIATGTGNWFSALALGVTLLKCLLIPTYHSTDFEVHRNWLAITHSLPISQWYYEATSEWTLDYPPFFAWFEYILSHVAKYFDQEMLNVHNLNYSSSRTLLFQRFSVIFMDVLFVYAVRECCKCIDGKKVGKELTEKPKFILSVLLLWNFGLLIVDHIHFQYNGFLFGLMLLSIARLFQKRHMEGAFLFAVLLHFKHIYLYVAPAYGVYLLRSYCFTANKPDGSIRWKSFSFVRVISLGLVVFLVSALSLGPFLALNQLPQVFSRLFPFKRGLCHAYWAPNFWALYNALDKVLSVIGLKLKFLDPNNIPKASMTSGLVQQFQHTVLPSVTPLATLICTLIAILPSIFCLWFKPQGPRGFLRCLTLCALSSFMFGWHVHEKAILLAILPMSLLSVGKAGDASIFLILTTTGHYSLFPLLFTAPELPIKILLMLLFTIYSISSLKTLFRKEKPLFNWMETFYLLGLGPLEVCCEFVFPFTSWKVKYPFIPLLLTSVYCAVGITYAWFKLYVSVLIDSAIGKTKKQ

SEQ ID NO: 214594 - DNA, 1581 bp, Artificial Sequence
  derived and/or modified sequence
atggccgcattgacgatagccaccgggacaggcaactggttctccgccctggctctgggtgtcacgctgttgaagtgcctgctgataccaacctaccatagcacggactttgaggtccaccgcaactggttggccattacccactctctgccaatatcccagtggtactacgaggccacgagcgaatggaccctcgactaccccccttttttcgcctggtttgagtatatcctgagccatgtcgccaagtactttgaccaggagatgctcaacgtgcacaacttgaattactcttcttcaagaaccctgctgtttcagcggttttctgtaatttttatggatgtgctattcgtgtacgccgtgcgggagtgctgtaaatgtattgatggcaagaaggtcgggaaggagctgactgaaaagccaaagtttattttgtcggttctgctcttgtggaactttggtctgctgatcgtggatcatatccattttcagtacaatggtttcctattcggcctgatgttgctgtccattgctaggcttttccaaaaaaggcacatggaaggagccttccttttcgcagtgctgctccatttcaagcatatatatctctacgtggcccccgcttacggtgtatacctcctgcgctcctactgctttacagcaaataaaccagacggatccattagatggaaatccttcagttttgtcagggttatctccctggggttagtggtgtttctagtcagtgcactgagcctgggccccttcctcgctttgaaccagctaccacaagtattttcccggctctttcctttcaaacgcggcctgtgtcacgcatattgggcgcccaatttttgggccctctacaacgccctggacaaggtcctgagtgtgataggtctgaaactgaagttcctggaccccaacaatataccaaaggcttccatgacatccggcctcgtccagcagttccagcataccgtgctgccaagtgtaactcctctcgcaacgctgatctgcactctgatcgcaatcttgccgtctattttctgcttgtggttcaaaccccagggccctcgaggattcctgcggtgcctcacgctgtgcgccctatcctcgttcatgttcggttggcatgtgcacgagaaggccattctcctcgcaatcttaccaatgtcactgttgtccgtgggcaaggcaggtgatgcatcaatcttcctaatccttacgacgacaggacactatagccttttcccactgctgttcaccgctcccgaacttccaatcaaaattttactcatgctgttgttcactatttacagtatatcaagcctgaaaactctgttcaggaaggagaagcctctttttaattggatggagacattttacctgctgggtttaggacctttggaggtgtgctgcgagttcgtttttccattcacatcatggaaagtaaagtatcccttcatacccctacttctgaccagtgtctattgtgccgttggtattacctacgcctggttcaaactgtatgtgtctgttttaatagattcagcaattggaaaaacaaagaaacaatag

SEQ ID NO: 214595 - DNA, 1581 bp, Artificial Sequence
  derived and/or modified sequence
atggccgccctgaccatcgccaccggcaccggcaactggttcagcgccctggccctgggcgtgaccctgctgaagtgcctgctgatccccacctaccacagcacagactttgaggtgcacaggaactggctggccatcacccacagcctgcccatcagccagtggtactatgaggccaccagcgagtggaccctggactacccacccttctttgcctggtttgagtacatcctgagccacgtggccaagtactttgaccaggagatgctgaatgtgcacaacctgaactacagcagcagcaggaccctgctcttccagcgcttcagcgtcatcttcatggatgtgctgtttgtgtatgctgtgcgggagtgctgcaagtgcattgatggcaagaaggtgggcaaggagctgacagagaagcccaagttcatcctgtctgtgctgctgctgtggaactttggcctgctgattgtggaccacatccacttccagtacaacggcttcctgtttggcctgatgctgctgagcatcgcccggctcttccagaagaggcacatggagggcgccttcctgtttgctgtgctgctgcacttcaagcacatctacctgtatgtggccccagcctatggagtgtacctgctgcggagctactgcttcaccgccaacaagccagatggcagcatccgctggaagagcttctcctttgtgcgggtcatcagcctgggcctggtggtgttcctggtgtctgccctgagcctgggccccttcctggccctgaaccagctgccccaggtgttcagccgcctcttccccttcaagaggggcctgtgccacgcctactgggcccccaacttctgggccctgtacaatgccctggacaaggtgctgtctgtgattggcctgaagctgaagttcctggaccccaacaacatccccaaggcctccatgaccagcggcctggtgcagcagttccagcacacagtgctgcccagcgtgacccccctggccaccctcatctgcaccctgattgccatcctgcccagcatcttctgcctgtggttcaagccccagggcccccggggcttcctgcgctgcctgaccctgtgtgccctgagcagcttcatgtttggctggcacgtgcatgagaaggccatcctgctggccatcctgcccatgagcctgctgtctgtgggcaaggctggagatgccagcatcttcctgatcctgaccaccaccggccactacagcctcttccccctgctcttcaccgcccctgagctgcccatcaagatcctgctgatgctgctcttcaccatctacagcatcagcagcctgaagaccctcttcaggaaggagaagcccctcttcaactggatggagaccttctacctgctgggcctgggccccctggaggtgtgctgtgaatttgtgttccccttcacctcctggaaggtgaagtaccccttcatccccctgctgctgacctctgtgtactgtgctgtgggcatcacctacgcctggttcaagctgtatgtgtctgtgctgattgacagcgccatcggcaagaccaagaagcagtag

SEQ ID NO: 214596 - DNA, 1581 bp, Artificial Sequence
  derived and/or modified sequence
atggccgccctgaccatcgccaccggcaccggcaactggttcagcgccctggccctcggcgtcaccttgctcaagtgtctgctaatccccacctaccattctaccgacttcgaagtgcatcgcaattggctggccatcactcatagcctgcctatcagccagtggtattatgaagccacttccgaatggaccctggactaccccccattctttgcatggttcgaatacatcctctcccacgtggcaaagtactttgatcaggaaatgctcaatgtgcacaatctgaattattcatctagtcgcacccttctattccaacgcttttctgtgatattcatggatgtgctgtttgtgtatgctgtcagagaatgttgtaagtgtatcgatgggaagaaggtgggcaaggaactcacggagaaacctaaatttatattgagcgtgctcctgctttggaacttcggcttgttaatcgtggaccacatacacttccagtacaacgggtttctgtttgggcttatgttattgagcatcgctagattatttcagaaaaggcacatggaaggagcatttctgttcgcagtgctcttgcacttcaaacacatttacctatatgttgcccccgcatacggcgtgtatctgcttcgctcctactgcttcacggctaacaagccagacgggagcatcaggtggaaatccttctcctttgtgcgagtaatctccttaggactcgtagtgttcctggtctctgcactgtccctcgggccattccttgcactgaaccaactgcctcaggttttctcacgcctattcccgtttaagaggggactatgccacgcgtattgggcccccaacttctgggctctgtataacgcactcgataaggtgctcagcgtcattgggctcaagctcaagttcctggatcccaataacattcccaaagcatccatgacttccgggctggtccagcagtttcagcatacagtgctgccctccgtcaccccactggctacccttatttgtaccttgatcgcgatcctgccctccatcttttgcttatggttcaaacctcagggcccccggggcttcctcaggtgtctgacgctctgcgctttatccagtttcatgttcggctggcatgtgcacgagaaagcgattctgctggccatcttgccaatgagcctgctgagtgttggcaaagcgggcgatgccagcatctttcttatactgaccactaccggccactatagtctgtttcctttgttatttacagccccagagctgccgatcaagattttactcatgttgctgtttacaatttacagcatcagctccttgaagacgttatttcgaaaagagaaacctctgttcaattggatggagaccttttacctcctcggactaggacctctcgaggtttgttgcgagttcgtgtttcctttcacttcttggaaggtcaaatacccgtttatcccactgctgcttacctctgtatattgcgccgtcgggatcacctatgcctggttcaaactgtatgtaagtgtacttatcgactccgctatcggtaaaacaaaaaaacaatag

SEQ ID NO: 214597 - DNA, 1581 bp, Artificial Sequence
  derived and/or modified sequence
atggccgctctcacgatcgccaccggtacaggtaactggttctccgcgctcgccctaggtgtcacactgctgaagtgccttctgatccctacctatcacagtaccgacttcgaggtacaccgaaactggctggccatcacacactcattacccataagccaatggtattatgaagcaacatctgaatggaccctggattatcctccctttttcgcctggtttgaatatattttatcccacgtagctaagtatttcgatcaggagatgcttaacgtacacaatctgaattactcgagttccaggacgcttctctttcagcggttctctgtgatctttatggacgtgttgtttgtttacgctgtaagggagtgttgcaagtgcattgatggcaagaaggtggggaaggaacttactgaaaaaccaaagttcatcttaagtgtgctgcttttgtggaatttcggccttctgattgtggatcatatccacttccagtataatggctttctcttcggcttgatgttgctctctatcgcacggctgtttcagaagagacatatggagggggcttttctgtttgctgtcctactgcatttcaagcacatttatctgtacgttgctcctgcgtatggtgtttatctgcttcgcagctactgtttcactgccaacaagccggacggttccattaggtggaaaagctttagttttgtccgagtaataagcctcgggttggtcgtgttcttagtctccgcccttagtctcggcccattcctcgcactcaatcagctccctcaggtattctctcggctctttccttttaaaagaggtctgtgtcatgcttactgggcccctaatttttgggctctctataatgcactggataaggtcctgagtgtcattgggcttaaattgaagtttttagaccctaataacattccgaaggcgagtatgacttccgggctcgtgcagcagttccagcacaccgtgttaccatcggtaacgccgcttgccactttgatttgtacacttatcgcaatacttccgtccatcttctgcctctggttcaaaccccagggaccaagggggttcctgcggtgtctaacactctgcgcactttcatccttcatgttcgggtggcacgttcacgaaaaagccattctgctggccattttacctatgtctttgttgagcgttgggaaggccggagacgcatcgatttttctcattctgaccacaacagggcactactctctctttcctcttctatttaccgcacccgagctccctatcaagattctcctcatgttactgttcacgatctattccatttcctccttgaagacgctgtttagaaaggaaaaaccactttttaattggatggaaaccttctacctgctgggcctcgggccactcgaggtctgctgcgagttcgtctttcctttcacctcctggaaagtgaaataccccttcataccattgctgttaactagcgtctattgtgccgtgggcatcacatatgcatggttcaagctgtatgttagcgtcctaattgatagtgccattggcaagaccaagaaacagtag

SEQ ID NO: 214598 - DNA, 1675 bp, Artificial Sequence
  derived and/or modified sequence
agagggctttctccgcatgcgcgggatcccggatgtggatcaagttggtgggaagcgtgcggtgccgcagcaatggcggcgctcacaattgccacgggtactggcaattggttttcggctttggcgctcggggtgactcttctcaaatgccttctcatccccacataccattccacagattttgaagtacaccgaaactggcttgctatcactcacagtttgccaatatcacagtggtattatgaggcaacttcagagtggacgttggattacccccctttctttgcatggtttgagtatatcctgtcacatgttgccaaatattttgatcaagaaatgctgaatgtccataatttgaattactccagctcaaggaccttacttttccagagattttccgtcatctttatggatgtactctttgtgtatgctgtccgtgagtgctgtaaatgcattgatggaaaaaaagtgggtaaagaacttacagaaaagccaaaatttattctgtcggtattacttctgtggaacttcgggttattaattgtggaccatattcattttcagtacaatggctttttatttggattaatgctactctccattgcacgattatttcagaaaaggcatatggaaggagcatttctctttgctgttctcctacatttcaagcatatctacctctatgtagcaccagcttatggtgtatatctgctgcgatcctactgtttcactgcaaataaaccagatgggtctattcgatggaagagtttcagctttgttcgtgttatttccctgggactggttgttttcttagtttctgctctttcattgggtcctttcctggccttgaatcagctgcctcaagtcttttcccgactctttcctttcaagaggggcctctgtcatgcatattgggctccaaacttctgggctttgtacaatgctttggacaaagtgctgtctgtcatcggtttgaaattgaaatttcttgatcccaacaatattcccaaggcctcaatgacaagtggtttggttcagcagttccaacacacagtccttccctcagtgactcccttggcaaccctcatctgcacactgattgccatattgccctctattttctgtctttggtttaaaccccaagggcccagaggctttctccgatgtctaactctttgtgccttgagctcctttatgtttgggtggcatgttcatgaaaaagccatacttctagcaattctcccaatgagccttttgtctgtgggaaaagcaggagacgcttcgatttttctgattctgaccacaacaggacattattccctctttcctctgctcttcactgcaccagaacttcccattaaaatcttactcatgttactattcaccatatatagtatttcgtcactgaagactttattcagaaaagaaaaacctctttttaattggatggaaactttctacctgcttggcctggggcctctggaagtctgctgtgaatttgtattccctttcacctcctggaaggtgaagtaccccttcatccctttgttactaacctcagtgtattgtgcagtaggcatcacatatgcttggttcaaactgtatgtttcagtattgattgactctgctattggcaagacaaagaaacaatgaataaaggaactgcttagatatg

SEQ ID NO: 214599 - DNA, 1677 bp, Artificial Sequence
  derived and/or modified sequence
agcaatggcggcgctcacaattgccacgggtactggcaattggttttcggctttggcgctcggggtgactcttctcaaatgccttctcatccccacataccattccacagattttgaagtacaccgaaactggcttgctatcactcacagtttgccaatatcacagtggtattatgaggcaacttcagagtggacgttggattacccccctttctttgcatggtttgagtatatcctgtcacatgttgccaaatattttgatcaagaaatgctgaatgtccataatttgaattactccagctcaaggaccttacttttccagagattttccgtcatctttatggatgtactctttgtgtatgctgtccgtgagtgctgtaaatgcattgatggaaaaaaagtgggtaaagaacttacagaaaagccaaaatttattctgtcggtattacttctgtggaacttcgggttattaattgtggaccatattcattttcagtacaatggctttttatttggattaatgctactctccattgcacgattatttcagaaaaggcatatggaaggagcatttctctttgctgttctcctacatttcaagcatatctacctctatgtagcaccagcttatggtgtatatctgctgcgatcctactgtttcactgcaaataaaccagatgggtctattcgatggaagagtttcagctttgttcgtgttatttccctgggactggttgttttcttagtttctgctctttcattgggtcctttcctggccttgaatcagctgcctcaagtcttttcccgactctttcctttcaagaggggcctctgtcatgcatattgggctccaaacttctgggctttgtacaatgctttggacaaagtgctgtctgtcatcggtttgaaattgaaatttcttgatcccaacaatattcccaaggcctcaatgacaagtggtttggttcagcagttccaacacacagtccttccctcagtgactcccttggcaaccctcatctgcacactgattgccatattgccctctattttctgtctttggtttaaaccccaagggcccagaggctttctccgatgtctaactctttgtgccttgagctcctttatgtttgggtggcatgttcatgaaaaagccatacttctagcaattctcccaatgagccttttgtctgtgggaaaagcaggagacgcttcgatttttctgattctgaccacaacaggacattattccctctttcctctgctcttcactgcaccagaacttcccattaaaatcttactcatgttactattcaccatatatagtatttcgtcactgaagactttattcagacggagtttcacccttgttgcccaggctggagtgcaatggcacgatctcagctaactgaaacctccgcctcccagaaaagaaaaacctctttttaattggatggaaactttctacctgcttggcctggggcctctggaagtctgctgtgaatttgtattccctttcacctcctggaaggtgaagtaccccttcatccctttgttactaacctcagtgtattgtgcagtaggcatcacatatgcttggttcaaactgtatgtttcagtattgattgactctgctattggcaagacaaagaaacaatgaataaaggaactgcttag

SEQ ID NO: 214600 - DNA, 1581 bp, Artificial Sequence
  derived and/or modified sequence
atggccgccctgaccatcgccaccggcaccggcaactggttcagcgccctggccctgggcgtgaccctgctgaagtgcctgctgatccccacctaccacagcaccgacttcgaggtgcacagaaactggctggccatcacccacagcctgcccatcagccagtggtactacgaggccaccagcgagtggaccctggactacccccccttcttcgcctggttcgagtacatcctgagccacgtggccaagtacttcgaccaggagatgctgaacgtgcacaacctgaactacagcagcagcagaaccctgctgttccagagattcagcgtgatcttcatggacgtgctgttcgtgtacgccgtgagagagtgctgcaagtgcatcgacggcaagaaggtgggcaaggagctgaccgagaagcccaagttcatcctgagcgtgctgctgctgtggaacttcggcctgctgatcgtggaccacatccacttccagtacaacggcttcctgttcggcctgatgctgctgagcatcgccagactgttccagaagagacacatggagggcgccttcctgttcgccgtgctgctgcacttcaagcacatctacctgtacgtggcccccgcctacggcgtgtacctgctgagaagctactgcttcaccgccaacaagcccgacggcagcatcagatggaagagcttcagcttcgtgagagtgatcagcctgggcctggtggtgttcctggtgagcgccctgagcctgggccccttcctggccctgaaccagctgccccaggtgttcagcagactgttccccttcaagagaggcctgtgccacgcctactgggcccccaacttctgggccctgtacaacgccctggacaaggtgctgagcgtgatcggcctgaagctgaagttcctggaccccaacaacatccccaaggccagcatgaccagcggcctggtgcagcagttccagcacaccgtgctgcccagcgtgacccccctggccaccctgatctgcaccctgatcgccatcctgcccagcatcttctgcctgtggttcaagccccagggccccagaggcttcctgagatgcctgaccctgtgcgccctgagcagcttcatgttcggctggcacgtgcacgagaaggccatcctgctggccatcctgcccatgagcctgctgagcgtgggcaaggccggcgacgccagcatcttcctgatcctgaccaccaccggccactacagcctgttccccctgctgttcaccgcccccgagctgcccatcaagatcctgctgatgctgctgttcaccatctacagcatcagcagcctgaagaccctgttcagaaaggagaagcccctgttcaactggatggagaccttctacctgctgggcctgggccccctggaggtgtgctgcgagttcgtgttccccttcaccagctggaaggtgaagtaccccttcatccccctgctgctgaccagcgtgtactgcgccgtgggcatcacctacgcctggttcaagctgtacgtgagcgtgctgatcgacagcgccatcggcaagaccaagaagcagtag

SEQ ID NO: 214601 - protein, 1104 aa, Artificial Sequence
  derived and/or modified sequence
MSFRAARLSMRNRRNDTLDSTRTLYSSASRSTDLSYSESDLVNFIQANFKKRECVFFTKDSKATENVCKCGYAQSQHMEGTQINQSEKWNYKKHTKEFPTDAFGDIQFETLGKKGKYIRLSCDTDAEILYELLTQHWHLKTPNLVISVTGGAKNFALKPRMRKIFSRLIYIAQSKGAWILTGGTHYGLMKYIGEVVRDNTISRSSEENIVAIGIAAWGMVSNRDTLIRNCDAEGYFLAQYLMDDFTRDPLYILDNNHTHLLLVDNGCHGHPTVEAKLRNQLEKYISERTIQDSNYGGKIPIVCFAQGGGKETLKAINTSIKNKIPCVVVEGSGQIADVIASLVEVEDALTSSAVKEKLVRFLPRTVSRLPEEETESWIKWLKEILECSHLLTVIKMEEAGDEIVSNAISYALYKAFSTSEQDKDNWNGQLKLLLEWNQLDLANDEIFTNDRRWESADLQEVMFTALIKDRPKFVRLFLENGLNLRKFLTHDVLTELFSNHFSTLVYRNLQIAKNSYNDALLTFVWKLVANFRRGFRKEDRNGRDEMDIELHDVSPITRHPLQALFIWAILQNKKELSKVIWEQTRGCTLAALGASKLLKTLAKVKNDINAAGESEELANEYETRAVELFTECYSSDEDLAEQLLVYSCEAWGGSNCLELAVEATDQHFIAQPGVQNFLSKQWYGEISRDTKNWKIILCLFIIPLVGCGFVSFRKKPVDKHKKLLWYYVAFFTSPFVVFSWNVVFYIAFLLLFAYVLLMDFHSVPHPPELVLYSLVFVLFCDEVRQWYVNGVNYFTDLWNVMDTLGLFYFIAGIVFRLHSSNKSSLYSGRVIFCLDYIIFTLRLIHIFTVSRNLGPKIIMLQRMLIDVFFFLFLFAVWMVAFGVARQGILRQNEQRWRWIFRSVIYEPYLAMFGQVPSDVDGTTYDFAHCTFTGNESKPLCVELDEHNLPRFPEWITIPLVCIYMLSTNILLVNLLVAMFGYTVGTVQENNDQVWKFQRYFLVQEYCSRLNIPFPFIVFAYFYMVVKKCFKCCCKEKNMESSVCCFKNEDNETLAWEGVMKENYLVKINTKANDTSEEMRHRFRQLDTKLNDLKGLLKEIANKIK

SEQ ID NO: 214602 - protein, 192 aa, Artificial Sequence
  derived and/or modified sequence
MKSFLPVHTIVLIRENVCKCGYAQSQHMEGTQINQSEKWNYKKHTKEFPTDAFGDIQFETLGKKGKYIRLSCDTDAEILYELLTQHWHLKTPNLVISVTGGAKNFALKPRMRKIFSRLIYIAQSKGAWILTGGTHYGLMKYIGEVVRDNTISRSSEENIVAIGIAAWGMVSNRDTLIRNCDAEVPVGQEEVC

SEQ ID NO: 214603 - protein, 165 aa, Artificial Sequence
  derived and/or modified sequence
MEGTQINQSEKWNYKKHTKEFPTDAFGDIQFETLGKKGKYIRLSCDTDAEILYELLTQHWHLKTPNLVISVTGGAKNFALKPRMRKIFSRLIYIAQSKGAWILTGGTHYGLMKYIGEVVRDNTISRSSEENIVAIGIAAWGMVSNRDTLIRNCDAEVPVGQEEVC

SEQ ID NO: 214604 - protein, 682 aa, Artificial Sequence
  derived and/or modified sequence
MQAINTSIKNKIPCVVVEGSGQIADVIASLVEVEDALTSSAVKEKLVRFLPRTVSRLPEEETESWIKWLKEILECSHLLTVIKMEEAGDEIVSNAISYALYKAFSTSEQDKDNWNGQLKLLLEWNQLDLANDEIFTNDRRWESADLQEVMFTALIKDRPKFVRLFLENGLNLRKFLTHDVLTELFSNHFSTLVYRNLQIAKNSYNDALLTFVWKLVANFRRGFRKEDRNGRDEMDIELHDVSPITRHPLQALFIWAILQNKKELSKVIWEQTRGCTLAALGASKLLKTLAKVKNDINAAGESEELANEYETRAVELFTECYSSDEDLAEQLLVYSCEAWGGSNCLELAVEATDQHFIAQPGVQWYVNGVNYFTDLWNVMDTLGLFYFIAGIVFRLHSSNKSSLYSGRVIFCLDYIIFTLRLIHIFTVSRNLGPKIIMLQRMLIDVFFFLFLFAVWMVAFGVARQGILRQNEQRWRWIFRSVIYEPYLAMFGQVPSDVDGTTYDFAHCTFTGNESKPLCVELDEHNLPRFPEWITIPLVCIYMLSTNILLVNLLVAMFGYTVGTVQENNDQVWKFQRYFLVQEYCSRLNIPFPFIVFAYFYMVVKKCFKCCCKEKNMESSVCCFKNEDNETLAWEGVMKENYLVKINTKANDTSEEMRHRFRQLDTKLNDLKGLLKEIANKIK

SEQ ID NO: 214605 - DNA, 3315 bp, Artificial Sequence
  derived and/or modified sequence
atgagcttcagagccgccagactgagcatgagaaacagaagaaacgacaccctggacagcaccagaaccctgtacagcagcgccagcagaagcaccgacctgagctacagcgagagcgacctggtgaacttcatccaggccaacttcaagaagagagagtgcgtgttcttcaccaaggacagcaaggccaccgagaacgtgtgcaagtgcggctacgcccagagccagcacatggagggcacccagatcaaccagagcgagaagtggaactacaagaagcacaccaaggagttccccaccgacgccttcggcgacatccagttcgagaccctgggcaagaagggcaagtacatcagactgagctgcgacaccgacgccgagatcctgtacgagctgctgacccagcactggcacctgaagacccccaacctggtgatcagcgtgaccggcggcgccaagaacttcgccctgaagcccagaatgagaaagatcttcagcagactgatctacatcgcccagagcaagggcgcctggatcctgaccggcggcacccactacggcctgatgaagtacatcggcgaggtggtgagagacaacaccatcagcagaagcagcgaggagaacatcgtggccatcggcatcgccgcctggggcatggtgagcaacagagacaccctgatcagaaactgcgacgccgagggctacttcctggcccagtacctgatggacgacttcaccagagaccccctgtacatcctggacaacaaccacacccacctgctgctggtggacaacggctgccacggccaccccaccgtggaggccaagctgagaaaccagctggagaagtacatcagcgagagaaccatccaggacagcaactacggcggcaagatccccatcgtgtgcttcgcccagggcggcggcaaggagaccctgaaggccatcaacaccagcatcaagaacaagatcccctgcgtggtggtggagggcagcggccagatcgccgacgtgatcgccagcctggtggaggtggaggacgccctgaccagcagcgccgtgaaggagaagctggtgagattcctgcccagaaccgtgagcagactgcccgaggaggagaccgagagctggatcaagtggctgaaggagatcctggagtgcagccacctgctgaccgtgatcaagatggaggaggccggcgacgagatcgtgagcaacgccatcagctacgccctgtacaaggccttcagcaccagcgagcaggacaaggacaactggaacggccagctgaagctgctgctggagtggaaccagctggacctggccaacgacgagatcttcaccaacgacagaagatgggagagcgccgacctgcaggaggtgatgttcaccgccctgatcaaggacagacccaagttcgtgagactgttcctggagaacggcctgaacctgagaaagttcctgacccacgacgtgctgaccgagctgttcagcaaccacttcagcaccctggtgtacagaaacctgcagatcgccaagaacagctacaacgacgccctgctgaccttcgtgtggaagctggtggccaacttcagaagaggcttcagaaaggaggacagaaacggcagagacgagatggacatcgagctgcacgacgtgagccccatcaccagacaccccctgcaggccctgttcatctgggccatcctgcagaacaagaaggagctgagcaaggtgatctgggagcagaccagaggctgcaccctggccgccctgggcgccagcaagctgctgaagaccctggccaaggtgaagaacgacatcaacgccgccggcgagagcgaggagctggccaacgagtacgagaccagagccgtggagctgttcaccgagtgctacagcagcgacgaggacctggccgagcagctgctggtgtacagctgcgaggcctggggcggcagcaactgcctggagctggccgtggaggccaccgaccagcacttcatcgcccagcccggcgtgcagaacttcctgagcaagcagtggtacggcgagatcagcagagacaccaagaactggaagatcatcctgtgcctgttcatcatccccctggtgggctgcggcttcgtgagcttcagaaagaagcccgtggacaagcacaagaagctgctgtggtactacgtggccttcttcaccagccccttcgtggtgttcagctggaacgtggtgttctacatcgccttcctgctgctgttcgcctacgtgctgctgatggacttccacagcgtgccccacccccccgagctggtgctgtacagcctggtgttcgtgctgttctgcgacgaggtgagacagtggtacgtgaacggcgtgaactacttcaccgacctgtggaacgtgatggacaccctgggcctgttctacttcatcgccggcatcgtgttcagactgcacagcagcaacaagagcagcctgtacagcggcagagtgatcttctgcctggactacatcatcttcaccctgagactgatccacatcttcaccgtgagcagaaacctgggccccaagatcatcatgctgcagagaatgctgatcgacgtgttcttcttcctgttcctgttcgccgtgtggatggtggccttcggcgtggccagacagggcatcctgagacagaacgagcagagatggagatggatcttcagaagcgtgatctacgagccctacctggccatgttcggccaggtgcccagcgacgtggacggcaccacctacgacttcgcccactgcaccttcaccggcaacgagagcaagcccctgtgcgtggagctggacgagcacaacctgcccagattccccgagtggatcaccatccccctggtgtgcatctacatgctgagcaccaacatcctgctggtgaacctgctggtggccatgttcggctacaccgtgggcaccgtgcaggagaacaacgaccaggtgtggaagttccagagatacttcctggtgcaggagtactgcagcagactgaacatccccttccccttcatcgtgttcgcctacttctacatggtggtgaagaagtgcttcaagtgctgctgcaaggagaagaacatggagagcagcgtgtgctgcttcaagaacgaggacaacgagaccctggcctgggagggcgtgatgaaggagaactacctggtgaagatcaacaccaaggccaacgacaccagcgaggagatgagacacagattcagacagctggacaccaagctgaacgacctgaagggcctgctgaaggagatcgccaacaagatcaagtag

SEQ ID NO: 214606 - DNA, 579 bp, Artificial Sequence
  derived and/or modified sequence
atgaagagcttcctgcccgtgcacaccatcgtgctgatcagagagaacgtgtgcaagtgcggctacgcccagagccagcacatggagggcacccagatcaaccagagcgagaagtggaactacaagaagcacaccaaggagttccccaccgacgccttcggcgacatccagttcgagaccctgggcaagaagggcaagtacatcagactgagctgcgacaccgacgccgagatcctgtacgagctgctgacccagcactggcacctgaagacccccaacctggtgatcagcgtgaccggcggcgccaagaacttcgccctgaagcccagaatgagaaagatcttcagcagactgatctacatcgcccagagcaagggcgcctggatcctgaccggcggcacccactacggcctgatgaagtacatcggcgaggtggtgagagacaacaccatcagcagaagcagcgaggagaacatcgtggccatcggcatcgccgcctggggcatggtgagcaacagagacaccctgatcagaaactgcgacgccgaggtgcccgtgggccaggaggaggtgtgctag

SEQ ID NO: 214607 - DNA, 498 bp, Artificial Sequence
  derived and/or modified sequence
atggagggcacccagatcaaccagagcgagaagtggaactacaagaagcacaccaaggagttccccaccgacgccttcggcgacatccagttcgagaccctgggcaagaagggcaagtacatcagactgagctgcgacaccgacgccgagatcctgtacgagctgctgacccagcactggcacctgaagacccccaacctggtgatcagcgtgaccggcggcgccaagaacttcgccctgaagcccagaatgagaaagatcttcagcagactgatctacatcgcccagagcaagggcgcctggatcctgaccggcggcacccactacggcctgatgaagtacatcggcgaggtggtgagagacaacaccatcagcagaagcagcgaggagaacatcgtggccatcggcatcgccgcctggggcatggtgagcaacagagacaccctgatcagaaactgcgacgccgaggtgcccgtgggccaggaggaggtgtgctag

SEQ ID NO: 214608 - DNA, 2049 bp, Artificial Sequence
  derived and/or modified sequence
atgcaggccatcaacaccagcatcaagaacaagatcccctgcgtggtggtggagggcagcggccagatcgccgacgtgatcgccagcctggtggaggtggaggacgccctgaccagcagcgccgtgaaggagaagctggtgagattcctgcccagaaccgtgagcagactgcccgaggaggagaccgagagctggatcaagtggctgaaggagatcctggagtgcagccacctgctgaccgtgatcaagatggaggaggccggcgacgagatcgtgagcaacgccatcagctacgccctgtacaaggccttcagcaccagcgagcaggacaaggacaactggaacggccagctgaagctgctgctggagtggaaccagctggacctggccaacgacgagatcttcaccaacgacagaagatgggagagcgccgacctgcaggaggtgatgttcaccgccctgatcaaggacagacccaagttcgtgagactgttcctggagaacggcctgaacctgagaaagttcctgacccacgacgtgctgaccgagctgttcagcaaccacttcagcaccctggtgtacagaaacctgcagatcgccaagaacagctacaacgacgccctgctgaccttcgtgtggaagctggtggccaacttcagaagaggcttcagaaaggaggacagaaacggcagagacgagatggacatcgagctgcacgacgtgagccccatcaccagacaccccctgcaggccctgttcatctgggccatcctgcagaacaagaaggagctgagcaaggtgatctgggagcagaccagaggctgcaccctggccgccctgggcgccagcaagctgctgaagaccctggccaaggtgaagaacgacatcaacgccgccggcgagagcgaggagctggccaacgagtacgagaccagagccgtggagctgttcaccgagtgctacagcagcgacgaggacctggccgagcagctgctggtgtacagctgcgaggcctggggcggcagcaactgcctggagctggccgtggaggccaccgaccagcacttcatcgcccagcccggcgtgcagtggtacgtgaacggcgtgaactacttcaccgacctgtggaacgtgatggacaccctgggcctgttctacttcatcgccggcatcgtgttcagactgcacagcagcaacaagagcagcctgtacagcggcagagtgatcttctgcctggactacatcatcttcaccctgagactgatccacatcttcaccgtgagcagaaacctgggccccaagatcatcatgctgcagagaatgctgatcgacgtgttcttcttcctgttcctgttcgccgtgtggatggtggccttcggcgtggccagacagggcatcctgagacagaacgagcagagatggagatggatcttcagaagcgtgatctacgagccctacctggccatgttcggccaggtgcccagcgacgtggacggcaccacctacgacttcgcccactgcaccttcaccggcaacgagagcaagcccctgtgcgtggagctggacgagcacaacctgcccagattccccgagtggatcaccatccccctggtgtgcatctacatgctgagcaccaacatcctgctggtgaacctgctggtggccatgttcggctacaccgtgggcaccgtgcaggagaacaacgaccaggtgtggaagttccagagatacttcctggtgcaggagtactgcagcagactgaacatccccttccccttcatcgtgttcgcctacttctacatggtggtgaagaagtgcttcaagtgctgctgcaaggagaagaacatggagagcagcgtgtgctgcttcaagaacgaggacaacgagaccctggcctgggagggcgtgatgaaggagaactacctggtgaagatcaacaccaaggccaacgacaccagcgaggagatgagacacagattcagacagctggacaccaagctgaacgacctgaagggcctgctgaaggagatcgccaacaagatcaagtag

SEQ ID NO: 214609 - DNA, 3315 bp, Artificial Sequence
  derived and/or modified sequence
atgtctttcagagcggcacgactgtccatgaggaatcgcaggaacgacaccctggactctactcgcaccctctacagctcggcctcacgctccacagatctgtcttatagtgagtcagatctggttaattttatccaggccaacttcaagaaaagagaatgcgtgttttttaccaaagactctaaagctaccgaaaatgtgtgtaaatgcggctatgcgcagagtcagcatatggaaggtactcagattaaccagtctgaaaaatggaattataagaaacataccaaggaattcccaactgacgctttcggagatatccagttcgaaacactggggaaaaaggggaagtacatccgcctgagttgtgataccgacgctgagatcctgtacgagctgttgacacagcattggcacctgaaaacccccaacctagtcatttcagtgacaggcggggcaaagaattttgctctgaagccacgcatgcggaaaattttttcccgcctcatttacatcgcccagtctaaaggagcctggatcctgaccggaggaacccactacggcctgatgaagtatataggcgaggttgttcgagacaacaccatatcacgctccagcgaagagaatatcgtggccatcggaatagcggcgtggggcatggtgtcaaacagggacactctgattaggaactgcgatgccgagggctactttctggctcagtacctgatggacgactttacaagggaccccctgtatattctggataacaaccacacccacctgttgctggttgacaatggctgccatggccatccaaccgtggaggcaaagctgcggaaccagctggagaaatatatctccgaaagaacaatacaggatagcaattacgggggaaagattccgattgtgtgcttcgcccaagggggtggtaaggagactctcaaagcaattaacacaagtatcaagaacaaaatcccctgtgtcgtagtggaaggcagtggccagattgcggacgtgatcgccagcttggtggaggttgaggatgcacttacttcaagcgccgttaaggaaaaactcgtgcgatttttgccccggactgttagtcgactgcctgaggaagagaccgaatcctggataaagtggctgaaggaaattctagagtgcagtcaccttctgactgtaattaagatggaagaagccggtgatgagatcgtttccaatgcaatctcctacgcattgtacaaggcattctctacctccgagcaggataaagacaattggaacggacagttaaaactgctgttagaatggaatcaattggacttggccaacgatgaaatcttcacaaacgacaggaggtgggaaagcgccgaccttcaagaagtgatgttcactgctctgatcaaggataggcccaagttcgtgcgactctttctcgagaacggacttaatctgcgtaagtttctgacacacgacgttctgacagagctcttttccaaccacttctcaaccctagtctacagaaatctccaaatcgcgaaaaatagttacaatgacgccctgctgactttcgtgtggaagctagtggctaacttccgaaggggctttaggaaggaggatcgcaatggccgggacgaaatggacatagagctgcatgatgtttcgcccattacacggcatccccttcaagccctcttcatctgggccatcctgcaaaacaaaaaggagctgtctaaggtgatttgggaacagacaagaggctgtacacttgctgcactcggcgcatctaagctgctaaagaccttagctaaagtgaaaaatgacattaatgcggccggcgagtctgaagagctagcaaatgagtatgagacgagagctgtggagctgttcacagaatgctactcctctgatgaagacttagccgagcaactcctggtgtatagctgtgaagcctggggtggaagcaattgcctcgaacttgctgtcgaggctaccgatcagcactttatagcccagccaggcgtgcagaacttcctttctaagcaatggtatggagaaatctcccgcgacactaagaattggaagattatcctgtgcctgttcatcataccccttgtgggctgtggcttcgtgagcttcaggaagaaacccgtggataagcataagaagctgctgtggtactatgtcgcgttctttacgtccccattcgtggttttcagctggaacgtcgtgttctacatcgcatttcttcttctcttcgcttatgttctgctcatggatttccatagcgttccccatcctcccgaattggtgctttatagcctggttttcgttctgttctgcgacgaggtgaggcagtggtatgtcaatggtgtaaattattttaccgacttatggaacgtaatggacacgctgggcctcttctattttatagctggtatcgtgttccggctgcatagcagcaacaaaagtagtctctacagcggccgggtgatcttttgcctcgattatatcatctttaccctgcgcctgattcatatctttaccgtgtctaggaatcttgggcccaagatcataatgctgcagagaatgctgatagacgtcttcttcttcctgtttctcttcgcagtctggatggttgccttcggcgtggctcgtcaggggatccttcgacagaatgagcagcggtggcgttggatttttagatcagttatctatgaaccttacttagcaatgtttggacaggtgcctagcgatgttgatggaacaacatacgatttcgctcactgtacctttaccggcaacgagtcaaaacctctctgtgtcgaactggatgagcacaatcttccacggtttccagagtggattacaatcccattggtgtgtatctatatgctgtccaccaacattctgttggtaaatttgcttgtggcgatgttcgggtatacggtcgggacggtgcaggagaacaatgaccaggtttggaagttccagagatatttcttggtgcaggaatactgcagcaggctcaatatcccctttcctttcatcgtttttgcatacttttacatggtcgtcaagaaatgcttcaaatgttgctgtaaggagaaaaatatggagtcatcggtgtgctgcttcaagaatgaggacaatgaaactctggcatgggagggggtgatgaaggagaattacctggtgaaaatcaatacaaaagctaacgacactagcgaagagatgcggcatcgtttccgtcagcttgacactaaattgaatgacctaaaagggctcctaaaagagattgcaaacaagatcaagtag

SEQ ID NO: 214610 - DNA, 579 bp, Artificial Sequence
  derived and/or modified sequence
atgaagagcttcttgcctgtgcacactattgtccttatccgcgagaacgtgtgcaagtgtgggtatgctcagtcccagcacatggaaggaacacagatcaaccagagcgagaaatggaactacaaaaagcacacaaaagagtttcccaccgatgcctttggggacatccagttcgagacactgggcaagaaaggtaagtatatcagactgagttgcgacaccgatgccgagatcctttacgagctgctgacccagcattggcacctgaaaacccccaatctggtgatcagtgtgacaggcggcgctaagaactttgcccttaagccaaggatgaggaaaatctttagcaggctcatctatatagcccaatccaagggggcctggatattgaccggggggacccactatgggctgatgaaatatatcggcgaggtggtgcgagataatactatttcccggagttctgaggagaacatcgtcgctataggaatagcggcctggggcatggtttcgaatcgagataccctaatcagaaactgcgatgcagaagttcccgtggggcaggaggaggtgtgttag

SEQ ID NO: 214611 - DNA, 498 bp, Artificial Sequence
  derived and/or modified sequence
atggaaggaacgcagatcaaccagtcagaaaaatggaactacaagaagcacactaaggagtttcccacagacgcctttggagatattcagtttgagacattaggtaagaaggggaaatacatcagactcagttgtgatacggacgctgaaattctgtatgagctgctaacacagcactggcacctgaaaaccccaaatttagtaatcagcgtgaccggtggggctaaaaacttcgctctcaaaccaagaatgcggaagattttcagtagacttatctatatcgcacagtctaaaggggcttggattctcaccggcggaacacactacggcctcatgaagtatataggggaggtcgtgcgcgacaacaccatcagtagatcctccgaggaaaacattgtggctatcgggatcgcggcttgggggatggtatccaatagggataccttgatcaggaactgcgacgctgaagtcccagtggggcaggaagaagtctgctag

SEQ ID NO: 214612 - DNA, 2049 bp, Artificial Sequence
  derived and/or modified sequence
atgcaggccatcaatacctccattaagaataaaattccatgtgttgttgtggagggttccggacagatcgccgatgtgatcgcttctttggtggaggttgaagatgctctgacttccagtgccgttaaagaaaagttggttcggttcctgccgcggactgtgtcgcggctaccggaggaggagactgaatcatggatcaagtggctgaaagagattctggaatgtagtcacctactgactgtcatcaagatggaggaggcgggcgatgagattgtcagcaacgcaattagctacgccttgtacaaagctttcagcactagtgaacaggataaggataattggaacggacagttaaagctgctgctagagtggaatcaactcgacttagctaatgacgagatctttaccaatgatagaagatgggagtccgccgacctccaggaggtaatgttcacggcactgattaaagatcggcccaagttcgttcggctattcctggaaaatggtctcaaccttagaaaattcctgacacacgacgtcctgaccgagttgtttagtaatcacttctctacgttagtgtaccgaaacctccagattgccaagaattcctacaatgatgctcttctgaccttcgtatggaaattggtggccaacttccgcagaggatttcggaaagaggatagaaatgggagagacgaaatggacatcgagctgcatgatgtgagtccaattacgaggcaccccttgcaggccctgtttatctgggcaatactgcagaacaaaaaagaactgtcgaaagtaatttgggaacagactcgcggttgcaccctagcagctctcggagccagcaagttacttaaaacactcgcaaaagttaagaacgatatcaacgctgccggcgagtccgaggaactcgctaatgaatacgagacccgggccgtagaactcttcactgaatgctattcctccgacgaggacttggcggagcagttgttagtgtacagctgtgaggcctggggcggctcgaattgcctggagttggcggtggaagcaacagaccagcacttcattgcgcaacctggcgtccagtggtacgtcaatggagtgaactattttaccgacttgtggaatgtaatggacacgttaggcctgttttacttcatcgctggaatcgtcttccgcctccactcatcgaataagagtagcctgtactctggaagagttatcttctgcctcgactatattatctttacactgagattaatccacatctttaccgtaagtcggaatttgggaccaaaaatcattatgctgcaaaggatgctgatcgacgtctttttcttcctgtttcttttcgctgtctggatggttgcttttggggtcgcacggcagggcattctcagacaaaacgaacagaggtggcgctggatcttcagaagtgtcatctatgagccttacttggcgatgtttggccaggtaccgtcagacgtggatggaacaacctacgacttcgctcactgcacctttacggggaacgaatccaagccgctctgtgtagaactggatgagcataatctcccccgtttccccgaatggatcacaatacccctggtgtgtatttatatgctgtctaccaacattctgctagtgaacctgctcgtggccatgttcggctacacagttggaacagtacaggaaaataacgaccaggtatggaaattccagcggtactttttggtgcaggaatattgcagtcgccttaatatcccctttcccttcatcgtgttcgcttatttctacatggttgtcaaaaagtgttttaagtgctgctgcaaagagaagaacatggagtccagcgtatgttgttttaagaacgaagacaatgaaacattagcctgggagggcgtcatgaaagaaaattacctggttaagataaacactaaggccaacgatacttcggaggagatgcgccacaggttccgacagctggacactaagctgaatgaccttaaagggctcttaaaggagatcgcaaacaagatcaagtag

SEQ ID NO: 214613 - DNA, 3315 bp, Artificial Sequence
  derived and/or modified sequence
atgtccttccgggccgcccggctgtccatgaggaacagaagaaatgacaccctggacagcaccaggaccctgtacagcagcgccagccgcagcacagacctgagctacagcgagagtgacctggtgaacttcatccaggccaacttcaagaagagagaatgtgtgttcttcaccaaggacagcaaggccacagaaaatgtgtgcaagtgtggctacgcccagagccagcacatggagggcacccagatcaaccagagcgagaagtggaactacaagaagcacaccaaggagttccccacagatgcctttggagacatccagtttgagaccctgggcaagaagggcaagtacatccggctgagctgtgacacagatgctgagatcctgtatgagctgctgacccagcactggcacctgaagacccccaacctggtgatctctgtgactggaggagccaagaactttgccctgaagcccaggatgaggaagatcttcagccgcctcatctacatcgcccagagcaaaggagcctggatcctgactggaggcacccactacggcctgatgaagtacatcggggaggtggtgcgggacaacaccatcagccgcagcagtgaagaaaatattgtggccatcggcattgctgcctggggcatggtgagcaacagagacaccctcatccggaactgtgatgctgagggctacttcctggcccagtacctgatggatgacttcacccgggaccccctgtacatcctggacaacaaccacacccacctgctgctggtggacaatggctgccacggccaccccaccgtggaggccaagctgaggaaccagctggagaagtacatcagcgagaggaccatccaggacagcaactatggaggcaagatccccatcgtgtgctttgcccagggcggcggcaaggagaccctgaaggccatcaacaccagcatcaagaacaagatcccctgtgtggtggtggagggcagcggccagattgctgatgtgattgccagcctggtggaggtggaggatgccctgaccagcagcgctgtgaaggagaagctggtgcgcttcctgcccaggacagtgtcccggctgcctgaggaggagacagagagctggatcaagtggctgaaggagatcctggagtgcagccacctgctgaccgtcatcaagatggaggaggccggagatgaaattgtgtccaatgccatctcctatgccctgtacaaggccttcagcaccagcgagcaggacaaggacaactggaatggccagctgaagctgctgctggagtggaaccagctggacctggccaatgatgagatcttcaccaatgaccggcgctgggagagcgctgacctgcaggaggtgatgttcaccgccctgatcaaggaccggcccaagtttgtgcggctcttcctggagaatggcctgaacctgaggaagttcctgacccatgatgtgctgacagagctgttcagcaaccacttcagcaccctggtgtacagaaacctgcagatcgccaagaacagctacaatgatgccctgctgacctttgtgtggaagctggtggccaacttccggcggggcttcaggaaggaggacagaaatggaagagatgagatggacatcgagctgcatgatgtgagccccatcaccaggcaccccctgcaggccctcttcatctgggccatcctgcagaacaagaaggagctgagcaaggtgatctgggagcagacccggggctgcaccctggccgccctgggcgccagcaagctgctgaagaccctggccaaggtgaagaatgacatcaatgctgctggggagagcgaggagctggccaatgaatatgagaccagggctgtggagctgttcacagagtgctacagcagtgatgaggacctggccgagcagctgctggtgtacagctgtgaggcctggggcggcagcaactgcctggagctggccgtggaggccacagaccagcacttcatcgcccagcccggggtgcagaacttcctgagcaagcagtggtatggagagatcagccgggacaccaagaactggaagatcatcctgtgcctcttcatcatccccctggtgggctgcggctttgtgtccttcaggaagaagcctgtggacaagcacaagaagctgctgtggtactacgtggccttcttcaccagcccctttgtggtgttctcctggaatgtggtgttctacatcgccttcctgctgctgtttgcctacgtgctgctgatggacttccacagcgtgccccaccccccagagctggtgctgtacagcctggtgtttgtgctcttctgtgatgaggtgcggcagtggtacgtgaatggagtgaactacttcacagacctgtggaatgtgatggacaccctgggcctcttctacttcatcgccggcatcgtgttccggctgcacagcagcaacaagagcagcctgtacagcggccgggtcatcttctgcctggactacatcatcttcaccctgcggctcatccacatcttcaccgtgtccaggaacctgggccccaagatcatcatgctgcagaggatgctgattgatgtgttcttcttcctgttcctgtttgctgtgtggatggtggcctttggagtggcccggcagggcatcctgcggcagaatgagcagcgctggcgctggatcttccgcagcgtcatctatgagccctacctggccatgtttggccaggtgcccagtgatgtggatggcaccacctatgactttgcccactgcaccttcaccggaaatgaaagcaagcccctgtgtgtggagctggatgagcacaacctgccccgcttccctgagtggatcaccatccccctggtgtgcatctacatgctgagcaccaacatcctgctggtgaacctgctggtggccatgtttggctacacagtgggcaccgtgcaggagaacaatgaccaggtgtggaagttccagcgctacttcctggtgcaggagtactgcagccggctgaacatccccttccccttcatcgtgtttgcctacttctacatggtggtgaagaagtgcttcaagtgctgctgcaaggagaagaacatggagagctctgtgtgctgcttcaagaatgaagataatgagaccctggcctgggagggcgtgatgaaggagaactacctggtgaagatcaacaccaaggccaatgacaccagcgaggagatgaggcaccgcttccggcagctggacaccaagctgaatgacctgaagggcctgctgaaggagatcgccaacaagatcaagtag

SEQ ID NO: 214614 - DNA, 579 bp, Artificial Sequence
  derived and/or modified sequence
atgaagagcttcctgcctgtgcacaccatcgtgctgatcagagaaaatgtgtgcaagtgtggctacgcccagagccagcacatggagggcacccagatcaaccagagcgagaagtggaactacaagaagcacaccaaggagttccccacagatgcctttggagacatccagtttgagaccctgggcaagaagggcaagtacatccggctgagctgtgacacagatgctgagatcctgtatgagctgctgacccagcactggcacctgaagacccccaacctggtgatctctgtgactggaggagccaagaactttgccctgaagcccaggatgaggaagatcttcagccgcctcatctacatcgcccagagcaaaggagcctggatcctgactggaggcacccactacggcctgatgaagtacatcggggaggtggtgcgggacaacaccatcagccgcagcagtgaagaaaatattgtggccatcggcattgctgcctggggcatggtgagcaacagagacaccctcatccggaactgtgatgctgaggtgcctgtgggccaggaggaggtgtgctag

SEQ ID NO: 214615 - DNA, 498 bp, Artificial Sequence
  derived and/or modified sequence
atggagggcacccagatcaaccagagcgagaagtggaactacaagaagcacaccaaggagttccccacagatgccttcggggacatccagtttgagaccctgggcaagaagggcaagtacatccggctgagctgtgacacagatgctgagatcctgtatgagctgctgacccagcactggcacctgaagacccccaacctggtgatctctgtgactggaggagccaagaactttgccctgaagcccaggatgaggaagatcttcagccgcctcatctacatcgcccagagcaagggggcctggatcctgaccggcggcacccactacggcctgatgaagtacatcggggaggtggtgcgggacaacaccatcagccgcagcagcgaggagaacatcgtggccatcggcattgctgcctggggcatggtgagcaacagagacaccctcatccggaactgtgatgctgaggtgcctgtgggccaggaggaggtgtgctag

SEQ ID NO: 214616 - DNA, 2049 bp, Artificial Sequence
  derived and/or modified sequence
atgcaggccatcaacaccagcatcaagaacaagatcccctgtgtggtggtggagggcagcggccagattgctgatgtgattgccagcctggtggaggtggaggatgccctgaccagcagcgctgtgaaggagaagctggtgcgcttcctgcccaggacagtgtcccggctgcctgaggaggagacagagagctggatcaagtggctgaaggagatcctggagtgcagccacctgctgaccgtcatcaagatggaggaggccggagatgaaattgtgtccaatgccatctcctatgccctgtacaaggccttcagcaccagcgagcaggacaaggacaactggaatggccagctgaagctgctgctggagtggaaccagctggacctggccaatgatgagatcttcaccaatgaccggcgctgggagagcgctgacctgcaggaggtgatgttcaccgccctgatcaaggaccggcccaagtttgtgcggctcttcctggagaatggcctgaacctgaggaagttcctgacccatgatgtgctgacagagctgttcagcaaccacttcagcaccctggtgtacagaaacctgcagatcgccaagaacagctacaatgatgccctgctgacctttgtgtggaagctggtggccaacttccggcggggcttcaggaaggaggacagaaatggaagagatgagatggacatcgagctgcatgatgtgagccccatcaccaggcaccccctgcaggccctcttcatctgggccatcctgcagaacaagaaggagctgagcaaggtgatctgggagcagacccggggctgcaccctggccgccctgggcgccagcaagctgctgaagaccctggccaaggtgaagaatgacatcaatgctgctggggagagcgaggagctggccaatgaatatgagaccagggctgtggagctgttcacagagtgctacagcagtgatgaggacctggccgagcagctgctggtgtacagctgtgaggcctggggcggcagcaactgcctggagctggccgtggaggccacagaccagcacttcatcgcccagcccggggtgcagtggtacgtgaatggagtgaactacttcacagacctgtggaatgtgatggacaccctgggcctcttctacttcatcgccggcatcgtgttccggctgcacagcagcaacaagagcagcctgtacagcggccgggtcatcttctgcctggactacatcatcttcaccctgcggctcatccacatcttcaccgtgtccaggaacctgggccccaagatcatcatgctgcagaggatgctgattgatgtgttcttcttcctgttcctgtttgctgtgtggatggtggcctttggagtggcccggcagggcatcctgcggcagaatgagcagcgctggcgctggatcttccgcagcgtcatctatgagccctacctggccatgtttggccaggtgcccagtgatgtggatggcaccacctatgactttgcccactgcaccttcaccggaaatgaaagcaagcccctgtgtgtggagctggatgagcacaacctgccccgcttccctgagtggatcaccatccccctggtgtgcatctacatgctgagcaccaacatcctgctggtgaacctgctggtggccatgtttggctacacagtgggcaccgtgcaggagaacaatgaccaggtgtggaagttccagcgctacttcctggtgcaggagtactgcagccggctgaacatccccttccccttcatcgtgtttgcctacttctacatggtggtgaagaagtgcttcaagtgctgctgcaaggagaagaacatggagagctctgtgtgctgcttcaagaatgaagataatgagaccctggcctgggagggcgtgatgaaggagaactacctggtgaagatcaacaccaaggccaatgacaccagcgaggagatgaggcaccgcttccggcagctggacaccaagctgaatgacctgaagggcctgctgaaggagatcgccaacaagatcaagtag

SEQ ID NO: 214617 - DNA, 3315 bp, Artificial Sequence
  derived and/or modified sequence
atgagcttccgggccgcccggctgagcatgcggaaccggcggaacgataccctggattcaacgagaacgctgtactcttctgcctctcgcagcacggacctgagctactccgaaagcgatctggttaactttatccaggcgaattttaaaaaacgtgaatgcgtcttcttcacaaaggattcaaaagctacagagaacgtgtgcaaatgtgggtatgcgcagtcccagcacatggaaggaacccagatcaaccagagcgagaagtggaactacaagaaacacaccaaagagttccccacagacgcgtttggcgacattcaatttgaaactttaggcaagaaagggaaatacattagattgtcttgcgatacagacgccgagatcctctacgagttgcttacgcagcactggcacctgaaaacccccaacctggtaatcagtgtcactggtggggctaagaattttgctcttaaaccacgtatgagaaagatctttagcagactgatttatattgcccaaagcaagggggcatggatcctcactgggggcacacattatgggcttatgaaatatatcggagaggtcgtgagggacaacaccatctcgcgcagcagcgaggagaatattgtggcgataggcatagccgcctggggtatggtgtcgaaccgcgacaccctgatccgcaactgtgatgctgaaggttacttcttagcccagtacctaatggacgattttaccagagaccctctgtatattctagacaacaatcatacacatcttttgctcgttgataatgggtgtcacggacaccctactgtcgaggctaagcttcggaatcaactagagaagtacatatccgaacgtactatacaggattctaattacggcgggaagatccctattgtatgtttcgcacaggggggtgggaaggagacgctgaaggccattaatacttctataaagaataagataccctgcgtcgtggttgagggctctggacagatagcagacgtgatagcttccctcgttgaagtggaggacgccctgaccagtagcgcagtgaaggagaagctggtgcgcttcttgccacgaactgtctctcgactccctgaagaggagaccgagagttggattaagtggctcaaggaaatccttgagtgcagccacctgcttacagtgatcaagatggaagaggctggggatgagattgttagcaatgccatttcctatgctctgtacaaagcattttcaactagcgagcaagataaggataactggaatgggcagctgaagcttctccttgaatggaaccagctggacctggcgaacgacgaaattttcactaacgataggaggtgggaatctgcggacctgcaagaagtgatgtttaccgccctgataaaagaccgaccgaagttcgtgcgactctttcttgagaacgggctcaatctgcggaaattccttacccacgatgtactgaccgagctattttcaaatcacttctctactctggtttatcggaatctgcagatcgcaaaaaacagctacaacgacgcattacttactttcgtgtggaaactggtggccaattttcgccgagggttcagaaaggaggatcggaacggcagggacgaaatggacattgagctccacgatgtgtcccccatcaccagacacccgctccaggcattgttcatatgggcaatcctgcagaacaaaaaagaactctccaaagtgatctgggaacagactagggggtgtacattggccgctcttggcgcaagcaagctgctgaaaaccttagcgaaagtcaaaaacgatatcaacgctgctggcgaatccgaggaactagccaacgaatatgagactagggccgtcgaattgttcaccgagtgttactccagcgacgaggatcttgcagagcagttgttggtgtacagctgtgaagcctggggtgggagcaattgtcttgagcttgccgtcgaggctacggatcaacattttatagcccagcccggagtgcagaattttctgagtaagcagtggtacggtgaaatcagcagggacaccaaaaattggaagattatcctgtgtctcttcattattccacttgttgggtgtggcttcgtctcctttaggaaaaagcctgtcgacaagcacaagaagcttttgtggtattacgtggcgttcttcacgtcaccctttgtggttttttcctggaacgtagtgttctatatcgcattcctattgctctttgcttacgtcctgctgatggactttcactccgtgccacacccccccgagctggttctgtactccttagtgttcgtgctgttttgtgacgaggtcagacaatggtatgttaacggggtgaactacttcaccgatctgtggaatgtgatggacacgcttgggttgttttactttatagcggggatagtgtttcgtttgcactctagtaataagtcatcgctgtattccggccgcgttattttttgcttggattatataatcttcactctgcgactgatacacatttttacagtctcccggaatttgggtcccaagattataatgttacaacgcatgctgattgacgtattcttctttctcttcctgttcgccgtctggatggttgcttttggagtggcgagacaaggaattctacgacagaatgaacaacgctggagatggatatttcgttccgttatatacgagccatacttagccatgttcggccaggtcccttctgatgtagatggcaccacttacgactttgcacattgtaccttcacgggcaatgagagcaaacccttgtgcgtcgagctggacgaacacaacctgccccgtttccccgaatggattacgatccccttggtgtgcatttacatgctatctacgaacattcttttagtaaacttacttgtggcaatgttcggctataccgtcgggactgtgcaggaaaacaacgaccaggtttggaaatttcagagatacttccttgtccaggaatactgcagccggcttaacatcccctttccatttatcgttttcgcctatttctatatggtggtgaaaaagtgtttcaaatgctgctgcaaggagaagaatatggagtcttctgtctgctgctttaaaaacgaggataatgagacactggcatgggaaggcgtaatgaaggaaaactatttagtcaagatcaacacaaaggcaaacgacacttccgaggagatgcggcataggtttcgccaactggacaccaagctgaacgatcttaaaggcctgcttaaggaaatagctaataagatcaagtag

SEQ ID NO: 214618 - DNA, 579 bp, Artificial Sequence
  derived and/or modified sequence
atgaagagcttcctgcccgtgcacaccatcgtgctgatccgggagaatgtttgtaaatgcggatacgcacagagccagcatatggaaggaacccagataaaccagtctgaaaaatggaactacaagaagcatacgaaagaatttcctaccgatgcctttggagatattcagtttgagactcttggaaaaaagggaaagtacatccgcctgtcctgtgatacagatgcggaaatcctgtacgagcttctgacccagcactggcatctcaaaactcccaatctggtgatatcggtgacaggaggtgccaagaacttcgcacttaagccaaggatgcgcaaaatcttctcacgtctgatctacatcgcccagtcaaaaggagcctggattctgaccggcggtacccactacggcctgatgaaatacataggcgaggtggttcgggataatactattagcagaagcagtgaagagaacatcgtggccatcggaattgcagcctggggcatggtttctaacagggatacactcataagaaactgtgatgccgaggtccctgtgggccaagaagaggtgtgctag

SEQ ID NO: 214619 - DNA, 498 bp, Artificial Sequence
  derived and/or modified sequence
atggagggcacccagatcaaccagagcgagaagtggaactacaagaagcataccaaagagtttcccaccgacgcatttggggacattcagtttgagaccctcggaaagaaagggaaatacattcgccttagctgcgacactgatgcggagattctctatgagctgctgacccagcattggcacttaaagacccccaatctagttatttccgttaccggcggcgccaaaaactttgctcttaagccacgaatgcgcaaaatcttttcccgcctgatctatatcgcccaatctaaaggtgcttggattctgacagggggaactcactatggacttatgaaatacattggggaggttgtgagagataacaccatcagcaggtcttcagaagagaatatcgtggcaataggcatcgcagcttggggcatggtcagcaatagagacactctaatccgtaactgcgatgccgaggtgcctgtcgggcaggaggaggtttgttag

SEQ ID NO: 214620 - DNA, 2049 bp, Artificial Sequence
  derived and/or modified sequence
atgcaggccatcaacaccagcatcaagaacaagatcccctgcgtggtggtcgaaggcagcggccagattgctgatgttatcgcttctctcgttgaggtagaggacgcactgacaagcagcgccgttaaggaaaagctggtgagatttcttcctcgaaccgtgtcccgactacccgaggaggaaaccgaaagttggataaagtggctgaaagagatcctcgaatgcagccacctactgaccgtcatcaagatggaggaagcaggggatgagatcgtaagtaatgccatctcttacgcattgtacaaagccttctcaacatcagagcaagataaggacaattggaacggccagttgaagctgctgctggagtggaatcagttggatctggctaacgacgaaatttttacaaatgatagacgatgggaatcagctgacctgcaggaggtgatgtttacagcactgatcaaggataggcccaagtttgtgcgcctattccttgagaacggacttaatctacgcaagttcctgacccatgacgtgctcacagaactgttttcgaaccacttcagtacactagtgtatcggaatttacaaattgctaagaactcatacaacgacgcactgctgacgttcgtgtggaagcttgtggcaaattttaggcggggattcaggaaggaagaccgtaacggtcgggacgaaatggacattgagttacatgacgtctctccaattacacgtcacccactccaggctctcttcatctgggctatccttcaaaacaaaaaggagctgtctaaggtgatctgggagcaaacgagagggtgcaccctcgcagcacttggggcatctaagctgctcaaaactctggccaaggtcaaaaatgatatcaatgccgcgggcgaatctgaggaacttgctaacgaatacgagaccagggctgttgagctgttcacagagtgctactcttctgacgaagaccttgccgagcagcttctcgtctattcttgcgaggcatgggggggtagcaattgtttggagctggctgtcgaggctaccgaccagcatttcatagcccagcctggcgttcagtggtatgttaatggcgtcaactatttcaccgatctgtggaacgtgatggatactctgggtctcttttattttatagccggaattgtattcaggctgcatagttccaacaaatcctcattatactcagggagagtaattttctgccttgactacattatctttacattgagattgattcacatttttaccgttagcaggaacctgggacctaaaattattatgctgcagcgaatgctgatcgatgtcttcttcttcctgttcctgttcgcggtgtggatggtggcctttggcgtcgctcgccaaggaatccttaggcagaatgagcagcggtggcgctggatatttcgatccgtgatttatgaaccctacctagccatgttcgggcaggtgccctccgacgtagacgggaccacatacgatttcgctcactgtaccttcaccgggaatgaaagcaagccactttgtgtcgaactggatgagcacaacctgccacggtttcccgaatggatcactatcccactcgtctgcatctatatgctgagtacaaacatcctactagttaacctgctagtcgccatgtttggctacacggtcggaaccgtccaggaaaacaacgaccaggtttggaaatttcaacgctactttctagtgcaagagtattgctctagactcaacattccattcccctttatagtgttcgcctacttctatatggtggtgaagaagtgtttcaagtgttgttgtaaggagaaaaatatggaaagctccgtttgctgttttaagaatgaggataacgagaccctagcatgggaaggtgttatgaaagaaaactatctcgtcaagataaacacaaaggctaacgatacgtctgaggaaatgaggcatcggttccggcagctggatacgaaactcaatgacttgaagggactgttgaaggaaatagctaataagatcaaatag

SEQ ID NO: 214621 - DNA, 3315 bp, Artificial Sequence
  derived and/or modified sequence
atgagcttcagggctgccaggctgtccatgaggaatcgtaggaatgacaccctcgacagcactcggactctgtattcaagtgcttcacgatctacggatctcagctattcagaaagtgatctggtgaatttcattcaggccaattttaaaaagcgagaatgcgttttttttaccaaggattcgaaggcaacggagaatgtgtgcaaatgcggctatgcgcagtctcagcacatggagggcacccaaatcaaccaaagcgagaagtggaactataagaaacacacgaaagagttcccgaccgatgcttttggagatattcagtttgaaaccttgggcaagaaaggcaagtatatccggctgtcctgcgacaccgacgccgagatcctctacgagttgctgactcagcactggcatcttaaaactccaaatctggtgatttccgtcaccggtggtgctaaaaacttcgccctgaaaccgaggatgcggaagatcttcagccgattgatatacattgcccagtccaaaggagcgtggattctcactgggggtacgcactacgggttaatgaagtacattggggaagtggtccgtgataataccatcagtaggagctccgaagagaacatcgtggccatcggaattgctgcctgggggatggtctcaaaccgagatacattgattcgcaactgcgatgccgaggggtactttctggcccagtaccttatggatgattttacacgcgacccactgtacatcctggataacaaccacacccatctgctgctggtggacaatggttgccacgggcacccaaccgtcgaggcaaagctgagaaaccagttggagaagtacatctctgagagaactattcaagatagtaattatggtggaaagattcctatcgtatgcttcgcacagggaggaggaaaagagaccctgaaagcaatcaatacttctatcaaaaacaaaattccttgtgtggtggtcgaaggatcaggccagattgccgatgtgatcgcttcgctcgttgaagtggaggacgccttgacgagtagcgcagttaaggagaaattggtgcggttcctgcccaggaccgtgtctcggctgcccgaagaagaaacagaaagctggatcaagtggctgaaggagattctcgagtgtagccatttacttaccgtgatcaagatggaggaggcaggtgatgaaatagtgtctaatgcgatctcttacgcactgtataaggctttctccacttcggagcaggacaaggataattggaacggccagctgaaacttctgctggagtggaaccagctggatttggccaatgatgaaatatttacgaacgataggcgctgggagtctgcggaccttcaagaagtaatgttcactgcccttataaaggaccgaccaaaatttgtgcgcttgtttctggagaacggattaaatctccgaaaattccttacacacgacgttctgacagaactgtttagtaatcatttttccaccctcgtttacagaaacctccaaatcgccaagaatagttacaacgatgccctccttacatttgtctggaagctggtcgccaactttagacgtggctttagaaaggaggatcggaatggacgcgacgagatggacatagagcttcacgatgtgagtcctattactcggcaccccttgcaggcactgttcatatgggcaatactgcagaataagaaagagttgtcaaaggtgatctgggaacagacaaggggctgtactttggccgcattaggagcttctaagctcttgaagacacttgcgaaggtgaagaatgatatcaatgcagctggagaatccgaggaactggctaacgaatatgagactcgagccgttgagctttttactgagtgttacagctcagacgaagacctggcagaacagctgctggtctacagctgtgaggcctgggggggttcgaattgcctcgagctggccgtggaggctactgaccaacattttattgcacagcctggggtacagaactttctgagcaaacagtggtatggagaaatctcccgcgacacaaagaattggaagataattctctgtcttttcatcattcctctggtgggatgcggcttcgtctctttccggaaaaagccagtggacaaacacaagaaacttctctggtactacgtggcattcttcacaagtcccttcgtggtattctcctggaacgtggtgttttacatagcattcctgttgcttttcgcttatgtgttactaatggacttccacagtgtgccacaccccccagaactggtattgtattctctggtatttgtgttgttttgcgacgaggtgaggcagtggtacgttaatggggtcaattacttcacagatctgtggaacgtcatggataccctcgggctgttttattttatcgcgggaatcgtgttccgcctccactcatctaacaagtcctctttgtactctggcagagtgattttttgcctcgattacatcatattcacccttcgactcatacatattttcacagtatcccggaatttgggccctaaaataattatgttgcagcggatgctgattgacgttttcttttttctcttccttttcgctgtttggatggtagcgttcggcgttgcacggcagggcatcttgcgtcagaacgagcagaggtggaggtggatttttcgaagcgtaatatacgagccctacctggccatgtttgggcaggtcccctctgatgtcgatgggacaacctatgactttgcccactgtactttcactggcaatgaatccaaacctctgtgtgttgaactcgatgagcacaacttacctcggtttcccgagtggattaccatcccactcgtatgcatctatatgctaagtacaaacatcctactggtcaatctgcttgtggccatgttcggctacactgtggggacggtacaggaaaataacgaccaggtgtggaaatttcagaggtatttcctggttcaagagtactgttcaagacttaatattccattcccatttattgtattcgcctatttctacatggtggttaaaaagtgctttaaatgttgctgcaaggagaagaacatggagtcaagcgtgtgctgtttcaaaaacgaggacaacgaaaccctcgcctgggagggcgttatgaaggagaattacctggttaagatcaatacgaaagcgaatgatacctcagaggagatgcgccatcggttccgccagctggatactaagctgaacgatctcaagggactgctcaaagagatcgccaacaaaatcaaatag

SEQ ID NO: 214622 - DNA, 579 bp, Artificial Sequence
  derived and/or modified sequence
atgaaatcttttttgcccgtgcacactatcgtccttattcgcgaaaatgtctgcaagtgcggatatgcccagagtcaacacatggaaggaacccagatcaatcaatcagagaaatggaactataagaagcataccaaagagttcccaactgacgccttcggcgatattcagttcgaaactctgggcaagaaagggaagtatatacggctgagttgcgatacagatgctgagatcctgtacgagctgctgacccaacactggcacctgaaaacacctaatctggtcatctctgtcaccggtggcgctaagaatttcgctcttaaaccaagaatgagaaagatattctctaggttgatttatatagcgcagtcaaagggcgcttggatcctcacagggggtacccactatggcttaatgaaatatatcggcgaagtcgtgagggacaatacaatctctaggtcttccgaggaaaacattgtcgccattggaattgcggcatggggtatggtcagtaaccgtgatacgctcattaggaactgtgacgccgaggtgcccgtggggcaggaggaagtatgttag

SEQ ID NO: 214623 - DNA, 498 bp, Artificial Sequence
  derived and/or modified sequence
atggagggaacacagattaatcagtcggagaagtggaactataagaagcacactaaggaattccccacagacgcatttggtgacatacagtttgaaacactaggcaagaaagggaaatatatcaggctgtcctgcgacaccgatgctgagatcctttatgaattactcacgcagcactggcatctcaagaccccaaatctcgtaatatcagtgaccggcggagcgaaaaatttcgctctgaagcctcggatgaggaaaatctttagccgtcttatttatattgcacagagcaagggcgcatggattctgactggcggaacccactacgggcttatgaagtacatcggggaagtggtgcgcgataacaccatttcaagatcctctgaagagaatatcgtggccatcggcatcgctgcctggggaatggtgagtaatcgggacaccctgattcgcaattgtgatgcagaagtgccggttggtcaggaagaggtctgttag

SEQ ID NO: 214624 - DNA, 2049 bp, Artificial Sequence
  derived and/or modified sequence
atgcaggcgatcaatacatccatcaagaacaagattccatgcgttgtagttgagggctccggacaaatcgccgatgtgatcgcctcactagtagaggtagaggacgctctgacctccagcgcagtgaaggagaagctcgtgagattcctgcctcgcaccgtctccagattgccagaggaagagaccgagtcctggattaagtggctcaaagagatcttagaatgtagccatttactcaccgtgatcaaaatggaagaggcgggagatgagatcgtgagcaacgcaatatcgtatgcgctgtataaagccttctctacatcagagcaggataaggacaactggaacggacagttgaagttgcttttggagtggaaccagctagacttagcaaatgatgagattttcacaaacgatcggaggtgggagagcgccgaccttcaggaggtcatgttcaccgccctaatcaaggaccggcctaaatttgttcgtctgttcctggagaatggcctaaatctccgcaaatttcttacacacgacgtgcttacagaattgttcagtaatcacttcagcacccttgtgtaccggaacttgcaaatcgctaagaatagctataatgacgcgctcctcacctttgtctggaagctggtggccaattttaggcgagggttcagaaaggaagatcgcaatgggagagacgagatggacatcgaactgcacgatgtgtctccaatcacacggcacccgcttcaagctctgtttatttgggcaattttgcaaaacaagaaagagctttctaaggtgatttgggagcaaacacggggttgcacattagctgcactcggagcaagtaagctcctaaagacccttgcgaaggtaaaaaacgacattaacgcagcaggagaatcagaggagctcgccaatgagtacgagacgagagctgtcgaactgtttactgaatgttatagtagcgatgaggatctcgcagaacagttgttggtttattcctgcgaggcatggggtggctccaactgccttgagctggcggttgaagccacggaccagcactttatcgctcagccgggagtacagtggtacgtcaatggcgtgaactattttactgatctctggaatgtgatggacacattaggacttttctattttatcgccggtattgtatttcgcctccatagctctaataagtcatcactctatagtggcagggtaattttttgcctcgattacattattttcaccctgagattgatacacatttttacagttagccgaaacttgggcccaaagattattatgctgcagcgcatgctgatagacgtgtttttctttttgtttctcttcgccgtgtggatggtggcctttggcgtcgcacggcagggtattttgagacaaaacgagcaaagatggaggtggatctttagaagcgtgatctatgagccctaccttgccatgttcggccaggtcccaagcgatgtggatggtactacctacgatttcgcacactgtacttttactggaaatgaaagcaaacctttgtgtgtggagctcgacgaacataacctgccccgtttccccgagtggattacaatacctctggtctgtatttatatgctctccacaaacatactattggtgaatctcctggtcgctatgtttggatacaccgtgggaaccgttcaggagaacaatgatcaggtgtggaaattccagaggtacttcctggtgcaggaatattgctcacgacttaacattccttttccattcattgtctttgcttatttttacatggttgtgaaaaaatgttttaagtgttgttgcaaggaaaagaatatggagtctagtgtgtgttgttttaagaacgaagataacgagacactcgcctgggaaggagttatgaaagagaactatcttgtgaagattaatacaaaagctaacgatactagcgaggagatgaggcaccgctttaggcagctcgacacaaagctgaacgatctgaaggggctgttgaaggagatcgccaataagattaagtag

SEQ ID NO: 214625 - DNA, 904 bp, Artificial Sequence
  derived and/or modified sequence
ctgcctttctccaccagagactcttcctcagggaggacttggtgaattttattcaagcaaattttaagaaacgagaatgtgtcttctttaccaaagattccaaggccacgctcaatgaaatccttccttcctgtccacaccatcgtgcttatcagggagaatgtgtgcaagtgtggctatgcccagagccagcacatggaaggcacccagatcaaccaaagtgagaaatggaactacaagaaacacaccaaggaatttcctaccgacgcctttggggatattcagtttgagacactggggaagaaagggaagtatatacgtctgtcctgcgacacggacgcggaaatcctttacgagctgctgacccagcactggcacctgaaaacacccaacctggtcatttctgtgaccgggggcgccaagaacttcgccctgaagccgcgcatgcgcaagatcttcagccggctcatctacatcgcgcagtccaaaggtgcttggattctcacgggaggcacccattatggcctgatgaagtacatcggggaggtggtgagagataacaccatcagcaggagttcagaggagaatattgtggccattggcatagcagcttggggcatggtctccaaccgggacaccctcatcaggaattgcgatgctgaggtaccggtgggacaggaggaggtctgctaggtcacatggaagaaagaccatggcatgggcctgtggcctgaaccctggggctctgtgatggagccagccagatcatggggaagtctgcctttcaaggagtgcctttgggaccttaaaggaattgaaaacaaggatgacgtacctaattaactgctgggaaagagttaacaatgaatgttttgttcattaaaatgtgttctcagcaatctca

SEQ ID NO: 214626 - DNA, 722 bp, Artificial Sequence
  derived and/or modified sequence
ctcagggaggacttggtgaattttattcaagcaaattttaagaaacgagaatgtgtcttctttaccaaagattccaaggccacggagaatgtgtgcaagtgtggctatgcccagagccagcacatggaaggcacccagatcaaccaaagtgagaaatggaactacaagaaacacaccaaggaatttcctaccgacgcctttggggatattcagtttgagacactggggaagaaagggaagtatatacgtctgtcctgcgacacggacgcggaaatcctttacgagctgctgacccagcactggcacctgaaaacacccaacctggtcatttctgtgaccgggggcgccaagaacttcgccctgaagccgcgcatgcgcaagatcttcagccggctcatctacatcgcgcagtccaaaggtgcttggattctcacgggaggcacccattatggcctgatgaagtacatcggggaggtggtgagagataacaccatcagcaggagttcagaggagaatattgtggccattggcatagcagcttggggcatggtctccaaccgggacaccctcatcaggaattgcgatgctgaggtaccggtgggacaggaggaggtctgctaggtcacatggaagaaagaccatggcatgggcctgtggcctgaaccctggggctctgtgatggagccagccagatcatggggaagtctgcctttcaaggagtg

SEQ ID NO: 214627 - DNA, 3348 bp, Artificial Sequence
  derived and/or modified sequence
tcctgcttgacaaaaaccgtcacttaggaaaagatgtcctttcgggcagccaggctcagcatgaggaacagaaggaatgacactctggacagcacccggaccctgtactccagcgcgtctcggagcacagacttgtcttacagtgaaagcgacttggtgaattttattcaagcaaattttaagaaacgagaatgtgtcttctttaccaaagattccaaggccacggagaatgtgtgcaagtgtggctatgcccagagccagcacatggaaggcacccagatcaaccaaagtgagaaatggaactacaagaaacacaccaaggaatttcctaccgacgcctttggggatattcagtttgagacactggggaagaaagggaagtatatacgtctgtcctgcgacacggacgcggaaatcctttacgagctgctgacccagcactggcacctgaaaacacccaacctggtcatttctgtgaccgggggcgccaagaacttcgccctgaagccgcgcatgcgcaagatcttcagccggctcatctacatcgcgcagtccaaaggtgcttggattctcacgggaggcacccattatggcctgatgaagtacatcggggaggtggtgagagataacaccatcagcaggagttcagaggagaatattgtggccattggcatagcagcttggggcatggtctccaaccgggacaccctcatcaggaattgcgatgctgagggctattttttagcccagtaccttatggatgacttcacaagagatccactgtatatcctggacaacaaccacacacatttgctgctcgtggacaatggctgtcatggacatcccactgtcgaagcaaagctccggaatcagctagagaagtatatctctgagcgcactattcaagattccaactatggtggcaagatccccattgtgtgttttgcccaaggaggtggaaaagagactttgaaatcaagaagatttgggaggagaatttcagtgacatgaataacctgtgtacttagtgttggccttgacagtcaacctgccaaagagaagagttgacattaattcgggagacttaaagattgtaaccggcatatatattagaaagctatggccaacctatctgcattgagatgagctgtgatcatacacacacagattgcccccaaaccagatgtttccagaccacctaaggcccatttatatgccacctggggatgcaggccatcaatacctccatcaaaaataaaattccttgtgtggtggtggaaggctcgggccagatcgctgatgtgatcgctagcctggtggaggtggaggatgccctgacatcttctgccgtcaaggagaagctggtgcgctttttaccccgcacggtgtcccggctgcctgaggaggagactgagagttggatcaaatggctcaaagaaattctcgaatgttctcacctattaacagttattaaaatggaagaagctggggatgaaattgtgagcaatgccatctcctacgctctatacaaagccttcagcaccagtgagcaagacaaggataactggaatgggcagctgaagcttctgctggagtggaaccagctggacttagccaatgatgagattttcaccaatgaccgccgatgggagtctgctgaccttcaagaagtcatgtttacggctctcataaaggacagacccaagtttgtccgcctctttctggagaatggcttgaacctacggaagtttctcacccatgatgtcctcactgaactcttctccaaccacttcagcacgcttgtgtaccggaatctgcagatcgccaagaattcctataatgatgccctcctcacgtttgtctggaaactggttgcgaacttccgaagaggcttccggaaggaagacagaaatggccgggacgagatggacatagaactccacgacgtgtctcctattactcggcaccccctgcaagctctcttcatctgggccattcttcagaataagaaggaactctccaaagtcatttgggagcagaccaggggctgcactctggcagccctgggagccagcaagcttctgaagactctggccaaagtgaagaacgacatcaatgctgctggggagtccgaggagctggctaatgagtacgagacccgggctgttgagctgttcactgagtgttacagcagcgatgaagacttggcagaacagctgctggtctattcctgtgaagcttggggtggaagcaactgtctggagctggcggtggaggccacagaccagcatttcatcgcccagcctggggtccagtggtacgtaaatggggtgaattattttactgacctgtggaatgtgatggacacgctggggcttttttacttcatagcaggaattgtatttcggctccactcttctaataaaagctctttgtattctggacgagtcattttctgtctggactacattattttcactctaagattgatccacatttttactgtaagcagaaacttaggacccaagattataatgctgcagaggatgctgatcgatgtgttcttcttcctgttcctctttgcggtgtggatggtggcctttggcgtggccaggcaagggatccttaggcagaatgagcagcgctggaggtggatattccgttcggtcatctacgagccctacctggccatgttcggccaggtgcccagtgacgtggatggtaccacgtatgactttgcccactgcaccttcactgggaatgagtccaagccactgtgtgtggagctggatgagcacaacctgccccggttccccgagtggatcaccatccccctggtgtgcatctacatgttatccaccaacatcctgctggtcaacctgctggtcgccatgtttggctacacggtgggcaccgtccaggagaacaatgaccaggtctggaagttccagaggtacttcctggtgcaggagtactgcagccgcctcaatatccccttccccttcatcgtcttcgcttacttctacatggtggtgaagaagtgcttcaagtgttgctgcaaggagaaaaacatggagtcttctgtctgctgtttcaaaaatgaagacaatgagactctggcatgggagggtgtcatgaaggaaaactaccttgtcaagatcaacacaaaagccaacgacacctcagaggaaatgaggcatcgatttagacaactggatacaaagcttaatgatctcaagggtcttctgaaagagattgctaataaaatcaaataaaactgtatgaactctaatggagaaaaatctaattatagcaagatcatattaaggaatgctgatgaacaatttt

SEQ ID NO: 214628 - protein, 226 aa, Artificial Sequence
  derived and/or modified sequence
MFTLLVLLSQLPTVTLGFPHCARGPKASKHAGEEVFTSKEEANFFIHRRLLYNRFDLELFTPGNLERECNEELCNYEEAREIFVDEDKTIAFWQEYSAKGPTTKSDGNREKIDVMGLLTGLIAAGVFLVIFGLLGYYLCITKCNRLQHPCSSAVYERGRHTPSIIFRRPEEAALSPLPPSVEDAGLPSYEQAVALTRKHSVSPPPPYPGHTKGFRVFKKSMSLPSH

SEQ ID NO: 214629 - DNA, 681 bp, Artificial Sequence
  derived and/or modified sequence
atgtttactctcctcgtcctactgagtcaactaccaaccgtcacactggggttcccccactgcgcgagagggcccaaggcttcaaagcacgccggcgaggaggtgtttacaagcaaggaagaagcaaacttcttcatccacaggcggctactatacaaccgctttgatctggagttgtttactccaggaaacttggagagagaatgcaacgaggagctgtgtaattacgaggaagccagagagattttcgtcgatgaggacaagaccatagctttttggcaagagtacagcgccaagggaccaactacaaaaagtgacggcaatagagagaagatcgatgtgatgggcttgctgaccggtctcattgcggcgggagtcttcttggtcatcttcgggcttctggggtattatctttgtattaccaagtgtaataggttgcaacacccatgcagcagcgccgtgtatgagcgcggacggcacactccgtctatcatctttagaaggcctgaggaggccgccctgagccctttaccgccaagcgtcgaagatgcaggcctaccgtcctatgaacaggccgttgcactgacacggaagcattctgtatcccctcctccaccgtatccaggacataccaaaggtttcagggtgtttaagaagtctatgtccctgccttctcactag

SEQ ID NO: 214630 - DNA, 681 bp, Artificial Sequence
  derived and/or modified sequence
atgttcaccctgctggtgctgctgagccagctgcccaccgtgaccctgggcttcccccactgtgcccggggccccaaggccagcaagcatgctggggaggaggtgttcaccagcaaggaggaggccaacttcttcatccaccggcggctgctgtacaacagatttgacctggagctgttcaccccaggcaacctggagcgggagtgcaatgaggagctgtgcaactatgaggaggcccgggagatctttgtggatgaggacaagaccatcgccttctggcaggagtacagcgccaagggccccaccaccaagagtgatggcaaccgggagaagattgatgtgatgggcctgctgaccggcctgattgctgctggggtcttcctggtgatcttcggcctgctgggctactacctgtgcatcaccaagtgcaaccggctgcagcacccctgcagcagcgctgtgtatgagcggggccgccacacccccagcatcatcttcagaagacctgaggaggccgccctgagccccctgccccccagcgtggaggatgctggcctgcccagctatgagcaggccgtggccctgaccaggaagcacagcgtgtccccacctccaccctacccaggccacaccaagggcttccgggtcttcaagaagtccatgagcctgcccagccactag

SEQ ID NO: 214631 - DNA, 681 bp, Artificial Sequence
  derived and/or modified sequence
atgttcaccctgctggtgctgctgagccagctgcccaccgtgaccctggggttcccccattgcgcgaggggtccaaaagctagcaagcacgcgggtgaggaagtgtttacaagcaaagaagaagcaaacttcttcatccaccggagactgctttacaataggtttgatttggaactgttcaccccaggcaatctggagcgcgaatgcaacgaggagctctgcaactacgaggaagccagggaaatctttgtagacgaggataaaacaatagctttttggcaggaatattctgcaaagggtcctaccacaaagtcagatgggaatcgagagaaaatcgacgtgatgggactgcttacaggtctgattgccgcaggtgttttcctggtcattttcggtctcctcggttattacctctgtattaccaagtgtaatcgtctccagcatccttgctcctccgcggtttacgagcgtggtcgacatacacccagcatcatctttcggcggcccgaggaggccgccctcagcccactaccaccctctgttgaggatgcaggcctgccctcttatgaacaggcagtggcgctaacccgcaaacactccgtgtccccacccccgccttatccaggccataccaaagggtttcgagtgttcaagaagtccatgagcctgcctagccattag

SEQ ID NO: 214632 - DNA, 681 bp, Artificial Sequence
  derived and/or modified sequence
atgttcacccttctggtgttattgtcgcaacttcctactgtgacattagggtttccacactgtgcccgtggccctaaagcaagcaaacacgccggtgaagaagtgtttacctctaaagaggaagccaacttctttatacaccgtcgattgttatacaatcggtttgaccttgaactgttcacccccggaaatctcgaacgagagtgcaatgaggagctgtgtaattatgaagaagccagggaaatcttcgttgatgaggataaaacgatcgcattctggcaggagtattccgccaaggggccaacaaccaagtccgacggaaatcgggaaaagatcgacgtgatggggctactcaccggcctgattgcggcaggggtgttcctggttatattcggattgctcggatattatctgtgtattacgaaatgcaacagactgcagcacccttgttcctcagctgtgtatgaacgtggaaggcataccccatcgatcatcttccgaagacctgaggaggccgctctgagccccttaccaccctctgtggaggatgccggtttaccttcttatgaacaagcggtcgcactcacacgcaagcattcggtgtcgcctccacccccttacccaggccataccaaaggttttcgcgtgttcaagaagtctatgagcctgccctcccactag

SEQ ID NO: 214633 - DNA, 5530 bp, Artificial Sequence
  derived and/or modified sequence
cccggaccgaggcaggacctcaccccgcgcgtgttccccgggcgcccctctgcgaaccccaggcccttcccaggtttgcgcgcgggggccatccagaccctgcggagagcgaggcccggagcgtcgccgaggtttgagggcgccggagaccgagggcctggcggccgaaggaaccgccccaagaagagcctctggcccgggggctgctggaacatgtgcggggggacacagtttgtttgacagttgccagactatgtttacgcttctggttctactcagccaactgcccacagttaccctggggtttcctcattgcgcaagaggtccaaaggcttctaagcatgcgggagaagaagtgtttacatcaaaagaagaagcaaactttttcatacatagacgccttctgtataatagatttgatctggagctcttcactcccggcaacctagaaagagagtgcaatgaagaactttgcaattatgaggaagccagagagatttttgtggatgaagataaaacgattgcattttggcaggaatattcagctaaaggaccaaccacaaaatcagatggcaacagagagaaaatagatgttatgggccttctgactggattaattgctgctggagtatttttggttatttttggattacttggctactatctttgtatcactaagtgtaataggctacaacatccatgctcttcagccgtctatgaaagggggaggcacactccctccatcattttcagaagacctgaggaggctgccttgtctccattgccgccttctgtggaggatgcaggattaccttcttatgaacaggcagtggcgctgaccagaaaacacagtgtttcaccaccaccaccatatcctgggcacacaaaaggatttagggtatttaaaaaatctatgtctctcccatctcactgactaccttgtcattttggtataagaaatttgtgttatttgataggccgggcatggtggctcatgcctgtaatcccagcactttgggaggccaggagttcgagaccagcctggccaacatggtgaaacccggtctctactaaaaattcaaaaattacctaggcgtcatggggcatgcctgtagtcccacctacttgggaggctgaagcaggagaattgctcgaacctgggaggcagaggttgcagtaagctgagatcacgccactgcattccagcctgggcgacagagcaagactccatctcaaaaataaaataaaaaaagaaagaaagaaaagaagaagaaaagagaagaaggagaaggagatgaaggaggaggaggaggagaaggagaagaagaagaagaagaagaccacaaaagacatgactatccaactttttatgacaaactgcaaggaataaaggaagaataagtccatgtactgtaccacagaagttctgtctgcatcttggacctgaacttgatcattatcagcttgataagagactttttgactctatatccttgcagttaagaagaaagcacttttttgtaatgtttgttttaatggttcaaaaaaaatctttcttataaagagcataggtagaattagtgaactctttggatcctttgtacagataaaggttatagatttcttgtgttgaatattaaaaaagcaaggatgtctaaccattaagattatccaaagtcaggctgggcgcagtggctcacgcctgtaatcccagcactttgggagggataggtgggcggatcacctgaggtcaggagtttgagaccagcctggccaacatggcaaaaccccgtctctacaaaaatacaaaagaaattagccagacatgatggcgggtgcctctaatcccagctactggggaggctgaggtgggagaatcgcttgaactcgggaggtggaggttgtagtgaggcgagattgtgccattgcactccaacctgggcgacagagtgagactccatctcaaaaaaaaaaaaaaaaaaaaagattatccaaaaagatattggacctactctttcttaggatttttttggcggggggttagaaatacttcacagaatttgacatttcagtataaatctgtgaccttaatataatcacttggttttatatgttaaattattgcacagcagtcatcatattttgcagagtttagttcttaactcttgctgtcagtcatgttttattataggtagtggggtcagtagttttcttcttctaaaaaatactatttgctatgaagttagttcttcagaagatacaagtttgcaatgaaaaggatttgcaagggttgttatgctatcaaataaacagacctaaaatctaggagacactagaacttaatgaagttgcccctgttactgattagtaaatactcccatcttcgttgcaaaattatctctctgtataactacatatgattattttgaaatttgttaaacttcataagtaatagtttgagaatgtggaaaaagtaatttgcttttctgctcttaaaataatattgattaatgttaccagaaaccttttgcatctcttaatatgtctgaacacaaaaggaaaacaccataatcatataaacccattctttgtctcttcttctaaatcatatgtataaccagtttttccttaagaatgtagcagcatataagctataaatttctggagtatatgcacacaaatttatctgggtgggtatgtaggtatatgtgagtttgtttcctcttccaggagctcaagaaataacatactcctgaaaaatagaatagaaatttctgtgctttatgtttttgccaggctattacattttcttatcatttaggatcacttataaaatgatcattgtttattttgttttataatttttacaggagtgagactgcaaacccacatgtttgatagttcctaccaaattaaaagtttagaaagcataaatcatattacagtgcatatgtgagtgtatgtctctcttttaagatgcatcatcttaaggcagataaaagtaagtccttaatcattacagactgccaaagactttatccttttagattctcagtctctttgttgcttgttgcaaataaatcatctagcaacatttacatttaattaggaaatctaacttgcttttaaaagttacccacgttgcatataaaaatcttgctattccttgtgtcttggctttacataagcacttttgctcatgtgactttgcactttgcacttattttaatcctctttaaagggctacaggcaaattctactttgccataatcacactaaggcatggaagaacaacttgcccagaatctagcaggttggtgacaactgggtttagaatgagtgagcacacttttctagtcccatgtcatgcctataaaattacactgcctcgaattatgaaattcagggatcttgtacataattctaagtttgggacagaaatttacaagcatttctcatatatacatacatttatatatgtacatgttacatatatttagatgtattctcatatacatatgaaaatatttatgatgaatagaattataagatatgtatgtatcttgcactgaatcataatttgaaatatttcatgaattcatttacttctattgactcccaaaattctaactgcaagctagcttcagaacctgtgagaaccccaccccacccaagcagctgcctagatttgtctactgctatcattttgtgtaaagcagttgctctaacttgaatgagtctagaattcatcattaagattgtgatatttatagagcatccaatgtggagatcatgatactttaaatataaaaaggaaaatatgatagaactgttattgacaaatgcttataatgattgaagggaaagtatctcaacattgtatcagtcacatatatttctgttgctttcaccattttctattcctgttgtaagtttggtggtagatttagttttgtttggtttatctgttttgtttgtgttttgtctcctggcaattgattagtgttaatcattaaatctattttgacacaaggttttatatataattagatcagttttccactttattacaattaagaaatgagtaaaatatggatataaaaggagaattggattgaaaagacaaatacacatttacaaggtcatacctttggtaggacagacaattccatatagaatattctcttttgataatgaaaaaaattaaagagagcacaaactttgactatgtcaaagtatttttatttttaattttttgagacaaggtcttgctctgctacccaggctggagtgcagtggtgcaatcacaactcactgtagcctgaacttcggggctcaagcaatcctcccacctcagcctcctaagtagctgggaccacaggtgcacctcggtacacctggctaatttttgtgttttttgtagagacagggtttcaccatgttgcccatgctggtctctaactcctgagctcaaggaatccacccacctcggcctcccaaagtgctgggattacaggcatgagccaccacactggactgctgtgtcaaagttttgcatcttttttttttttttttccagaaggagtctcactttgtcacccaggctggagtgcagtggagtgatcatggctcactgcaacctccgcctcccaggttcaaggatttctcctgcctcagcctcctgagtagctgcattacaggcacctgccagcacgccttgcaaatttttgtatttttagtggagatggggttttgccatgttggccaggctggtctcaaactcctgacctcaggtgatccgcccgcctcagcctcccaaagggctgggattacaggcgtgagccactgtgcctggccccaagttttgcatcttttaatgccctctgaacaaatacatagagaaaactctcagaacaattaaaacctgcagagcaacagtgtcctccatgtcttaggtttcaagtttgcctctaaaattctaatccatatttttctacttctcagataatttatgtgtgtgtactcttcctagacgtacaagagactttttaatgctaaatatttgtcagtgcttaacaaaaactcaatttcacattactcatattgtttttgttttaattgaatgtgaattaaatttttattagttatttgatttggaatgttatgtatgccattaacactattaggggaatctctagcatttctgtatttttaaagaatttgattcttttgtagattctgcctgtgtggtcattttaaaacatgtgtgacatatatcagtaccttcattcttctatattttgtgtctcctccaacctccaactttttttgttttttgaaaaatgtttctctaacacctcaacagtttaaggtaatttagtacacatatatcagtatttttgtgatctgaaaaagcaacccattttctaaattcatatttttcctaaaactttactatgtttttattttaagaggtttcctgttatatacactttttacacatgcaaataaactttataccaagtgagta

SEQ ID NO: 214634 - DNA, 681 bp, Artificial Sequence
  derived and/or modified sequence
atgttcaccctgctggtgctgctgagccagctgcccaccgtgaccctgggcttcccccactgcgccagaggccccaaggccagcaagcacgccggcgaggaggtgttcaccagcaaggaggaggccaacttcttcatccacagaagactgctgtacaacagattcgacctggagctgttcacccccggcaacctggagagagagtgcaacgaggagctgtgcaactacgaggaggccagagagatcttcgtggacgaggacaagaccatcgccttctggcaggagtacagcgccaagggccccaccaccaagagcgacggcaacagagagaagatcgacgtgatgggcctgctgaccggcctgatcgccgccggcgtgttcctggtgatcttcggcctgctgggctactacctgtgcatcaccaagtgcaacagactgcagcacccctgcagcagcgccgtgtacgagagaggcagacacacccccagcatcatcttcagaagacccgaggaggccgccctgagccccctgccccccagcgtggaggacgccggcctgcccagctacgagcaggccgtggccctgaccagaaagcacagcgtgagccccccccccccctaccccggccacaccaagggcttcagagtgttcaagaagagcatgagcctgcccagccactag

SEQ ID NO: 214635 - protein, 553 aa, Artificial Sequence
  derived and/or modified sequence
MAAPAGGGGSAVSVLAPNGRRHTVKVTPSTVLLQVLEDTCRRQDFNPCEYDLKFQRSVLDLSLQWRFANLPNNAKLEMVPASRSREGPENMVRIALQLDDGSRLQDSFCSGQTLWELLSHFPQIRECLQHPGGATPVCVYTRDEVTGEAALRGTTLQSLGLTGGSATIRFVMKCYDPVGKTPGSLGSSASAGQAAASAPLPLESGELSRGDLSRPEDADTSGPCCEHTQEKQSTRAPAAAPFVPFSGGGQRLGGPPGPTRPLTSSSAKLPKSLSSPGGPSKPKKSKSGQDPQQEQEQERERDPQQEQERERPVDREPVDREPVVCHPDLEERLQAWPAELPDEFFELTVDDVRRRLAQLKSERKRLEEAPLVTKAFREAQIKEKLERYPKVALRVLFPDRYVLQGFFRPSETVGDLRDFVRSHLGNPELSFYLFITPPKTVLDDHTQTLFQANLFPAALVHLGAEEPAGVYLEPGLLEHAISPSAADVLVARYMSRAAGSPSPLPAPDPAPKSEPAAEEGALVPPEPIPGTAQPVKRSLGKVPKWLKLPASKR

SEQ ID NO: 214636 - protein, 349 aa, Artificial Sequence
  derived and/or modified sequence
MVPASRSREGPENMVRIALQLDDGSRLQDSFCSGQTLWELLSHFPQIRECLQHPGGATPVCVYTRDEVTGEAALRGTTLQSLGLTGGSATIRFVMKCYDPVGKTPGSLGSSASAGQAAASAPLPLESGELSRGDLSRPEDADTSGPCCEHTQEKQSTRAPAAAPFVPFSGGGQRLGGPPGPTRPLTSSSAKLPKSLSSPGGPSKPKKSKSGQDPQQEQEQERERDPQQEQERERPVDREPVDREPVVCHPDLEERLQAWPAELPDEFFELTVDDVRRRLAQLKSERKRLEEAPLVTKAFREAQIKEKLERYPKRRSLSLSPRLESVVPSQLTASSASRVQVVLLPQPPK

SEQ ID NO: 214637 - DNA, 1662 bp, Artificial Sequence
  derived and/or modified sequence
atggctgcaccagccggcggggggggttccgctgtgtccgtattagccccaaacgggcgccggcataccgtcaaggtcacccccagcactgtgcttcttcaggtcctcgaggacacctgccggcgccaggatttcaatccatgtgagtatgacctgaagtttcagcggtccgtcttagacctcagtctgcagtggaggttcgcaaaccttccaaacaatgcgaagctggagatggtcccggcttctcggtcccgcgaaggccccgagaatatggtgaggatagccctgcagctcgacgacggtagtcgtttgcaagactccttttgctccgggcagaccctttgggagttgctgtcacacttcccacaaatcagggagtgccttcagcatccaggtggcgccacgccagtgtgcgtctacaccagggatgaggttactggcgaggccgctcttagggggacaaccttgcagtctctcggtctgactggcggcagtgccactattcgctttgtgatgaagtgttacgatccagtgggaaaaactcctggctccctgggcagcagcgcctctgctggccaggcggcagcctcggctcccctgccgttagagtctggggagctgagtagaggcgacctctctaggccagaagatgcggatacctcagggccttgttgtgaacatacacaggagaagcagagcactagagcccctgccgccgcaccatttgttcctttttcaggaggcgggcagcggctgggcggaccccccgggcctactaggccactgacgagttcctccgccaagctgcccaagtctctaagctcccccggaggcccatcaaagcccaaaaagtccaagtctgggcaggacccccagcaggagcaggagcaagagagggaacgcgatcctcagcaggagcaggagcgggaaaggcctgtggatcgggagcctgttgatcgagaacccgttgtgtgccatcccgacttagaggagcgcctccaggcttggcccgctgagctgcccgacgagttcttcgagctcacggtagacgatgttagaagaagactggctcagcttaaatccgagcgtaaacggctggaggaagctcctctggtgaccaaggcattcagggaggcccagattaaagagaagctggaacggtatcctaaggtggcactgcgggtgctctttccagatcgctacgtcctccaagggttctttaggcccagcgaaactgtcggggacctgagggactttgtccgctcccacctcgggaaccctgagctgtccttttatctgttcattactcctccaaaaactgttctggacgaccatactcagaccctgtttcaggcaaatctgttccccgctgccctcgttcacctaggagctgaggagcccgctggcgtttacctcgaaccaggcctgctggagcatgctatcagcccttccgccgctgatgtgctcgtggcccgatatatgtctcgcgctgcaggcagcccctctccattaccggcccccgacccagccccaaagagtgagcccgcagcagaggaaggagcattggtgcccccagagccaatcccagggactgcccagcctgtcaaaagaagcttagggaaagtgcccaagtggctgaaattgcccgcgtccaagcgatag

SEQ ID NO: 214638 - DNA, 1050 bp, Artificial Sequence
  derived and/or modified sequence
atggtgccagcatcccgttcccgggagggacccgaaaacatggtaagaatagcattacagctggacgatggtagccggctgcaggatagcttttgttccggccagacactttgggaattgctctctcacttcccccagatccgggagtgtctgcaacaccctggcggagcgaccccggtgtgcgtctatacacgcgacgaagtgactggggaggcggccttaagagggaccaccttgcagtctctgggccttacgggagggagtgccacaataagatttgtgatgaagtgctacgacccagtaggcaaaacacccggatcgctgggctcaagtgcatctgctggccaggcagcagcaagtgctcctctcccgttggaatccggagaactctctagaggagacctgtccagacccgaggacgcagacacatctggcccctgttgcgagcacacgcaggagaagcagtcaacgagagccccggccgctgctccatttgtgccattctcgggcggaggacagcgactgggtggccctcctggtccaactaggccgcttacgagtagcagcgccaaactgcccaagagcttatcttcacctggaggccccagcaagcccaaaaaatctaagagtggtcaggatcctcaacaagagcaggaacaggagcgggagagagatcctcagcaggaacaggagagggagagacccgtcgatagggaaccagtcgatcgagagcctgtggtctgtcatccggacctcgaggagagactacaggcttggcccgctgagttaccggacgaattttttgagttgaccgtggacgatgtgcggcgtcgcctcgcccagttgaagtccgaacggaagcgcctggaggaagccccgttggtcactaaagctttccgggaagcacagattaaagagaaactcgagcgttatccaaaaagacgttccctctcactgtccccacgactggagagcgtcgttccctctcagctaacagcctcttctgcttctcgcgtgcaggtcgtgttactgccgcagcctccaaaatag

SEQ ID NO: 214639 - DNA, 1662 bp, Artificial Sequence
  derived and/or modified sequence
atggccgccccagctgggggcggcggcagcgctgtgtctgtgctggcccccaacggccgccgccacacagtgaaggtgacccccagcacagtgctgctgcaggtgctggaggacacctgccggcggcaggacttcaacccctgtgaatatgacctgaagttccagaggtctgtgctggacctgagcctgcagtggaggtttgccaacctgcccaacaatgccaagctggagatggtgcctgccagccgcagccgggagggccctgagaacatggtgcgcatcgccctgcagctggatgatggcagccggctgcaggacagcttctgcagcggccagaccctgtgggagctgctgagccacttcccccagatccgggagtgcctgcagcaccctggaggagccacccctgtgtgtgtgtacaccagagatgaggtgactggagaggccgccctgcggggcaccaccctgcagagcctgggcctgaccggcggcagcgccaccatccgctttgtgatgaagtgctatgaccctgtgggcaagaccccaggcagcctgggcagcagcgccagcgctggccaggccgccgccagcgcccccctgcccctggagagcggggagctgagcagaggagacctgagcaggccagaagatgctgacaccagcggcccctgctgtgagcacacccaggagaagcagagcacccgggccccagctgctgccccctttgtgcccttcagcggcggcggccagaggctgggcggccccccaggccccacccggcccctgaccagcagcagcgccaagctgcccaagagcctgagcagccctgggggccccagcaagcccaagaagagcaagagcggccaggacccccagcaggagcaggagcaggagcgggagcgggacccccagcaggagcaggagcgggagaggcctgtggaccgggagcctgtggaccgggagcctgtggtgtgccacccagacctggaggagcggctgcaggcctggccagctgagctgcctgatgagttctttgagctgactgtggatgatgtgagaagaaggctggcccagctgaagtctgagaggaagaggctggaggaggcccccctggtgaccaaggccttccgggaggcccagatcaaggagaagctggagcgctaccccaaggtggccctgcgggtgctcttcccagacagatatgtgctgcagggcttcttccggcccagcgagaccgtgggggacctgcgggactttgtgcgcagccacctgggcaaccctgagctgtccttctacctgttcatcaccccacccaagacagtgctggatgaccacacccagaccctcttccaggccaacctcttccctgctgccctggtgcacctgggcgctgaggagcctgctggggtgtacctggagcccggcctgctggagcacgccatcagccccagcgctgctgatgtgctggtggcccgctacatgagcagagctgctggcagccccagccccctgcctgccccagaccctgcccccaagtctgagcctgctgctgaggagggcgccctggtgcccccagagcccatccctggaacagcccagcctgtgaagaggagcctgggcaaggtgcccaagtggctgaagctgcctgccagcaagaggtag

SEQ ID NO: 214640 - DNA, 1050 bp, Artificial Sequence
  derived and/or modified sequence
atggtgcctgccagccgcagccgggagggccctgagaacatggtgagaattgccctgcagctggatgatggcagccggctgcaggacagcttctgcagcggccagaccctgtgggagctgctgagccacttcccccagatcagagaatgtctgcagcaccctgggggcgccacccctgtgtgtgtgtacaccagagatgaggtgactggagaggccgccctgcggggcaccaccctgcagagcctgggcctgactggaggcagcgccaccatccgctttgtgatgaagtgctatgaccctgtgggcaagaccccaggcagcctgggcagcagcgccagcgctggccaggccgccgccagcgcccccctgcccctggagagcggggagctgagcagaggagacctgagcaggccagaagatgctgacaccagcggcccctgctgtgagcacacccaggagaagcagagcacccgggccccagctgctgccccctttgtgcccttcagcggcggcggccagaggctgggcggccccccaggccccacccggcccctgaccagcagcagcgccaagctgcccaagagcctgagcagccctgggggccccagcaagcccaagaagagcaagagcggccaggacccccagcaggagcaggagcaggagcgggagcgggacccccagcaggagcaggagcgggagaggcctgtggaccgggagcctgtggaccgggagcctgtggtgtgccacccagacctggaggagcggctgcaggcctggccagctgagctgcctgatgagttctttgagctgactgtggatgatgtgagaagaaggctggcccagctgaagtctgagaggaagaggctggaggaggcccccctggtgaccaaggccttccgggaggcccagatcaaggagaagctggagcgctaccccaagaggaggagcctgagcctgagcccccggctggagagcgtggtgcccagccagctgacagccagcagcgccagccgggtgcaggtggtgctgctgccccagccccccaagtag

SEQ ID NO: 214641 - DNA, 1841 bp, Artificial Sequence
  derived and/or modified sequence
gctgcggccccgccccctggccgcgtggctgcgcgtcctggctgttgccgataaagttgtttgacgccggcccggcggcgggtcacgtgagcggaaaatggcggccccggcaggcggcggaggctccgcggtgtcggtgctggccccgaacggccggcgccacacggtgaaggtgacgccgagcaccgtgctgcttcaggttctggaggacacgtgccggcggcaggacttcaacccctgtgaatatgatctgaagtttcagaggagcgtgctcgacctttctctccagtggagatttgccaacctgcccaacaatgccaagctggagatggtgcccgcttcccggagccgtgaggggcctgagaacatggttcgcatcgctttgcagctggacgatggctcgaggttgcaggactctttctgttcaggccagaccctctgggagcttctcagccattttccacagatcagggagtgcctgcagcaccccggcggggccaccccagtctgcgtgtacacgagggatgaggtgacgggtgaagctgccctgcggggcacgacgctgcagtcgctgggcctgaccgggggcagcgccaccatcaggtttgtcatgaagtgctacgaccccgtgggcaagaccccaggaagcctgggctcgtcagcgtcggctggccaggcagccgccagcgctccacttcccttggaatctggggagctcagccgcggcgacttgagccgtccggaggacgcggacacctcagggccctgctgcgagcacactcaggagaagcagagcacaagggcacccgcagctgccccctttgttcctttctcgggtgggggacagagactggggggccctcctgggcccacgaggcctctgacatcatcttcagctaagttgccgaagtccctctccagccctggaggcccctccaagccaaagaagtccaagtcgggccaggatccccagcaggagcaggagcaggagcgggagcgggatccccagcaggagcaggagcgggagcggcccgtggaccgggagcccgtggaccgggagccggtggtgtgccaccccgacctggaggagcggctgcaggcctggccagcggagctgcctgatgagttctttgagctgacggtggacgacgtgagaagacgcttggcccagctcaagagtgagcggaagcgcctggaagaagcccccttggtgaccaaggccttcagggaggcgcagataaaggagaagctggagcgctacccaaaggtggctctgagggtcctgttccccgaccgctacgtcctacagggcttcttccgccccagcgagacagtgggggacttgcgagacttcgtgaggagccacctggggaaccccgagctgtcattttacctgttcatcacccctccaaaaacagtcctggacgaccacacgcagaccctctttcaggcgaacctcttcccggccgctctggtgcacttgggagccgaggagccggcaggtgtctacctggagcctggcctgctggagcatgccatctccccatctgcggccgatgtgctggtggccaggtacatgtccagggccgccgggtccccttccccattgccagcccctgaccctgcacctaagtctgagccagctgctgaggagggggcgctggtcccccctgagcccatcccagggacggcccagcccgtgaagaggagcctgggcaaggtgcccaagtggctgaagctgccggccagcaagaggtgagagctgccagcctgaggtgcccactccgccagccacaggaccacctcctctgccagcaggaataaagacttgtgcatccctc

SEQ ID NO: 214642 - DNA, 1283 bp, Artificial Sequence
  derived and/or modified sequence
aaatggcggccccggcaggcggcggaggctccgcggtgtcggtgctggccccgaacggccggcgccacacggtgaaggtgacgccgagcaccgtgctgcttcaggttctggaggacacgtgccggcggcaggacttcaacccctgtgaatatgatctgaagtttcagaggagcgtgctcgacctttctctccagtggagatttgccaacctgcccaacaatgccaagctggagatggtgcccgcttcccggagccgtgaggggcctgagaacatggttcgcatcgctttgcagctggacgatggctcgaggttgcaggactctttctgttcaggccagaccctctgggagcttctcagccattttccacagatcagggagtgcctgcagcaccccggcggggccaccccagtctgcgtgtacacgagggatgaggtgacgggtgaagctgccctgcggggcacgacgctgcagtcgctgggcctgaccgggggcagcgccaccatcaggtttgtcatgaagtgctacgaccccgtgggcaagaccccaggaagcctgggctcgtcagcgtcggctggccaggcagccgccagcgctccacttcccttggaatctggggagctcagccgcggcgacttgagccgtccggaggacgcggacacctcagggccctgctgcgagcacactcaggagaagcagagcacaagggcacccgcagctgccccctttgttcctttctcgggtgggggacagagactggggggccctcctgggcccacgaggcctctgacatcatcttcagctaagttgccgaagtccctctccagccctggaggcccctccaagccaaagaagtccaagtcgggccaggatccccagcaggagcaggagcaggagcgggagcgggatccccagcaggagcaggagcgggagcggcccgtggaccgggagcccgtggaccgggagccggtggtgtgccaccccgacctggaggagcggctgcaggcctggccagcggagctgcctgatgagttctttgagctgacggtggacgacgtgagaagacgcttggcccagctcaagagtgagcggaagcgcctggaagaagcccccttggtgaccaaggccttcagggaggcgcagataaaggagaagctggagcgctacccaaagagacggagtctctctctgtcgcccaggctggagtcagtggtgccatctcagctcactgcaagctccgcctcccgggttcaagtggttctcctgcctcagcctcccaagtag

SEQ ID NO: 214643 - DNA, 1662 bp, Artificial Sequence
  derived and/or modified sequence
atggccgcccccgccggcggcggcggcagcgccgtgagcgtgctggcacctaatggacgcaggcatacagtgaaggttaccccaagtactgttcttttacaggtgctcgaggacacttgtagacgccaagatttcaatccatgcgagtacgatctcaagtttcagcgctctgtgctggacctgtccttgcaatggcgatttgcaaacctgcctaataacgctaaactcgagatggtcccagcatccagaagcagggagggacccgaaaacatggtgcggatcgcgctgcagctggatgatgggtcaagactccaggactctttctgttcaggccagaccctctgggaattgctaagccacttccctcaaatcagagaatgcctgcaacaccctggaggggctacacccgtgtgcgtgtataccagggacgaagtaacaggagaagcagcactgagaggcacaaccctgcaatcactggggctgactggggggagtgctacaattcggtttgtcatgaaatgctacgatccggtgggcaaaaccccgggcagcctaggatcctccgcatccgctgggcaagccgcagccagcgctccacttcctctggagtcgggcgagttgtctaggggcgatctctcaagacccgaagatgccgacacatccggtccctgctgcgagcatacgcaggaaaagcagtcaacgagggcgccagcagccgccccttttgtgccattctccgggggcggccagaggctaggaggccctccaggccccacccggcccctcacttcttcttcagccaaattgcctaagagcctgagcagccctgggggcccgagcaaacccaaaaagtcaaagtccggtcaggatcctcagcaggagcaggagcaagaacgtgagcgcgatccccagcaagagcaggagcgcgagcgcccagtggacagggagcccgtcgatcgggagcctgtggtctgtcaccctgacctggaagagaggttgcaggcctggccagcagagctccctgacgaattcttcgagctaactgttgacgacgttaggcgtcggctggcccagctgaagtccgaacgtaagcggcttgaagaagcacccctggtgaccaaagcttttagagaagcgcaaattaaggaaaagcttgaacgctatccaaaggtggccctgcgcgttctatttccggaccgatacgttcttcagggttttttcaggccctcagagacagttggtgatcttcgcgatttcgttcggtcgcatctcgggaacccggagctctctttttacttgtttattacccctccaaaaaccgtgctcgatgatcatacacagacactgttccaagcaaacctgttcccggctgccctggttcacctgggtgccgaggaacccgcaggggtgtacctcgagcctggactgttagagcatgcgatttccccctcggccgccgatgtgttggtcgctcggtatatgtcacgtgcggccggctctcccagtcccctccctgcccccgatccagcacccaagtcagagcctgcagctgaagagggtgccttagtacccccagagccgattccggggaccgcacagcccgtgaaaagatctcttggaaaagtgcctaagtggctgaaactccctgcatcaaaaaggtag

SEQ ID NO: 214644 - DNA, 1050 bp, Artificial Sequence
  derived and/or modified sequence
atggtgcccgccagccggagccgggagggccccgagaacatggtgaggattgcgctacagctcgacgatggcagtaggctccaagatagcttctgcagtggccaaacattatgggagctcctgagtcactttccgcagatacgcgagtgcttgcaacatccaggtggtgccacacctgtctgcgtgtacacccgggacgaagtcaccggagaggcagccctacgcggtaccaccctgcagtccctggggcttaccggcggatccgccactataagatttgtgatgaaatgttacgaccctgtcgggaagaccccagggtcactaggatcttccgctagtgccggacaggccgccgccagtgcaccattacccctggaatctggtgaactgtcccggggcgacctgtcaaggcctgaagacgcagacacgtctggtccctgttgtgaacatacacaggaaaagcagtcaacacgagccccagctgctgcccccttcgtgcccttcagcggcggcggacagcgcttgggagggccccctggccctaccagaccccttacctctagctctgcaaaacttcccaaaagcttaagcagtcccggtggtccatcaaagcccaagaagtccaaatctggacaggaccctcagcaggagcaggagcaggagcgggaacgagacccccagcaggaacaggaaagggagaggccagtggatcgggaaccggttgacagggagcccgtggtgtgccaccccgacttagaagaacggctccaagcctggccagcggaactgcctgatgagttcttcgaactgactgtggacgacgtacggcgccgcctcgcccagctcaagtccgagagaaagagactcgaggaagctccgctggtcactaaagcattcagagaagctcagatcaaagaaaagttggaacgttaccccaagcggcggtcactcagcctcagccctaggctggaatcagtggtcccgagtcagctgactgcaagttcagcttccagagtacaagtggtgctactgccacagccccccaaatag

SEQ ID NO: 214645 - DNA, 1662 bp, Artificial Sequence
  derived and/or modified sequence
atggctgctccagccggaggtgggggatctgcagtgagcgtcctggcccctaatggcagacggcatactgtgaaagtgactccttcgaccgttctgcttcaagtgcttgaagatacctgcagacgccaggatttcaatccatgcgagtacgatctcaagttccagcgtagcgtcttggacctgtcgcttcagtggcggtttgcgaacttgccgaacaacgccaagctcgagatggttcctgctagccgtagccgcgagggtcctgagaatatggttcgtattgctttgcagctagacgatgggtctaggctgcaagactcattctgtagcgggcagaccctgtgggagctattatcccatttcccgcagatccgcgagtgtctgcaacaccccggtggcgcaacacccgtttgcgtgtacaccagggacgaagttacaggggaagcagctctgaggggtaccacccttcagtccctcggcttgaccggtggatccgctaccatccgattcgtgatgaagtgctacgaccccgttggcaaaactcctggatccctcggaagctcagctagcgccggacaggcggcagcctcagctccattgccgctcgagagtggagagttgagcagaggggacctgtccaggccagaggacgccgacacttctggcccatgctgcgaacatactcaggaaaaacagtctacgcgggctcctgccgctgccccatttgtccctttttcagggggagggcagagactgggcggaccccctgggcctactagacccctgacaagtagcagtgccaaattacctaaatctctctcctccccaggcggtccatccaagccaaaaaagtctaagtcaggacaggacccccaacaagagcaggaacaggaacgcgaaagggatccgcagcaagaacaggaacgcgagagaccagtggatcgcgaacctgtggaccgcgaaccagttgtatgtcatcccgatcttgaagaacggcttcaggcatggcctgctgagttgccggacgaattctttgagcttactgttgacgacgttcggcgtcggttagcccaactgaagtcagagcggaaaagactagaggaggctccccttgtaaccaaggccttcagagaggcccagattaaagagaagttggaaaggtatcccaaagttgccctgcgtgtgctgttcccagatcggtacgtgttacagggcttctttcgccctagcgaaacggttggagatctcagagattttgtgcgctcccacctgggtaaccccgagctgtcgttctacttgttcatcaccccccctaagaccgtgttggacgatcatacccagactctgtttcaggcgaacttgttccccgcagccctggttcacctgggcgcagaagaacctgctggcgtttatttggagcctggattgctcgaacatgccatcagtccttctgcagccgatgtcctggtggccagatatatgtcgagggccgctggttcaccttcacccctgcccgcacccgatccagcccctaagtccgaaccggcagcggaggagggggctctcgtacccccagaacccatcccagggaccgcccagccagtcaagcgctccttgggaaaagtgcccaaatggcttaagctgcctgctagcaagaggtag

SEQ ID NO: 214646 - DNA, 1050 bp, Artificial Sequence
  derived and/or modified sequence
atggttcctgcctctagaagtcgcgaaggcccagaaaatatggtgagaattgcgcttcagcttgacgacggaagccggctgcaggactcattctgcagcggacaaacactgtgggagctgctgagtcacttcccccagattagagagtgcttgcagcacccgggaggcgctaccccagtctgcgtgtatactcgggacgaggtaaccggggaggccgcactccgcggaactaccctgcagagcttaggtctaactggcggttccgccacaattcggttcgtgatgaagtgctatgatccggtgggaaagactcctggctcactgggtagctcagcgagcgcgggtcaggctgcagctagcgccccactgcccttagaatcaggtgagctgtcgagaggagatctgtcacgaccagaagatgctgataccagcggaccgtgttgtgagcacacacaggagaagcagagtactagagctcccgcagccgctccttttgtccctttctccgggggtggccagagattgggcggacccccagggcctacccgcccactgacatccagttcagcgaagctccctaagtctttgtcgtctcccggagggcctagcaaaccaaagaaatccaaatcagggcaggatccccagcaggaacaggagcaggagcgagaaagagatcctcaacaagagcaagagcgcgaacggccagtggacagagaaccggtggatagggagccagtggtctgccaccccgatcttgaggagcggttacaagcctggcctgctgagctgcctgatgaattcttcgagctgaccgtggacgacgttagaagaagactcgctcagctgaaaagcgaacgcaaaaggctcgaggaggccccactggtgacaaaggcctttcgcgaggcgcagatcaaggagaagctggaaagatatcccaagcggagaagcctctccctgtctccaaggctggagagtgtcgtcccttcccagttgacggcatcatcagcctcccgcgtccaagtggttttacttccgcagcctccaaaatag

SEQ ID NO: 214647 - DNA, 1662 bp, Artificial Sequence
  derived and/or modified sequence
atggccgcccccgccggcggcggcggcagcgccgtgagcgtgctggcccccaacggcagaagacacaccgtgaaggtgacccccagcaccgtgctgctgcaggtgctggaggacacctgcagaagacaggacttcaacccctgcgagtacgacctgaagttccagagaagcgtgctggacctgagcctgcagtggagattcgccaacctgcccaacaacgccaagctggagatggtgcccgccagcagaagcagagagggccccgagaacatggtgagaatcgccctgcagctggacgacggcagcagactgcaggacagcttctgcagcggccagaccctgtgggagctgctgagccacttcccccagatcagagagtgcctgcagcaccccggcggcgccacccccgtgtgcgtgtacaccagagacgaggtgaccggcgaggccgccctgagaggcaccaccctgcagagcctgggcctgaccggcggcagcgccaccatcagattcgtgatgaagtgctacgaccccgtgggcaagacccccggcagcctgggcagcagcgccagcgccggccaggccgccgccagcgcccccctgcccctggagagcggcgagctgagcagaggcgacctgagcagacccgaggacgccgacaccagcggcccctgctgcgagcacacccaggagaagcagagcaccagagcccccgccgccgcccccttcgtgcccttcagcggcggcggccagagactgggcggcccccccggccccaccagacccctgaccagcagcagcgccaagctgcccaagagcctgagcagccccggcggccccagcaagcccaagaagagcaagagcggccaggacccccagcaggagcaggagcaggagagagagagagacccccagcaggagcaggagagagagagacccgtggacagagagcccgtggacagagagcccgtggtgtgccaccccgacctggaggagagactgcaggcctggcccgccgagctgcccgacgagttcttcgagctgaccgtggacgacgtgagaagaagactggcccagctgaagagcgagagaaagagactggaggaggcccccctggtgaccaaggccttcagagaggcccagatcaaggagaagctggagagataccccaaggtggccctgagagtgctgttccccgacagatacgtgctgcagggcttcttcagacccagcgagaccgtgggcgacctgagagacttcgtgagaagccacctgggcaaccccgagctgagcttctacctgttcatcaccccccccaagaccgtgctggacgaccacacccagaccctgttccaggccaacctgttccccgccgccctggtgcacctgggcgccgaggagcccgccggcgtgtacctggagcccggcctgctggagcacgccatcagccccagcgccgccgacgtgctggtggccagatacatgagcagagccgccggcagccccagccccctgcccgcccccgaccccgcccccaagagcgagcccgccgccgaggagggcgccctggtgccccccgagcccatccccggcaccgcccagcccgtgaagagaagcctgggcaaggtgcccaagtggctgaagctgcccgccagcaagagatag

SEQ ID NO: 214648 - DNA, 1050 bp, Artificial Sequence
  derived and/or modified sequence
atggtgcccgccagcagaagcagagagggccccgagaacatggtgagaatcgccctgcagctggacgacggcagcagactgcaggacagcttctgcagcggccagaccctgtgggagctgctgagccacttcccccagatcagagagtgcctgcagcaccccggcggcgccacccccgtgtgcgtgtacaccagagacgaggtgaccggcgaggccgccctgagaggcaccaccctgcagagcctgggcctgaccggcggcagcgccaccatcagattcgtgatgaagtgctacgaccccgtgggcaagacccccggcagcctgggcagcagcgccagcgccggccaggccgccgccagcgcccccctgcccctggagagcggcgagctgagcagaggcgacctgagcagacccgaggacgccgacaccagcggcccctgctgcgagcacacccaggagaagcagagcaccagagcccccgccgccgcccccttcgtgcccttcagcggcggcggccagagactgggcggcccccccggccccaccagacccctgaccagcagcagcgccaagctgcccaagagcctgagcagccccggcggccccagcaagcccaagaagagcaagagcggccaggacccccagcaggagcaggagcaggagagagagagagacccccagcaggagcaggagagagagagacccgtggacagagagcccgtggacagagagcccgtggtgtgccaccccgacctggaggagagactgcaggcctggcccgccgagctgcccgacgagttcttcgagctgaccgtggacgacgtgagaagaagactggcccagctgaagagcgagagaaagagactggaggaggcccccctggtgaccaaggccttcagagaggcccagatcaaggagaagctggagagataccccaagagaagaagcctgagcctgagccccagactggagagcgtggtgcccagccagctgaccgccagcagcgccagcagagtgcaggtggtgctgctgccccagccccccaagtag

SEQ ID NO: 214649 - protein, 562 aa, Artificial Sequence
  derived and/or modified sequence
MALSKSMHARNRYKDKPPDFAYLASKYPDFKQHVQINLNGRVSLNFKDPEAVRALTCTLLREDFGLSIDIPLERLIPTVPLRLNYIHWVEDLIGHQDSDKSTLRRGIDIGTGASCIYPLLGATLNGWYFLATEVDDMCFNYAKKNVEQNNLSDLIKVVKVPQKTLLMDALKEESEIIYDFCMCNPPFFANQLEAKGVNSRNPRRPPPSSVNTGGITEIMAEGGELEFVKRIIHDSLQLKKRLRWYSCMLGKKCSLAPLKEELRIQGVPKVTYTEFCQGRTMRWALAWSFYDDVTVPSPPSKRRKLEKPRKPITFVVLASVMKELSLKASPLRSETAEGIVVVTTWIEKILTDLKVQHKRVPCGKEEVSLFLTAIENSWIHLRRKKRERVRQLREVPRAPEDVIQALEEKKPTPKESGNSQELARGPQERTPCGPALREGEAAAVEGPCPSQESLSQEENPEPTEDERSEEKGGVEVLESCQGSSNGAQDQEASEQFGSPVAERGKRLPGVAGQYLFKCLINVKKEVDDALVEMHWVEGQNRDLMNQLCTYIRNQIFRLVAVN

SEQ ID NO: 214650 - protein, 224 aa, Artificial Sequence
  derived and/or modified sequence
MALSKSMHARNRYKDKPPDFAYLASKYPDFKQHVQINLNGRVSLNFKDPEAVRALTCTLLREDFGLSIDIPLERLIPTVPLRLNYIHWVEDLIGHQDSDKSTLRRGIDIGTGASCIYPLLGATLNGWYFLATEVDDMCFNYAKKNVEQNNLSDLIKVVKVPQKTLLMDALKEESEIIYDFCMCNPPFFANQLEAKGVNSRNPRRPPPSSVNTGESLEPGRRRLQ

SEQ ID NO: 214651 - protein, 201 aa, Artificial Sequence
  derived and/or modified sequence
MKELSLKASPLRSETAEGIVVVTTWIEKILTDLKVQHKRVPCGKEEVSLFLTAIENSWIHLRRKKRERVRQLREVPRAPEDVIQALEEKKPTPKESGNSQELARGPQERTPCGPALREGEAAAVEGPCPSQESLSQEENPEPTEDERSEEKGGVEVLESCQGSSNGAQDQEACWLKLAPQLWTASARSEGLFVESGLGSTA

SEQ ID NO: 214652 - protein, 344 aa, Artificial Sequence
  derived and/or modified sequence
MAEGGELEFVKRIIHDSLQLKKRLRWYSCMLGKKCSLAPLKEELRIQGVPKVTYTEFCQGRTMRWALAWSFYDDVTVPSPPSKRRKLEKPRKPITFVVLASVMKELSLKASPLRSETAEGIVVVTTWIEKILTDLKVQHKRVPCGKEEVSLFLTAIENSWIHLRRKKRERVRQLREVPRAPEDVIQALEEKKPTPKESGNSQELARGPQERTPCGPALREGEAAAVEGPCPSQESLSQEENPEPTEDERSEEKGGVEVLESCQGSSNGAQDQEASEQFGSPVAERGKRLPGVAGQYLFKCLINVKKEVDDALVEMHWVEGQNRDLMNQLCTYIRNQIFRLVAVN

SEQ ID NO: 214653 - DNA, 1689 bp, Artificial Sequence
  derived and/or modified sequence
atggccctgagcaagagcatgcacgccagaaacagatacaaggacaagccccccgacttcgcctacctggccagcaagtaccccgacttcaagcagcacgtgcagatcaacctgaacggcagagtgagcctgaacttcaaggaccccgaggccgtgagagccctgacctgcaccctgctgagagaggacttcggcctgagcatcgacatccccctggagagactgatccccaccgtgcccctgagactgaactacatccactgggtggaggacctgatcggccaccaggacagcgacaagagcaccctgagaagaggcatcgacatcggcaccggcgccagctgcatctaccccctgctgggcgccaccctgaacggctggtacttcctggccaccgaggtggacgacatgtgcttcaactacgccaagaagaacgtggagcagaacaacctgagcgacctgatcaaggtggtgaaggtgccccagaagaccctgctgatggacgccctgaaggaggagagcgagatcatctacgacttctgcatgtgcaacccccccttcttcgccaaccagctggaggccaagggcgtgaacagcagaaaccccagaagacccccccccagcagcgtgaacaccggcggcatcaccgagatcatggccgagggcggcgagctggagttcgtgaagagaatcatccacgacagcctgcagctgaagaagagactgagatggtacagctgcatgctgggcaagaagtgcagcctggcccccctgaaggaggagctgagaatccagggcgtgcccaaggtgacctacaccgagttctgccagggcagaaccatgagatgggccctggcctggagcttctacgacgacgtgaccgtgcccagcccccccagcaagagaagaaagctggagaagcccagaaagcccatcaccttcgtggtgctggccagcgtgatgaaggagctgagcctgaaggccagccccctgagaagcgagaccgccgagggcatcgtggtggtgaccacctggatcgagaagatcctgaccgacctgaaggtgcagcacaagagagtgccctgcggcaaggaggaggtgagcctgttcctgaccgccatcgagaacagctggatccacctgagaagaaagaagagagagagagtgagacagctgagagaggtgcccagagcccccgaggacgtgatccaggccctggaggagaagaagcccacccccaaggagagcggcaacagccaggagctggccagaggcccccaggagagaaccccctgcggccccgccctgagagagggcgaggccgccgccgtggagggcccctgccccagccaggagagcctgagccaggaggagaaccccgagcccaccgaggacgagagaagcgaggagaagggcggcgtggaggtgctggagagctgccagggcagcagcaacggcgcccaggaccaggaggccagcgagcagttcggcagccccgtggccgagagaggcaagagactgcccggcgtggccggccagtacctgttcaagtgcctgatcaacgtgaagaaggaggtggacgacgccctggtggagatgcactgggtggagggccagaacagagacctgatgaaccagctgtgcacctacatcagaaaccagatcttcagactggtggccgtgaactag

SEQ ID NO: 214654 - DNA, 675 bp, Artificial Sequence
  derived and/or modified sequence
atggccctgagcaagagcatgcacgccagaaacagatacaaggacaagccccccgacttcgcctacctggccagcaagtaccccgacttcaagcagcacgtgcagatcaacctgaacggcagagtgagcctgaacttcaaggaccccgaggccgtgagagccctgacctgcaccctgctgagagaggacttcggcctgagcatcgacatccccctggagagactgatccccaccgtgcccctgagactgaactacatccactgggtggaggacctgatcggccaccaggacagcgacaagagcaccctgagaagaggcatcgacatcggcaccggcgccagctgcatctaccccctgctgggcgccaccctgaacggctggtacttcctggccaccgaggtggacgacatgtgcttcaactacgccaagaagaacgtggagcagaacaacctgagcgacctgatcaaggtggtgaaggtgccccagaagaccctgctgatggacgccctgaaggaggagagcgagatcatctacgacttctgcatgtgcaacccccccttcttcgccaaccagctggaggccaagggcgtgaacagcagaaaccccagaagacccccccccagcagcgtgaacaccggcgagagcctggagcccggcagaagaagactgcagtag

SEQ ID NO: 214655 - DNA, 1689 bp, Artificial Sequence
  derived and/or modified sequence
atggcactgtccaagtctatgcatgcaagaaataggtacaaggataagccccccgacttcgcctatcttgctagcaaataccccgattttaaacaacatgtgcagatcaatctcaatgggcgggtgagcctgaactttaaagatccagaagctgtccgggccctcacctgcacactcctgcgcgaagacttcggattgtctatagacattcccttggaacggttaatacccaccgtgcccctgagactaaattatattcactgggtcgaagacctgataggtcatcaggactccgacaaaagtacactgcgtagagggatcgacattggcaccggcgcaagttgtatctatcctctcctcggggcgacgcttaacggctggtattttttagctacagaggtggacgatatgtgttttaattacgcaaagaaaaacgtggagcagaataacctgagcgacctgattaaggtggtcaaagtccctcagaagactctcctgatggatgctctgaaagaagaatccgagattatttatgacttttgcatgtgtaaccctcctttttttgcaaatcagctcgaggcgaaaggagtgaattcccggaaccctagaagaccacctccttcaagcgtaaataccggggggattaccgaaataatggctgaggggggagaactggaattcgttaagagaatcatccatgacagtctccagttgaagaaacggcttaggtggtattcctgcatgcttggcaaaaaatgctccttggcgcctctgaaagaggaactcaggatacagggcgtcccaaaagtgacttacacggaattctgccagggaagaaccatgcgttgggccctggcctggtcattctatgatgacgtcactgtgccctcccccccctctaagcgccggaagctcgagaaaccgagaaagcccattaccttcgtggtcctggcttctgtgatgaaagaactgtcactgaaggcaagtccattgcgttccgagaccgccgaagggatagtcgtcgtgactacctggattgagaaaatcctgaccgaccttaaggtgcagcataagcgggtcccctgcgggaaggaggaggtgagtctgtttctgaccgccatagagaacagctggattcatttaagaagaaaaaaacgcgagagggtccggcagctcagggaagttccaagggcccccgaggacgtaattcaagccctcgaggagaaaaaaccaacacccaaagaatcagggaattcacaggagctcgcaagagggccgcaggaacgcacgccttgcgggcccgctctcagggagggagaagcagctgcggtggaaggaccgtgtccgagccaggaatcgctcagccaggaggaaaacccagagcctactgaggacgagcggtcagaagagaagggtggagttgaggtgcttgaatcttgccagggttcctcgaacggggcacaggatcaggaagccagtgaacagtttggttcgcctgtagctgagcgcggtaaaaggctgcctggggtggccggtcagtatctgtttaagtgtttgattaatgtcaagaaggaagtggacgatgcactggttgagatgcactgggtggaaggacagaaccgcgatctgatgaaccagttgtgcacctatattagaaatcagatctttcgtctagtggccgtgaactag

SEQ ID NO: 214656 - DNA, 675 bp, Artificial Sequence
  derived and/or modified sequence
atggcactctcaaaatcaatgcatgcccgaaatcgctataaagacaagccgccagactttgcctatctggctagtaagtatccggactttaaacaacacgtgcaaatcaatctcaacggccgagtttctttaaactttaaggacccggaggcagttagagcactgacatgcaccctgttgcgcgaagattttggactcagtattgatataccgctcgagcggttgatccccactgtgcctctccggctgaattacattcattgggttgaggacttaatcggtcatcaggacagcgataagagcaccctgcgccgcggcatcgacatcggaacgggagcaagctgcatctacccgctgctgggcgccactctcaacgggtggtacttcctcgctactgaggtggatgatatgtgcttcaattacgcaaaaaaaaatgttgagcagaacaacctgagcgatctgattaaggtagtgaaggtgcctcagaagaccctgttgatggacgctcttaaggaagagtcggagatcatctacgatttttgcatgtgtaatcccccctttttcgccaatcagcttgaggccaagggagtgaacagtagaaatcctcgccgacctcctccaagtagcgtgaatacaggcgaatccctcgagccagggcgccggagactccagtag

SEQ ID NO: 214657 - DNA, 1689 bp, Artificial Sequence
  derived and/or modified sequence
atggccctgagcaagtccatgcacgccaggaaccgctacaaggacaagcccccagactttgcctacctggccagcaagtacccagacttcaagcagcacgtgcagatcaacctgaatggccgggtgtccctgaacttcaaggaccctgaggccgtgcgggccctgacctgcaccctgctgcgggaggactttggcctgagcattgacatccccctggagcggctcatccccaccgtgcccctgcggctgaactacatccactgggtggaggacctgattggccaccaggacagcgacaagagcaccctgcggcggggcattgatattggaactggagccagctgcatctaccccctgctgggcgccaccctgaatggctggtacttcctggccacagaggtggatgacatgtgcttcaactatgccaagaagaatgtggagcagaacaacctgagtgacctgatcaaggtggtgaaggtgccccagaagaccctgctgatggatgccctgaaggaggagagcgagatcatctatgacttctgcatgtgcaacccccccttctttgccaaccagctggaggccaagggcgtgaacagcaggaacccccggcggcccccacccagctctgtgaacacaggaggcatcacagagatcatggccgagggcggggagctggagtttgtgaagaggatcatccatgacagcctgcagctgaagaagaggctgcgctggtacagctgcatgctgggcaagaagtgcagcctggcccccctgaaggaggagctgcgcatccagggcgtgcccaaggtgacctacacagagttctgccagggccgcaccatgcgctgggccctggcctggagcttctatgatgatgtgacagtgcccagcccccccagcaagaggaggaagctggagaagcccaggaagcccatcacctttgtggtgctggcctctgtgatgaaggagctgagcctgaaggccagccccctgcggagtgaaacagctgagggcatcgtggtggtgaccacctggattgagaagatcctgacagacctgaaggtgcagcacaagagggtgccctgtgggaaggaggaggtgtccctcttcctgacagccattgaaaattcctggatccacctgcggaggaagaagcgggagcgggtgcggcagctgcgggaggtgccccgggccccagaagatgtgatccaggccctggaggagaagaagcccacccccaaggagagcggcaacagccaggagctggcccggggcccccaggagaggaccccctgtggccctgccctgcgggagggggaggccgctgctgtggagggcccctgccccagccaggagagcctgagccaggaggagaaccctgagcccacagaagatgagaggtctgaggagaagggcggcgtggaggtgctggagagctgccagggcagcagcaatggagcccaggaccaggaggccagcgagcagtttggcagccctgtggccgagcggggcaagaggctgcccggggtggccggccagtacctgttcaagtgcctgatcaacgtgaagaaggaggtggatgatgccctggtggagatgcactgggtggagggccagaacagagacctgatgaaccagctgtgcacctacatccggaaccagatcttccggctggtggccgtgaactag

SEQ ID NO: 214658 - DNA, 675 bp, Artificial Sequence
  derived and/or modified sequence
atggccctgagcaagtccatgcacgccaggaaccgctacaaggacaagcccccagactttgcctacctggccagcaagtacccagacttcaagcagcacgtgcagatcaacctgaatggccgggtgtccctgaacttcaaggaccctgaggccgtgcgggccctgacctgcaccctgctgcgggaggactttggcctgagcattgacatccccctggagcggctcatccccaccgtgcccctgcggctgaactacatccactgggtggaggacctgattggccaccaggacagcgacaagagcaccctgcggcggggcattgatattggaactggagccagctgcatctaccccctgctgggcgccaccctgaatggctggtacttcctggccacagaggtggatgacatgtgcttcaactatgccaagaagaatgtggagcagaacaacctgagtgacctgatcaaggtggtgaaggtgccccagaagaccctgctgatggatgccctgaaggaggagagcgagatcatctatgacttctgcatgtgcaacccccccttctttgccaaccagctggaggccaagggcgtgaacagcaggaacccccggcggcccccacccagctctgtgaacacaggagagagcctggagcccggcagaagaaggctgcagtag

SEQ ID NO: 214659 - DNA, 1689 bp, Artificial Sequence
  derived and/or modified sequence
atggccctgagcaagagcatgcacgcccggaaccggtacaaggacaagcccccagatttcgcttacctcgctagtaagtaccctgactttaagcagcacgttcagattaatctgaacggcagagtgagtttgaactttaaagatcccgaagccgtccgggcactcacgtgcaccctactccgagaggatttcggcctgtctatcgatatccccctggaacgattaattcctaccgttcctctgcggcttaattacatccattgggtggaagatctgatcggacatcaagactcagataaatccacacttagaaggggcatcgatataggcaccggcgctagttgtatttatcctctgctgggtgcaacactcaacggatggtatttcctggccactgaggttgatgatatgtgctttaactatgcaaaaaaaaacgtggaacagaataacttatccgacctcatcaaggtggtgaaggtgccccaaaagacattactcatggacgcgttgaaggaggaaagtgaaattatatatgatttctgtatgtgtaacccccccttcttcgccaatcagttggaagccaagggcgtgaacagcaggaacccccgacgaccgccaccgagctctgtgaataccggcgggattacagagattatggcagaaggaggcgaactggagttcgtcaaacgcattattcatgacagtctgcagctgaaaaagcggctccggtggtacagctgtatgttgggcaagaagtgctccctggcccctctgaaagaggagcttcggatacagggtgtgcccaaagtgacttacactgaattttgccagggcagaaccatgcggtgggccctcgcctggtccttttacgatgatgttaccgtgccatcccctccgagcaaaaggcggaagctcgagaaacccagaaagccgataactttcgtagtgctagccagtgttatgaaggaactgagcctcaaggcttccccactgcggtcagagacagctgaaggaatagtggtggtaaccacctggatcgagaagatcctgacggatctgaaggtccagcacaaacgagtgccctgcggaaaggaggaagtgagtctcttcctcacagccatcgagaactcgtggatccacctgcgtagaaaaaaacgagagcgagtgcgtcaactgcgcgaggttcctagggctcctgaggatgtcattcaggccctggaggaaaagaaacccacaccaaaagagtctggaaacagccaagagctggctagagggccacaggagagaactccttgtgggccagctctgcgagaaggcgaggccgctgctgtggaaggaccatgtccctctcaggagagtctatctcaggaagaaaaccctgagcccactgaagacgagcggtctgaggagaagggcggtgtggaggtactggaatcgtgccagggctcctccaacggcgcacaagatcaggaggcgtcagagcaattcggtagccccgtggcagaacgaggcaagcgcctcccaggtgtggctggtcagtatctgtttaagtgcctgataaacgtgaagaaggaggtggacgatgcccttgtggagatgcattgggtagagggccagaaccgtgatttgatgaatcaattgtgtacatatattcggaaccagatcttccgcctggtggccgtgaattag

SEQ ID NO: 214660 - DNA, 675 bp, Artificial Sequence
  derived and/or modified sequence
atggccctgagcaagagcatgcacgcccggaaccggtacaaggacaagccaccggatttcgcgtacctggcttctaagtaccccgatttcaagcaacatgttcagatcaatctgaatgggagagtcagtttaaattttaaagatcctgaggctgtccgcgccttgacgtgcactcttctgcgagaggactttgggttatctatagatattcctctcgagcgcctgatccccacagtcccattgcgactgaactacatccactgggtggaagatctgattggacatcaggacagtgataaaagtacccttcgcagaggtattgatattggtaccggcgcctcttgcatttatccgctcctcggtgcgacactgaatggatggtattttctagcaacggaggtggacgacatgtgcttcaattacgccaagaagaatgtggaacagaataacctgtcagacttgatcaaggtcgtcaaagtaccacagaaaaccctgctgatggacgcccttaaggaggagagtgagatcatctacgacttttgcatgtgtaatccgccttttttcgcaaatcagctggaggcaaagggggtcaactccaggaatccccgaagaccacccccctccagcgtgaatacaggcgaaagcctcgagcccggcagacgacggctgcagtag

SEQ ID NO: 214661 - DNA, 5749 bp, Artificial Sequence
  derived and/or modified sequence
acgaggctagatggcttcacaagatggcggcgcgctgggagcgtatcatctgcgtttctaggagcttcgctatgcggctgctttaagattctagggttgtacaggcccacgccagacacgacgtctggcaggaacctcggcctcagagatggctctgagtaaatcaatgcatgcaagaaatagatacaaggacaaacctcctgactttgcatatctggcatccaaatatccagattttaagcagcatgttcagataaatctgaatggaagagtgagccttaattttaaagaccccgaagcagtcagagctctgacgtgtactctcctaagggaagattttggactttctattgatattccattggagagactaattcccacagttcccttgagactcaactatattcactgggtagaagatctgatcggtcaccaggattctgacaaaagtactctccgaagaggaattgacataggcacgggggcatcttgcatctaccccttacttggagcaaccttgaatggctggtatttcctcgcaacagaagtggatgatatgtgtttcaactatgcaaagaaaaatgtggaacagaataacttatctgatctcataaaagtggtgaaagtgccacagaagacactcctgatggatgctcttaaagaagaatctgagataatctatgacttttgcatgtgcaaccctcccttttttgccaatcaattggaagccaagggagtaaactcacgaaatcctcgaagacctccgcctagttctgttaatacaggaggcatcacagagatcatggcagaaggaggtgaattagagtttgttaaaaggatcatccatgacagtctacaacttaaaaaaagattaagatggtatagctgcatgctgggaaagaaatgcagcctggcgcctctgaaggaggagcttcgcatacaaggggttcccaaagtaacgtacactgaattctgtcaaggtcggacaatgagatgggccttagcttggagtttttatgatgatgtcacagtaccatcaccaccaagtaagcgaagaaaattagagaaaccgagaaaacccataacattcgtggtgctggcgtccgtgatgaaggaattatccctcaaagcatcacctctgcgctcggagacggcggaaggcatagtcgttgtcacgacatggattgaaaaaattctcactgatttgaaggtccagcataaacgagttccctgtggaaaagaggaagtcagccttttcctaacggccatagaaaactcctggattcatttaaggagaaagaaaagagagcgtgtgagacagctgagagaagttccccgagctcctgaggacgtcattcaggccttggaagagaaaaagcccacccccaaagagtctggcaatagccaagaactggccaggggcccccaggagaggaccccctgtgggcctgctctgcgggaaggcgaggctgccgctgtggagggcccgtgcccgagccaggagtccctgtcccaggaggaaaacccggaacccacggaggatgaaaggagtgaggaaaagggaggggtggaggttttggaaagttgtcaaggctctagcaacggagcccaggaccaagaggcttctgagcagttcggcagcccagtggctgaaagggggaaacgtctcccaggagtggccggacagtacctgtttaagtgtttgataaacgttaagaaggaggtggacgatgccttagtggagatgcactgggttgagggccagaacagggatctgatgaaccagctttgcacctacatacgtaaccaaattttcaggcttgttgcagttaactagaaacctcctgcacagttggaaacgtgttgatagtaacttgctttggagtggcctgtggggtggcaagaggaatcctaccagcggcccattagtagcacgatgtggaattatcttcgaaaacaaaaacctatgaatctgtcccccacctccccccgcctccttcccgctttttgagttacagggagtcgtagtgtggtcatttacaaggaggaattgtggtcatcagtaacaacagaaagccctcagtaaactcccgagggattgcaagctggctcaagctggcccctcagctctggactgcctctgcaaggtcagaagggttgtttgtggagtctgggctgggcagcactgcctagaatatcatgctgtctctgtcacccaagggtgtttcttgaggaggggtggctctctctgcctccagctggaggccctggtaccctgttctaggtcactcttcaagatggggcctaccttgcatcaatcccacaaagggagctgtatggtgggtggtggggaatctgggagagaaaccttagtaatgctgggaaggagcagcagagtctggggaccacccggtaaatggcacattcctgacacctggctgttttgatgttgcttatttcagaagcagaattaggtaagcaaaactccccggtgtgactgaggcacacagaaggcacccatacccccacctccagcctgttgacagtaccattttgtagcagttttactactgtgtgatttttgtttggacatctgaagtagagcttgttttgtttttaaataagaatattcacaaattaaaaaccagcggtcctatttgaatcctggggttagctgagtgagcggctgatgatagaaatgagaaatagaacaaaatagtatgtgccgtaggtagcttaagaaagtctcagatattttgttgctgatcaaatactgtttttttgtggcttcacttgtaatcccccctgtacttacctactcacattggagagttctgaggccggagtaactgtgtccttgaaacacgtttctaattggaatgccagggttcagtagccgtccccccggaaaggggtgaccttttgctgtgcttgatgttgcatcagcagcctagggttctgtttagactaaaatcttggccagagctccttgccatctgctaagaagactggggctgagtagttaagccagccttctgagaggtggctgttggtcaggacgggaagctggtgaccttggcatgtcttggcagcagctagatcaggccctcggcagagacacaggaagcggaactgctgtgccttaacttggctgtggagctggagctggagaaggcagcatactgaccagtggctttttgattgattgtttgttatgaggtggagttttactcttgttgtctaggctggagtgccgtggtgcgatcttagctcactgcaacccccgcctcccgggttcaagcgattctcctgcctcagcctcccaagtagctgggattacaggcacgcgccaccacgcctggctaattttgtgtttttggtagagatgggatttcaccatgttggccaggctaatctcgaactcatgatctcgggtgatccgcccaccttggcctcccaaagtgctgggattacagccgtgagccactactcccagcctctgaccagtgttcttaacctggtccgtggacctccagagagtccatgtacctcctagagttacttctaaaagctctgtgagcatgtgtgtgtgtgtgtgtgtgtgtgtgtattttttttcctggagagagggttcccagaaccctcagacacagacaaaggggtcaataacccactaaggattaagaatcattattctagtccaagcattcatgtgtcaggctgcaaaaaacaatacccagggtcacacagagccaagactcaattcaggaccgtggattcccctggtctagaaattttctgctgtgccagcccacaccaccccactgtccttacctcgagtgaatattacatttgagtcatttgctgggcccaaacctagtttccttggtataattttaggataattgtttaagtggcaactattcattcagtaagtagtaagtacttattgtttgcttgtttcattatgaaagagtggcacatgctcattaaagatttggaaaaatgaaagtcaaaacaacaaaatcaccccgagtcccaaccttctgtaacataaccactcttggcattggcgtgttcctttctagtctctctgtagacggggtgtgtgagtgtgtgggtttaactttggttgtcctcatgctgcgtattcagttttgtattctggtcctttgttcatttaacatcttacaagtatttgtccatgttgtaacagtagtgtattagcttacactccttgcctgttcaaaatgtctttcaggcacagcactggcctttaagcctgtgtcgtagggatttccagagaatgctctgtgtattgaagcacagaaggtgtttctgtgtctcagtgtgtttctgtccctaggtttaaggcttcatgtcatggaggagattttatagatgtcaagctaatgaccttagagttttaaaaaatccgtgaccgtggccaggcgcagtggctcacgcctgtaatcccagcactgtgaggctgagatgggcgcatcgcatgaggtcgggagtttgagaccagcctggccaacatggcgaaaccccgtctctactcaaaatacaaaaattagccgggcatgatagcacgtgcctgtaatcccagctactcgggaggctgaggcaggagactcgcttgaacctgggaggtggaggttgcagtgagccgagaatgccactgcactacagcctgggcgacaaagtgggactgtctcaaaaaaaaaaaaaaaaaaaaaaaaaaaggaacccatgagcaggccagctttcagtctggagccgagtgccttctgtgcatttggatgtttccatttccttccctgagaagattttcttaggctacctagtgagagaacattgaaaatatttttaaaggacatctaagcattgttttggtcatgcatatgctttataattgtgtgttgtttcatagcatatacctctggtacaggtgggcaagtttttctttgaagaaatgggttattgactcatatgtcataaccttgagtgttactctcccggtgtccagaggtcacattcatgttgcggggttggtatgaaattaaatcttggtgatgtgaccctacattctcttctggtccctagaatcggcttctggtctcctgataactgaagtggagacagaagttgagcctgttgcccaggcaaactaaagctgcttttgttcttcggaatctgctttgcctccgtcagcctgcttccttccccacacatgctggccgcactgtccccactccagacctctgctgtgtgtcctgggcagggccgcgttttggcagtaccctttcaactcatcctaagcttcgtgtagattactttagtatatattttttataaaacataaagcctttcctctcgatggaaatcaaagcttaccatgtgagcactcgaacttctaagttgtgacaggaataacaaaactgcaaggagtggaaaagatggaaaagcctgtgggaaatccgaggccttttgaaagaagggagctgatgacttcacgaccagctcctggagcccctcctttctgctgaagccgcggcatttccctccgtggccacacgagggcacccttggcccttttatcaaagcgccttcacttccccgtgggaatggagacaagtctgtccacggtgttttcttgaaatacccagttgctacccagatttgtatttttatgtaaacaaatacattttcacagaaataaaatttgaaaaataaaagtagaaag

SEQ ID NO: 214662 - DNA, 823 bp, Artificial Sequence
  derived and/or modified sequence
acgaggctagatggcttcacaagatggcggcgcgctgggagcgtatcatctgcgtttctaggagcttcgctatgcggctgctttaagattctagggttgtacaggcccacgccagacacgacgtctggcaggaacctcggcctcagagatggctctgagtaaatcaatgcatgcaagaaatagatacaaggacaaacctcctgactttgcatatctggcatccaaatatccagattttaagcagcatgttcagataaatctgaatggaagagtgagccttaattttaaagaccccgaagcagtcagagctctgacgtgtactctcctaagggaagattttggactttctattgatattccattggagagactaattcccacagttcccttgagactcaactatattcactgggtagaagatctgatcggtcaccaggattctgacaaaagtactctccgaagaggaattgacataggcacgggggcatcttgcatctaccccttacttggagcaaccttgaatggctggtatttcctcgcaacagaagtggatgatatgtgtttcaactatgcaaagaaaaatgtggaacagaataacttatctgatctcataaaagtggtgaaagtgccacagaagacactcctgatggatgctcttaaagaagaatctgagataatctatgacttttgcatgtgcaaccctcccttttttgccaatcaattggaagccaagggagtaaactcacgaaatcctcgaagacctccgcctagttctgttaatacaggagaatcgcttgaacctgggaggcggaggttgcagtga

SEQ ID NO: 214663 - DNA, 1944 bp, Artificial Sequence
  derived and/or modified sequence
acaagatggcggcgcgctgggagcgtatcatctgcgtttctaggagcttcgctatgcggctgctttaagattctagggttgtacaggcccacgccagacacgacgtctggcaggaacctcggcctcagagatggctctgagtaaatcaatgcatgcaagaaatagatacaaggacaaacctcctgactttgcatatctggcatccaaatatccagattttaagcagcatgttcagataaatctgaatggaagagtgagccttaattttaaagaccccgaagcagtcagagctctgacgtgtactctcctaagggaagattttggactttctattgatattccattggagagactaattcccacagttcccttgagactcaactatattcactgggtagaagatctgatcggtcaccaggattctgacaaaagtactctccgaagaggaattgacatagggagtaaactcacgaaatcctcgaagacctccgcctagttctgttaatacaggaggcatcacagagatcatggcagaaggaggtgaattagagtttgttaaaaggatcatccatgacagtctacaacttaaaaaaagattaagatggtatagctgcatgctgggaaagaaatgcagcctggcgcctctgaaggaggagcttcgcatacaaggggttcccaaagtaacgtacactgaattctgtcaaggtcggacaatgagatgggccttagcttggagtttttatgatgatgtcacagtaccatcaccaccaagtaagcgaagaaaattagagaaaccgagaaaacccataacattcgtggtgctggcgtccgtgatgaaggaattatccctcaaagcatcacctctgcgctcggagacggcggaaggcatagtcgttgtcacgacatggattgaaaaaattctcactgatttgaaggtccagcataaacgagttccctgtggaaaagaggaagtcagccttttcctaacggccatagaaaactcctggattcatttaaggagaaagaaaagagagcgtgtgagacagctgagagaagttccccgagctcctgaggacgtcattcaggccttggaagagaaaaagcccacccccaaagagtctggcaatagccaagaactggccaggggcccccaggagaggaccccctgtgggcctgctctgcgggaaggcgaggctgccgctgtggagggcccgtgcccgagccaggagtccctgtcccaggaggaaaacccggaacccacggaggatgaaaggagtgaggaaaagggaggggtggaggttttggaaagttgtcaaggctctagcaacggagcccaggaccaagaggcttctgagcagttcggcagcccagtggctgaaagggggaaacgtctcccaggagtggccggacagtacctgtttaagtgtttgataaacgttaagaaggaggtggacgatgccttagtggagatgcactgggttgagggccagaacagggatctgatgaaccagctttgcacctacatacgtaaccaaattttcaggcttgttgcagttaactagaaacctcctgcacagttggaaacgtgttgatagtaacttgctttggagtggcctgtggggtggcaagaggaatcctaccagcggcccattagtagcacgatgtggaattatcttcgaaaacaaaaacctatgaatctgtcccccacctccccccgcctccttcccgctttttgagttacagggagtcgtagtgtggtcatttacaaggaggaattgtggtcatcagtaacaacagaaagccctcagtaaactcccgagggattgcaagctggctcaagctggcccctcagctctggactgcctctgcaaggtcagaagggttgtttgtggagtctgggctgggcagcactgcctagaatatcatgctgtctctgtcacccaa

SEQ ID NO: 214664 - DNA, 1689 bp, Artificial Sequence
  derived and/or modified sequence
atggctctgtccaagagcatgcatgctcggaatcgatataaagacaagccacccgacttcgcttacctagcctctaaataccccgatttcaaacagcacgtccagataaatctgaatggcagagtgagtcttaatttcaaagaccccgaggccgtgcgggctctgacctgcacccttctccgcgaggacttcggattatcgatcgacattccactggagagactgatccccacagtgccactcaggcttaactatattcactgggtcgaagatctaattggacaccaagatagtgacaaatcaacattgaggagaggtatcgatattgggaccggggctagttgtatctaccctcttcttggcgctacccttaacggttggtacttcctggcaacggaagtggacgatatgtgcttcaactacgctaaaaaaaatgtagagcagaacaacctctctgatcttattaaagttgtaaaggtaccccagaagacactcctgatggacgcacttaaagaagagtcggagatcatctacgacttctgtatgtgtaaccccccttttttcgctaatcagcttgaagccaagggtgtcaattcaagaaaccccaggcggcctcctccgagctctgttaataccggtggaattaccgagattatggctgagggcggtgagcttgaatttgtcaagaggattattcacgactccttgcagctgaaaaagcgcctgagatggtactcctgtatgctcggcaagaaatgtagcctcgctcccctgaaggaagaactccggattcagggggttccaaaagtcacatatacagaattttgccaaggacggaccatgcgatgggcattagcctggagcttttacgacgacgtaactgtcccctctcccccatcgaagcggaggaagctggagaagcccagaaaacccataacttttgtggtgctcgccagcgtcatgaaggagctgtccttaaaggctagtcccctccggtccgagacggccgaggggattgtggtcgtaactacctggatcgagaaaatcctgaccgatctgaaggttcagcacaagagggtgccatgcgggaaggaggaggtatcattgtttctgacagccatcgaaaactcgtggatacacctgcggagaaagaaaagagagcgggtccgccagctccgcgaggttccacgtgcacccgaggatgtgatccaggcactggaggagaaaaaacctacccctaaagagagcggtaacagccaagagctggctaggggaccccaggagaggacaccatgcggtccagctctacgagagggcgaggccgcagccgtggaagggccatgtccatctcaggaatccttgtctcaggaggagaacccagaaccaactgaagacgaaagatctgaggagaaaggtggggtggaagttctggaatcctgtcagggcagcagtaacggagcgcaggatcaagaggcctctgaacagtttggctcccctgtggctgaacgcggaaagcgactcccgggagtcgcgggacagtatctgttcaagtgtcttataaacgtaaaaaaagaagtagatgacgctctcgtggaaatgcactgggtggagggccaaaacagggacttgatgaatcagctatgcacatatatcaggaatcagatttttagactggtggccgtgaactag

SEQ ID NO: 214665 - DNA, 675 bp, Artificial Sequence
  derived and/or modified sequence
atggcactgtctaaatccatgcatgcgcgtaacagatacaaagataagccaccagactttgcctatttggcatcaaagtaccccgactttaagcagcacgtgcaaatcaatctgaatggacgtgtatcacttaacttcaaggaccctgaagcagtacgggcactcacgtgcacactcctgcgcgaagatttcggcctgtctatagacatccccctggagcggcttattcctactgttcctctgaggctgaattatattcactgggtcgaagacctgataggacaccaggacagcgataaatctacgcttcggaggggcattgatattgggacgggcgcatcctgcatttacccgctactcggtgccacattgaacggctggtattttctcgccaccgaggtcgacgacatgtgcttcaattatgctaaaaagaacgtggagcaaaataatctttctgacttgatcaaagttgttaaggtcccccagaagactctgctaatggacgccctgaaggaagaatccgagattatctatgatttttgcatgtgtaatccccctttctttgctaaccagctcgaagcaaagggcgttaacagcagaaatccaaggcggccaccgccatccagtgtaaacacaggcgagagtctggaaccaggtcgcaggcggctccagtag

SEQ ID NO: 214666 - protein, 502 aa, Artificial Sequence
  derived and/or modified sequence
MFGTLLLYCFFLATVPALAETGGERQLSPEKSEIWGPGLKADVVLPARYFYIQAVDTSGNKFTSSPGEKVFQVKVSAPEEQFTRVGVQVLDRKDGSFIVRYRMYASYKNLKVEIKFQGQHVAKSPYILKGPVYHENCDCPLQDSAAWLREMNCPETIAQIQRDLAHFPAVDPEKIAVEIPKRFGQRQSLCHYTLKDNKVYIKTHGEHVGFRIFMDAILLSLTRKVKMPDVELFVNLGDWPLEKKKSNSNIHPIFSWCGSTDSKDIVMPTYDLTDSVLETMGRVSLDMMSVQANTGPPWESKNSTAVWRGRDSRKERLELVKLSRKHPELIDAAFTNFFFFKHDENLYGPIVKHISFFDFFKHKYQINIDGTVAAYRLPYLLVGDSVVLKQDSIYYEHFYNELQPWKHYIPVKSNLSDLLEKLKWAKDHDEEAKKIAKAGQEFARNNLMGDDIFCYYFKLFQEYANLQVSEPQIREGMKRVEPQTEDDLFPCTCHRKKTKDEL

SEQ ID NO: 214667 - DNA, 1509 bp, Artificial Sequence
  derived and/or modified sequence
atgttcggcactctcctgttgtactgtttcttcctcgctacggtcccagcactcgctgagaccgggggtgaaagacagctgagtcccgaaaagtcagagatctgggggccagggctgaaggcggacgtggtcctgcctgccagatatttttacatccaggcggttgatacctctgggaacaagtttacctcttccccaggggaaaaggtgttccaggtcaaagtgagcgcacctgaagaacaatttacgcgggtgggcgtgcaggtcctggaccgcaaagacggcagtttcatagttagataccgcatgtacgcctcctacaagaacttaaaagtagagatcaagtttcaggggcaacatgtcgctaaatcaccttatattttaaagggaccggtgtaccacgagaattgcgattgcccactgcaagactcagcagcctggctgagagagatgaattgtcctgaaacaatcgcccagatccaaagggaccttgcacatttcccagcggttgaccccgaaaagatagccgtggagattccgaaaagattcggacaacgccagtccctgtgccactataccctaaaagataataaagtgtatattaaaactcatggcgagcatgttgggtttcgcatctttatggacgctatcctcctctctctcacgcgtaaagtcaaaatgcctgatgtcgaactttttgttaatctgggcgactggcccctagagaaaaagaaaagcaacagtaacattcacccaatcttctcctggtgtggatctaccgatagtaaggatatcgttatgccaacttacgacctgacagatagcgtcctggagaccatgggaagagtttcattagatatgatgagcgtccaggcaaatacaggacccccctgggagtctaaaaatagtacagccgtttggcggggtagagactccagaaaggaacggctggagctggtcaagctctctcgcaaacaccctgaactgattgatgctgcatttaccaacttcttcttcttcaaacacgatgagaacctatatgggccaatcgtgaaacatattagctttttcgacttttttaagcacaaataccagatcaacatagatggcactgtcgccgcctacagactgccatacttgttggtcggggacagcgtcgtgctgaagcaggacagcatctattatgaacatttttataacgaactccaaccttggaaacactacattccagtcaaaagcaatctgagcgatctgctagaaaagctcaaatgggctaaggatcacgacgaggaagctaaaaaaatcgctaaggctggacaagaatttgcgcgcaacaacctgatgggtgacgatatattttgctattattttaagctgtttcaggagtacgccaacttgcaggtcagcgagccacagatcagggaaggcatgaaaagagtggagccccagacagaagacgacctgtttccctgcacctgtcaccgcaaaaaaactaaggacgaattgtag

SEQ ID NO: 214668 - DNA, 2060 bp, Artificial Sequence
  derived and/or modified sequence
cttggctggaacctgagacggattcgctcccaaatgatgctccagtggcaggagcaactcaagttcatcattgtcctgagagagaggagcagcgcggttctcggccgggacagcagaacgccaggggaccctcacctgggcgcgccggggcacgggctttgattgtcctggggtcgcggagacccgcgcgcctgccctgcacgccgggcggcaacctttgcagtcgcgttggctgctgcgatcggccggcgggtccctgccgaaggctcggctgcttctgtccacctcttacacttcttcatttatcggtggatcatttcgagagtccgtcttgtaaatgtttggcactttgctactttattgcttctttctggcgacagttccagcactcgccgagaccggcggagaaaggcagctgagcccggagaagagcgaaatatggggacccgggctaaaagcagacgtcgtccttcccgcccgctatttctatattcaggcagtggatacatcagggaataaattcacatcttctccaggcgaaaaggtcttccaggtgaaagtctcagcaccagaggagcaattcactagagttggagtccaggttttagaccgaaaagatgggtccttcatagtaagatacagaatgtatgcaagctacaaaaatctgaaggtggaaattaaattccaagggcaacatgtggccaaatccccatatattttaaaagggccggtttaccatgagaactgtgactgtcctctgcaagatagtgcagcctggctacgggagatgaactgccctgaaaccattgctcagattcagagagatctggcacatttccctgctgtggatccagaaaagattgcagtagaaatcccaaaaagatttggacagaggcagagcctatgtcactacaccttaaaggataacaaggtttatatcaagactcatggtgaacatgtaggttttagaattttcatggatgccatactactttctttgactagaaaggtgaagatgccagatgtggagctctttgttaatttgggagactggcctttggaaaaaaagaaatccaattcaaacatccatccgatcttttcctggtgtggctccacagattccaaggatatcgtgatgcctacgtacgatttgactgattctgttctggaaaccatgggccgggtaagtctggatatgatgtccgtgcaagctaacacgggtcctccctgggaaagcaaaaattccactgccgtctggagagggcgagacagccgcaaagagagactcgagctggttaaactcagtagaaaacacccagaactcatagacgctgctttcaccaactttttcttctttaaacacgatgaaaacctgtatggtcccattgtgaaacatatttcattttttgatttcttcaagcataagtatcaaataaatatcgatggcactgtagcagcttatcgcctgccatatttgctagttggtgacagtgttgtgctgaagcaggattccatctactatgaacatttttacaatgagctgcagccctggaaacactacattccagttaagagcaacctgagcgatctgctagaaaaacttaaatgggcgaaagatcacgatgaagaggccaaaaagatagcaaaagcaggacaagaatttgcaagaaataatctcatgggcgatgacatattctgttattatttcaaacttttccaggaatatgccaatttacaagtgagtgagccccaaatccgagagggcatgaaaagggtagaaccacagactgaggacgacctcttcccttgtacttgccataggaaaaagaccaaagatgaactctgatatgcaaaataacttctattagaataatggtgctctgaagactcttcttaactaaaaagaagaatttttttaagtattaattccatggacaatataaaatctgtgtgattgtttgcagtatgaagacacatttctacttatgcagtattctcatgactgtactttaaagtacatttttagaattttataataaaaccacctttattttaaagga

SEQ ID NO: 214669 - DNA, 1509 bp, Artificial Sequence
  derived and/or modified sequence
atgtttggcaccctgctgctgtactgcttcttcctggccaccgtgcctgccctggccgagactggaggagagcggcagctgagccctgagaagtctgagatctggggccctggcctgaaggcagatgtggtgctgcctgcccgctacttctacatccaggccgtggacaccagcggcaacaagttcaccagcagccctggagagaaggtgttccaggtgaaggtgtctgcccctgaggagcagttcaccagggtgggcgtgcaggtgctggacaggaaggatggcagcttcatcgtgcgctacaggatgtatgccagctacaagaacctgaaggtggagatcaagttccagggccagcacgtggccaagagcccctacatcctgaagggccctgtgtaccacgagaactgtgactgccccctgcaggacagcgctgcctggctgcgggagatgaactgcccagagaccatcgcccagatccagagggacctggcccacttccctgctgtggaccctgagaagattgctgtggagatccccaagagatttggccagaggcagagcctgtgccactacaccctgaaggacaacaaggtgtacatcaagacccacggggagcacgtgggcttccgcatcttcatggatgccatcctgctgagcctgaccaggaaggtgaagatgccagatgtggagctgtttgtgaacctgggggactggcccctggagaagaagaagagcaacagcaacatccaccccatcttctcctggtgtggcagcacagacagcaaggacatcgtgatgcccacctatgacctgacagattctgtgctggagaccatgggccgggtgtccctggacatgatgtctgtgcaggccaacacaggccccccctgggagagcaagaacagcacagctgtgtggaggggccgggacagcaggaaggagcggctggagctggtgaagctgagcaggaagcaccctgagctgattgatgctgccttcaccaacttcttcttcttcaagcatgatgagaacctgtatggccccatcgtgaagcacatctccttctttgacttcttcaagcacaagtaccagatcaacattgatggcaccgtggccgcctaccgcctgccctacctgctggtgggggacagcgtggtgctgaagcaggacagcatctactatgagcacttctacaatgagctgcagccctggaagcactacatccctgtgaagagcaacctgagtgacctgctggagaagctgaagtgggccaaggaccatgatgaggaggccaagaagatcgccaaggccggccaggagtttgccaggaacaacctgatgggagatgacatcttctgctactacttcaagctgttccaggagtatgccaacctgcaggtgtctgagccccagatccgggagggcatgaagagggtggagccccagacagaagatgacctcttcccctgcacctgccacaggaagaagaccaaggatgagctgtag

SEQ ID NO: 214670 - DNA, 1509 bp, Artificial Sequence
  derived and/or modified sequence
atgttcggcaccctgctgctgtactgcttcttcctggccaccgtgccggccctggccgagaccggcggtgagagacagctgagcccagagaaatccgaaatctggggccccggtttgaaggccgatgtggtacttcccgcccggtatttttatatccaagcagtcgacacatctggaaacaaattcactagctcacccggagaaaaggttttccaggtcaaagtctccgcccccgaggaacaatttactcgggtgggagtgcaggtcctcgacagaaaggatggcagcttcatagtccgctatcgcatgtatgcttcctacaaaaacctgaaggttgagatcaagttccagggtcaacacgttgcaaaatccccgtacattctgaagggcccagtatatcacgaaaactgcgattgcccgctgcaagactccgccgcatggcttagagagatgaactgtcccgaaacaattgcgcagattcagcgcgatctggctcactttcctgctgttgacccagagaagatcgcagtcgagattccgaagcggttcggacagcgtcaaagcctgtgtcattacaccctgaaggacaataaagtctatatcaagacccacggtgaacacgtagggttcaggatcttcatggacgcaatcctcctgtctttaacgagaaaggttaagatgcccgacgtggagctgttcgtgaacctgggagattggcctctcgagaaaaagaagtcaaactccaatatacatcccatcttcagctggtgcgggtcaacagacagtaaagacatcgtaatgcctacctacgatctgacagactccgtacttgaaacgatggggcgcgtgtcactagacatgatgtctgttcaggccaacaccggaccgccttgggagtcaaaaaacagcactgccgtttggcgcgggagggatagccgcaaggagcgattggagctcgtaaaattatctagaaagcatcccgagttgattgacgctgcttttactaactttttcttcttcaaacacgatgagaacttgtacggtcctattgtcaagcacatcagcttctttgatttcttcaagcataaataccagatcaacatagatggtactgtggccgcctaccgattgccctatcttttggttggggacagcgttgtgctcaaacaggactctatttattatgaacatttctataatgagttacaaccctggaagcactatattccagttaaaagcaatctttcagatctgttagaaaagctcaagtgggccaaagatcacgacgaggaggcaaaaaagatcgccaaggcagggcaggagttcgccagaaataatctgatgggagatgacatcttttgctactattttaaactgtttcaggagtacgcgaacctgcaggtatctgaacctcagataagagaagggatgaagagggtggagcctcagactgaagacgatcttttcccctgtacctgtcatcgcaaaaaaacgaaagacgagttgtag

SEQ ID NO: 214671 - DNA, 1509 bp, Artificial Sequence
  derived and/or modified sequence
atgtttgggacgctgctgttatactgcttcttcttggccacagttcccgcactagcagagaccggcggtgagcgccagctttcaccagagaagagcgagatctggggcccagggctgaaggcagacgtggtcctgccagcacgctacttttatattcaggcagttgatacttccggaaataagttcacgagtagcccgggagaaaaggtcttccaggtaaaagtatctgctcccgaagaacagttcactagagttggtgtgcaagtcctggacaggaaggatgggtccttcatcgtgcgctatcggatgtacgcgagctacaaaaaccttaaggttgaaattaagtttcaagggcaacatgttgctaagtctccatatatccttaagggaccggtttaccacgaaaattgtgattgtcccctgcaggacagtgcagcctggctgagagagatgaattgtccggagaccattgctcagattcaacgcgacctggcgcactttcccgctgtggaccccgagaagatcgcagtggagatccctaagcgctttggtcaacgccagtctctttgccattacaccctcaaagataacaaagtgtatatcaagactcatggggagcacgttggctttagaatttttatggacgccatacttctgagtctgaccagaaaggtaaagatgccggatgtagagttgttcgttaatttgggtgattggcctctggaaaagaagaagtctaactctaacatccatcctatcttcagctggtgcggttccactgacagtaaggatattgtgatgcccacttacgacttgactgattccgttctcgagactatgggcagggtgtcactcgatatgatgtcagtccaggccaacactgggccaccatgggagagtaaaaactctactgccgtgtggagaggtcgtgactctcgtaaagaacgtctcgagttggttaagctcagcagaaagcatccagaactaattgacgcggcattcaccaactttttcttttttaagcacgatgagaatttgtatggcccaatcgtgaagcacatcagtttttttgatttttttaaacacaaataccagatcaacattgatgggacagtggccgcttaccggctcccttatctcctggtgggcgacagcgtcgtactgaaacaagactcaatctactacgagcatttttataacgagctacagccatggaagcactacatccctgtgaagtcgaacctcagtgacctgctcgagaaactcaaatgggcgaaagaccacgatgaggaagccaagaagatcgcaaaagctggtcaggaattcgcacgcaacaatctaatgggcgacgacatcttttgttattactttaaactgtttcaggagtacgcaaatcttcaggtgagcgagccccagattcgtgaaggaatgaagcgggttgaaccccagactgaggatgaccttttcccatgcacgtgccacaggaaaaagacgaaggatgagttgtag

SEQ ID NO: 214672 - DNA, 1509 bp, Artificial Sequence
  derived and/or modified sequence
atgttcggcaccctgctgctgtactgcttcttcctggccaccgtgcccgccctggccgagaccggcggcgagagacagctgagccccgagaagagcgagatctggggccccggcctgaaggccgacgtggtgctgcccgccagatacttctacatccaggccgtggacaccagcggcaacaagttcaccagcagccccggcgagaaggtgttccaggtgaaggtgagcgcccccgaggagcagttcaccagagtgggcgtgcaggtgctggacagaaaggacggcagcttcatcgtgagatacagaatgtacgccagctacaagaacctgaaggtggagatcaagttccagggccagcacgtggccaagagcccctacatcctgaagggccccgtgtaccacgagaactgcgactgccccctgcaggacagcgccgcctggctgagagagatgaactgccccgagaccatcgcccagatccagagagacctggcccacttccccgccgtggaccccgagaagatcgccgtggagatccccaagagattcggccagagacagagcctgtgccactacaccctgaaggacaacaaggtgtacatcaagacccacggcgagcacgtgggcttcagaatcttcatggacgccatcctgctgagcctgaccagaaaggtgaagatgcccgacgtggagctgttcgtgaacctgggcgactggcccctggagaagaagaagagcaacagcaacatccaccccatcttcagctggtgcggcagcaccgacagcaaggacatcgtgatgcccacctacgacctgaccgacagcgtgctggagaccatgggcagagtgagcctggacatgatgagcgtgcaggccaacaccggccccccctgggagagcaagaacagcaccgccgtgtggagaggcagagacagcagaaaggagagactggagctggtgaagctgagcagaaagcaccccgagctgatcgacgccgccttcaccaacttcttcttcttcaagcacgacgagaacctgtacggccccatcgtgaagcacatcagcttcttcgacttcttcaagcacaagtaccagatcaacatcgacggcaccgtggccgcctacagactgccctacctgctggtgggcgacagcgtggtgctgaagcaggacagcatctactacgagcacttctacaacgagctgcagccctggaagcactacatccccgtgaagagcaacctgagcgacctgctggagaagctgaagtgggccaaggaccacgacgaggaggccaagaagatcgccaaggccggccaggagttcgccagaaacaacctgatgggcgacgacatcttctgctactacttcaagctgttccaggagtacgccaacctgcaggtgagcgagccccagatcagagagggcatgaagagagtggagccccagaccgaggacgacctgttcccctgcacctgccacagaaagaagaccaaggacgagctgtag

SEQ ID NO: 214673 - protein, 393 aa, Artificial Sequence
  derived and/or modified sequence
MKRTRDEVDATLQIAKLNAAELLPAVHCLGFGPGASGAAAGDFCLLELEPTLCQQLEDGHSLVIRGDKDEQAVLCSKDKTYDLKIADTSNMLLFIPGCKTPDQLKKEDSHCNIIHTEIFGFSNNYWELRRRRPKLKKLKKLLMENPYEGPDSQKEKDSNSSKYTTEDLLDQIQASEEEIMTQLQVLNACKIGGYWRILEFDYEMKLLNHVTQLVDSESWSFGKVPLNTCLQELGPLEPEEMIEHCLKCYGKKYVDEGEVYFELDADKICRAAARMLLQNAVKFNLAEFQEVWQQSVPEGMVTSLDQLKGLALVDRHSRPEIIFLLKVDDLPEDNQERFNSLFSLREKWTEEDIAPYIQDLCGEKQTIGALLTKYSHSSMQNGVKVYNSRRPIS

SEQ ID NO: 214674 - DNA, 1182 bp, Artificial Sequence
  derived and/or modified sequence
atgaagagaacccgcgatgaggtggatgcaactctgcagatcgccaaactgaacgctgccgagttgctgccagccgtgcactgcctcggtttcggacccggggccagtggagcggccgcaggcgacttttgccttctggagctggagcctactctatgtcagcagctggaagatggtcattctcttgtaattcggggtgacaaggatgaacaagcagtgctttgttccaaggataaaacctacgatctcaagatagccgacacatccaacatgctactgtttatccctggatgtaaaacccccgaccagctgaaaaaggaggattcgcactgcaacataatacatacagagattttcggtttctcaaacaattactgggaactcagacggagacgacccaagttaaaaaagctgaaaaagctcctgatggagaacccatacgaagggccggattcgcaaaaggagaaggattcaaacagctccaaatatactacggaagacttgcttgaccaaatccaggcaagcgaggaggagattatgacccagctgcaggtgctgaatgcatgtaaaattgggggttactggcggattctggagtttgattacgagatgaagctcctgaatcacgtaacacagctcgtggattccgaatcctggagctttggtaaggtacccctaaatacttgcctgcaagagctcggccctcttgaacctgaggaaatgattgagcactgtttgaagtgctatggtaagaaatatgtggatgagggtgaagtgtactttgaactggacgctgacaagatatgtcgggcggccgctaggatgctgttgcagaacgccgtgaagttcaatctggcggagttccaggaggtctggcagcaatctgttccggaaggcatggtgaccagtctggatcaactgaaggggctagcactggtggacaggcattcacgcccggagatcatcttcctccttaaggtggatgatctgccagaggacaaccaggagcgatttaacagtctcttttccctgcgcgagaaatggaccgaagaggacattgctccatacattcaggatctgtgcggcgaaaaacagacaatcggcgcactgctgacaaagtatagtcactcaagcatgcaaaacggtgtgaaagtgtataacagtcggcggcctatctcatag

SEQ ID NO: 214675 - DNA, 1182 bp, Artificial Sequence
  derived and/or modified sequence
atgaagaggaccagagatgaggtggatgccaccctgcagatcgccaagctgaatgctgctgagctgctgcctgctgtgcactgcctgggctttggacctggggccagcggggctgctgctggggacttctgcctgctggagctggagcccaccctgtgccagcagctggaggatggccacagcctggtgatccggggggacaaggatgagcaggccgtgctgtgcagcaaggacaagacctatgacctgaagattgctgacaccagcaacatgctgctcttcatccctggctgcaagaccccagaccagctgaagaaggaggacagccactgcaacatcatccacacagagatcttcggcttcagcaacaactactgggagctgcggaggagaagacccaagctgaagaagctgaagaagctgctgatggagaacccctatgagggccctgacagccagaaggagaaggacagcaacagcagcaagtacaccacagaggacctgctggaccagatccaggccagcgaggaggagatcatgacccagctgcaggtgctgaatgcctgcaagattggaggctactggaggatcctggagtttgattatgagatgaagctgctgaaccacgtgacccagctggtggacagcgagagctggagctttgggaaggtgcccctgaacacctgcctgcaggagctgggccccctggagcctgaggagatgattgagcactgcctgaagtgctacggcaagaagtatgtggatgaaggagaggtgtactttgagctggatgctgacaagatctgcagagctgctgccaggatgctgctgcagaatgctgtgaagttcaacctggccgagttccaggaggtgtggcagcagagcgtgcctgagggcatggtgaccagcctggaccagctgaagggcctggccctggtggacagacacagcaggcctgagatcatcttcctgctgaaggtggatgacctgcctgaggacaaccaggagcgcttcaacagcctcttcagcctgcgggagaagtggacagaagaagatattgccccctacatccaggacctgtgtggggagaagcagaccatcggggccctgctgaccaagtacagccacagctccatgcagaatggagtgaaggtgtacaacagcagaagacccatctcctag

SEQ ID NO: 214676 - DNA, 1182 bp, Artificial Sequence
  derived and/or modified sequence
atgaagcggacccgggacgaggtggacgccaccctgcagatcgccaaattaaacgccgcagagctgctccccgccgtccattgcctgggttttggccccggagccagtggtgcagcggcaggagacttctgtctcttagaactagaaccaaccctctgtcagcagctggaggatggacattctctggttatcaggggcgacaaagatgaacaagcagtgctctgttctaaggacaaaacttacgatttgaaaatcgcagacactagtaatatgctgctttttatccctggttgcaagacacctgatcagctcaaaaaggaagactctcattgcaatattatacacactgagatctttggtttctccaacaattattgggagctccggagacgtagaccaaaactgaagaagctgaaaaaattgttaatggaaaacccttacgagggaccagattctcagaaggaaaaagactcaaacagttcaaaatataccaccgaggacttgctcgatcagatccaggctagtgaagaagaaatcatgacccaactccaggtattgaacgcttgcaaaatcggaggctattggcgaattttggaattcgactatgagatgaaacttctcaatcacgtgactcagctcgtggatagcgagtcatggagtttcggaaaggtgcccctgaacacctgcttgcaggaactcggccccttggaacccgaagagatgatcgaacactgtttaaagtgctatgggaagaaatacgtagatgagggagaggtatactttgagctcgacgccgacaagatctgccgggccgccgcaagaatgctcctacaaaacgccgtcaagttcaacctggccgagtttcaagaggtgtggcagcagtccgtccctgagggaatggtgacaagtctcgatcagctgaaaggccttgcacttgttgaccggcattcccgaccagaaatcatctttctcctcaaggtagatgatctaccggaagataaccaagagcgcttcaattctctcttttcactcagagagaagtggaccgaggaagacatcgctccatacattcaggatctgtgcggcgagaagcaaacgatcggcgctctgctgactaagtactcccattccagcatgcagaacggagttaaagtgtacaatagccggcgaccaattagttag

SEQ ID NO: 214677 - DNA, 1182 bp, Artificial Sequence
  derived and/or modified sequence
atgaaacggacaagagacgaggtcgatgctactttacagatcgccaagctgaatgctgctgagcttctcccagccgtccattgtctgggcttcggccctggtgcatcgggcgctgccgctggggatttttgcctactcgagctcgagcctactttgtgccagcaacttgaggacggtcacagcctggtgatacgtggtgacaaggatgagcaggcagttctctgttccaaagacaaaacttacgatcttaagattgctgatactagtaatatgttattgtttatccctgggtgcaaaacacccgaccagcttaagaaagaagactcacactgcaatattattcacacagagatatttgggttctccaataattactgggagctgagacggagacgaccgaaactgaaaaaactgaagaagctgttgatggagaacccatacgaggggccagatagccagaaggagaaggattctaacagctccaagtacacgactgaagatttactggatcaaatccaagcatccgaggaggagattatgactcagctgcaggtgcttaatgcctgtaaaattggtgggtattggaggatcctcgagttcgattatgagatgaagttgctgaatcacgtaactcagctggtggactccgaatcatggtcttttggtaaggtgcctctcaatacttgtctgcaggagcttggccctctggagcccgaagagatgatcgaacattgcctgaaatgttacggcaaaaaatacgtggacgaaggcgaagtgtactttgagctggatgcggataaaatctgtcgggctgctgccagaatgttattacagaacgccgtcaaattcaacttagctgaatttcaggaggtgtggcagcagagcgtccccgaaggtatggtgacctccctcgatcagttaaagggcctggcgttagtggataggcactcacgccctgagatcatcttcctgctgaaagtagacgatttaccagaggataaccaagagcgctttaactccctctttagcctgagagagaagtggaccgaagaagatatcgctccatatatacaggacttgtgtggcgaaaagcagaccatcggagcgcttcttaccaagtattcccactctagcatgcagaatggtgtcaaggtatacaactctagacggcctatctcctag

SEQ ID NO: 214678 - DNA, 1182 bp, Artificial Sequence
  derived and/or modified sequence
atgaagagaaccagagacgaggtggacgccaccctgcagatcgccaagctgaacgccgccgagctgctgcccgccgtgcactgcctgggcttcggccccggcgccagcggcgccgccgccggcgacttctgcctgctggagctggagcccaccctgtgccagcagctggaggacggccacagcctggtgatcagaggcgacaaggacgagcaggccgtgctgtgcagcaaggacaagacctacgacctgaagatcgccgacaccagcaacatgctgctgttcatccccggctgcaagacccccgaccagctgaagaaggaggacagccactgcaacatcatccacaccgagatcttcggcttcagcaacaactactgggagctgagaagaagaagacccaagctgaagaagctgaagaagctgctgatggagaacccctacgagggccccgacagccagaaggagaaggacagcaacagcagcaagtacaccaccgaggacctgctggaccagatccaggccagcgaggaggagatcatgacccagctgcaggtgctgaacgcctgcaagatcggcggctactggagaatcctggagttcgactacgagatgaagctgctgaaccacgtgacccagctggtggacagcgagagctggagcttcggcaaggtgcccctgaacacctgcctgcaggagctgggccccctggagcccgaggagatgatcgagcactgcctgaagtgctacggcaagaagtacgtggacgagggcgaggtgtacttcgagctggacgccgacaagatctgcagagccgccgccagaatgctgctgcagaacgccgtgaagttcaacctggccgagttccaggaggtgtggcagcagagcgtgcccgagggcatggtgaccagcctggaccagctgaagggcctggccctggtggacagacacagcagacccgagatcatcttcctgctgaaggtggacgacctgcccgaggacaaccaggagagattcaacagcctgttcagcctgagagagaagtggaccgaggaggacatcgccccctacatccaggacctgtgcggcgagaagcagaccatcggcgccctgctgaccaagtacagccacagcagcatgcagaacggcgtgaaggtgtacaacagcagaagacccatcagctag

SEQ ID NO: 214679 - DNA, 2314 bp, Artificial Sequence
  derived and/or modified sequence
gcgtggggcacggaggggctcgcgctcccagaagccggcaggccttcccgcgggcgggcccgcagcgcgctccgccccggaaacacgcccatggccgccttggcgcgctttcaaacgctcaggtttcctaccttccggctgcttgggaacttctttcttgcccgccaagcccgcagccacccgggcgcggcgggactcctagacccggcgctgcgatgaagaggacccgcgacgaggtggatgcgacgctgcagatcgccaagctgaatgcggccgagctgctgccggcggtgcactgcctgggcttcggccctggggccagcggcgctgcagccggcgacttctgcctgctggagctggagcccacgctgtgccagcagctggaggatggacacagtcttgtgattcgtggtgataaagacgagcaagctgtgctgtgcagtaaagacaaaacatacgacttgaagatagcagacacttccaatatgttgcttttcattcctggttgtaaaactccggaccagttgaagaaggaagattcacactgtaacattattcacactgagatctttggtttttctaataattattgggaattaagaagacgtagacccaagttaaagaagctaaagaaacttttgatggaaaatccatatgaaggacctgacagtcaaaaagagaaggattcaaatagctcaaaatatacaactgaagatttgcttgatcaaattcaggcaagtgaggaagaaataatgacccaattacaagttctaaatgcctgtaagattggaggttattggaggattcttgaatttgattatgagatgaaacttctgaatcatgtaactcagcttgtggattctgaatcatggtcttttggtaaagttcctttgaacacatgccttcaggaactcggaccattggagccagaggaaatgatagaacactgtcttaaatgttatgggaagaaatatgtagatgaaggcgaagtttattttgagttggatgctgataaaatatgtagagcagcagcacgaatgctacttcagaatgcggtgaaattcaatctcgctgagtttcaagaagtgtggcagcagagtgttcctgaaggaatggtaactagtcttgatcagcttaagggtttagcgctggtggatagacactcgagaccagaaatcatatttttgctgaaagtagatgatttacctgaggataatcaggaacgttttaatagccttttctctctaagggagaagtggacagaagaagatattgctccatatattcaagatttgtgtggagagaagcaaaccataggtgcattactcactaaatattctcattcttcgatgcaaaatggtgttaaagtttataattcgagaagacccatttcttaaaagaacaacggtcttttcttcaggactcaagttgctttataaagttgctggatagaagaaaaataacttgtacttttatttctgacttttagaaacctagtcttctaaggcatttttctcctcatcttaagcattttgaaactactgttatttcttaaatgttataggatgtagctttaaaattatatttgtactatgtacacagtgtaaacaaggacaaaagaattctttcctatattatgtctgaggtctctatgatttatttaaagtttggctttttatatttaaaatgtcatttctttacttaggatttgatgttctaatcattaatacacttaagttttccagagaactaaatagtaatagtttcatagaagagaactatttattcacttaaatatcatttctcaagtgagtgagttcccctctacttttagccttccacccaaactggaagcctctaggtgctatcaattatttatatccatcgtttacatccatgaaattggctgaataattactcctctgcctggcgtagacatgcgctttgggaaaaaaacgagtttataatcctataatgaagaatactggcacaggcaatgctcactcgaaaacttcaagtaatttctagttggttttggaatgcttgataaagttcctttacagctttattttcctgatttgttttggtttagatcaaagttcaaattaattttaacttagctaatgaactcatcaccaggacagttggagggggtaggccgaggttaaatggtccacgtttcaaaaatgttaatggctaatccataattaaagaaggtttaactgttactgaagtttacaagttttattgtcatgaacatgaaatacaaacacgatggcttcgaaatgtctttcaataaatgtttctgcattta

SEQ ID NO: 214680 - protein, 360 aa, Artificial Sequence
  derived and/or modified sequence
MDTPLRRSRRLGGLRPESPESLTSVSRTRRALVEFESNPEETREPGSPPSVQRAGLGSPERPPKTSPGSPRLQQGAGLESPQGQPEPGAASPQRQQDLHLESPQRQPEYSPESPRCQPKPSEEAPKCSQDQGVLASELAQNKEELTPGAPQHQLPPVPGSPEPYPGQQAPGPEPSQPLLELTPRAPGSPRGQHEPSKPPPAGETVTGGFGAKKRKGSSSQAPASKKLNKEELPVIPKGKPKSGRVWKDRSKKRFSQMLQDKPLRTSWQRKMKERQERKLAKDFARHLEEEKERRRQEKKQRRAENLKRRLENERKAEVVQVIRNPAKLKRAKKKQLRSIEKRDTLALLQKQPPQQPAAKI

SEQ ID NO: 214681 - protein, 163 aa, Artificial Sequence
  derived and/or modified sequence
MDTPLRRSRRLGGLRPESPESLTSVSRTRRALVEFESNPEETREPGSPPSVQRAGLGSPERPPKTSPGSPRLQQGAGLESPQGQPEPGAASPQRQQDLHLESPQNKEELTPGAPQHQLPPVPGSPEPYPGQQATSSWGDGDRRLRGKEAKRFFIPGPSVQEVE

SEQ ID NO: 214682 - protein, 104 aa, Artificial Sequence
  derived and/or modified sequence
MLQDKPLRTSWQRKMKERQERKLAKDFARHLEEEKERRRQEKKQRRAENLKRRLENERKAEVVQVIRNPAKLKRAKKKQLRSIEKRDTLALLQKQPPQQPAAKI

SEQ ID NO: 214683 - DNA, 492 bp, Artificial Sequence
  derived and/or modified sequence
atggacacaccattacgccgaagcaggcgactgggcggcctgcgtcccgaatcccccgagagtctgacaagcgtatctcggacaagaagagcgctggtggagtttgagtctaatcctgaagagacaagagagccagggagtccaccctccgttcagcgggctggccttggaagccctgaaagacctcctaagacctcgcccggctctcctcggcttcaacagggagcaggactggaatcaccccagggtcaacctgagcctggagccgccagtccacagcgccagcaagaccttcaccttgaaagcccccagaacaaggaggaactgacgcctggggccccccagcaccagctgccaccggtcccaggttcccctgaaccttaccctggccagcaggccacttctagctggggtgatggcgatcgccgcctgagagggaaggaggcaaaacggttttttatcccgggcccgtccgtgcaagaggtggaatag

SEQ ID NO: 214684 - DNA, 315 bp, Artificial Sequence
  derived and/or modified sequence
atgctgcaggataagcccctccggacatcttggcaaagaaagatgaaagagcggcaggagcgaaaactagcgaaagactttgctaggcatttggaagaggagaaagaaagaaggagacaagagaagaagcaacggagggccgagaatctgaagcggagactcgagaatgagaggaaggctgaagtggtgcaggtgatacgtaaccccgcaaagttgaagcgagctaagaagaagcagctcaggagcatcgagaagcgagataccctcgctttgctccagaagcagcctccacagcaaccggctgccaaaatttag

SEQ ID NO: 214685 - DNA, 492 bp, Artificial Sequence
  derived and/or modified sequence
atggacacccccctgcggcgcagccggcggctgggcggcctgcggcctgagagccctgagagcctgacctctgtgtccaggacccggcgggccctggtggagtttgagagcaaccctgaggagacccgggagcccggcagcccccccagcgtgcagagagctggcctgggcagccctgagcggccccccaagaccagccctggcagcccccggctgcagcagggcgccggcctggagagcccccagggccagcctgagcctggagctgccagcccccagaggcagcaggacctgcacctggagagcccccagaacaaggaggagctgacccctggggccccccagcaccagctgccccctgtgcccggcagccctgagccctacccaggccagcaggccaccagctcctggggagatggagaccggcggctgcggggcaaggaggccaagcgcttcttcatccctggccccagcgtgcaggaggtggagtag

SEQ ID NO: 214686 - DNA, 315 bp, Artificial Sequence
  derived and/or modified sequence
atgctgcaggacaagcccctgcggacctcctggcagaggaagatgaaggagcggcaggagaggaagctggccaaggactttgcccggcacctggaggaggagaaggagcggcggcggcaggagaagaagcagaggagagctgagaacctgaagaggcggctggagaatgaaaggaaggccgaggtggtgcaggtgatcagaaatcctgccaagctgaagagggccaagaagaagcagctgcggagcattgagaagagggacaccctggccctgctgcagaagcagcccccccagcagcctgctgccaagatctag

SEQ ID NO: 214687 - DNA, 492 bp, Artificial Sequence
  derived and/or modified sequence
atggacacccccctgcggcggagccggcggctgggcggcctgcggcctgagtcaccggagtctctgaccagtgtgagccggactaggcgagccctcgtggaattcgaatctaatcccgaggaaaccagggagcccggcagtccaccctccgttcaaagggcaggtctcgggtctccagagcgtccccctaaaaccagcccgggctccccgcggctccagcagggtgctggcctcgagtcacctcagggacaaccagagcccggggcagccagccctcagcggcaacaagatctccatctagagtctcctcagaataaggaggagctcacccccggagccccccagcaccagctgccacctgttccaggttcacccgagccttatccgggacagcaagcaaccagttcttggggcgacggtgatcgacgtcttaggggaaaggaggcaaagaggttctttatccctgggccatctgtgcaagaggtggaatag

SEQ ID NO: 214688 - DNA, 315 bp, Artificial Sequence
  derived and/or modified sequence
atgctgcaggacaagcccctgcggaccagctggcagcggaagatgaaagagaggcaagaacgcaaactggctaaggactttgccagacacctggaggaggagaaggagagacgtcgacaggaaaaaaaacagaggcgcgccgagaatctgaaacggaggttggaaaatgagagaaaagccgaagtggtccaagtgatccgcaaccccgccaagttaaaaagggccaagaagaaacagctgcggagcatcgagaaacgggacactctcgccctgctccaaaagcagcctccacagcagcccgcagccaagatctag

SEQ ID NO: 214689 - DNA, 492 bp, Artificial Sequence
  derived and/or modified sequence
atggatacccccctcagacgctccaggcggcttggcggactgcgacccgagagccctgaatcattgacatcggtcagcagaactagacgcgctctggttgaatttgagtcaaaccccgaagaaacgcgagagccaggcagccccccttcagttcagcgcgctggactgggttctcccgagcgccctcccaagacttctccagggagccctcgcctgcagcagggtgccggattggagagtcctcaaggccagcctgagccgggagcggcaagtccacagagacagcaggacctccacctggagagcccccagaataaagaagagcttacccccggtgctccccagcaccagctgcccccagtcccaggatctcccgaaccctacccgggacagcaagcgacatcctcctggggcgacggtgatcgcagactccgcggaaaagaggctaagcggttctttatccctggtccatccgtgcaagaggttgagtag

SEQ ID NO: 214690 - DNA, 315 bp, Artificial Sequence
  derived and/or modified sequence
atgcttcaggataagccactaagaaccagctggcagaggaaaatgaaagaacggcaagaacgtaaactcgccaaagacttcgccaggcacctagaagaagagaaagaacgccgacggcaggagaagaaacagaggcgtgcagagaaccttaaacggcgactggaaaatgagaggaaagctgaggtcgtccaggtgatccggaaccccgcaaaattgaaaagggccaaaaaaaagcagctgagaagtatcgaaaaaagagacactttggcgctgctgcagaagcagcccccacagcagcctgctgccaagatctag

SEQ ID NO: 214691 - DNA, 1893 bp, Artificial Sequence
  derived and/or modified sequence
ggtttcggcgggggctgcacgtgcgcaggggtgtggaaacttaccggctgagccatggatacaccgttaaggcgcagccgacggctgggaggcctaaggcccgaatcccccgagagcctcacctcagtttcgcggacgagacgggcccttgtggagttcgagtcgaacccagaagaaacgagggagcccgggtctcctccgagtgtgcagcgggctggcctggggtcccccgaaaggccgccgaagacaagcccaggatcaccccgtctgcagcagggtgcaggcttggagtcaccccaagggcagccagagccaggcgcagcgtccccccagcgtcagcaagacctacacctggagtcgcctcaaagacagccagagtacagtcctgaatccccacgatgtcagccgaagccaagtgaggaggcaccaaagtgttctcaggaccagggagtactggcctcggagttggcccagaataaggaggagctgaccccgggggccccccagcatcagctaccgccggtcccaggatcaccagagccttaccccggtcagcaagctcccggtccggagccctctcagccactactggagctgacacccagggcacctggctccccccggggtcagcatgagccgagcaagccacctccagctggggagacggtgacaggcggcttcggggcaaagaagcgaaaaggttcttcatcccaggccccagcgtccaagaagttgaataaagaggagcttcctgtaatcccgaaggggaagcccaaatcggggcgagtgtggaaggaccgctccaagaaaagattctcccagatgcttcaggacaagcccctgcgcacatcgtggcagcggaagatgaaggaacgacaggagaggaagctggccaaggactttgcccgtcacctggaggaggagaaggagaggcgccgccaggagaagaaacagcgccgggctgagaacctgaaacgccgcctggagaatgagcggaaggcagaggtcgtccaagtgatccgaaaccccgccaagctcaagcgggcaaagaagaagcagctgcgctccattgagaagcgggacaccctggccctgctgcagaagcagccgccccagcagccggcagccaagatctgagctcaggacggcccgaggccttccatggccaacaaccatgtcagacacagcacctcaggccgctgctcagatgcctctgctggagctggcactccaaacccatggctccagaacagggacccccaccccgaccggggctcctcggcctttgaaggcttccaggcaggtctgtgtgggacagaagcccagagggggcctgggacctggcagagatgggggcgggaagagattcagctcccatccctccttcctctccttctccaagtgccttcaaaccaagaactgtacattcttctggttcctcagtgagctggtgactggcaggtgactccctcagcagtgtatgccctttctcagcatcctaggtccatcccaggcctggaggctgacagttgggaatccagcttcccccacaccttcccaaaggctgctctgagcacctccacaccccactgcctctgtccccagcagactgaatccggttcctctccacttttcaatactgaaagattaaaatggggaggttgcagggagcagagcttttccctagcacccactttcccaaaccagtctctgcagaagccccagagaatctaactcatgcctgtccagtctacagcaaaaatatttattgagtgcctgttgcatacaggcacaatcctaggcaccggcaaatacagacaatagaccaaagtccctgccctcgaggagctttcattctgatggagagaaaacataataaacaagcaaaatgca

SEQ ID NO: 214692 - DNA, 1644 bp, Artificial Sequence
  derived and/or modified sequence
atggatacaccgttaaggcgcagccgacggctgggaggcctaaggcccgaatcccccgagagcctcacctcagtttcgcggacgagacgggcccttgtggagttcgagtcgaacccagaagaaacgagggagcccgggtctcctccgagtgtgcagcgggctggcctggggtcccccgaaaggccgccgaagacaagcccaggatcaccccgtctgcagcagggtgcaggcttggagtcaccccaagggcagccagagccaggcgcagcgtccccccagcgtcagcaagacctacacctggagtcgcctcaaaataaggaggagctgaccccgggggccccccagcatcagctaccgccggtcccaggatcaccagagccttaccccggtcagcaagccacctccagctggggagacggtgacaggcggcttcggggcaaagaagcgaaaaggttcttcatcccaggccccagcgtccaagaagttgaataaagaggagcttcctgtaatcccgaaggggaagcccaaatcggggcgagtgtggaaggaccgctccaagaaaagattctcccagatgcttcaggacaagcccctgcgcacatcgtggcagcggaagatgaaggaacgacaggagaggaagctggccaaggactttgcccgtcacctggaggaggagaaggagaggcgccgccaggagaagaaacagcgccgggctgagaacctgaaacgccgcctggagaatgagcggaaggcagaggtcgtccaagtgatccgaaaccccgccaagctcaagcgggcaaagaagaagcagctgcgctccattgagaagcgggacaccctggccctgctgcagaagcagccgccccagcagccggcagccaagatctgagctcaggacggcccgaggccttccatggccaacaaccatgtcagacacagcacctcaggccgctgctcagatgcctctgctggagctggcactccaaacccatggctccagaacagggacccccaccccgaccggggctcctcggcctttgaaggcttccaggcaggtctgtgtgggacagaagcccagagggggcctgggacctggcagagatgggggcgggaagagattcagctcccatccctccttcctctccttctccaagtgccttcaaaccaagaactgtacattcttctggttcctcagtgagctggtgactggcaggtgactccctcagcagtgtatgccctttctcagcatcctaggtccatcccaggcctggaggctgacagttgggaatccagcttcccccacaccttcccaaaggctgctctgagcacctccacaccccactgcctctgtccccagcagactgaatccggttcctctccacttttcaatactgaaagattaaaatggggaggttgcagggagcagagcttttccctagcacccactttcccaaaccagtctctgcagaagccccagagaatctaactcatgcctgtccagtctacagcaaaaatatttattgagtgcctgttgcatacaggcacaatcctaggcaccggcaaatacagacaatagaccaaagtccctgccctcgaggagctttcattctgatggagagaaaacataataaacaagcaaaatgc

SEQ ID NO: 214693 - DNA, 697 bp, Artificial Sequence
  derived and/or modified sequence
ggccacctccctagggggtgagcgccccgcctccagaggcattcacacccgggccaaatgcacttggcggaagcaacagaactttacagcaggggccgcgtagcctggactctgcagtcgctgacaggattcaagtcctgactgccacaagattctcccagatgcttcaggacaagcccctgcgcacatcgtggcagcggaagatgaaggaacgacaggagaggaagctggccaaggactttgcccgtcacctggaggaggagaaggagaggcgccgccaggagaagaaacagcgccgggctgagaacctgaaacgccgcctggagaatgagcggaaggcagaggtcgtccaagtgatccgaaaccccgccaagctcaagcgggcaaagaagaagcagctgcgctccattgagaagcgggacaccctggccctgctgcagaagcagccgccccagcagccggcagccaagatctgagctcaggacggcccgaggccttccatggccaacaaccatgtcagacacagcacctcaggccgctgctcagatgcctctgctggagctggcactccaaacccatggctccagaacagggacccccaccccgaccggggctcctcggcctttgaaggcttccaggcaggtctgtgtgggacagaagcccagagggggcctgggacctggcagagatgggggcg

SEQ ID NO: 214694 - DNA, 492 bp, Artificial Sequence
  derived and/or modified sequence
atggacacccccctgagaagaagcagaagactgggcggcctgagacccgagagccccgagagcctgaccagcgtgagcagaaccagaagagccctggtggagttcgagagcaaccccgaggagaccagagagcccggcagcccccccagcgtgcagagagccggcctgggcagccccgagagaccccccaagaccagccccggcagccccagactgcagcagggcgccggcctggagagcccccagggccagcccgagcccggcgccgccagcccccagagacagcaggacctgcacctggagagcccccagaacaaggaggagctgacccccggcgccccccagcaccagctgccccccgtgcccggcagccccgagccctaccccggccagcaggccaccagcagctggggcgacggcgacagaagactgagaggcaaggaggccaagagattcttcatccccggccccagcgtgcaggaggtggagtag

SEQ ID NO: 214695 - DNA, 315 bp, Artificial Sequence
  derived and/or modified sequence
atgctgcaggacaagcccctgagaaccagctggcagagaaagatgaaggagagacaggagagaaagctggccaaggacttcgccagacacctggaggaggagaaggagagaagaagacaggagaagaagcagagaagagccgagaacctgaagagaagactggagaacgagagaaaggccgaggtggtgcaggtgatcagaaaccccgccaagctgaagagagccaagaagaagcagctgagaagcatcgagaagagagacaccctggccctgctgcagaagcagcccccccagcagcccgccgccaagatctag

SEQ ID NO: 214696 - DNA, 1083 bp, Artificial Sequence
  derived and/or modified sequence
atggatacaccgttgagacggagccgaagattgggtggtctccgacctgagtcccccgaatccttaacatccgtgtccaggacaagacgcgcactcgtcgagttcgagtctaatccggaggaaacgagagagcctggatcacccccatctgtccagcgcgcagggctgggcagtccagagagaccaccaaaaacttcacctggatctcctcgtttgcagcagggagccggtctggaaagcccccagggacagcccgagcctggagccgctagcccgcagcggcagcaggaccttcatttggagtcaccccagaggcagcctgagtattctcctgagtcaccacgctgtcagcccaagccctccgaagaggctcctaaatgttcacaggatcagggagtgctcgcctccgagttggctcaaaacaaagaagaacttaccccgggggcaccccagcaccagttacctccggttcccggctcccccgagccctaccccgggcagcaggcacccggccctgaaccaagtcagccactgcttgagctaacaccacgcgcaccaggatctccacggggccagcacgaaccctccaagcctccccctgcaggcgagaccgtgacaggcggatttggagctaagaaacgaaagggcagtagcagtcaggcccccgcatcaaaaaaactgaataaggaggagttaccagtgataccaaaaggtaagcctaaatcgggcagagtctggaaagacaggtcaaaaaagcgcttcagccagatgctccaggataagcccctgcgaactagttggcagaggaagatgaaggagaggcaggagcggaaactggctaaagatttcgcacggcatctggaggaagaaaaagagcgacggaggcaggagaaaaagcagcgcagagcagaaaatctgaaacggcgtttggaaaatgaaagaaaggctgaagtggtgcaagttattaggaacccagctaagttgaagcgcgccaaaaagaagcagctgaggtcaattgaaaagagagacacacttgcgttgttacagaagcagccaccccagcaaccagcggcaaaaatctag

SEQ ID NO: 214697 - DNA, 1083 bp, Artificial Sequence
  derived and/or modified sequence
atggacacccccctgcggcgcagccggcggctgggcggcctgcggcctgagagccctgagagcctgacctctgtgtccaggacccggcgggccctggtggagtttgagagcaaccctgaggagacccgggagcccggcagcccccccagcgtgcagagagctggcctgggcagccctgagcggccccccaagaccagccctggcagcccccggctgcagcagggcgccggcctggagagcccccagggccagcctgagcctggagctgccagcccccagaggcagcaggacctgcacctggagagcccccagaggcagcctgagtacagccctgagagcccccgctgccagcccaagcccagcgaggaggcccccaagtgcagccaggaccagggcgtgctggccagcgagctggcccagaacaaggaggagctgacccctggggccccccagcaccagctgccccctgtgcccggcagccctgagccctacccaggccagcaggcccctggccctgagcccagccagcccctgctggagctgaccccccgggcccctggcagcccccggggccagcacgagcccagcaagcccccacctgctggggagaccgtgactggaggctttggagccaagaagaggaagggcagcagcagccaggccccagccagcaagaagctgaacaaggaggagctgcctgtgatccccaagggcaagcccaagagcggccgggtgtggaaggacaggagcaagaagcgcttcagccagatgctgcaggacaagcccctgcggacctcctggcagaggaagatgaaggagcggcaggagaggaagctggccaaggactttgcccggcacctggaggaggagaaggagcggcggcggcaggagaagaagcagaggagagctgagaacctgaagaggcggctggagaatgaaaggaaggccgaggtggtgcaggtgatcagaaatcctgccaagctgaagagggccaagaagaagcagctgcggagcattgagaagagggacaccctggccctgctgcagaagcagcccccccagcagcctgctgccaagatctag

SEQ ID NO: 214698 - DNA, 1083 bp, Artificial Sequence
  derived and/or modified sequence
atggacacccccctgcggcggagccggcggctgggcggcctgcggcccgaaagccccgaaagcctgacaagcgtctcaaggacccggcgggccctggtggagtttgagtctaaccctgaggagactagggaaccagggtcgccccctagcgtgcagcgcgcaggtctcgggagccccgagaggccaccaaaaacctcccctggcagtccacgtctgcagcaaggcgccgggctggaatctccacagggacagcctgagcctggcgcggctagtccccagaggcagcaagacctccatctggaaagtcctcagcgacagcctgagtactcccctgaatctccgcggtgtcaacctaaaccatctgaagaagcccccaagtgctctcaagatcagggcgtgctagccagcgagcttgcccaaaataaagaggaactgacgccaggcgctccgcagcatcagcttccacctgtgcccgggagccctgagccttatccagggcagcaggccccaggtccagaaccttcccagccgctcctggagctcacgcctcgggcccctggatcccctaggggacagcacgaaccttccaagcccccacccgccggagaaacagtcactgggggattcggggctaagaagaggaagggcagctccagccaggcccccgccagtaaaaagctgaacaaagaagaactgcccgtgataccgaagggtaagcctaagagtggccgagtatggaaagaccggagcaagaagaggttctcccagatgcttcaggacaagcccttaagaacatcctggcagaggaaaatgaaggaacggcaggaaaggaaactcgctaaggatttcgcacggcacctcgaggaagagaaggagaggcgccggcaggagaagaagcagaggagggctgaaaaccttaaaagaaggttggaaaatgaacggaaggcggaggtggtccaagtgatccgcaatccagcgaagcttaaacgagccaaaaaaaagcagctgagaagcattgagaagagggacaccctggctctactccagaagcagccaccccaacagcctgctgccaaaatctag

SEQ ID NO: 214699 - DNA, 1083 bp, Artificial Sequence
  derived and/or modified sequence
atggatacacctctgaggaggtcccgtagactcggaggactcagacccgagtcccccgaatcgctgacgtctgtctctcgaacaaggcgagcacttgtcgagttcgaatccaacccagaggagacccgcgaaccaggtagccctcccagtgtgcagcgagcaggcctcgggtctcccgagcgcccacccaagacctctccgggaagtccccgtctacagcagggagcagggctggaatccccgcaagggcagcctgaacctggtgcggcatccccccagaggcagcaggatcttcacctggaatcgccccagagacaacccgagtactcccctgaatccccacgttgtcagcccaagccttccgaggaggccccaaaatgcagtcaagatcagggcgttttggcttctgaactagcacagaacaaagaggaactaacccccggagctccccagcaccagctgccccctgtgcctggttcccccgagccctacccagggcagcaagccccagggccagagccctcccagccattgttagagctgaccccgcgagcaccaggaagtcccagaggacagcacgaaccctctaaaccaccaccagctggcgagaccgtgaccggaggatttggagctaaaaaaagaaagggttcctcctctcaagctccggcttcaaaaaaacttaacaaggaggaactgcccgtcatccctaaaggaaaaccgaaatcaggacgagtctggaaggaccggagtaagaaacgcttttctcagatgttgcaagataaaccattaaggacatcctggcagcgcaaaatgaaagagagacaggagcggaaactggccaaagattttgccaggcacctcgaggaggaaaaggaaagacgcagacaggagaaaaagcagcgtcgagctgagaacctgaaacgtagactagagaacgaacgcaaggccgaggtggtccaggtcatccggaacccagcaaagctcaaaagagctaaaaaaaagcagctaaggtctatcgagaaaagggataccctggctcttctgcaaaaacaacctccgcagcagcctgccgctaaaatttag

SEQ ID NO: 214700 - DNA, 1083 bp, Artificial Sequence
  derived and/or modified sequence
atggacacccccctgagaagaagcagaagactgggcggcctgagacccgagagccccgagagcctgaccagcgtgagcagaaccagaagagccctggtggagttcgagagcaaccccgaggagaccagagagcccggcagcccccccagcgtgcagagagccggcctgggcagccccgagagaccccccaagaccagccccggcagccccagactgcagcagggcgccggcctggagagcccccagggccagcccgagcccggcgccgccagcccccagagacagcaggacctgcacctggagagcccccagagacagcccgagtacagccccgagagccccagatgccagcccaagcccagcgaggaggcccccaagtgcagccaggaccagggcgtgctggccagcgagctggcccagaacaaggaggagctgacccccggcgccccccagcaccagctgccccccgtgcccggcagccccgagccctaccccggccagcaggcccccggccccgagcccagccagcccctgctggagctgacccccagagcccccggcagccccagaggccagcacgagcccagcaagcccccccccgccggcgagaccgtgaccggcggcttcggcgccaagaagagaaagggcagcagcagccaggcccccgccagcaagaagctgaacaaggaggagctgcccgtgatccccaagggcaagcccaagagcggcagagtgtggaaggacagaagcaagaagagattcagccagatgctgcaggacaagcccctgagaaccagctggcagagaaagatgaaggagagacaggagagaaagctggccaaggacttcgccagacacctggaggaggagaaggagagaagaagacaggagaagaagcagagaagagccgagaacctgaagagaagactggagaacgagagaaaggccgaggtggtgcaggtgatcagaaaccccgccaagctgaagagagccaagaagaagcagctgagaagcatcgagaagagagacaccctggccctgctgcagaagcagcccccccagcagcccgccgccaagatctag

SEQ ID NO: 214701 - protein, 600 aa, Artificial Sequence
  derived and/or modified sequence
MGKKLDLSKLTDEEAQHVLEVVQRDFDLRRKEEERLEALKGKIKKESSKRELLSDTAHLNETHCARCLQPYQLLVNSKRQCLECGLFTCKSCGRVHPEEQGWICDPCHLARVVKIGSLEWYYEHVKARFKRFGSAKVIRSLHGRLQGGAGPELISEERSGDSDQTDEDGEPGSEAQAQAQPFGSKKKRLLSVHDFDFEGDSDDSTQPQGHSLHLSSVPEARDSPQSLTDESCSEKAAPHKAEGLEEADTGASGCHSHPEEQPTSISPSRHGALAELCPPGGSHRMALGTAAALGSNVIRNEQLPLQYLADVDTSDEESIRAHVMASHHSKRRGRASSESQIFELNKHISAVECLLTYLENTVVPPLAKGLGAGVRTEADVEEEALRRKLEELTSNVSDQETSSEEEEAKDEKAEPNRDKSVGPLPQADPEVGTAAHQTNRQEKSPQDPGDPVQYNRTTDEELSELEDRVAVTASEVQQAESEVSDIESRIAALRAAGLTVKPSGKPRRKSNLPIFLPRVAGKLGKRPEDPNADPSSEAKAMAVPYLLRRKFSNSLKSQGKDDDSFDRKSVYRGSLTQRNPNARKGMASHTFAKPVVAHQS

SEQ ID NO: 214702 - protein, 551 aa, Artificial Sequence
  derived and/or modified sequence
MGKKLDLSKLTDEEAQHVLEVVQRDFDLRRKEEERLEALKGKIKKESSKRELLSDTAHLNETHCARCLQPYQLLVNSKRQCLECGLFTCKSCGRVHPEEQGWICDPCHLARVVKIGSLEWYYEHVKARFKRFGSAKVIRSLHGRLQGGAGPELISEERSGDSDQTDEDGEPGSEAQAQAQPFGSKKKRLLSVHDFDFEGDSDDSTQPQGHSLHLSSVPEARDSPQSLTDESCSEKAAPHKAEGLEEADTGASGCHSHPEEQPTSISPSRHGALAELCPPGGSHRMALGTAAALGSNVIRNEQLPLQYLADVDTSDEESIRAHVMASHHSKRRGRASSESQIFELNKHISAVECLLTYLENTVVPPLAKGLGAGVRTEADVEEEALRRKLEELTSNVSDQETSSEEEEAKDEKAEPNRDKSVGPLPQADPEVGTAAHQTNRQEKSPQDPGDPVQYNRTTDEELSELEDRVAVTASEVQQAESEVSDIESRIAALRAAGLTVKPSGKPRRKSNLPALYEGTLSLCSEDLKHTHPDSVKSKRSRLNHVASCGNP

SEQ ID NO: 214703 - DNA, 1803 bp, Artificial Sequence
  derived and/or modified sequence
atgggtaagaaactggacctgtctaagctcaccgatgaggaggcccagcacgtgctggaggtggtgcagagggattttgatctacgcaggaaagaggaagaaagactagaagcacttaagggcaaaattaaaaaggagtcgagcaaacgcgaactactctctgacaccgctcatcttaatgagacgcactgcgcccgctgcttgcagccctatcagctgttagtcaactctaaacgccaatgcttggagtgtggtctgttcacctgcaagagctgcggacgggtgcaccccgaggaacagggatggatttgcgacccatgccatctcgctcgcgtggttaaaatcggttctctcgaatggtactatgagcacgttaaggcgaggttcaaacggtttggaagcgcgaaagtcatccggagtttacatggacgtctgcagggcggcgctgggccagagctaatatctgaggaaaggtctggggattcggatcagaccgatgaagatggcgaacccgggtcagaagcccaggcgcaggcccaaccatttggttccaaaaagaagaggctgctttcagttcacgacttcgacttcgagggcgattctgacgattccacccagcctcaaggtcatagtctgcacctatcatctgtgcctgaggctagagacagcccccagagcctcaccgacgaaagttgtagtgaaaaagccgccccgcataaagcagaggggttggaggaagcagatacgggcgcttccgggtgtcactctcacccagaagagcaacccacgtcaatctctccttcacgccatggcgctttggccgaattgtgccccccgggcgggtcccaccgcatggctttgggcaccgcagcagcgcttgggagtaatgtgatccggaacgagcagctgccattgcagtatcttgcggacgtcgacacatcagatgaggagtcaattcgggcccatgtcatggcctcccaccactctaagaggcggggacgcgccagctccgagtcccaaatattcgagctgaataagcacatcagtgcagttgagtgccttctgacatatttggagaacactgtggtaccaccactcgccaaaggcctcggggcaggagtgcgtactgaggctgatgtcgaagaggaagctttgcggaggaaactagaagaattgacgtccaatgtcagcgatcaggaaacctcttctgaagaggaagaagcaaaggatgaaaaagccgaaccaaatagagataagtcagtgggaccacttcctcaggcggatccagaagtgggcaccgcagcacaccaaaccaaccggcaagagaagtcgcctcaggaccccggagaccccgtgcagtataaccggactaccgacgaggagctgagcgagctggaggaccgggttgccgtgaccgcctctgaagtgcagcaagctgaaagtgaagttagcgacattgaatcacggattgcggccttgagagcagccggcctgacagtgaagccgagcggtaaacctcggcgcaagtcgaatctgcccatcttcctaccgcgagtggcaggaaaactgggaaagcgccccgaagacccaaatgccgacccttcgtctgaggcaaaggccatggctgttccctatctgctgagaagaaaattctctaactctctgaaaagtcaggggaaggatgatgattcttttgatcggaaatcagtgtatcgcggttccctcactcaacgcaacccaaatgcgcgcaaaggtatggccagccacacattcgctaagcctgtggtagcacatcagagttag

SEQ ID NO: 214704 - DNA, 1656 bp, Artificial Sequence
  derived and/or modified sequence
atgggcaaaaaactagacctctcaaaactgaccgacgaggaggctcaacatgtcctcgaagttgtgcagagagatttcgatttacggagaaaagaagaagaaagattggaagcgctgaaaggaaaaatcaaaaaggaatcttccaaacgggagttgctgtcagacaccgctcatctgaatgagactcactgtgcgagatgcctacaaccctaccagctactggtgaattccaaaaggcagtgccttgaatgtggcttatttacttgcaagtcatgtggacgcgttcatcccgaggagcagggctggatctgtgatccctgccaccttgctcgagtggttaaaatcggaagcctagagtggtattatgaacatgtgaaggctcgtttcaaacggttcggttctgcgaaagtcattaggtccttgcatggcagactgcaaggcggagccgggccagaactaatctctgaagagaggagcggcgatagtgatcagactgacgaggacggcgaaccaggcagtgaggcccaggcccaggctcaaccctttggttcaaagaaaaaacgcctgctgtctgtccacgacttcgactttgagggagacagcgatgattccactcagccacagggccacagcctgcacctctccagtgtccctgaggcaagagattcaccccaatccctgacggatgagagttgcagcgagaaagcggccccccataaggctgaaggcctggaagaggccgacacaggtgcttccggatgccactcgcaccctgaagagcagccaacttctatcagcccgagccgacacggtgcgctggcagagctgtgcccccccgggggcagccaccgtatggcccttggcacagccgcagcccttggttctaatgtcatcaggaatgaacagctgcctctgcaatacctcgcagacgtcgatacctcagatgaggagtctattagagcccacgttatggctagtcaccacagcaaacgccgcgggagagcttctagtgagtcccagatattcgagctgaacaagcacatcagcgccgtggagtgtttgttaacctatttggaaaataccgtggtgcctcccctggccaaggggcttggcgctggggtccgcaccgaggctgatgtggaagaggaagccttgagacgaaagctagaggagttaactagcaacgtgagtgaccaagagacaagttccgaggaggaagaggcaaaagatgaaaaggccgaaccgaaccgtgacaagtcagtgggacccctcccccaggcagatccagaagtcgggaccgctgcccatcagacgaatcgccaggagaagtcaccccaggaccccggggaccccgttcagtataataggacaactgacgaagagctctctgagctagaggatagggtggccgtcacagcgagcgaagtccaacaggccgagagcgaagtgagtgacatagagagtcgaatcgcggcgctgcgtgccgctgggctaacagttaaaccatccggcaagcctcggaggaaaagcaatctgccagcactatatgaagggacattgagtttgtgttctgaagacctgaagcatactcacccagatagcgtgaaaagtaaacggtctagactcaatcacgtggcaagctgtgggaacccctag

SEQ ID NO: 214705 - DNA, 1803 bp, Artificial Sequence
  derived and/or modified sequence
atgggcaagaagctggacctgagcaagctgacagatgaggaggcccagcacgtgctggaggtggtgcagagggactttgacctgcggaggaaggaggaggagcggctggaggccctgaagggcaagatcaagaaggagagcagcaagcgggagctgctgagtgacacagcccacctgaatgagacccactgtgcccgctgcctgcagccctaccagctgctggtgaacagcaagaggcagtgcctggagtgtggcctcttcacctgcaagagctgtggccgggtgcaccctgaggagcagggctggatctgtgacccctgccacctggcccgggtggtgaagattggcagcctggagtggtactatgagcacgtgaaggcccgcttcaagcgcttcggcagcgccaaggtgatccgcagcctgcacggccgcctgcagggcggggccggccctgagctgatcagcgaggagaggtctggggacagcgaccagacagatgaagatggagagcccggcagcgaggcccaggcccaggcccagcccttcggcagcaagaagaagaggctgctgtctgtgcatgactttgattttgaaggagacagtgatgacagcacccagccccagggccacagcctgcacctgagctctgtgcctgaggcccgggacagcccccagagcctgacagatgagagctgcagcgagaaggccgccccccacaaggccgagggcctggaggaggccgacacaggagccagcggctgccacagccaccctgaggagcagcccaccagcatcagccccagccgccacggggccctggccgagctgtgccccccaggcggcagccacaggatggccctgggcacagctgctgccctgggcagcaatgtcatcagaaatgagcagctgcccctgcagtacctggctgatgtggacaccagtgatgaggagagcatccgggcccacgtgatggccagccaccacagcaagagaagaggccgggccagcagcgagagccagatctttgagctgaacaagcacatctctgctgtggagtgcctgctgacctacctggagaacacagtggtgccccccctggccaagggcctgggcgctggggtgaggacagaagcagatgtggaggaggaggccctgcggaggaagctggaggagctgaccagcaatgtgtctgaccaggagaccagcagcgaggaggaggaggccaaggatgagaaggccgagcccaacagagacaagtctgtgggccccctgccccaggccgaccctgaggtgggcacagctgcccaccagaccaaccggcaggagaagagcccccaggaccccggggaccctgtgcagtacaacagaaccacagatgaggagctgtctgagctggaggacagagtggccgtgacagccagcgaggtgcagcaggccgagagcgaggtgtctgacatcgagagcagaattgctgccctgcgggccgccggcctgactgtgaagcccagcggcaagcccaggaggaagagcaacctgcccatcttcctgccccgggtggccggcaagctgggcaagaggcctgaggaccccaatgctgaccccagcagcgaggccaaggccatggctgtgccctacctgctgcggaggaagttcagcaacagcctgaagagccagggcaaggatgatgacagctttgacaggaagtctgtgtaccggggcagcctgacccagaggaaccccaatgccaggaagggcatggccagccacacctttgccaagcctgtggtggcccaccagagctag

SEQ ID NO: 214706 - DNA, 1656 bp, Artificial Sequence
  derived and/or modified sequence
atgggcaagaagctggacctgagcaagctgacagatgaggaggcccagcacgtgctggaggtggtgcagagggactttgacctgcggaggaaggaggaggagcggctggaggccctgaagggcaagatcaagaaggagagcagcaagcgggagctgctgagtgacacagcccacctgaatgagacccactgtgcccgctgcctgcagccctaccagctgctggtgaacagcaagaggcagtgcctggagtgtggcctcttcacctgcaagagctgtggccgggtgcaccctgaggagcagggctggatctgtgacccctgccacctggcccgggtggtgaagattggcagcctggagtggtactatgagcacgtgaaggcccgcttcaagcgcttcggcagcgccaaggtgatccgcagcctgcacggccgcctgcagggcggggccggccctgagctgatcagcgaggagaggtctggggacagcgaccagacagatgaagatggagagcccggcagcgaggcccaggcccaggcccagcccttcggcagcaagaagaagaggctgctgtctgtgcatgactttgattttgaaggagacagtgatgacagcacccagccccagggccacagcctgcacctgagctctgtgcctgaggcccgggacagcccccagagcctgacagatgagagctgcagcgagaaggccgccccccacaaggccgagggcctggaggaggccgacacaggagccagcggctgccacagccaccctgaggagcagcccaccagcatcagccccagccgccacggggccctggccgagctgtgccccccaggcggcagccacaggatggccctgggcacagctgctgccctgggcagcaatgtcatcagaaatgagcagctgcccctgcagtacctggctgatgtggacaccagtgatgaggagagcatccgggcccacgtgatggccagccaccacagcaagagaagaggccgggccagcagcgagagccagatctttgagctgaacaagcacatctctgctgtggagtgcctgctgacctacctggagaacacagtggtgccccccctggccaagggcctgggcgctggggtgaggacagaagcagatgtggaggaggaggccctgcggaggaagctggaggagctgaccagcaatgtgtctgaccaggagaccagcagcgaggaggaggaggccaaggatgagaaggccgagcccaacagagacaagtctgtgggccccctgccccaggccgaccctgaggtgggcacagctgcccaccagaccaaccggcaggagaagagcccccaggaccccggggaccctgtgcagtacaacagaaccacagatgaggagctgtctgagctggaggacagagtggccgtgacagccagcgaggtgcagcaggccgagagcgaggtgtctgacatcgagagcagaattgctgccctgcgggccgccggcctgactgtgaagcccagcggcaagcccaggaggaagagcaacctgcctgccctgtatgagggcaccctgagcctgtgcagcgaggacctgaagcacacccacccagacagcgtgaagagcaagaggagccggctgaaccacgtggccagctgtggcaacccctag

SEQ ID NO: 214707 - DNA, 3823 bp, Artificial Sequence
  derived and/or modified sequence
atccagaggtgtccgcgctcccggagctgggcggagcggggcgcagcccacgtggttcgggcgggaggcgccgggacgtggccagttgcccgcctgccccggagagccaggcgctaaccagccgctctgcgccccgcgccctgcttgcccccattatccagccttgccccggcgccctgacctgacgccctggcctgacgccctgcttcgtcgcctcctttctctcccaggtgctggaccagggactgagcgtcccccggagagggtccggtgtgaccccgacaagaagcagaaatggggaagaaactggatctttccaagctcactgatgaagaggcccagcatgtcttggaagttgttcaacgagattttgacctccgaaggaaagaagaggaacggctagaggcgttgaagggcaagattaagaaggaaagctccaagagggagctgctttccgacactgcccatctgaacgagacccactgcgcccgctgcctgcagccctaccagctgcttgtgaatagcaaaaggcagtgcctggaatgtggcctcttcacctgcaaaagctgtggccgcgtccacccggaggagcagggctggatctgtgacccctgccatctggccagagtcgtgaagatcggctcactggagtggtactatgagcatgtgaaagcccgcttcaagaggttcggaagtgccaaggtcatccggtccctccacgggcggctgcagggtggagctgggcctgaactgatatctgaagagagaagtggagacagcgaccagacagatgaggatggagaacctggctcagaggcccaggcccaggcccagccctttggcagcaaaaaaaagcgcctcctctccgtccacgacttcgacttcgagggagactcagatgactccactcagcctcaaggtcactccctgcacctgtcctcagtccctgaggccagggacagcccacagtccctcacagatgagtcctgctcagagaaggcagcccctcacaaggctgagggcctggaggaggctgatactggggcctctgggtgccactcccatccggaagagcagccgaccagcatctcaccttccagacacggcgccctggctgagctctgcccgcctggaggctcccacaggatggccctggggactgctgctgcactcgggtcgaatgtcatcaggaatgagcagctgcccctgcagtacttggccgatgtggacacctctgatgaggaaagcatccgggctcacgtgatggcctcccaccattccaagcggagaggccgggcgtcttctgagagtcagatctttgagctgaataagcatatttcagctgtggaatgcctgctgacctacctggagaacacagttgtgcctcccttggccaagggtctaggtgctggagtgcgcacggaggccgatgtagaggaggaggccctgaggaggaagctggaggagctgaccagcaacgtcagtgaccaggagacctcgtccgaggaggaggaagccaaggacgaaaaggcagagcccaacagggacaaatcagttgggcctctcccccaggcggacccggaggtgggcacggctgcccatcaaaccaacagacaggaaaaaagcccccaggaccctggggaccccgtccagtacaacaggaccacagatgaggagctgtcagagctggaggacagagtggcagtgacggcctcagaagtccagcaggcagagagcgaggtttcagacattgaatccaggattgcagccctgagggccgcagggctcacggtgaagccctcgggaaagccccggaggaagtcaaacctcccgatatttctccctcgagtggctgggaaacttggcaagagaccagaggacccaaatgcagacccttcaagtgaggccaaggcaatggctgtgccctatcttctgagaagaaagttcagtaattccctgaaaagtcaaggtaaagatgatgattcttttgatcggaaatcagtgtaccgaggctcgctgacacagagaaaccccaacgcgaggaaaggaatggccagccacaccttcgcgaaacctgtggtggcccaccagtcctaacgggacaggacagagagacagagcagccctgcactgttttccctccaccacagccatcctgtccctcattggctctgtgctttccactatacacagtcaccgtcccaatgagaaacaagaaggagcaccctccacatggactcccacctgcaagtggacagcgacattcagtcctgcactgctcacctgggtttactgatgactcctggctgccccaccatcctctctgatctgtgagaaacagctaagctgctgtgacttccctttaggacaatgttgtgtaaatctttgaaggacacaccgaagacctttatactgtgatcttttacccctttcactcttggctttcttatgttgctttcatgaatggaatggaaaaaagatgactcagttaaggcaccagccatatgtgtattcttgatggtctatatcggggtgtgagcagatgtttgcgtatttcttgtgggtgtgactggatattagacatccggacaagtgactgaactaatgatctgctgaataatgaaggaggaatagacaccccagtccccaccctacgtgcacccgctctgcaagttcccatgtgatctgtagaccaggggaaattacactgcggtcaagggcagagcctgcacatgacagcaagtgagcatttgatagatgctcagatgctagtgcagagagcctgctgggagacgaagagacagcaggcagagctccagatgggcaaggaagaggcttggttctagcctggctctgcccctcactgcagtggatccagtggggcagaggacagagggtcacaaccaatgagggatgtctgccaaggatgggggtgcagaggccacaggagtcagcttgccactcgcccattggttacatagatgatctctcagacaggctgggactcagagttatttcctagtatcggtgtgccccatccagttttaagtggagccctccaagactctccagagctgcctttgaacatcctaacagtaatcacatctcaccctccctgaggttcactttagacaggacccaatggctgcactgcctttgtcagagggggtgctgagaggagtggcttcttttagaatcaaacagtagagacaagagtcaagccttgtgtcttcaagcattgaccaagttaagtgtttccttccctctctcaataagacacttccaggagctttccaatctctcacttaaaactaaggtttgaatctcaaagtgttgctgggaggctgatactcctgcaacttcaggagacctgtgagcacacattagcagctgtttctctgactccttgtggcatcagataaaaacgtgggagtttttccatataattcccagccttacttataaattctattctttgaaaaaattattcaggctaggtaaggtggctcatacctataatcccagccctttgagaggccaaggtgggagaattgcttgaggccaggagtttgagacctcctgggcaacatagtgagatcccatctctacaaaaaacaaaacaaaaaaattacccaagcatgatggtatatgcctgtagtcgtacctacttacttaggaggctgaggcaggaggatcacttgagccctggaggttggggctgcagtgagccatgatcgcatcactatactcgagcctgggcaacagagtgagaccttgtctcttaaaaaaattaataataaataaatgaaaataattcttcaga

SEQ ID NO: 214708 - DNA, 2274 bp, Artificial Sequence
  derived and/or modified sequence
cagttgcccgcctgccccggagagccaggcgctaaccagccgctctgcgccccgcgccctgcttgcccccattatccagccttgccccggcgccctgacctgacgccctggcctgacgccctgcttcgtcgcctcctttctctcccaggtgctggaccagggactgagcgtcccccggagagggtccggtgtgaccccgacaagaagcagaaatggggaagaaactggatctttccaagctcactgatgaagaggcccagcatgtcttggaagttgttcaacgagattttgacctccgaaggaaagaagaggaacggctagaggcgttgaagggcaagattaagaaggaaagctccaagagggagctgctttccgacactgcccatctgaacgagacccactgcgcccgctgcctgcagccctaccagctgcttgtgaatagcaaaaggcagtgcctggaatgtggcctcttcacctgcaaaagctgtggccgcgtccacccggaggagcagggctggatctgtgacccctgccatctggccagagtcgtgaagatcggctcactggagtggtactatgagcatgtgaaagcccgcttcaagaggttcggaagtgccaaggtcatccggtccctccacgggcggctgcagggtggagctgggcctgaactgatatctgaagagagaagtggagacagcgaccagacagatgaggatggagaacctggctcagaggcccaggcccaggcccagccctttggcagcaaaaaaaagcgcctcctctccgtccacgacttcgacttcgagggagactcagatgactccactcagcctcaaggtcactccctgcacctgtcctcagtccctgaggccagggacagcccacagtccctcacagatgagtcctgctcagagaaggcagcccctcacaaggctgagggcctggaggaggctgatactggggcctctgggtgccactcccatccggaagagcagccgaccagcatctcaccttccagacacggcgccctggctgagctctgcccgcctggaggctcccacaggatggccctggggactgctgctgcactcgggtcgaatgtcatcaggaatgagcagctgcccctgcagtacttggccgatgtggacacctctgatgaggaaagcatccgggctcacgtgatggcctcccaccattccaagcggagaggccgggcgtcttctgagagtcagatctttgagctgaataagcatatttcagctgtggaatgcctgctgacctacctggagaacacagttgtgcctcccttggccaagggtctaggtgctggagtgcgcacggaggccgatgtagaggaggaggccctgaggaggaagctggaggagctgaccagcaacgtcagtgaccaggagacctcgtccgaggaggaggaagccaaggacgaaaaggcagagcccaacagggacaaatcagttgggcctctcccccaggcggacccggaggtgggcacggctgcccatcaaaccaacagacaggaaaaaagcccccaggaccctggggaccccgtccagtacaacaggaccacagatgaggagctgtcagagctggaggacagagtggcagtgacggcctcagaagtccagcaggcagagagcgaggtttcagacattgaatccaggattgcagccctgagggccgcagggctcacggtgaagccctcgggaaagccccggaggaagtcaaacctcccggctctttatgaggggactctgagcctctgctctgaggatctgaaacacacacaccctgacagtgtaaaatccaaaaggagccgcctgaatcatgttgcctcatgtggaaatccttagtccgccgccacgtgaagatggatgtgactagaacggagggcgcgggaggctcacatcagaggagctgctcacatatttctccctcgagtggctgggaaacttggcaagagaccagaggacccaaatgcagacccttcaagtgaggccaaggcaatggctgtgccctatcttctgagaagaaagttcagtaattccctgaaaagtcaaggtaaagatgatgattcttttgatcggaaatcagtgtaccgaggctcgctgacacagagaaaccccaacgcgaggaaaggaatggccagccacaccttcgcgaaacctgtggtggcccaccagtcctaacgggacaggacagagagacagagcagccctgcactgttttccctccaccacagccatcctgtccctcatt

SEQ ID NO: 214709 - DNA, 1803 bp, Artificial Sequence
  derived and/or modified sequence
atgggcaagaagctggacctgagcaagctgaccgacgaggaggcccagcatgtgcttgaggttgtacaacgggactttgacctgcgacgtaaggaggaggagcggctggaagccctgaaaggtaaaatcaagaaggagagcagcaagagagagcttctcagcgacacagcacaccttaacgagacgcattgtgcacgctgtctacaaccataccagttactggtgaactccaagcggcagtgtctcgaatgtggtctgtttacctgcaagtcctgcggccgggtgcaccccgaagaacaggggtggatctgcgatccctgtcacttagctagagttgtaaaaatagggagtctggaatggtattacgaacacgtgaaagcaaggtttaaaagattcgggtctgcaaaggtcatccgatcactacatgggaggctccaggggggggccggtccagagctgatctcagaggaacggtcaggggattctgaccagacggacgaagacggtgaaccaggttctgaagcccaagcgcaagctcagccgttcggcagcaagaaaaaaaggctactgagtgtgcacgattttgacttcgaaggcgactcagatgatagtactcagccccaaggacactctctccatctgagcagcgtgccagaggcccgggatagtcctcagtcactgaccgatgaaagctgttcagagaaagccgcgccgcacaaagcagagggcttggaagaagccgacacaggtgcctcaggttgccatagccatccggaggagcagcctacatccatatcaccttctcggcacggtgccctggccgagctgtgtcctccaggcggctcacaccgaatggccctcggaaccgccgctgccctgggatctaatgtgatccgtaatgagcagcttccactgcagtacctcgctgatgtggacacttccgatgaggagagcatcagggctcacgtgatggcatcacaccactccaagcgcagaggacgcgcctcgagtgaaagtcagatatttgagctgaacaaacacatctcagccgtagagtgtctgcttacttatctagagaacacagtcgtcccgcccctggccaaaggcttaggcgccggcgtgcggactgaggccgatgtggaagaggaggccttacgaagaaagttggaggagcttacctccaacgtcagtgaccaggagactagtagcgaagaagaggaagccaaggacgagaaggccgaacctaatcgcgacaaaagtgtcggtccactgccgcaggccgatcctgaggtgggtactgcagcccaccagacaaaccgtcaggaaaaatcccctcaggacccaggcgacccagtgcagtacaaccggacgaccgatgaggagctgtcagagctcgaagatcgagtggccgtcacggcctccgaagtccagcaggcagagtcagaagtgtctgatatcgaatcccggatcgctgctctgagagccgccggcttgaccgtgaaacctagcggcaagccaagaaggaagtctaacctcccaatctttctccctagagtggcaggcaaattaggcaagcgaccagaggatcccaacgcagatccttcctccgaggccaaggcaatggccgtgccctacctattacggcgcaaattctctaatagcttgaaaagccaaggcaaggatgatgattcattcgataggaaatccgtttacagggggtccttaacgcagcgcaatcctaacgcccggaagggaatggcttctcacacttttgctaaacccgttgtggcccaccagtcttag

SEQ ID NO: 214710 - DNA, 1656 bp, Artificial Sequence
  derived and/or modified sequence
atgggcaagaagctggacctgagcaagctgaccgacgaggaggcccaacacgtgctcgaagtggttcagcgcgactttgacctacgcaggaaggaagaggagcgcctggaggctctcaagggcaagatcaagaaggaatccagcaagcgagagttgctgtctgatacagcccatttgaacgaaacacattgcgcacgctgcctgcaaccgtaccaactgctcgtgaactcaaagaggcaatgcttggagtgcgggctttttacatgcaaaagttgcggacgagtgcacccagaggaacagggttggatttgtgatccatgtcatcttgctcgagttgtaaagattggttctttagaatggtactacgaacacgttaaggcccgatttaagcggttcggaagtgctaaggtgatccggagtctgcacggtcggcttcagggaggagcaggccctgaactcatttccgaggaacggtccggcgattcagaccagacagacgaggacggagaacctggaagcgaggcccaagcccaagcacagcccttcgggtccaagaaaaaacgcctactgagtgtgcacgatttcgactttgagggagattcagatgattccactcagcctcagggccactcactccacctgtctagcgtacccgaagcaagggattctcctcaatccctgaccgacgagtcatgcagcgaaaaggccgccccccacaaagctgaaggattagaagaggccgatactggggctagcggttgtcactctcatcccgaagaacaacccacgtcaatatctccctcaagacacggcgctcttgcagagctgtgtccgccaggcggctcacacaggatggccttgggcacggctgcggcattgggctctaatgtcattagaaacgagcaacttcccttgcagtacctggcagacgtcgacaccagtgatgaagaaagcatcagggcgcacgtcatggcgtcgcaccactctaagcgccgcggccgcgcttccagcgaatcacagatatttgagctgaataaacacatctccgcagtcgaatgtctcctgacataccttgagaatacggttgtgccccctctagccaagggacttggggcaggggtgaggacagaagccgacgtcgaagaagaggctcttagaagaaaattggaagaactgactagcaacgtctctgatcaggagaccagttctgaggaggaggaagccaaagatgagaaggcagaaccaaacagggacaagtcggtgggcccattgccccaagctgaccctgaggtgggcactgccgcacaccagacgaataggcaagagaagagcccacaggaccctggggaccctgtgcagtacaataggactaccgatgaggagctttccgaattggaggatagggttgctgtgacggcctccgaagtacagcaggcagaatctgaagtcagcgacattgagtcccgtatagccgcactgcgggcagcaggcctgaccgtgaagccatccggcaaaccaagaagaaagtcgaatctgcctgctctctatgaagggacgctgtccctttgttcggaggatcttaagcatacgcacccagactcggtgaagagtaaacggtctcggttaaatcacgtagcttcatgtggtaatccatag

SEQ ID NO: 214711 - DNA, 1803 bp, Artificial Sequence
  derived and/or modified sequence
atgggtaagaagctggatctgagcaaattaacagatgaggaggctcaacacgtactggaggtggtgcagcgcgacttcgatctgcgcagaaaggaagaggagcgcctggaagcacttaagggcaagatcaaaaaggaatctagcaaaagggagctgcttagcgataccgcacacctcaatgagactcactgtgcaaggtgcctccagccgtatcagttgcttgtgaacagcaaaagacagtgtcttgaatgcgggctatttacatgtaagtcttgcggacgggtgcatccagaagagcaaggctggatatgcgatccttgtcacttggctagggtggtgaagattggatcactcgagtggtactatgagcatgtcaaagcgcgatttaagcgctttggtagcgctaaggtgatccgttccttgcatggcaggctgcaagggggagccggtccagaacttatttctgaggagaggtccggcgacagcgatcaaaccgacgaagatggagaacctggcagtgaggctcaagcgcaggctcagccttttgggagcaaaaagaagaggctgttgagcgtgcacgattttgactttgaaggggattccgacgatagcacccagccacagggtcactctctgcatctctcctccgtgcctgaagcccgagactccccacagtccctgactgacgagagttgtagtgaaaaggctgctcctcataaggctgaaggtctggaggaagcggataccggagcttccggttgccattcccatcctgaggagcagcctacgagcattagcccctctcggcatggggcactggccgaactgtgccctcccggagggtcccaccggatggctctgggaacggcggcagcccttggatccaatgtaattaggaacgagcagttgcctttacagtatttagcagacgtggacacaagtgatgaggagtccatcagagctcacgtcatggcctcccaccattctaagaggcgaggtcgcgcttcatcagaatcacaaatatttgaattgaacaaacatatttcagccgtggagtgcctgctgacctacctggagaacactgtggtgccacccctggctaaaggtctcggcgcaggcgtcagaacggaggcagacgttgaggaggaggcccttagacgtaagttggaagagttgaccagcaatgtatccgaccaggagacctcatccgaggaagaggaagccaaagacgagaaagcggagcctaatagggacaaatctgtcggtccacttccgcaggccgaccctgaggtgggcaccgccgctcaccagacaaaccgacaggagaagtctcctcaggacccaggcgatcccgtccaatataatcggacgacagacgaagagctctccgagttggaagacagagtggccgtcacagcatcggaggtgcagcaggctgagtcagaagtgtccgacattgagtcccgcatagctgcactgcgtgccgctggactgacagtgaaaccttctgggaagcctaggagaaaaagtaacctgcctatctttttacccagggtcgctggtaagcttggtaagcgacccgaggaccctaatgctgacccctctagcgaagctaaggctatggccgtcccctatctgctgcgcaggaaattctccaactctttgaagtcccaggggaaggatgatgattcgttcgatcgtaagagtgtgtataggggctccctcactcaacggaacccgaacgctagaaagggcatggctagccataccttcgctaaacctgtggtggctcatcaatcttag

SEQ ID NO: 214712 - DNA, 1656 bp, Artificial Sequence
  derived and/or modified sequence
atgggaaagaaattggatctgtccaaactgacagatgaggaggctcagcacgtgctggaggtcgtacagagggattttgacctaaggagaaaggaagaggagaggctggaggcactgaaaggaaagattaagaaggaatcatctaaacgggagctcttaagcgacacagcccaccttaatgagacccattgtgctcgctgcttgcagccctatcaactgctcgttaactctaaacgccagtgcctggaatgcggtctgtttacttgcaagagctgtggtcgcgttcacccagaggaacaggggtggatctgcgacccctgtcatcttgctagggtagtgaaaatcggatcactcgagtggtattatgagcacgtcaaagccagatttaaaagattcggttcagcaaaggtaatacgtagcctgcacggacggctgcaaggcggtgccggaccggagctgatctctgaagagagatcaggggatagcgatcagaccgatgaagacggcgagcctggaagcgaggcccaggcccaggcccaaccctttggctctaagaagaagaggctcttgtctgttcacgactttgactttgagggcgacagtgatgattctacacaacctcagggacacagccttcatctctccagtgtgccggaggctagggactcgcctcagagcctgacggacgaaagctgctctgaaaaggctgcccctcataaggctgaagggttagaggaggcagataccggcgctagtggttgccatagccatcctgaggagcagcccacttctatctcacctagtaggcacggtgccctcgcagaactgtgccctcccggaggcagccacagaatggcgcttggcacagcagctgccctggggagtaatgtgataaggaatgagcaactgcccttgcagtatttggccgacgtggacacgagtgatgaggagtcaattcgagcacacgtcatggcaagccatcattcaaagcggaggggcagagccagcagcgagtctcagatcttcgagctcaacaaacacatttcagccgtggaatgtctgcttacctatctagaaaacacagtggtaccacccctcgccaaagggctgggagcaggcgttagaacggaagcggatgtggaagaggaagccttaaggcgaaagctcgaggagctgacttccaacgtgtcagaccaggaaacgtctagtgaggaggaggaggcgaaggatgagaaagctgaacctaatcgggataagtctgtgggtcctctcccacaggcggatccagaagtcggaactgccgcacaccagaccaatagacaagagaagagtccccaggaccctggagaccccgtacagtataaccgcactaccgacgaagaactcagcgaattggaggatcgcgtggctgtaacagcatccgaggtgcagcaggccgaatccgaagtgtccgatattgagagtaggatagctgcattgagagctgcaggattgacagtcaaaccctcgggcaagcctaggagaaaaagcaatttgccggcattgtatgaggggacgttaagtctctgttccgaagacctgaagcacacacaccctgactctgtgaagtccaagagatctagattgaaccatgttgcatcctgtgggaatccctag

SEQ ID NO: 214713 - DNA, 1803 bp, Artificial Sequence
  derived and/or modified sequence
atgggcaagaagctggacctgagcaagctgaccgacgaggaggcccagcacgtgctggaggtggtgcagagagacttcgacctgagaagaaaggaggaggagagactggaggccctgaagggcaagatcaagaaggagagcagcaagagagagctgctgagcgacaccgcccacctgaacgagacccactgcgccagatgcctgcagccctaccagctgctggtgaacagcaagagacagtgcctggagtgcggcctgttcacctgcaagagctgcggcagagtgcaccccgaggagcagggctggatctgcgacccctgccacctggccagagtggtgaagatcggcagcctggagtggtactacgagcacgtgaaggccagattcaagagattcggcagcgccaaggtgatcagaagcctgcacggcagactgcagggcggcgccggccccgagctgatcagcgaggagagaagcggcgacagcgaccagaccgacgaggacggcgagcccggcagcgaggcccaggcccaggcccagcccttcggcagcaagaagaagagactgctgagcgtgcacgacttcgacttcgagggcgacagcgacgacagcacccagccccagggccacagcctgcacctgagcagcgtgcccgaggccagagacagcccccagagcctgaccgacgagagctgcagcgagaaggccgccccccacaaggccgagggcctggaggaggccgacaccggcgccagcggctgccacagccaccccgaggagcagcccaccagcatcagccccagcagacacggcgccctggccgagctgtgcccccccggcggcagccacagaatggccctgggcaccgccgccgccctgggcagcaacgtgatcagaaacgagcagctgcccctgcagtacctggccgacgtggacaccagcgacgaggagagcatcagagcccacgtgatggccagccaccacagcaagagaagaggcagagccagcagcgagagccagatcttcgagctgaacaagcacatcagcgccgtggagtgcctgctgacctacctggagaacaccgtggtgccccccctggccaagggcctgggcgccggcgtgagaaccgaggccgacgtggaggaggaggccctgagaagaaagctggaggagctgaccagcaacgtgagcgaccaggagaccagcagcgaggaggaggaggccaaggacgagaaggccgagcccaacagagacaagagcgtgggccccctgccccaggccgaccccgaggtgggcaccgccgcccaccagaccaacagacaggagaagagcccccaggaccccggcgaccccgtgcagtacaacagaaccaccgacgaggagctgagcgagctggaggacagagtggccgtgaccgccagcgaggtgcagcaggccgagagcgaggtgagcgacatcgagagcagaatcgccgccctgagagccgccggcctgaccgtgaagcccagcggcaagcccagaagaaagagcaacctgcccatcttcctgcccagagtggccggcaagctgggcaagagacccgaggaccccaacgccgaccccagcagcgaggccaaggccatggccgtgccctacctgctgagaagaaagttcagcaacagcctgaagagccagggcaaggacgacgacagcttcgacagaaagagcgtgtacagaggcagcctgacccagagaaaccccaacgccagaaagggcatggccagccacaccttcgccaagcccgtggtggcccaccagagctag

SEQ ID NO: 214714 - DNA, 1656 bp, Artificial Sequence
  derived and/or modified sequence
atgggcaagaagctggacctgagcaagctgaccgacgaggaggcccagcacgtgctggaggtggtgcagagagacttcgacctgagaagaaaggaggaggagagactggaggccctgaagggcaagatcaagaaggagagcagcaagagagagctgctgagcgacaccgcccacctgaacgagacccactgcgccagatgcctgcagccctaccagctgctggtgaacagcaagagacagtgcctggagtgcggcctgttcacctgcaagagctgcggcagagtgcaccccgaggagcagggctggatctgcgacccctgccacctggccagagtggtgaagatcggcagcctggagtggtactacgagcacgtgaaggccagattcaagagattcggcagcgccaaggtgatcagaagcctgcacggcagactgcagggcggcgccggccccgagctgatcagcgaggagagaagcggcgacagcgaccagaccgacgaggacggcgagcccggcagcgaggcccaggcccaggcccagcccttcggcagcaagaagaagagactgctgagcgtgcacgacttcgacttcgagggcgacagcgacgacagcacccagccccagggccacagcctgcacctgagcagcgtgcccgaggccagagacagcccccagagcctgaccgacgagagctgcagcgagaaggccgccccccacaaggccgagggcctggaggaggccgacaccggcgccagcggctgccacagccaccccgaggagcagcccaccagcatcagccccagcagacacggcgccctggccgagctgtgcccccccggcggcagccacagaatggccctgggcaccgccgccgccctgggcagcaacgtgatcagaaacgagcagctgcccctgcagtacctggccgacgtggacaccagcgacgaggagagcatcagagcccacgtgatggccagccaccacagcaagagaagaggcagagccagcagcgagagccagatcttcgagctgaacaagcacatcagcgccgtggagtgcctgctgacctacctggagaacaccgtggtgccccccctggccaagggcctgggcgccggcgtgagaaccgaggccgacgtggaggaggaggccctgagaagaaagctggaggagctgaccagcaacgtgagcgaccaggagaccagcagcgaggaggaggaggccaaggacgagaaggccgagcccaacagagacaagagcgtgggccccctgccccaggccgaccccgaggtgggcaccgccgcccaccagaccaacagacaggagaagagcccccaggaccccggcgaccccgtgcagtacaacagaaccaccgacgaggagctgagcgagctggaggacagagtggccgtgaccgccagcgaggtgcagcaggccgagagcgaggtgagcgacatcgagagcagaatcgccgccctgagagccgccggcctgaccgtgaagcccagcggcaagcccagaagaaagagcaacctgcccgccctgtacgagggcaccctgagcctgtgcagcgaggacctgaagcacacccaccccgacagcgtgaagagcaagagaagcagactgaaccacgtggccagctgcggcaacccctag

SEQ ID NO: 214715 - protein, 468 aa, Artificial Sequence
  derived and/or modified sequence
MRGSPGDAERRQRWGRLFEELDSNKDGRVDVHELRQGLARLGGGNPDPGAQQGISSEGDADPDGGLDLEEFSRYLQEREQRLLLMFHSLDRNQDGHIDVSEIQQSFRALGISISLEQAEKILHSMDRDGTMTIDWQEWRDHFLLHSLENVEDVLYFWKHSTVLDIGECLTVPDEFSKQEKLTGMWWKQLVAGAVAGAVSRTGTAPLDRLKVFMQVHASKTNRLNILGGLRSMVLEGGIRSLWRGNGINVLKIAPESAIKFMAYEQIKRAILGQQETLHVQERFVAGSLAGATAQTIIYPMEVLKTRLTLRRTGQYKGLLDCARRILEREGPRAFYRGYLPNVLGIIPYAGIDLAVYETLKNWWLQQYSHDSADPGILVLLACGTISSTCGQIASYPLALVRTRMQAQASIEGGPQLSMLGLLRHILSQEGMRGLYRGIAPNFMKVIPAVSISYVVYENMKQALGVTSR

SEQ ID NO: 214716 - protein, 438 aa, Artificial Sequence
  derived and/or modified sequence
MRGSPGDAERRQRWGRLFEELDSNKDGRVDVHELRQGLARLGGGNPDPGAQQGISSEGDADPDGGLDLEEFSRYLQEREQRLLLMFHSLDRNQDGHIDVSEIQQSFRALGISISLEQAEKILHSMDRDGTMTIDWQEWRDHFLLHSLENVEDVLYFWKHSTVLDIGECLTVPDEFSKQEKLTGMWWKQLVAGAVAGAVSRTGTAPLDRLKVFMQVHASKTNRLNILGGLRSMVLEGGIRSLWRGNGINVLKIAPESAIKFMAYEQIKRAILGQQETLHVQERFVAGSLAGATAQTIIYPMEVLKTRLTLRRTGQYKGLLDCARRILEREGPRAFYRGYLPNVLGIIPYAGIDLAVYETLKNWWLQQYSHDSADPGILVLLACGTISSTCGQIASYPLALVRTRMQAQDVSVYKTDTVPTLIELTGRRGRKMLNKSFWN

SEQ ID NO: 214717 - DNA, 1407 bp, Artificial Sequence
  derived and/or modified sequence
atgagaggcagccccggcgacgccgagagaagacagagatggggcagactgttcgaggagctggacagcaacaaggacggcagagtggacgtgcacgagctgagacagggcctggccagactgggcggcggcaaccccgaccccggcgcccagcagggcatcagcagcgagggcgacgccgaccccgacggcggcctggacctggaggagttcagcagatacctgcaggagagagagcagagactgctgctgatgttccacagcctggacagaaaccaggacggccacatcgacgtgagcgagatccagcagagcttcagagccctgggcatcagcatcagcctggagcaggccgagaagatcctgcacagcatggacagagacggcaccatgaccatcgactggcaggagtggagagaccacttcctgctgcacagcctggagaacgtggaggacgtgctgtacttctggaagcacagcaccgtgctggacatcggcgagtgcctgaccgtgcccgacgagttcagcaagcaggagaagctgaccggcatgtggtggaagcagctggtggccggcgccgtggccggcgccgtgagcagaaccggcaccgcccccctggacagactgaaggtgttcatgcaggtgcacgccagcaagaccaacagactgaacatcctgggcggcctgagaagcatggtgctggagggcggcatcagaagcctgtggagaggcaacggcatcaacgtgctgaagatcgcccccgagagcgccatcaagttcatggcctacgagcagatcaagagagccatcctgggccagcaggagaccctgcacgtgcaggagagattcgtggccggcagcctggccggcgccaccgcccagaccatcatctaccccatggaggtgctgaagaccagactgaccctgagaagaaccggccagtacaagggcctgctggactgcgccagaagaatcctggagagagagggccccagagccttctacagaggctacctgcccaacgtgctgggcatcatcccctacgccggcatcgacctggccgtgtacgagaccctgaagaactggtggctgcagcagtacagccacgacagcgccgaccccggcatcctggtgctgctggcctgcggcaccatcagcagcacctgcggccagatcgccagctaccccctggccctggtgagaaccagaatgcaggcccaggccagcatcgagggcggcccccagctgagcatgctgggcctgctgagacacatcctgagccaggagggcatgagaggcctgtacagaggcatcgcccccaacttcatgaaggtgatccccgccgtgagcatcagctacgtggtgtacgagaacatgaagcaggccctgggcgtgaccagcagatag

SEQ ID NO: 214718 - DNA, 1317 bp, Artificial Sequence
  derived and/or modified sequence
atgagaggcagccccggcgacgccgagagaagacagagatggggcagactgttcgaggagctggacagcaacaaggacggcagagtggacgtgcacgagctgagacagggcctggccagactgggcggcggcaaccccgaccccggcgcccagcagggcatcagcagcgagggcgacgccgaccccgacggcggcctggacctggaggagttcagcagatacctgcaggagagagagcagagactgctgctgatgttccacagcctggacagaaaccaggacggccacatcgacgtgagcgagatccagcagagcttcagagccctgggcatcagcatcagcctggagcaggccgagaagatcctgcacagcatggacagagacggcaccatgaccatcgactggcaggagtggagagaccacttcctgctgcacagcctggagaacgtggaggacgtgctgtacttctggaagcacagcaccgtgctggacatcggcgagtgcctgaccgtgcccgacgagttcagcaagcaggagaagctgaccggcatgtggtggaagcagctggtggccggcgccgtggccggcgccgtgagcagaaccggcaccgcccccctggacagactgaaggtgttcatgcaggtgcacgccagcaagaccaacagactgaacatcctgggcggcctgagaagcatggtgctggagggcggcatcagaagcctgtggagaggcaacggcatcaacgtgctgaagatcgcccccgagagcgccatcaagttcatggcctacgagcagatcaagagagccatcctgggccagcaggagaccctgcacgtgcaggagagattcgtggccggcagcctggccggcgccaccgcccagaccatcatctaccccatggaggtgctgaagaccagactgaccctgagaagaaccggccagtacaagggcctgctggactgcgccagaagaatcctggagagagagggccccagagccttctacagaggctacctgcccaacgtgctgggcatcatcccctacgccggcatcgacctggccgtgtacgagaccctgaagaactggtggctgcagcagtacagccacgacagcgccgaccccggcatcctggtgctgctggcctgcggcaccatcagcagcacctgcggccagatcgccagctaccccctggccctggtgagaaccagaatgcaggcccaggacgtgagcgtgtacaagaccgacaccgtgcccaccctgatcgagctgaccggcagaagaggcagaaagatgctgaacaagagcttctggaactag

SEQ ID NO: 214719 - DNA, 1407 bp, Artificial Sequence
  derived and/or modified sequence
atgaggggctcgccaggggacgccgagagacgccaacgctggggtagattatttgaagagctggatagtaacaaggacggtagggtagatgtgcatgagttacggcagggcctggcccgcctgggaggaggaaacccagatcctggcgctcagcaaggcattagctcggaaggcgacgcagatcccgacgggggtctggacctcgaggagtttagccgttacttacaagagagagaacagagactcttacttatgttccactcattggacaggaatcaggatgggcatattgacgtctcagaaatccagcagtcctttagggccctcggaattagtatctcattagagcaggctgaaaagatcctccatagcatggacagggatggcaccatgacaatcgactggcaggaatggagagatcattttctgttgcactccctagagaatgttgaggacgtactgtacttttggaagcattctacagtgctagacatcggcgagtgtttaactgtcccggacgagttttctaaacaagaaaagcttaccggaatgtggtggaaacagctggttgccggtgccgtggccggggcggtgtcaagaaccggcactgctccactagacagattgaaggtgtttatgcaagtgcacgcttcaaaaactaatcgactcaacatcttaggcgggttaaggtcaatggtgctggaaggagggatcagaagcctttggagaggaaacggaattaatgtgcttaaaatcgcaccggagtcagccattaaattcatggcctatgagcagattaaacgcgcaatcttggggcaacaagaaacgttacatgtccaagagcggtttgtggccgggtctctcgcaggggctaccgcccagaccatcatctaccctatggaagtccttaagactcgcttaacgttgcgcagaaccggccaatataaaggcctcctggattgcgcaaggaggatattagaaagagagggcccaagagctttttatcgaggatatctgccaaacgtgttaggtatcattccatacgccggaatcgaccttgcggtttacgagacgttgaagaactggtggctccaacagtattcgcatgactctgccgaccccggcattctggtcctcctagcctgtgggacaatctcatctacgtgtggccagatcgctagctatcctctcgctctggtgaggacgcgaatgcaggcccaggcctccattgagggaggcccacagctgagcatgttaggtctgttaaggcacattttgagtcaggaaggtatgcgcgggctgtacagagggatcgcccctaatttcatgaaggtgattcccgcagtgagtatttcctatgtggtctacgagaatatgaagcaggccctcggcgtgacttctcgctag

SEQ ID NO: 214720 - DNA, 1317 bp, Artificial Sequence
  derived and/or modified sequence
atgaggggttccccgggtgacgctgaaaggaggcagagatgggggcggcttttcgaggagctagactcgaataaggatggacgcgtggatgtccatgagcttcgccaaggcttggctcgcctcggaggaggcaatccggatcctggagcccaacagggcatcagtagtgagggcgatgcggatcctgatggtggccttgacttagaggagttttccagataccttcaggaaagggagcagcgactgttgctgatgttccacagtctggaccggaaccaggatggacatattgatgtcagtgagatacagcagagcttccgcgccctaggaataagtatttcccttgaacaggcggagaaaatcttgcactccatggatcgagacggcaccatgaccatcgattggcaggaatggcgggaccactttctcctgcattcactcgagaacgtagaggatgtgctgtatttctggaagcactcaactgtgctggatattggagagtgcctgaccgtgccagatgaattcagtaaacaggaaaagcttaccggcatgtggtggaaacagctggtcgctggtgcggtggcaggagctgtgagcagaaccggaaccgcccctcttgatagacttaaagtgtttatgcaggtgcacgcctctaagaccaatagattgaatatcctgggtgggcttcgctcgatggtgctggaaggcggcatccgctcactatggaggggaaacggcatcaacgtcctcaaaatagcccctgaatccgcgattaaatttatggcgtacgagcagattaagagggccatactcgggcagcaggaaaccctgcatgtgcaggagcgattcgttgcggggagcttggctggcgctacggcacagaccataatctacccgatggaggtgctaaagacacgccttacacttcgcagaaccggacagtataaaggactcctggattgcgcccggcggatccttgaaagggaaggtccaagggcattctatagagggtatctgcctaacgttctgggcattattccttatgctggcatagatttagccgtgtatgagacactgaagaattggtggctccagcagtattctcacgattctgccgaccccgggatcctggtactgctggcctgtggcaccatcagtagcacatgcggccaaatagctagctatcctctggctctagtgcgcactcggatgcaggcacaggatgtctcagtctacaaaacagataccgtgccgacactgattgagttgacaggccggagaggcaggaagatgctaaacaaatcgttttggaattag

SEQ ID NO: 214721 - DNA, 1407 bp, Artificial Sequence
  derived and/or modified sequence
atgaggggcagccctggagatgctgagcggcggcagcgctggggccgcctgtttgaggagctggacagcaacaaggatggccgggtggatgtgcatgagctgcggcagggcctggcccggctgggcggcggcaacccagaccccggggcccagcagggcatcagcagtgaaggagatgctgaccctgatggcggcctggacctggaggagttcagccgctacctgcaggagcgggagcagaggctgctgctgatgttccacagcctggacaggaaccaggacggccacattgatgtgtctgagatccagcagagcttccgggccctgggcatcagcatcagcctggagcaggccgagaagatcctgcacagcatggacagagatggcaccatgaccatcgactggcaggagtggagggaccacttcctgctgcacagcctggagaatgtggaggatgtgctgtacttctggaagcacagcacagtgctggacattggagaatgtctgactgtgcctgatgagttcagcaagcaggagaagctgaccggcatgtggtggaagcagctggtggccggggctgtggccggggctgtgtccaggactggaacagcccccctggaccggctgaaggtgttcatgcaggtgcacgccagcaagaccaaccggctgaacatcctgggcggcctgcgctccatggtgctggagggcggcatccgcagcctgtggagaggaaatggcatcaacgtgctgaagatcgcccctgagagcgccatcaagttcatggcctatgagcagatcaagagggccatcctgggccagcaggagaccctgcacgtgcaggagagatttgtggccggcagcctggccggggccacagcccagaccatcatctaccccatggaggtgctgaagacccggctgaccctgcggaggacaggccagtacaagggcctgctggactgtgcccggcgcatcctggagcgggagggcccccgggccttctaccggggctacctgcccaacgtgctgggcatcatcccctatgccggcatcgacctggccgtgtatgagaccctgaagaactggtggctgcagcagtacagccatgattctgctgaccccggcatcctggtgctgctggcctgtggcaccatcagcagcacctgtggccagatcgccagctaccccctggccctggtgaggaccaggatgcaggcccaggccagcattgagggcggcccccagctgtccatgctgggcctgctgcggcacatcctgagccaggagggcatgaggggcctgtaccggggcatcgcccccaacttcatgaaggtgatcccagctgtgtccatctcctatgtggtgtatgagaacatgaagcaggccctgggcgtgaccagcaggtag

SEQ ID NO: 214722 - DNA, 1317 bp, Artificial Sequence
  derived and/or modified sequence
atgaggggcagccctggagatgctgagcggcggcagcgctggggccgcctgtttgaggagctggacagcaacaaggatggccgggtggatgtgcatgagctgcggcagggcctggcccggctgggcggcggcaacccagaccccggggcccagcagggcatcagcagtgaaggagatgctgaccctgatggcggcctggacctggaggagttcagccgctacctgcaggagcgggagcagaggctgctgctgatgttccacagcctggacaggaaccaggacggccacattgatgtgtctgagatccagcagagcttccgggccctgggcatcagcatcagcctggagcaggccgagaagatcctgcacagcatggacagagatggcaccatgaccatcgactggcaggagtggagggaccacttcctgctgcacagcctggagaatgtggaggatgtgctgtacttctggaagcacagcacagtgctggacattggagaatgtctgactgtgcctgatgagttcagcaagcaggagaagctgaccggcatgtggtggaagcagctggtggccggggctgtggccggggctgtgtccaggactggaacagcccccctggaccggctgaaggtgttcatgcaggtgcacgccagcaagaccaaccggctgaacatcctgggcggcctgcgctccatggtgctggagggcggcatccgcagcctgtggagaggaaatggcatcaacgtgctgaagatcgcccctgagagcgccatcaagttcatggcctatgagcagatcaagagggccatcctgggccagcaggagaccctgcacgtgcaggagagatttgtggccggcagcctggccggggccacagcccagaccatcatctaccccatggaggtgctgaagacccggctgaccctgcggaggacaggccagtacaagggcctgctggactgtgcccggcgcatcctggagcgggagggcccccgggccttctaccggggctacctgcccaacgtgctgggcatcatcccctatgccggcatcgacctggccgtgtatgagaccctgaagaactggtggctgcagcagtacagccatgattctgctgaccccggcatcctggtgctgctggcctgtggcaccatcagcagcacctgtggccagatcgccagctaccccctggccctggtgaggaccaggatgcaggcccaggatgtgtctgtgtacaagacagacacagtgcccaccctgattgagctgaccggccggcggggcaggaagatgctgaacaagagcttctggaactag

SEQ ID NO: 214723 - DNA, 1407 bp, Artificial Sequence
  derived and/or modified sequence
atgcggggcagccccggcgacgccgagcggcggcagcggtggggccgcctttttgaggagctggacagcaataaggatggcagagtcgacgtccacgagctcaggcagggcctggcgcggctcggcggcggaaatccggatcccggcgctcagcagggcatctctagcgaaggcgatgccgatcctgacggcggcctggacttggaggaattctctcgctatttacaggaacgagaacagagactgctgctgatgttccatagcctggaccgcaaccaggacggccacatagacgtgagcgaaatccaacaatcattccgggctctgggcataagtattagcttagaacaggctgagaagattttacacagcatggacagagacggaactatgaccattgactggcaagaatggagagatcatttcttactgcactccctggaaaacgtggaggacgtgctgtacttttggaagcactccacggtcttggacataggcgaatgcctcacagtgcctgatgagttctctaagcaagaaaagttgacaggcatgtggtggaaacagctggtcgctggtgctgttgccggggcagtgtcaaggacaggcacagctcctctcgacaggcttaaagtgtttatgcaggtgcatgcctccaaaacaaacaggctgaacatactgggggggttgcgatcaatggttctggaaggcggaatacggtccctctggaggggtaacggaatcaacgtcctcaaaattgccccagaaagcgcaattaagtttatggcctatgaacagattaaacgagccatcctgggccaacaggagaccttacatgtccaggaaagatttgtggcaggatcattagcaggagctaccgcccagactatcatttatcccatggaagtcctcaagacacgacttaccctcaggagaacgggacagtacaaggggctgctcgattgcgcacgtcgtattctggagcgcgaagggcccagggccttctatcgaggatacctgccaaatgtgctgggaataatcccatatgccgggatcgatctggcagtgtacgagactttgaagaactggtggttgcagcagtactctcacgattcagccgatcccgggatcttggttctcctggcgtgcggtactatcagctcaacctgtggtcaaattgccagctatcctctggctttggtgcgtaccaggatgcaggcccaggctagtattgagggcggtcctcagctgtctatgctaggactcctacgccacatcctgagtcaggaaggtatgcgcgggctgtacaggggaatcgctcctaacttcatgaaagtaatccccgccgtatctatttcctatgtggtctatgagaacatgaaacaagccctcggtgttacatcccggtag

SEQ ID NO: 214724 - DNA, 1317 bp, Artificial Sequence
  derived and/or modified sequence
atgcggggcagccccggcgacgccgagcggcggcagcggtggggccgccttttcgaagaattggattcaaataaagacggccgcgttgatgtgcatgagctccgccagggtctggctcgattaggtggagggaaccctgatccgggcgcacaacaagggatttcctcggagggggatgccgacccggacggaggtctggatttagaggagttttctaggtacctccaggagcgtgagcaacgcctgctgttgatgttccactccttggatcgcaaccaggacggtcatattgacgtttccgagatccagcagtctttccgagcactcgggatcagtattagcctggaacaagccgagaaaatcctgcactctatggacagggatggtacaatgaccatagattggcaggaatggagggaccacttcctgttacatagtctcgagaacgtggaggatgttctctatttctggaagcacagcaccgtgcttgacattggggaatgcctgactgtgccagacgaatttagcaagcaggaaaaattgacgggaatgtggtggaaacagctcgttgccggcgctgtggctggcgcagtatccagaaccgggacagctccactcgacagactcaaagtcttcatgcaggtgcatgcctccaagactaatcggctcaatatcctaggcggattacgatcaatggtgctggagggcgggatacgcagcttatggcggggcaatgggattaatgtgctgaaaattgctcccgaatctgctattaaattcatggcgtacgagcagattaaaagggcaatcctgggacagcaggaaacgcttcacgtccaggaacggttcgtggccgggtcgcttgctggggccaccgcacaaaccatcatctatcctatggaggtgttgaagactaggctgacactgcgcaggaccggccagtacaaaggacttctcgactgtgcacgccggatcctggagcgagaaggtcctcgcgccttctatcgggggtacctgccaaacgtactgggaatcatcccatacgcaggtatcgatcttgccgtgtacgagacactgaagaactggtggctgcagcagtatagtcatgatagtgctgaccctggcattctcgtgctgctggcttgtggcactatatcctcaacatgcggccaaattgcaagttatccattggctcttgttaggaccaggatgcaggcccaggatgtgtcagtgtacaaaaccgacaccgtgcctacgttgatcgagctaacaggacggcgcggcaggaaaatgctcaacaagtcattctggaactag

SEQ ID NO: 214725 - DNA, 1407 bp, Artificial Sequence
  derived and/or modified sequence
atgcggggttcacccggtgatgctgagaggagacagcgatggggccgactctttgaggaattggactccaacaaggacgggcgagtggatgtgcatgaacttaggcaggggctggcaaggttgggcggagggaatcccgatccaggagcccagcagggtattagcagtgagggtgatgccgaccccgatggcggtctcgatttagaagagtttagccgataccttcaggaaagagaacaacggctgctgctcatgttccattcgctggataggaaccaagacggccatattgatgtgtccgagattcagcaatccttccgtgcgctggggattagtatttccttagagcaagccgagaaaatcctgcactcaatggatcgcgacgggacaatgacaatcgactggcaagaatggcgcgatcactttctcctacattctctcgagaatgtggaggatgtgttgtacttctggaagcactccacagtactggatatcggcgaatgtctgaccgtgccagatgaattcagcaaacaggaaaaactgaccgggatgtggtggaaacagctagttgcaggcgcagtggctggagctgtttctaggaccggaacagctcctctggatcgcctgaaagtcttcatgcaagtccacgcatcaaagaccaatagactcaacatactggggggactgcgttccatggtgcttgagggtgggatcagaagcctttggcgcggtaatgggataaacgtgttgaaaattgctcccgagtcagccattaagttcatggcttatgagcagatcaagcgtgcgatcctgggtcagcaggagacccttcacgtgcaggagcgtttcgtggctggctctctggccggagccaccgcccaaactattatttaccccatggaagtgctcaaaacccgcctgacactgaggaggaccggtcagtataaagggcttctggactgcgcccgtaggattctggagagggaaggcccaagggcattttacaggggttaccttccaaatgttctgggcattatcccctacgcaggaatagacctggctgtttatgaaactctgaaaaactggtggctacagcagtattcccacgactcagcagaccctggcatccttgtgctgctggcctgtgggacaatttccagtacctgtgggcagatcgccagctatcccctggcacttgtacggactagaatgcaagcacaggcctcaattgagggtggccctcaactctccatgcttgggctgctgaggcatatcttgagccaggagggcatgcggggattgtaccgcggtatcgcacccaactttatgaaggtgattcctgcggtttccatctcctacgtcgtctacgaaaacatgaagcaggcactgggagtgacgtcaaggtag

SEQ ID NO: 214726 - DNA, 1317 bp, Artificial Sequence
  derived and/or modified sequence
atgcggggatcgcccggtgacgcggaacgccgacagaggtggggccgtctattcgaagaactcgactctaacaaagatggtcgcgtagatgtgcacgagctccgacagggactggccaggttggggggtggcaaccccgaccccggtgcccaacaggggatatcctctgaaggggatgctgaccccgatggaggcttggacctagaagagttctcaaggtacctccaagagcgtgaacaacgtttgcttctcatgtttcactcgcttgatcgaaaccaggacggccacattgacgtgtcagagattcagcagtcttttagggcgctcgggatatccatttccttagaacaagccgagaagattctacatagtatggacagggacgggacgatgaccatagattggcaggagtggagagatcactttcttttgcattcccttgaaaacgtggaggatgttctgtacttttggaaacactcaaccgttctcgatattggtgagtgtctaacagtcccggatgagttttccaagcaggaaaagttgactggtatgtggtggaagcaattagtcgcgggagctgtggcaggcgcagtgtccaggaccgggaccgcgcctctagataggttaaaggtgtttatgcaagtgcacgcctcaaagacgaataggctcaatatactcggaggattgaggtcaatggtccttgaagggggaattcgtagtctgtggaggggaaacggcattaatgtgctcaaaattgccccagagtccgctatcaagttcatggcttacgagcagattaaacgcgctatactgggacagcaggaaaccctgcatgtgcaagaaaggtttgtggccggaagcctagcaggtgcaaccgcacaaacaatcatttatccaatggaagttctgaagactcgcttgacactccgccgtacggggcagtataagggcctgctggattgtgccagacggatcctggagagagaagggcctcgggctttttaccgtggctacctgccaaatgtgctggggatcatcccctacgccggaattgatctagcagtgtacgaaaccctgaaaaattggtggttgcagcagtacagccatgatagcgcagaccctgggatccttgtgctgctcgcctgcggcacgatctcctctacatgcggccagattgccagctacccccttgcactggtaaggacaaggatgcaggcacaggacgtgtccgtgtataagacagatactgtgcccacactgatcgagctaaccgggagaagaggcaggaagatgttgaataagtccttttggaactag

SEQ ID NO: 214727 - DNA, 3460 bp, Artificial Sequence
  derived and/or modified sequence
agagccgagcggactgcgcggaggctgcggagccggcggccgcgggagctgaccctgcggggtcccggggggggagggggagccgcgaagcccccactgaggccgccgctgccgggcctcccctcccccccgggcgggcgccatgcgggggagcccgggcgacgcggagcggcggcagcgctggggtcgcctgttcgaggagctggacagtaacaaggatggccgcgtggacgtgcacgagttgcgccaggggctggccaggctgggcgggggcaacccagaccccggcgcccaacagggtatctcctctgagggtgatgctgacccagatggcgggctcgacctggaggaattttcccgctatctgcaggagcgggaacagcgtctgctgctcatgtttcacagtcttgaccggaaccaggatggtcacattgatgtctctgagatccaacagagtttccgagctctgggcatttccatctcgctggagcaggctgagaaaattttgcacagcatggaccgagacggcacaatgaccattgactggcaagaatggcgcgaccacttcctgttgcattcgctggaaaatgtggaggacgtgctgtatttctggaagcattccacggtcctggacattggcgagtgcctgacagtgccggacgagttctcaaagcaagagaagctgacgggcatgtggtggaaacagctggtggccggcgcagtggcaggtgccgtgtcacggacaggcacggcccctctggaccgcctcaaggtcttcatgcaggtccatgcctcaaagaccaaccggctgaacatccttggggggcttcgaagcatggtccttgagggaggcatccgctccctgtggcgcggcaatggtattaatgtactcaagattgcccccgagtcagctatcaagttcatggcctatgaacagatcaagagggccatcctggggcagcaggagacactgcatgtgcaggagcgcttcgtggctggctccctggctggtgccacagcccaaaccatcatttaccctatggaggtgctgaagacgcggctgaccttgcgccggacgggccagtataaggggctgctggactgcgccaggcgtatcctggagagggaggggccccgtgccttctaccgcggctacctccccaacgtgctgggcatcatcccctatgcgggcatcgacctggccgtctacgagactctgaagaactggtggcttcagcagtacagccacgactcggcagacccaggcatcctcgtgctcctggcctgcggtaccatatccagcacctgcggccagatagccagttacccgctggccctggtccggacccgcatgcaggcacaagcctccatcgagggtggcccccagctgtccatgctgggtctgctacgtcacatcctgtcccaggagggcatgcggggcctctaccgggggatcgcccccaacttcatgaaggttattccagctgtgagcatctcctatgtggtctacgagaacatgaagcaggccttgggggtcacgtccaggtgagggacccggagcccgtccccccaatccctcaccccccacacctcagccactggagactgatgatccaaccacaggatccctactctttggccacgagatcccagtacccagatcctggatcctagactcctatgccccaaccattgggtcatgggatcccagcatccagatcctggatcctagactcctatgccccaaccactgggtcatgcgatccccacccttcagccactagatcccagatccccctgtaaccataactgtggatcccttacttcagcaactcaagtctgctaccctaaccacaagattcaagattatccacaccccagcccttaatccccatcccccaaatcactggatcctgcagccccacatcctaaggtggatcccacgcttccctgtgccccctactggatcctggacctctacgtcttaaccactggatcccacacaaatcagtgaatggatcccaacaccccaaccacaggagcacggattccctgtacctcaacacccagaccctgcctccctcaggcaccagatccagtgtcctagtgaaacgctggatcctagatccccaaccccagatccccatgcctcgagccctggatctccaagctcagctgctggattctggatgtcaacaaacctcaccactggatcctgacaaccacaatgcctggatcctggggcccccatcactggatcccagatcccctcactccacccactggattcctgcattggtttttggttttttgtttttttttaacctcgacactgggtctcagatccttctgctgactgccagatccctgcatttcaagcactacgccttccacccccaggcactggatcccagattcccaagccttcacccaccagattctggctcctaaaacaagtgcgggggccccagtggcacagcaagtggatcctggcaactgcagctgctggattccagattctgggtccccaatccctctgcccagtccctcaatgttgaaacctcatctcttgaaggcagatcctgatattccaaggcactgaatcccaagccctgaatccccggtttctgatctgaatcttccaggcgccgggtcccaaatgttcaggccccaagtctagatcctggcagcccagtcacagagtatcccacacacactggtgcccagagccggcttctcatgacatgaaattgcatggtcgagggagtctgtggggaaggaagcccaggtcctggctgcaacctgcacggatgctggattccccctcaccccacctctgcatggccaccccctcccagccctgtggggaaactgttccctggaaccactccactccctgcatccccacacttcacagcatcttccatccccctcccaccttctaggcgaatagtccccagagctgtgttcctccaaggggtccgaggaatcactcactcctggaggctggcaaggagacagtctgaggccagggacacatgaagggatgtccccaccccagcactatcagggcctccccaggcttccagagttgaaagccaggagaaaatcggcaaagaccacccttccctaaacccaagcacccaatgatgcaaaaaacaaaaacaaaaaaaaaccaccaaatccccaaattcattccagatctatttttctaccagagagaggagcaaagtcctcctcccctgcgcccttacattctgcacttcatagttggattctgagcttaggatcatctggagaccccatggagggacttggaaaggggaactgggatttggggaggggctggaggacttccgcacgcttccacctccttcgacctccactgcgccccacctccctgcctgtgtgtgttatttcaaaggaaaagaacaaaaggaataaattttctaagctcttt

SEQ ID NO: 214728 - DNA, 1440 bp, Artificial Sequence
  derived and/or modified sequence
ggaggctgcggagccggcggccgcgggagctgaccctgcggggtcccggggggggagggggagccgcgaagcccccactgaggccgccgctgccgggcctcccctcccccccgggcgggcgccatgcgggggagcccgggcgacgcggagcggcggcagcgctggggtcgcctgttcgaggagctggacagtaacaaggatggccgcgtggacgtgcacgagttgcgccaggggctggccaggctgggcgggggcaacccagaccccggcgcccaacagggtatctcctctgagggtgatgctgacccagatggcgggctcgacctggaggaattttcccgctatctgcaggagcgggaacagcgtctgctgctcatgtttcacagtcttgaccggaaccaggatggtcacattgatgtctctgagatccaacagagtttccgagctctgggcatttccatctcgctggagcaggctgagaaaattttgcacagcatggaccgagacggcacaatgaccattgactggcaagaatggcgcgaccacttcctgttgcattcgctggaaaatgtggaggacgtgctgtatttctggaagcattccacggtcctggacattggcgagtgcctgacagtgccggacgagttctcaaagcaagagaagctgacgggcatgtggtggaaacagctggtggccggcgcagtggcaggtgccgtgtcacggacaggcacggcccctctggaccgcctcaaggtcttcatgcaggtccatgcctcaaagaccaaccggctgaacatccttggggggcttcgaagcatggtccttgagggaggcatccgctccctgtggcgcggcaatggtattaatgtactcaagattgcccccgagtcagctatcaagttcatggcctatgaacagatcaagagggccatcctggggcagcaggagacactgcatgtgcaggagcgcttcgtggctggctccctggctggtgccacagcccaaaccatcatttaccctatggaggtgctgaagacgcggctgaccttgcgccggacgggccagtataaggggctgctggactgcgccaggcgtatcctggagagggaggggccccgtgccttctaccgcggctacctccccaacgtgctgggcatcatcccctatgcgggcatcgacctggccgtctacgagactctgaagaactggtggcttcagcagtacagccacgactcggcagacccaggcatcctcgtgctcctggcctgcggtaccatatccagcacctgcggccagatagccagttacccgctggccctggtccggacccgcatgcaggcacaagatgtgtcagtgtacaagacggacacggtccccaccctcatagagctcacaggccggagaggaaggaagatgctaaataaatcattctggaattaa

SEQ ID NO: 214729 - protein, 488 aa, Artificial Sequence
  derived and/or modified sequence
MAGKGSSGRRPLLLGLLVAVATVHLVICPYTKVEESFNLQATHDLLYHWQDLEQYDHLEFPGVVPRTFLGPVVIAVFSSPAVYVLSLLEMSKFYSQLIVRGVLGLGVIFGLWTLQKEVRRHFGAMVATMFCWVTAMQFHLMFYCTRTLPNVLALPVVLLALAAWLRHEWARFIWLSAFAIIVFRVELCLFLGLLLLLALGNRKVSVVRALRHAVPAGILCLGLTVAVDSYFWRQLTWPEGKVLWYNTVLNKSSNWGTSPLLWYFYSALPRGLGCSLLFIPLGLVDRRTHAPTVLALGFMALYSLLPHKELRFIIYAFPMLNITAARGCSYLLNNYKKSWLYKAGSLLVIGHLVVNAAYSATALYVSHFNYPGGVAMQRLHQLVPPQTDVLLHIDVAAAQTGVSRFLQVNSAWRYDKREDVQPGTGMLAYTHILMEAAPGLLALYRDTHRVLASVVGTTGVSLNLTQLPPFNVHLQTKLVLLERLPRPS

SEQ ID NO: 214730 - DNA, 1467 bp, Artificial Sequence
  derived and/or modified sequence
atggctgggaagggcagcagcgggcgacggccattgctgttaggcctcctcgtagctgtggccactgtgcatctcgtgatttgtccctacacaaaggttgaggagagttttaacctccaggccacacacgacctcctgtaccattggcaagatctagagcaatatgaccatctggagtttcctggagtggttcctagaacgtttctgggtccagtagttatcgccgtattttctagtcctgctgtgtatgtgctgtccctcctggaaatgtcaaaattttacagccagcttatcgtccgcggcgtactgggcctgggcgtgatctttggtctgtggaccctgcagaaggaggtgcgacgacactttggcgccatggtcgccacaatgttctgttgggtcacggccatgcagttccacctcatgttttactgcactagaacattacccaatgtgcttgcactccccgtggtgcttttggcactcgctgcttggctgagacacgagtgggcaaggtttatttggttatctgcattcgccatcattgtgtttagggtggagttgtgtctatttcttggcttacttctgctgttggccctgggaaatcggaaggtaagcgtggtccgcgcactcaggcatgctgtgcccgcaggcattctctgcttgggcctgacggtggcagtcgactcctacttctggaggcagttgacatggccagagggcaaggtgctttggtacaatacagtgctgaataagtccagcaactggggaacaagtccgttgctttggtatttctattccgcgctacccagaggactgggctgtagcctgttgtttattccccttggactggtagaccgtaggacccatgcacccacagtgctggcgcttggctttatggctttatatagcctactcccccataaggaactgaggtttatcatttatgccttccccatgctcaacatcactgctgcccggggttgctcatatctgctgaacaactataaaaagagctggctctataaggctggttccctgctagtcatcgggcaccttgtcgtaaacgccgcctatagtgccaccgctctatacgtgagtcactttaactacccaggaggcgtcgctatgcaacggctccatcagttggtaccccctcagaccgatgtcctgttgcatatcgacgttgctgctgcccagaccggagtgagtaggtttctgcaagtgaactccgcttggaggtatgacaagagggaggacgtgcagcctggaaccggcatgctggcttacacgcatatactgatggaagctgctcccgggctgctggcactctatagggatacacatagggtgcttgcctcagtggtaggaaccactggcgtttctctaaacctcacccagctgccacctttcaatgtgcacttgcagaccaaactggttttgctcgagcgtctgccccggccctcttag

SEQ ID NO: 214731 - DNA, 987 bp, Artificial Sequence
  derived and/or modified sequence
atgccaccgactcagccgaggccctgtatgtgtcccatttctactacccaggttgcatcacagtgccgtggctgcacgagctggtgccctcctcgccagacttctttctgtacccttacttggcagcccccgagacaggtctgccttgggttttccaagagcactgcaccaggtggcactactcggggaagaatgtgttccagagggcaggcctgctggcacacccacaccagctcatggcgtcgcccttgggcacctggacctctacaagggcacacacccggacccggccaacgccggggcgaccacaggtgtgaatcggagcctgatcctactgcaccactgcagcggcccccagcagacaaagccggagctagtggggaggcccctccagccgttctacggggaacccgacagccgagtgctgctaccgggctgcccggtgcagttataaccactagcttttggcacaactctagtacaatcatgactatacagcgaagtaagtcgaaagattgggctccagctagtgacagacaccagacccggagtcgtgccagctcaaccgcctcagctggcgccttatctaccaaggagcgaggcgctcaggtccttctggcgccccgtgagcctctgccacgcgttatggtggcatcctccgggcttccggcaggagactgtcgccccgaccaggtgcccttcatgaccaaccaggaacagcgcgcgcaccctggcacctgtctccctggagggcatgtgtgcccagcccacccgggtggcgccgtcttttggcagcaccctaccctcgcagcccggggcccactcggggctccaaaaaccgcccctccactcagaggggatcacggggggcccggccgcactccaccaccctggtgccaccactgcaatttctgtatccaccggcatcctatctccatcactgacaagatactgggggacaaacatatccagaaaggaatgaggtag

SEQ ID NO: 214732 - DNA, 1467 bp, Artificial Sequence
  derived and/or modified sequence
atggccggcaagggcagcagtggaagaagacccctgctgctgggcctgctggtggccgtggccaccgtgcacctggtgatctgcccctacaccaaggtggaggagagcttcaacctgcaggccacccatgacctgctgtaccactggcaggacctggagcagtatgaccacctggagttccctggggtggtgcccaggaccttcctgggccctgtggtgattgctgtgttcagcagccctgctgtgtatgtgctgagcctgctggagatgagcaagttctacagccagctgattgtgcggggcgtgctgggcctgggcgtcatcttcggcctgtggaccctgcagaaggaggtgagaagacactttggagccatggtggccaccatgttctgctgggtgacagccatgcagttccacctgatgttctactgcaccaggaccctgcccaacgtgctggccctgcctgtggtgctgctggccctggccgcctggctgcggcatgagtgggcccgcttcatctggctgagcgcctttgccatcatcgtgttccgggtggagctgtgcctcttcctgggcctgctgctgctgctggccctgggcaacaggaaggtgtctgtggtgcgggccctgcggcatgctgtgcctgctggcatcctgtgcctgggcctgactgtggccgtggacagctacttctggaggcagctgacctggccagagggcaaggtgctgtggtacaacacagtgctgaacaagagcagcaactggggcaccagccccctgctgtggtacttctacagcgccctgccccggggcctgggctgcagcctgctcttcatccccctgggcctggtggacaggaggacccacgcccccaccgtgctggccctgggcttcatggccctgtacagcctgctgccccacaaggagctgcgcttcatcatctatgccttccccatgctgaacatcacagctgcccggggctgcagctacctgctgaacaactacaagaagtcctggctgtacaaggccggcagcctgctggtgattggccacctggtggtgaatgctgcctacagcgccacagccctgtatgtgagccacttcaactacccaggaggagtggccatgcagaggctgcaccagctggtgcccccccagacagatgtgctgctgcacattgatgtggccgccgcccagacaggagtgagccgcttcctgcaggtgaacagcgcctggaggtatgacaagcgggaggatgtgcagcccggcaccggcatgctggcctacacccacatcctgatggaggccgcccctggcctgctggccctgtacagagacacccaccgggtgctggcctctgtggtgggcaccaccggggtgtccctgaacctgacccagctgccccccttcaacgtgcacctgcagaccaagctggtgctgctggagcggctgccccggcccagctag

SEQ ID NO: 214733 - DNA, 1467 bp, Artificial Sequence
  derived and/or modified sequence
atggccggcaagggcagcagcggccggcggcccctgctgctgggcttattggtagctgtggccactgtacacctggtgatctgcccgtacacgaaggttgaagagtcctttaacctacaagctacccacgatctcctgtatcactggcaagatcttgagcagtacgaccacctcgagtttccaggcgttgttccaagaacctttctcggacccgtggttattgctgtttttagctctccggccgtgtacgttcttagcttactagaaatgagtaaattttactcacagctgattgtgcgaggtgtgctcggacttggcgtgatctttggactctggaccctccaaaaagaagtcaggcgacatttcggtgccatggtggcaacaatgttctgctgggtgacagccatgcagttccacttgatgttttactgtactcgcacactgcccaatgtgttggctctccccgtcgtgctgttggctctcgcggcttggctgagacatgagtgggcgaggttcatctggctgagcgcatttgcaataattgtgttcagagtggagctctgtctgttcctcggtctattgcttctcctggctctaggcaatcggaaggtttcagttgtacgagcccttaggcatgcagtgcccgcggggatcctgtgcttggggctgactgtggccgtcgacagctacttctggcgtcaactgacgtggccggagggaaaggttctctggtataacaccgtgctgaacaagagctccaactgggggacaagtccgttattgtggtatttttattcagctctgccacggggcctgggttgttccctgctgttcattccactcggcttggttgacaggcggactcatgcacccacggtgctggcactgggcttcatggcgctctactccttacttccccacaaggagctgagatttatcatttacgccttcccaatgctcaacattaccgccgcccgcgggtgctcatatttgctgaacaactacaagaagtcatggctttacaaggctggatccctgctggttataggccatctggtcgtcaacgcagcttattctgccaccgccctgtatgtgagccactttaattatcccggcggggtcgcaatgcagaggctacatcagctggttcctcctcaaacagatgtgcttctccacatcgacgttgctgcagcccagactggtgtgtctaggtttttacaagttaactctgcctggcggtatgacaagagagaggacgtgcagcccggcacaggcatgctggcctacacccacattttgatggaagcagcaccaggcctgctcgccctgtacagagacacacatcgcgtattagcaagtgtggttgggactactggcgtatccctgaacctgacccagctgccccccttcaatgtgcacctacaaaccaagcttgtgctgttggagaggctgcctaggccaagctag

SEQ ID NO: 214734 - DNA, 987 bp, Artificial Sequence
  derived and/or modified sequence
atgccccccacccagccccggccctgcatgtgccccatcagcaccacgcaggtggcctcccagtgtcgtggctgcacatcgtggtgccccccgcgccagacatcgttttgcacgctgacttggcaacctccgaggcaagtttgcctgggattctcaaagtctaccgccccaggaggcactacgagaggtagaatgtgctccaggggacaagcctgctggcacactcacacctccagctggcggcgtccctgggcgcccgggcccctgcaggggcataccccaggtcctggacaaagacgaggcgaccatcgctgcgagtccgagcctgacccaacggcacccctgcagagaccacctgcagacaaagctggtgcctccggagaggcgccaccagctgtgttgcgcggaacacggcagccttctgcagcaacaggactgcccggggcagttatcactacctcattctggcacaattcgtctacaattatgactatacagcggtctaaaagtaaggactgggcccctgcctctgatcggcatcagaccaggagccgggctagtagcacagccagtgctggagccctctcaactaaagagaggggggctcaggttctgctcgcgccccgggagccgcttccaagggtgatggtggctagctctggactacctgcaggcgactgtaggcccgaccaggtgccatttatgaccaaccaggagcagagggcccaccccgggacctgcttgccaggggggcatgtatgtcctgcccatcctggaggcgcggtgttctggcagcatcctacgttagcggcccggggccccctgggggcacccaaaacagcaccaccactacggggagaccatggtggcccaggtcgcacccctcctccatggtgtcaccactgcaatttctgcatccacaggcaccctatctctatcacagacaaaattctcggtgataaacacatccagaaagggatgcgctag

SEQ ID NO: 214735 - DNA, 1467 bp, Artificial Sequence
  derived and/or modified sequence
atggccggtaagggcagcagcggaaggcggccactcttgctgggccttttggtcgctgtcgcaaccgtgcacttagttatctgtccgtacactaaggtggaagaatcctttaacctccaggctacgcacgaccttttgtaccattggcaggaccttgagcagtatgaccatctggagtttcctggcgtcgtacccaggacattcctggggccagtggtgattgcagtgttctcaagtcccgcagtctacgtgctgagcctcctcgagatgagcaaattttatagtcaactaattgttcgaggagtgctgggacttggcgtcatctttggcctgtggaccctgcagaaggaggtgcgcagacatttcggcgcaatggtcgctaccatgttctgctgggtgacggcaatgcaattccacctgatgttttactgcaccaggacgctgcctaacgtgcttgcgctgccggtggtcctcttagccctggccgcttggctgaggcatgagtgggcaaggttcatctggctgtcggcgtttgctataatcgtgtttcgtgtggaactatgtttgttccttggtcttctcttattgcttgcattagggaatcggaaagtcagtgtggttagagctttacggcacgccgtgcccgcaggtatcctgtgtctagggctcactgtcgctgtggattcgtacttttggcggcaactgacatggcctgaaggcaaagttctatggtataatactgtgcttaacaaatcttctaattgggggacaagtcctttgctctggtacttctatagcgcgctgcccagagggctgggatgctccctcttatttatacctcttggcctggttgaccgacggacacacgctcctacggtgctcgccctgggcttcatggccttgtatagtctgttacctcataaagagttgcgcttcattatttatgcgtttcccatgttgaatattacagctgcaagagggtgctcatatctgctgaataactataagaagtcctggctctacaaggccggatctttgctcgtgatcggacatcttgtggtgaatgccgcatacagtgctactgctctctacgtatcccattttaactaccccggtggtgtagcgatgcagaggctccaccagctcgttccgcctcagaccgatgtcctcctgcatatagacgttgccgctgcacagactggagtctctcgatttctccaagttaactccgcctggaggtacgacaaaagagaggatgtgcagccagggacagggatgctcgcctacacacacatcctgatggaggctgctcccggactcctggcgctgtaccgcgacacccaccgggtgctcgcttcagtcgtcggcactaccggggtgagcctaaacttgactcagctccccccattcaatgtgcatttgcagactaagcttgtgctgctggagcgcctgccccgtccttcctag

SEQ ID NO: 214736 - DNA, 987 bp, Artificial Sequence
  derived and/or modified sequence
atgccgcctacacagccacgcccttgcatgtgcccgataagtactacgcaggtggcctcccaatgcaggggctgcacgtcttggtgcccacccaggcagacctctttctgtaccctgacatggcagccccctcgccaggtatgtctgggctttagcaagagtacagcaccagggggaaccactagagggcgaatgtgctctaggggccaggcttgttggcatacccatacgagctcctggagacgcccatgggccccaggtcccctgcagggacacacgccaggcccaggacagagacgaggggaccaccggtgtgaatcagaacccgaccccacagccccactacagaggcctcccgctgataaagctggagcttctggagaagccccacccgctgtgctgagaggcactcggcaaccctctgctgccactggactccccggtgccgtaattacaacaagcttttggcataattcctcaacaatcatgacaatccagcgatcaaaatcaaaagactgggcccctgcctcagaccgtcaccagactcgctctagggcttcctctacagcttcagccggagcactgagtactaaggaacgtggagcacaggtgctgctggctcccagggaaccactccccagggtgatggtggcgagctcaggtctacctgccggagattgccggcctgatcaggtgccgtttatgactaatcaggagcaaagggcacacccgggtacgtgtctgccagggggacacgtctgcccagcacacccaggtggcgctgtgttctggcagcaccccactctggctgctagggggcctctgggggcaccaaagactgcgcctcctctgagaggagaccatggcggtccaggcaggactcctcccccttggtgtcatcactgtaacttctgcattcataggcacccaatctctattacagacaagatccttggcgacaaacacatccagaagggaatgcgctag

SEQ ID NO: 214737 - DNA, 2360 bp, Artificial Sequence
  derived and/or modified sequence
gcgcgcagcccgcggcggccatctttactcagggcacagagggtctctgcggccgtagcggccggggctgcggtagccactttagatttgggcaaggactttagattcgggctctgttctgtttccgccgtcctgcttcctgccgaggctggcccaggcagccgcgcttcgaaggacgccgccgggagctgcggagcatgcgtggagtggcagtgctaacggctggtgtctcgcactgttggcctgtgaaggtacgtgaagctgaaagcctggaatggctggaaaggggtcatcaggcaggcggcccctgctgctggggctgctggtggccgtagccactgtccacctggtcatctgtccctacaccaaagtggaggagagcttcaacctgcaggccacacatgacctgctctaccactggcaagacctggagcagtacgaccatcttgagttccccggagtcgtccccaggacgttcctcgggccagtggtgatcgcagtgttctccagccccgcggtttacgtgctttcgctgttagaaatgtccaagttttactctcagctaatagttagaggagtgcttggactcggcgtgatttttggactctggacgttacaaaaggaagtgagacggcacttcggggccatggtggccaccatgttctgctgggtgacggccatgcagttccacctgatgttctactgcacgcggacactgcccaatgtgctggccctgcctgtagtcctgctggccctcgcggcctggctgcggcacgagtgggcccgcttcatctggctgtcagccttcgccatcatcgtgttcagggtggagctgtgcctgttcctgggcctcctgctgctgctggccttgggcaaccgaaaggtttctgtagtcagagcccttcgccacgccgtcccggcagggatcctctgtttaggactgacggttgctgtggactcttatttttggcggcagctcacttggccggaaggaaaggtgctttggtacaacactgtcctgaacaaaagctccaactgggggacctccccgctgctgtggtacttctactcagccctgccccgcggcctgggctgcagcctgctcttcatccccctgggcttggtagacagaaggacgcacgcgccgacggtgctggcactgggcttcatggcactctactccctcctgccacacaaggagctacgcttcatcatctatgccttccccatgctcaacatcacggctgccagaggctgctcctacctgctgaataactataaaaagtcttggctgtacaaagcggggtctctgcttgtgatcggacacctcgtggtgaatgccgcctactcagccacggccctgtatgtgtcccatttcaactacccaggtggcgtcgcaatgcagaggctgcaccagctggtgcccccccagacagacgtccttctgcacattgacgtggcagccgcccagacaggtgtgtctcggtttctccaagtcaacagcgcctggaggtacgacaagagggaggatgtgcagccggggacaggcatgctggcatacacacacatcctcatggaggcggcccctgggctcctggccctctacagggacacacaccgggtcctggccagcgtcgtggggaccacaggtgtgagtctgaacctgacccaactgccccccttcaacgtccacctgcagacaaagctggtgcttctggagaggctcccccggccgtcctgagggggaccaggcagccctcagcagccacaggccttccaggagctgttatcactaccagtttctggcacaattccagcacaattatgacaattcagagaagcaagtcaaaggactgggcacctgcctctgacagacaccagaccaggtccagggcctcctccacagcctcagctggggctctcagcaccaaagaacgaggggcccaggtcttgttggcaccccgggagccactgcccagggtgatggtggccagctcagggcttcctgcgggtgactgtcgcccagaccaggtgccattcatgactaatcaggagcagcgggctcacccaggcacctgtctgccaggaggccacgtgtgtcctgcccacccagggggagctgtattttggcagcaccccacgcttgctgcccgagggcctcttggggcacctaagacagcaccccctctcaggggagaccatggtggccccggccgcacccccccaccctggtgccaccactgcaacttttgtattcacaggcatcccatctccatcacagataaaatcttaggagataaacacattcaaaaaggaatgagataaaaagaataaggcaataaatgttgattggaacctct

SEQ ID NO: 214738 - DNA, 1488 bp, Artificial Sequence
  derived and/or modified sequence
ggcaaccgaaaggtttctgtagtcagagcccttcgccacgccgtcccggcagggatcctctgtttaggactgacggttgctgtggactcttatttttggcggcagctcacttggccggaaggaaaggtgctttggtacaacactgtcctgaacaaaagctccaactgggggacctccccgctgctgtggtacttctactcagccctgccccgcggcctgggctgcagcctgctcttcatccccctgggcttggtagacagaaggacgcacgcgccgacggtgctggcactgggcttcatggcactctactccctcctgccacacaaggagctacgcttcatcatctatgccttccccatgctcaacatcacggctgccagaggctgctcctacctgctgaataactataaaaagtcttggctgtacaaagcggggtctctgcttgtgatcggacacctcgtggtgaatgccgcctactcagccacggccctgtatgtgtcccatttcaactacccaggtggcgtcgcaatgcagaggctgcaccagctggtgcccccccagacagacgtccttctgcacattgacgtggcagccgcccagacaggtgtgtctcggtttctccaagtcaacagcgcctggaggtacgacaagagggaggatgtgcagccggggacaggcatgctggcatacacacacatcctcatggaggcggccctgggctcctggccctctacagggacacacaccgggtcctggccagcgtcgtggggaccacaggtgtgagtctgaacctgacccaactgccccccttcaacgtccacctgcagacaaagctggtgcttctggagaggctcccccggccgtcctgagggggaccaggcagccctcagcagccacaggccttccaggagctgttatcactaccagtttctggcacaattccagcacaattatgacaattcagagaagcaagtcaaaggactgggcacctgcctctgacagacaccagaccaggtccagggcctcctccacagcctcagctggggctctcagcaccaaagaacgaggggcccaggtcttgttggcaccccgggagccactgcccagggtgatggtggccagctcagggcttcctgcgggtgactgtcgcccagaccaggtgccattcatgactaatcaggagcagcgggctcacccaggcacctgtctgccaggaggccacgtgtgtcctgcccacccagggggagctgtattttggcagcaccccacgcttgctgcccgagggcctcttggggcacctaagacagcaccccctctcaggggagaccatggtggccccggccgcacccccccaccctggtgccaccactgcaacttttgtattcacaggcatcccatctccatcacagataaaatcttaggagataaacacattcaaaaaggaatgagataaaaagaataaggcaataaatgttgattggaacctct

SEQ ID NO: 214739 - DNA, 1467 bp, Artificial Sequence
  derived and/or modified sequence
atggccggcaagggcagcagcggcagaagacccctgctgctgggcctgctggtggccgtggccaccgtgcacctggtgatctgcccctacaccaaggtggaggagagcttcaacctgcaggccacccacgacctgctgtaccactggcaggacctggagcagtacgaccacctggagttccccggcgtggtgcccagaaccttcctgggccccgtggtgatcgccgtgttcagcagccccgccgtgtacgtgctgagcctgctggagatgagcaagttctacagccagctgatcgtgagaggcgtgctgggcctgggcgtgatcttcggcctgtggaccctgcagaaggaggtgagaagacacttcggcgccatggtggccaccatgttctgctgggtgaccgccatgcagttccacctgatgttctactgcaccagaaccctgcccaacgtgctggccctgcccgtggtgctgctggccctggccgcctggctgagacacgagtgggccagattcatctggctgagcgccttcgccatcatcgtgttcagagtggagctgtgcctgttcctgggcctgctgctgctgctggccctgggcaacagaaaggtgagcgtggtgagagccctgagacacgccgtgcccgccggcatcctgtgcctgggcctgaccgtggccgtggacagctacttctggagacagctgacctggcccgagggcaaggtgctgtggtacaacaccgtgctgaacaagagcagcaactggggcaccagccccctgctgtggtacttctacagcgccctgcccagaggcctgggctgcagcctgctgttcatccccctgggcctggtggacagaagaacccacgcccccaccgtgctggccctgggcttcatggccctgtacagcctgctgccccacaaggagctgagattcatcatctacgccttccccatgctgaacatcaccgccgccagaggctgcagctacctgctgaacaactacaagaagagctggctgtacaaggccggcagcctgctggtgatcggccacctggtggtgaacgccgcctacagcgccaccgccctgtacgtgagccacttcaactaccccggcggcgtggccatgcagagactgcaccagctggtgcccccccagaccgacgtgctgctgcacatcgacgtggccgccgcccagaccggcgtgagcagattcctgcaggtgaacagcgcctggagatacgacaagagagaggacgtgcagcccggcaccggcatgctggcctacacccacatcctgatggaggccgcccccggcctgctggccctgtacagagacacccacagagtgctggccagcgtggtgggcaccaccggcgtgagcctgaacctgacccagctgccccccttcaacgtgcacctgcagaccaagctggtgctgctggagagactgcccagacccagctag

SEQ ID NO: 214740 - DNA, 987 bp, Artificial Sequence
  derived and/or modified sequence
atgccccccacccagcccagaccctgcatgtgccccatcagcaccacccaggtggccagccagtgcagaggctgcaccagctggtgcccccccagacagaccagcttctgcaccctgacctggcagccccccagacaggtgtgcctgggcttcagcaagagcaccgcccccggcggcaccaccagaggcagaatgtgcagcagaggccaggcctgctggcacacccacaccagcagctggagaagaccctgggcccccggccccctgcagggccacacccccggccccggccagagaagaggcgaccacagatgcgagagcgagcccgaccccaccgcccccctgcagagaccccccgccgacaaggccggcgccagcggcgaggccccccccgccgtgctgagaggcaccagacagcccagcgccgccaccggcctgcccggcgccgtgatcaccaccagcttctggcacaacagcagcaccatcatgaccatccagagaagcaagagcaaggactgggcccccgccagcgacagacaccagaccagaagcagagccagcagcaccgccagcgccggcgccctgagcaccaaggagagaggcgcccaggtgctgctggcccccagagagcccctgcccagagtgatggtggccagcagcggcctgcccgccggcgactgcagacccgaccaggtgcccttcatgaccaaccaggagcagagagcccaccccggcacctgcctgcccggcggccacgtgtgccccgcccaccccggcggcgccgtgttctggcagcaccccaccctggccgccagaggccccctgggcgcccccaagaccgccccccccctgagaggcgaccacggcggccccggcagaaccccccccccctggtgccaccactgcaacttctgcatccacagacaccccatcagcatcaccgacaagatcctgggcgacaagcacatccagaagggcatgagatag

SEQ ID NO: 214741 - protein, 1004 aa, Artificial Sequence
  derived and/or modified sequence
MGELCRRDSALTALDEETLWEMMESHRHRIVRCICPSRLTPYLRQAKVLCQLDEEEVLHSPRLTNSAMRAGHLLDLLKTRGKNGAIAFLESLKFHNPDVYTLVTGLQPDVDFSNFSGLMETSKLTECLAGAIGSLQEELNQEKGQKEVLLRRCQQLQEHLGLAETRAEGLHQLEADHSRMKREVSAHFHEVLRLKDEMLSLSLHYSNALQEKELAASRCRSLQEELYLLKQELQRANMVSSCELELQEQSLRTASDQESGDEELNRLKEENEKLRSLTFSLAEKDILEQSLDEARGSRQELVERIHSLRERAVAAERQREQYWEEKEQTLLQFQKSKMACQLYREKVNALQAQVCELQKERDQAYSARDSAQREISQSLVEKDSLRRQVFELTDQVCELRTQLRQLQAEPPGVLKQEARTREPCPREKQRLVRMHAICPRDDSDCSLVSSTESQLLSDLSATSSRELVDSFRSSSPAPPSQQSLYKRVAEDFGEEPWSFSSCLEIPEGDPGALPGAKAGDPHLDYELLDTADLPQLESSLQPVSPGRLDVSESGVLMRRRPARRILSQVTMLAFQGDALLEQISVIGGNLTGIFIHRVTPGSAADQMALRPGTQIVMVDYEASEPLFKAVLEDTTLEEAVGLLRRVDGFCCLSVKVNTDGYKRLLQDLEAKVATSGDSFYIRVNLAMEGRAKGELQVHCNEVLHVTDTMFQGCGCWHAHRVNSYTMKDTAAHGTIPNYSRAQQQLIALIQDMTQQCTVTRKPSSGGPQKLVRIVSMDKAKASPLRLSFDRGQLDPSRMEGSSTCFWAESCLTLVPYTLVRPHRPARPRPVLLVPRAVGKILSEKLCLLQGFKKCLAEYLSQEEYEAWSQRGDIIQEGEVSGGRCWVTRHAVESLMEKNTHALLDVQLDSVCTLHRMDIFPIVIHVSVNEKMAKKLKKGLQRLGTSEEQLLEAARQEEGDLDRAPCLYSSLAPDGWSDLDGLLSCVRQAIADEQKKVVWTEQSPR

SEQ ID NO: 214742 - DNA, 3015 bp, Artificial Sequence
  derived and/or modified sequence
atgggcgagctgtgcagaagagacagcgccctgaccgccctggacgaggagaccctgtgggagatgatggagagccacagacacagaatcgtgagatgcatctgccccagcagactgaccccctacctgagacaggccaaggtgctgtgccagctggacgaggaggaggtgctgcacagccccagactgaccaacagcgccatgagagccggccacctgctggacctgctgaagaccagaggcaagaacggcgccatcgccttcctggagagcctgaagttccacaaccccgacgtgtacaccctggtgaccggcctgcagcccgacgtggacttcagcaacttcagcggcctgatggagaccagcaagctgaccgagtgcctggccggcgccatcggcagcctgcaggaggagctgaaccaggagaagggccagaaggaggtgctgctgagaagatgccagcagctgcaggagcacctgggcctggccgagaccagagccgagggcctgcaccagctggaggccgaccacagcagaatgaagagagaggtgagcgcccacttccacgaggtgctgagactgaaggacgagatgctgagcctgagcctgcactacagcaacgccctgcaggagaaggagctggccgccagcagatgcagaagcctgcaggaggagctgtacctgctgaagcaggagctgcagagagccaacatggtgagcagctgcgagctggagctgcaggagcagagcctgagaaccgccagcgaccaggagagcggcgacgaggagctgaacagactgaaggaggagaacgagaagctgagaagcctgaccttcagcctggccgagaaggacatcctggagcagagcctggacgaggccagaggcagcagacaggagctggtggagagaatccacagcctgagagagagagccgtggccgccgagagacagagagagcagtactgggaggagaaggagcagaccctgctgcagttccagaagagcaagatggcctgccagctgtacagagagaaggtgaacgccctgcaggcccaggtgtgcgagctgcagaaggagagagaccaggcctacagcgccagagacagcgcccagagagagatcagccagagcctggtggagaaggacagcctgagaagacaggtgttcgagctgaccgaccaggtgtgcgagctgagaacccagctgagacagctgcaggccgagccccccggcgtgctgaagcaggaggccagaaccagagagccctgccccagagagaagcagagactggtgagaatgcacgccatctgccccagagacgacagcgactgcagcctggtgagcagcaccgagagccagctgctgagcgacctgagcgccaccagcagcagagagctggtggacagcttcagaagcagcagccccgccccccccagccagcagagcctgtacaagagagtggccgaggacttcggcgaggagccctggagcttcagcagctgcctggagatccccgagggcgaccccggcgccctgcccggcgccaaggccggcgacccccacctggactacgagctgctggacaccgccgacctgccccagctggagagcagcctgcagcccgtgagccccggcagactggacgtgagcgagagcggcgtgctgatgagaagaagacccgccagaagaatcctgagccaggtgaccatgctggccttccagggcgacgccctgctggagcagatcagcgtgatcggcggcaacctgaccggcatcttcatccacagagtgacccccggcagcgccgccgaccagatggccctgagacccggcacccagatcgtgatggtggactacgaggccagcgagcccctgttcaaggccgtgctggaggacaccaccctggaggaggccgtgggcctgctgagaagagtggacggcttctgctgcctgagcgtgaaggtgaacaccgacggctacaagagactgctgcaggacctggaggccaaggtggccaccagcggcgacagcttctacatcagagtgaacctggccatggagggcagagccaagggcgagctgcaggtgcactgcaacgaggtgctgcacgtgaccgacaccatgttccagggctgcggctgctggcacgcccacagagtgaacagctacaccatgaaggacaccgccgcccacggcaccatccccaactacagcagagcccagcagcagctgatcgccctgatccaggacatgacccagcagtgcaccgtgaccagaaagcccagcagcggcggcccccagaagctggtgagaatcgtgagcatggacaaggccaaggccagccccctgagactgagcttcgacagaggccagctggaccccagcagaatggagggcagcagcacctgcttctgggccgagagctgcctgaccctggtgccctacaccctggtgagaccccacagacccgccagacccagacccgtgctgctggtgcccagagccgtgggcaagatcctgagcgagaagctgtgcctgctgcagggcttcaagaagtgcctggccgagtacctgagccaggaggagtacgaggcctggagccagagaggcgacatcatccaggagggcgaggtgagcggcggcagatgctgggtgaccagacacgccgtggagagcctgatggagaagaacacccacgccctgctggacgtgcagctggacagcgtgtgcaccctgcacagaatggacatcttccccatcgtgatccacgtgagcgtgaacgagaagatggccaagaagctgaagaagggcctgcagagactgggcaccagcgaggagcagctgctggaggccgccagacaggaggagggcgacctggacagagccccctgcctgtacagcagcctggcccccgacggctggagcgacctggacggcctgctgagctgcgtgagacaggccatcgccgacgagcagaagaaggtggtgtggaccgagcagagccccagatag

SEQ ID NO: 214743 - DNA, 4537 bp, Artificial Sequence
  derived and/or modified sequence
agagattgggccacattcagtcctcgcttccctgggagggggaagagtttcactctggctcctaggctggaatgcagtggcaccatctcagctctctgcaacctccacttcccaggttcaagcgattctcctgcctcaccctcctgagtagctgggactacaggcgagcaccaccacagccggctaatttttctatttctagtagaaatggggtttcaccatgttggcaggctggtctcgaactctgacctcaagtgatctgcctgcctcagcctctgaaagtgctggattgcaggcgtgagccaccgcaccaggcctaaacagatttctttacaatctaccaccatgaacagcaagcattagcattggctcttccttctgcccagctccgtcccacccagcagcccgcagagaaaggaggcagctggcaccacactgggctttggagacactgcggggactgtggaccccaccctgctgcacggagctcctgcaaaagcaaacctgagaaccttgggtcctcccagcgcccagccatgggggaactgtgccgcagggactccgcactcacggcactggacgaggagacactgtgggagatgatggagagccaccgccacaggatcgtacgctgcatctgccccagccgcctcaccccctacctgcgccaggccaaggtgctgtgccagctggacgaggaggaggtgctgcacagcccccggctcaccaacagcgccatgcgggccgggcacttgctggatttgctgaagactcgagggaagaacggggccatcgccttcctggagagcctgaagttccacaaccctgacgtctacaccctggtcaccgggctgcagcctgatgttgacttcagtaactttagcggtctcatggagacatccaagctgaccgagtgcctggctggggccatcggcagcctgcaggaggagctgaaccaggaaaaggggcagaaggaggtgctgctgcggcggtgccagcagctgcaggagcacctgggcctggccgagacccgtgccgagggcctgcaccagctggaggctgaccacagccgcatgaagcgtgaggttagcgcacacttccatgaggtgctgaggctgaaggacgagatgctcagcctctcgctgcactatagcaatgcgctgcaggagaaggagctggccgcctcacgctgccgcagcctgcaggaggagctgtatctactgaagcaggagctgcagcgagccaacatggtttcctcctgtgagctggaattgcaagagcagtccctgaggacagccagcgaccaggagtccggggatgaggagctgaaccgcctgaaggaggagaatgagaaactgcgctcgctgactttcagcctggcggagaaggacattctggagcagagcctggacgaggcgcgggggagccgacaggagctggtggagcgcatccactcgctgcgggagcgggccgtggctgccgagaggcagcgagagcagtactgggaagagaaggaacagaccctgctgcagttccagaagagtaagatggcctgccaactctacagggagaaggtgaatgcgctgcaggcccaggtgtgcgagctgcagaaggagcgagaccaggcgtactccgcgagggacagtgctcagagggagatttcccagagcctggtggagaaggactccctccgcaggcaggtgttcgagctgacggaccaggtctgcgagctgcgcacacagcttcgccagctgcaggcagagcctccgggtgtgctcaagcaggaagccaggaccagggagccctgtccacgggagaagcagcggctggtgcggatgcatgccatctgccccagagacgacagcgactgcagcctcgtcagctccacagagtctcagctcttgtcggacctgagtgccacgtccagccgcgagctggtggacagcttccgctccagcagccccgcgccccccagccagcagtccctgtacaagcgggtggccgaggacttcggggaagaaccctggtctttcagcagctgcctggagatcccggagggagacccgggagccctgccgggagctaaggcaggcgacccacacctggattatgagctcctagacacggcagaccttccgcagctggaaagcagcctgcagccagtctcccctggaaggcttgatgtctcggagagcggcgtcctcatgcggcggaggccagcccgcaggatcctgagccaggtcaccatgctggcgttccagggggatgcattgctggagcagatcagcgtcatcggcgggaacctcacgggcatcttcatccaccgggtcaccccgggctcggcggcggaccagatggccttgcgcccgggcacccagattgtgatggttgattacgaagcctcagagcccttgttcaaggcagtcctggaggacacgaccctggaggaggccgtggggcttctcaggagggtggacggcttctgctgcctgtctgtgaaggtcaacacggacggttataagaggctactccaggacctggaggccaaagtggcgacctcgggggactcattctacatccgggtcaacctggccatggagggcagggccaaaggggagctgcaggtgcattgcaacgaggtcctgcacgtcaccgacaccatgttccagggctgcggctgctggcatgcccaccgcgtgaactcttacaccatgaaggatactgccgcgcacggcaccatccccaactactccagggctcagcagcagctcatagccctcatccaggacatgactcagcagtgcaccgtgacccgcaagccatcttctgggggaccacagaagctggtccgcatcgtcagtatggacaaagccaaggccagccctctgcgtttgtcctttgacaggggccagttggaccccagcaggatggagggctccagcacgtgcttctgggccgagagctgcctcaccctggtgccctataccctggtgcggccccatcgacccgcccggccccggcctgtgctcctcgtgcccagggcggttgggaagatcctgagcgagaaactgtgcctcctccaagggtttaagaagtgcctggcagagtacttgagccaggaggagtatgaggcctggagccagagaggggacatcatccaggagggagaggtgtccgggggccgctgctgggtgacccgccatgctgtggagtccctcatggaaaagaacacccatgccctcctggacgtccagctggacagtgtctgcaccctgcacaggatggacatcttccccatcgtcatccacgtctctgtcaacgagaagatggcaaagaagctcaagaagggcctacagcggttgggcacctcagaggagcagctcctggaggctgcgaggcaggaggagggagacctggaccgggcgccctgtctatacagcagcctggctcctgacggctggagcgacctggacggcctgctcagctgtgtccgccaggccatcgccgacgagcagaagaaggtggtgtggacggagcagagcccccgatgatgcaccgtgccccttcccgggactgtgggggcttctgtgtgcctgttaatgcagtcctgttcctcagcccaggccctcttggcacagctgtgggctccttggcacatgaggccggctctccccactggctggggtctaaccttgaaccctcaccacgtgcaggtcacacacagtgaagccacttgtaactgcacacttttctgtggaaacatcttcaccctttaccaggcttggcatggtctgaactggaaaccctgagaatgtttctgcagtgggacaggagggacgtcttcccatgccttccctagaaccggaggccccggacttctctggaaaaccgcctgtctgcaggcccgattcaaatctatgggggctgcacttcccttttacattttgatgtgtcaaaggcttttggagtgaccaaaagcacagaggcagcgggtggggcgcctgggtggtccccaaggtcgctgccacccttgcccggggcagaggcagaagcccacatatgctgtgacgctggccaccttttctcagcttctgaggctgcgatgcctcaggaactccagtttacagagaccagtgtgtttacttgtaaataaagcctctgcgtggtggagacggtactttcagtgggtctgtgccccgtggcccctgtgcctgttcggtgggggtgtcccagagaagcctggcaccagtacccccgtacaaggcccagcggactctgccttcccctgacctggctttgcaccccagcccttcttgggccaaacatctttactccaccttcagggctcggggaggacccaggtccgccagcacctggccttgcccctgcctcctggggctgttgcagactgaatgtcattttgacagcagtgtccaagaatcaggaagctgttctagaattcaggttggtatcatcataaatgagttcagaaaaagaacttctgtatattttactaaaataaaaagcttttacaata

SEQ ID NO: 214744 - DNA, 3927 bp, Artificial Sequence
  derived and/or modified sequence
cggtcaattcacctggtgctgctttgacttcaggctcttccttctgcccagctccgtcccacccagcagcccgcagagaaaggaggcagctggcaccacactgggctttggagacactgcggggactgtggaccccaccctgctgcacggagctcctgcaaaagcaaacctgagaaccttgggtcctcccagcgcccagccatgggggaactgtgccgcagggactccgcactcacggcactggacgaggagacactgtgggagatgatggagagccaccgccacaggatcgtacgctgcatctgccccagccgcctcaccccctacctgcgccaggccaaggtgctgtgccagctggacgaggaggaggtgctgcacagcccccggctcaccaacagcgccatgcgggccgggcacttgctggatttgctgaagactcgagggaagaacggggccatcgccttcctggagagcctgaagttccacaaccctgacgtctacaccctggtcaccgggctgcagcctgatgttgacttcagtaactttagcggtctcatggagacatccaagctgaccgagtgcctggctggggccatcggcagcctgcaggaggagctgaaccaggaaaaggggcagaaggaggtgctgctgcggcggtgccagcagctgcaggagcacctgggcctggccgagacccgtgccgagggcctgcaccagctggaggctgaccacagccgcatgaagcgtgaggttagcgcacacttccatgaggtgctgaggctgaaggacgagatgctcagcctctcgctgcactatagcaatgcgctgcaggagaaggagctggccgcctcacgctgccgcagcctgcaggaggagctgtatctactgaagcaggagctgcagcgagccaacatggtttcctcctgtgagctggaattgcaagagcagtccctgaggacagccagcgaccaggagtccggggatgaggagctgaaccgcctgaaggaggagaatgagaaactgcgctcgctgactttcagcctggcggagaaggacattctggagcagagcctggacgaggcgcgggggagccgacaggagctggtggagcgcatccactcgctgcgggagcgggccgtggctgccgagaggcagcgagagcagtactgggaagagaaggaacagaccctgctgcagttccagaagagtaagatggcctgccaactctacagggagaaggtgaatgcgctgcaggcccaggtgtgcgagctgcagaaggagcgagaccaggcgtactccgcgagggacagtgctcagagggagatttcccagagcctggtggagaaggactccctccgcaggcaggtgttcgagctgacggaccaggtctgcgagctgcgcacacagcttcgccagctgcaggcagagcctccgggtgtgctcaagcaggaagccaggaccagggagccctgtccacgggagaagcagcggctggtgcggatgcatgccatctgccccagagacgacagcgactgcagcctcgtcagctccacagagtctcagctcttgtcggacctgagtgccacgtccagccgcgagctggtggacagcttccgctccagcagccccgcgccccccagccagcagtccctgtacaagcgggtggccgaggacttcggggaagaaccctggtctttcagcagctgcctggagatcccggagggagacccgggagccctgccgggagctaaggcaggcgacccacacctggattatgagctcctagacacggcagaccttccgcagctggaaagcagcctgcagccagtctcccctggaaggcttgatgtctcggagagcggcgtcctcatgcggcggaggccagcccgcaggatcctgagccaggtcaccatgctggcgttccagggggatgcattgctggagcagatcagcgtcatcggcgggaacctcacgggcatcttcatccaccgggtcaccccgggctcggcggcggaccagatggccttgcgcccgggcacccagattgtgatggttgattacgaagcctcagagcccttgttcaaggcagtcctggaggacacgaccctggaggaggccgtggggcttctcaggagggtggacggcttctgctgcctgtctgtgaaggtcaacacggacggttataagaggctactccaggacctggaggccaaagtggcgacctcgggggactcattctacatccgggtcaacctggccatggagggcagggccaaaggggagctgcaggtgcattgcaacgaggtcctgcacgtcaccgacaccatgttccagggctgcggctgctggcatgcccaccgcgtgaactcttacaccatgaaggatactgccgcgcacggcaccatccccaactactccagggctcagcagcagctcatagccctcatccaggacatgactcagcagtgcaccgtgacccgcaagccatcttctgggggaccacagaagctggtccgcatcgtcagtatggacaaagccaaggccagccctctgcgtttgtcctttgacaggggccagttggaccccagcaggatggagggctccagcacgtgcttctgggccgagagctgcctcaccctggtgccctataccctggtgcggccccatcgacccgcccggccccggcctgtgctcctcgtgcccagggcggttgggaagatcctgagcgagaaactgtgcctcctccaagggtttaagaagtgcctggcagagtacttgagccaggaggagtatgaggcctggagccagagaggggacatcatccaggagggagaggtgtccgggggccgctgctgggtgacccgccatgctgtggagtccctcatggaaaagaacacccatgccctcctggacgtccagctggacagtgtctgcaccctgcacaggatggacatcttccccatcgtcatccacgtctctgtcaacgagaagatggcaaagaagctcaagaagggcctacagcggttgggcacctcagaggagcagctcctggaggctgcgaggcaggaggagggagacctggaccgggcgccctgtctatacagcagcctggctcctgacggctggagcgacctggacggcctgctcagctgtgtccgccaggccatcgccgacgagcagaagaaggtggtgtggacggagcagagcccccgatgatgcaccgtgccccttcccgggactgtgggggcttctgtgtgcctgttaatgcagtcctgttcctcagcccaggccctcttggcacagctgtgggctccttggcacatgaggccggctctccccactggctggggtctaaccttgaaccctcaccacgtgcaggtcacacacagtgaagccacttgtaactgcacacttttctgtggaaacatcttcaccctttaccaggcttggcatggtctgaactggaaaccctgagaatgtttctgcagtgggacaggagggacgtcttcccatgccttccctagaaccggaggccccggacttctctggaaaaccgcctgtctgcaggcccgattcaaatctatgggggctgcacttcccttttacattttgatgtgtcaaaggcttttggagtgaccaaaagcacagaggcagcgggtggggcgcctgggtggtccccaaggtcgctgccacccttgcccggggcagaggcagaagcccacatatgctgtgacgctggccaccttttctcagcttctgaggctgcgatgcctcaggaactccagtttacagagaccagtgtgtttacttgtaaataaagcctctgcgtggtggagacggtactttcagtgggtctgtgccccgtggcccctgtgcctgttcggtgggggtgtcccagagaagcctggcaccagtacccccgtacaa

SEQ ID NO: 214745 - DNA, 1545 bp, Artificial Sequence
  derived and/or modified sequence
ctatagcaatgcgctgcaggagaaggagctggccgcctcacgctgccgcagcctgcaggaggagctgtatctactgaagcaggagctgcagcgagccaacatggtttcctcctgtgagctggaattgcaagagcagtccctgaggacagccagcgaccaggagtccggggatgaggagctgaaccgcctgaaggaggagaatgagaaactgcgctcgctgactttcagcctggcggagaaggacattctggagcagagcctggacgaggcgcgggggagccgacaggagctggtggagcgcatccactcgctgcgggagcgggccgtggctgccgagaggcagcgagagcagtactgggaagagaaggaacagaccctgctgcagttccagaagagtaagatggcctgccaactctacagggagaaggtgaatgcgctgcaggcccaggtgtgcgagctgcagaaggagcgagaccaggcgtactccgcgagggacagtgctcagagggagatttcccagagcctggtggagaaggactccctccgcaggcaggtgttcgagctgacggaccaggtctgcgagctgcgcacacagcttcgccagctgcaggcagagcctccgggtgtgctcaagcaggaagccaggaccagggagccctgtccacgggagaagcagcggctggtgcggatgcatgccatctgccccagagacgacagcgactgcagcctcgtcagctccacagagtctcagctcttgtcggacctgagtgccacgtccagccgcgagctggtggacagcttccgctccagcagccccgcgccccccagccagcagtccctgtacaagcgggtggccgaggacttcggggaagaaccctggtctttcagcagctgcctggagatcccggagggagacccgggagccctgccgggagctaaggcaggcgacccacacctggattatgagctcctagacacggcagaccttccgcagctggaaagcagcctgcagccagtctcccctggaaggcttgatgtctcggagagcggcgtcctcatgcggcggaggccagcccgcaggatcctgagccaggtcaccatgctggcgttccagggggatgcattgctggagcagatcagcgtcatcggcgggaacctcacgggcatcttcatccaccgggtcaccccgggctcggcggcggaccagatggccttgcgcccgggcacccagattgtgatggttataagaggctactccaggacctggaggccaaagtggcgacctcgggggactcattctacatccgggtcaacctggccatggagggcagggccaaaggggagctgcaggtgcattgcaacgaggtcctgcacgtcaccgacaccatgttccagggctgcggctgctggcatgcccaccgcgtgaactcttacaccatgaaggatactgccgcgcacggcaccatccccaactactccagggctcagcagcagctcatagccctcatccaggacatgactcagcagtgcaccgtgacccgcaag

SEQ ID NO: 214746 - DNA, 3015 bp, Artificial Sequence
  derived and/or modified sequence
atgggtgagctgtgtaggagagattccgctttgacagccctggacgaagagacgctgtgggagatgatggaatcccacagacatagaattgtgcgttgtatttgtcctagcaggctgacaccttacctgcgccaggccaaggtactgtgccagctggatgaggaagaagttctgcattcaccccggcttactaactcagccatgcgtgcgggccaccttttagacttgctcaagacacgcggtaagaatggcgcaatcgcatttctggaatctctgaagttccataaccctgatgtgtatacgctcgtaaccggactgcagcccgacgtggacttcagcaattttagcgggttaatggagactagtaaacttactgagtgccttgccggggcgataggttcgttacaggaagaacttaatcaagagaaaggccaaaaggaagtgttacttcggcgctgtcagcaactgcaagagcacctggggctggccgaaaccagggccgaaggcctccatcagctggaagcagatcactcacgtatgaaacgggaggtgagcgcccactttcatgaagtgctacgattgaaggacgagatgctgtccctgagcctacattattccaatgcactgcaagagaaggaactcgctgcttcacgctgtaggagcctccaggaggaactgtatctcctcaagcaggaattgcagcgagcaaacatggtcagttcctgtgagctggaacttcaagagcagagccttagaacagcctctgaccaggagagcggcgacgaggaactgaataggcttaaagaggagaatgaaaaactccgctccctcactttttcacttgctgaaaaagatatcctggagcaaagcttagacgaagctcgtggaagtaggcaggagttggtagagaggattcactctcttcgagagcgggccgtagcagccgagcggcagagggagcaatactgggaagaaaaggagcagacactccttcaatttcagaaatccaagatggcctgccagttatacagagagaaagtcaatgcactgcaagctcaagtgtgcgagctacagaaggaaagagaccaggcttactccgctcgtgactctgcccagcgagaaataagccaatccctcgtggaaaaggactcacttaggcgacaagtcttcgaactgacagatcaggtctgcgaacttcggactcaattgcggcagcttcaagcagagccacccggagtgttgaaacaggaggccagaacgcgggagccgtgccctagggaaaaacagaggcttgtccgaatgcacgcgatctgcccgcgcgacgattccgactgttcgttggtgtcctcgacagaaagccaattattgagtgacctgagtgccacaagttcaagggagcttgtggacagttttagatccagctctcccgctcctccatcacaacagtcactgtataagcgcgtcgctgaggacttcggcgaagagccctggagcttttcatcttgcctggagatccctgaaggggatcccggggctctgccgggagccaaagctggggacccccacctggattatgaattgttagataccgccgacctgcctcagttggaatcgtcattgcagccagtcagcccaggccgcttggatgtgtctgagtccggagtcctgatgcgtcggcgacctgcccgcaggatcttatctcaggtcacaatgcttgcgttccaaggtgatgccctgcttgaacagatttctgttatcggaggtaacctgacgggcattttcattcacagggtgaccccagggtcggcggctgatcaaatggcactgaggccaggcacccagattgtgatggtggattacgaggctagcgagcccctgtttaaggccgtcctcgaggacacaactctcgaggaggctgtgggactcctgcgtagagtggatggtttttgctgcctcagcgtgaaggtgaatactgacggttataagaggttgcttcaggatcttgaggctaaagtcgctacatctggagatagcttttatataagggtcaatctggcaatggaaggtagagccaaaggggaactgcaggtccactgtaacgaggtactccacgttacagacaccatgtttcaggggtgtggttgctggcatgcgcacagggtaaacagttataccatgaaagacacagccgctcatggcacaatcccaaactacagtagagcccagcagcagttaattgcactcatccaagacatgactcagcagtgtactgtgactcggaagccgtcgtcaggtggcccgcagaagctggtcagaatagtgagtatggacaaggccaaggcctcaccactacggctttcattcgacaggggacagctggaccctagtagaatggagggcagcagtacctgtttctgggctgagagttgcctcacactggttccatacaccttggtccgaccccatagaccagcgagacccaggcccgtgttattagtgccacgggcagtggggaagattctatcagagaaactatgccttctgcagggcttcaaaaagtgcctcgcggagtacctaagccaggaggagtacgaagcatggtcacagcgaggtgatattatccaggagggcgaagttagcggcgggcggtgttgggttacacgccatgccgttgagtctttaatggaaaagaacacacatgccctgctggatgttcagcttgactcagtgtgcaccctccatcgtatggatatatttccgattgtgatccacgtatccgtgaatgaaaaaatggccaagaaactcaaaaagggactgcagcggctcggcacatcagaagagcagttgctagaagctgctcggcaggaggagggagatctggatagagccccctgtctgtactcatccctcgctccagatggttggtctgacctggatggacttttgtcctgcgtgcggcaggctattgccgatgagcagaaaaaggtagtgtggacggaacagtccccgcggtag

SEQ ID NO: 214747 - DNA, 3015 bp, Artificial Sequence
  derived and/or modified sequence
atgggtgagctgtgtcgtcgagattctgcattgacagctcttgatgaggagacattatgggagatgatggagtcccacaggcaccgaattgtacgctgtatctgcccaagcagacttaccccttacctgcgccaagccaaggtgctgtgccaactcgatgaggaagaggtgctgcatagtccaaggcttactaacagtgctatgcgagctggccacctgttggacttactcaagacacgagggaagaatggagcaatagcgtttctggaaagtcttaaatttcataacccagacgtgtatacgcttgttactggactccagccagacgttgatttctccaacttctcaggactgatggagacatcgaaactcaccgagtgcctggccggggcaattggaagtctgcaggaggaattgaaccaggagaagggacagaaagaggttctccttcggcggtgccagcagctgcaggaacacctgggtttggctgagaccagagcggaaggattgcaccagctggaggctgaccattcaagaatgaagagggaggtttctgcccacttccatgaggtgcttaggctgaaggacgaaatgcttagcttgagcttgcactattccaatgccttgcaagagaaagagctggctgcctctagatgccgcagcctgcaagaggaactgtacctcctaaaacaagagctacagagggctaatatggtcagttcatgcgagctggagctgcaagagcaatctttacgaacagcttccgaccaggaatctggcgacgaagaactgaacaggctaaaggaggagaatgagaagctcagatctctcacattttcgctcgccgagaaagatattctggagcagtcactggacgaggcccggggcagcaggcaggagctagttgagcgcattcactcacttcgtgaacgggccgttgctgccgaaagacaaagggagcaatactgggaggagaaagaacagacgctgctccagttccagaagtcgaagatggcgtgccaattgtatcgagaaaaggtgaacgccttgcaggcacaggtgtgtgaactgcaaaaggaacgcgatcaggcttacagcgctagagacagtgcgcaacgggagatttctcagtcattggtcgaaaaagattctttaaggcgccaggtgtttgaactgaccgaccaagtttgtgaattaagaacccagctgaggcagctgcaggccgagccacctggcgtcttaaagcaggaagcacggaccagagagccatgcccgcgggagaaacagagactggtgaggatgcacgccatctgtccccgcgacgattccgattgttccctcgtatcctctactgaatcccagttgttgagcgacctcagcgcgacgagctctcgcgagttagtagactcctttagaagttcttctcctgccccgccttcccagcagtctttatacaagagagtagcagaggatttcggagaggaaccttggagcttttccagctgcctggagatacctgagggagatccaggggcactgcccggcgcgaaggctggcgaccctcacctcgattacgagctccttgacaccgcggatctgccccagctcgaatccagtctgcaaccggtgtccccaggtaggctcgatgtaagcgagtccggagtcctgatgcgccgaaggccagctcgaaggatattaagtcaggtgacgatgctggcattccagggtgacgctttactggaacaaataagcgtgatcggagggaatctcaccggtatattcatacaccgtgtgacacctggatcagcagccgaccagatggccttgagacccggcacacagatagtgatggtagattacgaagcctcagagccactgtttaaggcagtgctcgaagacacgaccctagaggaggcagtgggactcctaagacgcgttgatggtttctgctgtttatctgtcaaggtcaacactgatggatataaacgcttgctccaggacttagaagctaaagtggcaacgtctggagatagcttttacattagggtgaatcttgctatggaaggccgcgcaaaaggggaactccaggtgcactgcaatgaggtgttgcatgtgacagacacaatgtttcagggttgtggctgttggcatgcccacagagtgaatagctataccatgaaggacacagccgcccacggcaccatccccaattatagcagggcacagcaacagctgatcgctttgatccaggatatgacacaacagtgtacggttacaagaaagccttcctcaggaggcccacagaaacttgttagaatagtctccatggacaaagcaaaggcctctccattacgcctctcttttgatcggggccaattagatccatcgaggatggaaggctcatctacctgtttttgggccgagagctgtttgaccctggtgccatacacccttgtgcgtcctcaccggcctgcccgcccacgccccgtactgttagtgccaagagccgtcgggaaaattctctcagagaaactttgcctgctgcagggcttcaagaagtgcttagcagagtacctcagccaggaggaatatgaggcatggtctcagaggggcgacataatccaggaaggggaggtctcggggggccgctgctgggtaacgaggcacgccgttgagagtttaatggaaaagaacactcatgctttgctggatgtgcaattagactctgtgtgtactctccataggatggacatcttcccgatcgtaatacatgtgtctgttaatgagaaaatggctaagaagctgaaaaaaggtctccaacggctggggaccagtgaggagcagctgttggaagccgcccgacaagaggagggtgatctggaccgggcgccatgcctatacagctctctcgcacctgatggctggagtgacctcgatgggttactcagttgcgttcgacaggctatcgcagatgaacagaagaaagtagtttggaccgagcagtctccccggtag

SEQ ID NO: 214748 - DNA, 3015 bp, Artificial Sequence
  derived and/or modified sequence
atgggagagctgtgccggcgggacagcgccctgacagccctggatgaggagaccctgtgggagatgatggagagccaccgccaccgcatcgtgcgctgcatctgccccagccggctgaccccctacctgcggcaggccaaggtgctgtgccagctggatgaggaggaggtgctgcacagcccccggctgaccaacagcgccatgagagctggccacctgctggacctgctgaagacccggggcaagaatggagccatcgccttcctggagagcctgaagttccacaacccagatgtgtacaccctggtgacaggcctgcagccagatgtggacttcagcaacttcagcggcctgatggagaccagcaagctgacagagtgcctggccggggccatcggcagcctgcaggaggagctgaaccaggagaagggccagaaggaggtgctgctgcggcgctgccagcagctgcaggagcacctgggcctggccgagaccagggctgagggcctgcaccagctggaggccgaccacagcaggatgaagcgggaggtgtctgcccacttccacgaggtgctgcggctgaaggatgagatgctgagcctgagcctgcactacagcaatgccctgcaggagaaggagctggccgccagccgctgccgcagcctgcaggaggagctgtacctgctgaagcaggagctgcagagggccaacatggtgagcagctgtgagctggagctgcaggagcagagcctgaggacagccagtgaccaggagagcggagatgaggagctgaaccggctgaaggaggagaatgagaagctgcggagcctgaccttcagcctggccgagaaggacatcctggagcagagcctggatgaggcccggggcagccggcaggagctggtggagcgcatccacagcctgcgggagagagctgtggccgctgagcggcagcgggagcagtactgggaggagaaggagcagaccctgctgcagttccagaagagcaagatggcctgccagctgtaccgggagaaggtgaatgccctgcaggcccaggtgtgtgagctgcagaaggagcgggaccaggcctacagcgcccgggacagcgcccagcgggagatcagccagagcctggtggagaaggacagcctgcggcggcaggtgtttgagctgacagaccaggtgtgtgagctgcggacccagctgcggcagctgcaggccgagcccccaggagtgctgaagcaggaggcccggacccgggagccctgcccccgggagaagcagaggctggtgaggatgcacgccatctgccccagagatgacagcgactgcagcctggtgagcagcacagagagccagctgctgagtgacctgagcgccaccagcagccgggagctggtggacagcttccgcagcagcagccctgccccacccagccagcagagcctgtacaagagggtggccgaggactttggagaggagccctggagcttcagcagctgcctggagatccctgagggggaccccggggccctgcccggggccaaggccggggacccccacctggactatgagctgctggacacagctgacctgccccagctggagagcagcctgcagcctgtgtccccaggccgcctggatgtgtctgagagcggcgtgctgatgagaagaagacctgcccggcgcatcctgagccaggtgaccatgctggccttccagggagatgccctgctggagcagatcagcgtcatcggcggcaacctgaccggcatcttcatccaccgggtgaccccaggcagcgctgctgaccagatggccctgcggcccggcacccagatcgtgatggtggactatgaggccagcgagcccctcttcaaggctgtgctggaggacaccaccctggaggaggccgtgggcctgctgcggcgggtggatggcttctgctgcctgtctgtgaaggtgaacacagatggctacaagaggctgctgcaggacctggaggccaaggtggccaccagcggggacagcttctacatccgggtgaacctggccatggagggccgggccaagggggagctgcaggtgcactgcaatgaggtgctgcacgtgacagacaccatgttccagggctgcggctgctggcacgcccaccgggtgaacagctacaccatgaaggacacagctgcccacggcaccatccccaactacagccgggcccagcagcagctgattgccctgatccaggacatgacccagcagtgcaccgtgaccaggaagcccagcagcggcggcccccagaagctggtgagaattgtgtccatggacaaggccaaggccagccccctgcggctgagctttgaccggggccagctggaccccagcaggatggagggcagcagcacctgcttctgggccgagagctgcctgaccctggtgccctacaccctggtgcggccccacaggcctgcccggcccaggcctgtgctgctggtgcccagggctgtgggcaagatcctgtctgagaagctgtgcctgctgcagggcttcaagaagtgcctggccgagtacctgagccaggaggagtatgaggcctggagccagagaggagacatcatccaggagggggaggtgtctgggggccgctgctgggtgaccaggcatgctgtggagagcctgatggagaagaacacccacgccctgctggatgtgcagctggacagcgtgtgcaccctgcacaggatggacatcttccccatcgtcatccacgtgtctgtgaatgagaagatggccaagaagctgaagaagggcctgcagaggctgggcaccagcgaggagcagctgctggaggccgcccggcaggaggagggggacctggaccgggccccctgcctgtacagcagcctggccccagatggctggagcgacctggatggcctgctgagctgtgtgcggcaggccatcgcagatgagcagaagaaggtggtgtggacagagcagagccccaggtag

SEQ ID NO: 214749 - DNA, 3015 bp, Artificial Sequence
  derived and/or modified sequence
atgggcgagctgtgccggcgggacagcgccctgaccgccctggacgaggaaacgctgtgggagatgatggagtctcatcgacatcggattgttagatgcatctgcccatctcggctcacaccctacctgcgccaggccaaagttctttgtcaactggacgaggaagaagtcctccactctccacgccttactaatagcgcaatgagagcgggccatttattggaccttctcaaaacccggggcaagaacggtgcaatcgcctttctcgaatctctcaagttccataatcccgacgtttatacactggtgaccggactgcagcccgatgtggatttctctaacttctcgggtcttatggagacctctaaactgacggagtgcctggccggggctatcggttcattacaggaggagctgaaccaggaaaaaggccagaaagaagtcctgctgcgtaggtgccagcaattgcaggaacatctcggattggccgagacccgtgcagagggactccatcagctcgaggctgatcatagccggatgaagcgcgaagtcagtgctcacttccatgaggttctgcgcctgaaagatgagatgttgagcctgagtttgcactatagtaacgctctacaggagaaagaactggccgcctccagatgtcggtcgctacaggaagagttgtacctgttgaagcaggagctacaaagggccaacatggtgagttcatgcgagttagagctgcaggagcagagcctgcgcaccgcctcagaccaggaaagcggggatgaagagctgaatcgcttaaaagaggagaatgagaagctgcgaagcctgacgtttagtttggccgaaaaagacatccttgagcagagcctggacgaagcccgcgggtcaagacaggagctggtcgagcggatccacagccttcgggaaagagccgttgccgccgagaggcagcgcgaacagtattgggaagaaaaggagcagactctcttgcagtttcaaaaatcaaagatggcctgccagttgtacagagaaaaggtcaatgctctgcaagcccaggtctgcgagctccagaaagagcgagaccaagcctattcagcgcgcgatagcgcccaacgagagatttcgcaaagccttgtggagaaggactcactccgccgacaggtgttcgaattgacggaccaggtttgcgagctgaggacccagcttaggcagctccaggcagagccccctggtgttctgaagcaagaagctagaacccgggagccttgccctcgagagaagcagcggctcgtgcggatgcacgcgatctgcccacgcgacgacagcgattgcagcctcgtctcttcaacggagtcccagctcttatccgacctcagcgccacttctagccgggagctcgtggactcctttagatcttcaagtcctgcaccaccctcacagcagagtctgtataagcgagtggcggaagattttggagaggagccctggtccttttccagttgtctggaaatccccgaaggcgaccccggtgcactccccggcgccaaggctggagatccacacctggattacgaactattagacacagccgatttgccccagctggaaagtagtctgcagcccgtgtcacctgggagacttgacgtaagcgagtccggtgtccttatgagaagacgacctgcacggcggatcttaagccaagtgaccatgcttgcttttcagggcgatgcactgttggaacagataagcgttataggcggaaacttaacgggtatctttattcatcgggttactcccggctctgcggctgatcagatggccctgcgacccggtactcaaattgtgatggtagattatgaagcctccgagcccctgtttaaggccgtgctggaagatacaactctcgaagaagccgtgggacttcttcggagagtggacggattctgctgtcttagcgtcaaggtcaacaccgatggctacaagaggcttctccaagatctggaggccaaggtggccacctccggtgattctttctatattcgcgtgaatttagccatggagggcagagcaaagggtgaattgcaggtgcattgtaacgaggtgctccacgtgaccgacacgatgtttcaggggtgcgggtgttggcacgcccatcgcgtcaactcttatactatgaaagacacagcagctcatgggacgatccccaactatagcagagcacaacaacagctgattgctctgatccaggatatgacacagcagtgcactgtgacgcggaaaccgagctcaggtggcccccagaaactcgtcagaattgtatccatggacaaagctaaggcttccccactccgccttagcttcgaccggggccagttagatccgagcaggatggagggttccagtacatgtttctgggcagaaagttgcctcactttggtgccatatacccttgtcagaccccacagaccagcccgacctcgtccagtgctcctcgtacccagagcagttgggaagattcttagtgagaaattgtgtcttctgcaggggttcaaaaagtgtttggcggaatacctaagccaggaggaatatgaggcctggagccagcggggcgacattatacaggagggcgaagtctccggcgggagatgctgggttactcggcacgccgtcgagtctctgatggaaaaaaatacacacgccctcttagacgtacagctcgatagcgtctgtacccttcaccgcatggatatcttccccattgtaatccatgtttccgtgaacgagaagatggctaagaaactcaaaaaagggctgcaaagattaggcaccagcgaggaacagcttctcgaagccgcccgacaggaagaaggtgatctcgatagggccccctgtctctactcatccctagcaccggatgggtggtcagatttagacggattattgtcatgtgtgcgccaagccatcgccgatgagcagaagaaggtcgtctggacagaacagtctccgaggtag

SEQ ID NO: 214750 - DNA, 3015 bp, Artificial Sequence
  derived and/or modified sequence
atgggcgagctgtgccggcgggacagcgccctgaccgccctggacgaggagaccttgtgggagatgatggagtcacatcgacaccggattgttcggtgtatctgcccttcaaggctaacaccttaccttagacaggcaaaagtgttgtgccagctcgatgaagaagaggtgttacatagccctcggctcacaaatagcgcaatgcgcgcagggcatctcctggacctactaaagacccgcggaaagaacggagccattgcctttttggagagtttaaaattccataatccggatgtgtataccttggttacaggtctgcagccagacgtggactttagtaacttcagcggtctgatggagacgtcaaagttgacagagtgcttagcaggggcaattgggtcgttacaagaggagctgaatcaagaaaaaggacagaaagaagtgctgctacgcagatgccagcagctccaagagcatttaggcctggcagaaactcgggcggagggtctccaccagctcgaagcggatcacagtcgtatgaagcgagaggtttctgcccactttcatgaagtcctccgtttgaaagatgaaatgctgagtctgagcctccattactcgaatgccttgcaagagaaggaactcgcagcctcaaggtgccgatcactgcaagaggagctctacttgctcaagcaggagctgcagagggcaaacatggtgtcctcatgtgagctcgagctgcaagagcagtctttgcgaactgccagtgatcaggagtcaggagacgaagagttaaatcgcctgaaggaagaaaatgagaaattacggagcctcacatttagtttggccgagaaagacattcttgagcagagcctggacgaggccagaggttctcgccaagagcttgtcgaaaggatccatagcctgcgagaaagggccgtggcggctgaaaggcagagggaacagtactgggaggagaaagaacaaaccctcctgcagtttcagaagtcaaagatggcatgtcagttatacagggagaaggtgaacgccctgcaagcgcaggtctgcgaactgcagaaagagagagatcaagcctacagcgccagggatagcgctcagcgggagattagtcagtccctcgtcgaaaaggattcattgcgcaggcaggtctttgaactcactgatcaggtgtgtgaattgaggacgcagctcagacagctccaggctgagccccctggcgttttaaagcaggaagcgcgcacccgcgaaccatgtcccagagaaaagcagcgcctggtacgaatgcacgctatctgtccacgcgacgactctgattgttccctggtaagcagtacagagtcccagctactgagcgatctaagcgccacttccagccgggagctggtagactcctttagatcctctagtccggcaccccccagtcagcagtcattatacaaacgcgtggcagaggattttggggaggagccctggagtttcagctcttgcctggaaatccccgagggcgaccccggcgcactaccgggcgccaaggctggggacccacatttggactatgagcttctcgacactgctgaccttccccagcttgagtcctccctgcagcccgttagccccggcagactggacgtctcagaaagtggtgtcctgatgcgccgtcggcccgctcggcgcatccttagccaggttacaatgctagcctttcagggcgatgcactcttggagcagatcagtgttattggaggtaatctgaccgggatttttatacacagggttacgcctggaagcgccgcagaccaaatggccctgaggcctggcacacagattgttatggtagactatgaagccagtgaaccactgtttaaggcagtgctggaggacacaaccctggaagaagccgtaggcctgttgcgacgcgttgacggtttttgctgcctctctgtaaaggtgaacacagacggttataaacgactgctgcaggacctagaggcaaaagtggcaacaagcggggactccttttacattagagtgaatctcgccatggaaggacgcgccaaaggagagctgcaggtccactgtaatgaggtccttcatgtcactgacacaatgtttcaaggttgtggatgctggcatgctcatagggttaacagttacaccatgaaagatactgcagcccatggaacgataccaaattactcgagagcccagcagcagcttatcgccctgatacaagacatgactcagcagtgtaccgttacccggaagcccagctcaggaggtccacagaaactggttcgtatagtttccatggataaggccaaggcaagtcccctgcggctgagttttgaccgggggcagttggacccctcccggatggagggtagctcaacatgcttctgggcggagagttgccttacactagtcccatacacactggtcagaccacatcggcccgcacggcctcggccggtgttgttggtcccccgtgcagttggcaaaatcctgagcgagaaactatgcctgctccagggctttaagaaatgcttggcagagtacttgagccaggaggaatatgaggcttggagccagagaggcgacatcatccaggagggcgaggtctcgggcgggcggtgttgggtgacgagacacgctgtcgaaagtctgatggaaaagaacacccatgcactgttagacgttcagctagactctgtgtgtaccttacacaggatggatatcttcccaatagtgattcacgttagcgtgaatgagaaaatggccaagaaactgaagaagggattgcaacggcttggcacttctgaagaacagttgttggaggcggcccggcaggaggagggtgatttagacagggccccctgtctgtattcaagtctcgccccggacggctggagtgatttggatggtctcctttcctgcgtgaggcaggccatagcagatgagcagaagaaagttgtatggacggaacagtcacctcgatag

SEQ ID NO: 214751 - DNA, 3015 bp, Artificial Sequence
  derived and/or modified sequence
atgggagagctgtgtcgccgagactctgctctgaccgcgttggacgaggaaactctttgggaaatgatggagagccatagacacaggatcgtaaggtgtatttgtcccagtagactcactccctatctccggcaggccaaggtcttatgtcaacttgatgaggaggaggtcttgcatagtcctcgtctgaccaatagcgctatgcgggctggacaccttctggacctgcttaaaacacgcggtaagaacggggctatagcatttctcgagtcacttaagttccataatcccgacgtgtacaccctcgttactggcctccagcccgatgtcgacttctctaatttttctgggttgatggagaccagcaagttgacggagtgtctggccggagcgattggatcactgcaagaggaactcaatcaggagaagggccagaaggaagttttactgagacgctgtcagcaactgcaagagcacttgggcctggccgagacgagggctgagggtctccaccagctggaggcggaccacagccgaatgaagagggaagtatctgctcatttccacgaggtccttcgcctgaaagatgagatgctgagtctcagtttgcactacagcaatgccctgcaggagaaggaattggccgctagtcgttgccggtcattacaggaagagctctatttactgaaacaagaactccaaagggcgaatatggttagctcatgcgaattggagctgcaagaacagtcacttcgcacagcctccgatcaagagagcggagatgaggagctaaatcgtttaaaggaggagaacgagaaactgaggtccctgaccttctccctggctgagaaggacattttagagcagtctctcgatgaggcacgtggtagcaggcaggagctagtggaaaggattcatagcctccgtgagcgcgctgtcgctgcagagcgccagagagaacagtactgggaagagaaggaacaaacgcttctgcagttccagaagtccaagatggcttgccagctctacagagaaaaggtgaacgctttacaggctcaggtctgcgagcttcaaaaagagcgagaccaagcttactccgctagggacagtgcgcagagggagatcagccagtcactagtggagaaggattctttgcgcaggcaggtgttcgagctcaccgatcaggtctgcgagcttcgaactcagctgcgccagctccaggctgagcctcctggggttttaaagcaggaagctcgcactcgcgaaccgtgtcctcgcgaaaagcagaggcttgtacggatgcatgctatctgtccaagagatgatagcgactgtagtttggtgtcttccaccgaatcccagcttctctctgacctgagcgccaccagtagcagggagttggtagattcctttcgttcatccagtcctgctcctccctcccagcaatctttgtacaaaagggttgctgaggacttcggcgaagaaccttggtccttttctagttgtctggaaatccctgaaggcgatcccggagctctgccaggagccaaggccggtgatccacacttagactacgagttactggatactgccgatctgcctcagttggagtcgtcactgcaaccggttagtccgggtcgactagacgtctccgagtctggcgtcctgatgcgtcggcgtccagcacgcagaattctgagtcaggtcacgatgctggctttccaaggggacgctctgctggagcagatcagcgtgataggcggaaacctgacaggaatttttatccatcgcgtcactcccggaagcgccgcagaccagatggcgttaagaccaggcacccagatcgttatggtggactacgaggctagcgaaccccttttcaaagctgtgctcgaagatacaacccttgaggaagcagtaggcctgctcaggagagttgacggcttttgttgtctcagtgtcaaggtaaacaccgacgggtacaaacgcctactacaggacttggaggcaaaggtcgccacaagtggagacagcttctatatcagggttaatctagccatggagggcagggctaagggtgagctccaagtgcactgtaacgaagtccttcacgtgactgataccatgtttcaggggtgtggttgctggcacgctcaccgggtgaattcctacaccatgaaagatacagccgcacacggcacaattccgaattatagcagagctcaacagcaattgatcgctctcatccaagacatgactcaacagtgcaccgttacaagaaagccatcaagtggcggaccacaaaagcttgtgcgcattgtctccatggacaaggctaaagcctcccccttgcggctgagcttcgacagagggcaactagacccctcgagaatggagggatcaagcacatgtttttgggccgaaagttgcctaaccctggtcccatacacactggtgcgtccccatcgtcctgcgaggcccaggccagttctcctcgtgccacgagcggtagggaaaatcctatctgaaaaactctgccttctgcagggtttcaagaagtgtctggccgagtacctatcccaagaggagtacgaggcatggtcacagaggggagatatcatacaagagggagaggttagcggtgggcgatgttgggtgacgcgacatgcggtcgaatctctgatggagaaaaatacccacgcactgttagacgtgcagttggatagcgtgtgcaccctgcacaggatggatattttccccattgtgatccatgtgtctgtcaatgaaaaaatggctaagaagctgaagaaaggactccagcgactgggaacatcagaggagcagctcctcgaggcagctcgccaggaggagggagacctggacagagccccatgtctgtatagcagtctggcgcctgatggctggtccgatcttgatggattgctcagctgtgtgcggcaggctattgctgatgagcagaaaaaggtggtgtggactgaacagagccctagatag

SEQ ID NO: 214752 - DNA, 3015 bp, Artificial Sequence
  derived and/or modified sequence
atgggcgaactatgccgacgggattcggcactgactgcattggatgaagagaccttatgggagatgatggagagccacagacaccgcattgtgcggtgcatctgcccctcaaggctcacgccatacctgagacaggcaaaggtgctgtgccagctcgacgaggaggaagtactccatagcccaagactcaccaactctgctatgcgggctggccatctgctcgatctgcttaagacacggggtaagaacggggctatcgcatttctggaatcattgaaatttcataaccccgacgtatacaccctggtgacaggccttcaaccagatgtggactttagtaattttagcgggttgatggagacatccaagctcactgagtgtttggcaggcgctatcgggtctctccaggaagagctgaatcaggaaaagggccagaaggaggtcctgttgcggaggtgccagcaacttcaggaacatctggggttagcggaaacccgagcagagggcctccaccaactggaagccgaccattcacggatgaaaagagaggtgtccgctcacttccatgaagtgctgaggctgaaagatgaaatgcttagccttagccttcactactccaacgccctccaggaaaaggagttggccgcttcgaggtgccggagccttcaggaggagctttaccttttgaagcaggaactccagcgcgctaatatggtgtcctcctgcgagctggagcttcaggagcagagcctccgaacagcctctgaccaggaaagtggtgatgaggagctgaaccggttgaaagaggagaacgagaaactccggagtttgaccttcagcttagccgagaaggacatcctcgaacagagtttggatgaagccagaggatctagacaggaacttgtggaacgcattcactctctgcgcgagagagctgtagccgcagaacggcaacgtgagcagtattgggaggaaaaagagcagaccctactgcaattccagaagagcaaaatggcatgtcagctgtaccgagagaaggtcaacgccctacaggcccaggtttgtgagctacaaaaagaaagagatcaggcctactccgcccgtgacagcgcccaacgggaaataagccagtcgctggtagaaaaggactcactcagacgacaggtgttcgaattgacggaccaggtctgcgaactccgaacccaacttcgacaacttcaggccgagccccctggggtgctaaagcaagaagccaggactcgggagccctgccctagagagaagcagaggctagtgcggatgcatgccatatgcccaagagatgacagcgattgctcacttgtctccagcacggagagccagcttctgtcagatctgagtgcaacaagtagccgggagctcgtggattctttccggagttcaagccctgccccacctagccagcagagtttatataagagggtggccgaggacttcggcgaggaaccctggtccttttccagctgcctggaaataccagaaggcgaccccggagcgctgcctggggctaaagctggggacccccatctagactacgagctccttgacacggcagacctgccccagctggagtcctctttgcagccagtgtcaccaggacgtttagacgtatctgagagcggagtgctgatgagaagacggccagcacggcgtatcctctctcaagtgacaatgcttgctttccagggcgatgccctcctcgagcaaatttctgttattggtggtaatctgaccggcatcttcatccacagggtcacacctggctcagccgctgatcagatggctctccgcccagggactcagattgtcatggtagactacgaagccagcgaaccactcttcaaggccgttctcgaggacacgactctggaggaggccgtaggtctcctgcgaagagtggacgggttctgttgcctctctgttaaggtgaacacagacggatacaagaggttgttacaagatctggaagctaaagtcgcgacatctggtgactccttctacatcagagtgaacctcgcgatggaaggtagggctaagggcgaactccaggttcattgtaacgaggtgctccacgtgacagacacaatgttccaggggtgcgggtgttggcatgcccatagagtcaattcatatactatgaaagacacagccgctcacggtacaatccctaattattcacgtgcccagcagcagttgattgctctaatccaggatatgacccagcagtgcaccgtcacacgaaagccaagctcgggagggcctcagaagcttgtccgtatcgtctcaatggataaggccaaagctagtcctctcaggttaagtttcgatcggggtcagctcgacccttccaggatggaagggagctcaacctgtttttgggccgagtcgtgcctgacgctagtgccatacacgctcgtgagacctcaccgaccagccaggccaaggcctgtgctactcgtgcccagggctgtcggaaagatcctaagtgaaaagctttgtctgcttcagggatttaagaagtgcttggccgagtatttgtcacaggaggaatacgaggcttggtcacagcgtggcgatatcatccaagagggcgaagtttccgggggaaggtgctgggtcacacgccatgcagtggagagcctcatggagaagaacacccacgcattgctggacgtgcagctggatagcgtgtgcacattgcatcgaatggatatctttcctatcgtcatccacgtgagtgtcaatgaaaaaatggcgaaaaagttgaagaagggcttgcagcggctcggcaccagcgaggagcagctcctggaggccgctagacaggaggaaggagatctcgaccgcgctccatgcctgtacagcagtttggctccagatggatggagcgatctggacggattgctaagctgtgtacgacaagcaattgctgatgagcaaaagaaagtagtttggacagaacaatcaccacgatag

SEQ ID NO: 214753 - protein, 264 aa, Artificial Sequence
  derived and/or modified sequence
MGGAQLELPSGARPGVCVRRSFRAHAGDQPRRPPGPIPVPGTMKQESAAPNTPPTSQSPTPSAQFPRNDGDPQALWIFGYGSLVWRPDFAYSDSRVGFVRGYSRRFWQGDTFHRGSDKMPGRVVTLLEDHEGCTWGVAYQVQGEQVSKALKYLNVREAVLGGYDTKEVTFYPQDAPDQPLKALAYVATPQNPGYLGPAPEEAIATQILACRGFSGHNLEYLLRLADFMQLCGPQAQDEHLAAIVDAVGTMLPCFCPTEQALALV

SEQ ID NO: 214754 - DNA, 795 bp, Artificial Sequence
  derived and/or modified sequence
atgggcggcgcccagctggagctgcccagcggcgccagacccggcgtgtgcgtgagaagaagcttcagagcccacgccggcgaccagcccagaagaccccccggccccatccccgtgcccggcaccatgaagcaggagagcgccgcccccaacaccccccccaccagccagagccccacccccagcgcccagttccccagaaacgacggcgacccccaggccctgtggatcttcggctacggcagcctggtgtggagacccgacttcgcctacagcgacagcagagtgggcttcgtgagaggctacagcagaagattctggcagggcgacaccttccacagaggcagcgacaagatgcccggcagagtggtgaccctgctggaggaccacgagggctgcacctggggcgtggcctaccaggtgcagggcgagcaggtgagcaaggccctgaagtacctgaacgtgagagaggccgtgctgggcggctacgacaccaaggaggtgaccttctacccccaggacgcccccgaccagcccctgaaggccctggcctacgtggccaccccccagaaccccggctacctgggccccgcccccgaggaggccatcgccacccagatcctggcctgcagaggcttcagcggccacaacctggagtacctgctgagactggccgacttcatgcagctgtgcggcccccaggcccaggacgagcacctggccgccatcgtggacgccgtgggcaccatgctgccctgcttctgccccaccgagcaggccctggccctggtgtag

SEQ ID NO: 214755 - DNA, 795 bp, Artificial Sequence
  derived and/or modified sequence
atggggggtgcccagctagagctgcctagcggcgcaaggcctggggtgtgcgtgaggaggagctttagagcacacgctggcgaccagcccaggagaccacccggacctattccagtgccaggaactatgaagcaggagagcgcggcacctaatacacctccaacttctcagtctccaactccctcagcccagtttcccaggaacgacggcgatccgcaggccctctggatttttggctacgggagcctggtgtggagacccgatttcgcttattctgactcgcgtgtcggattcgttaggggatacagcagacgtttctggcagggcgatactttccaccggggatcagacaagatgcccggaagggtggttacattactggaagatcatgaaggatgcacatggggcgtagcctaccaggtgcaaggcgaacaggtgtccaaggctcttaagtacttgaacgtgcgggaggctgttctgggtggctacgacacgaaggaggtgacgttttaccctcaggacgcacccgaccaacccctcaaggcccttgcctatgttgcgacaccacagaacccagggtacctgggtccagctcctgaggaggccattgctacgcagatcctggcttgcagaggattctctggccacaatctggagtacctgctgcgcttggcagacttcatgcagttgtgcggaccacaggcacaggatgaacacctggctgccattgtcgatgccgtagggactatgctgccctgtttctgtcctactgaacaggctcttgctctcgtgtag

SEQ ID NO: 214756 - DNA, 795 bp, Artificial Sequence
  derived and/or modified sequence
atgggcggggcccagctggagctgcccagcggggcccggcctggggtgtgtgtgagaagaagcttccgggcccacgccggggaccagcccaggaggcctcctggccccatccctgtgcccggcaccatgaagcaggagagcgctgcccccaacaccccacccaccagccagagccccacccccagcgcccagttccccagaaatgatggagacccccaggccctgtggatcttcggctacggcagcctggtgtggaggccagactttgcctacagcgacagccgggtgggctttgtgcggggctacagccgccgcttctggcagggcgacaccttccaccggggcagtgacaagatgcctggccgggtggtgaccctgctggaggaccacgagggctgcacctggggcgtggcctaccaggtgcagggcgagcaggtgtccaaggccctgaagtacctgaatgtgcgggaggccgtgctgggcggctatgacaccaaggaggtgaccttctacccccaggatgccccagaccagcccctgaaggccctggcctacgtggccaccccccagaaccctggctacctgggccctgcccctgaggaggccatcgccacccagatcctggcctgccggggcttcagcggccacaacctggagtacctgctgcggctggccgacttcatgcagctgtgtggcccccaggcccaggatgagcacctggccgccatcgtggatgctgtgggcaccatgctgccctgcttctgccccacagagcaggccctggccctggtgtag

SEQ ID NO: 214757 - DNA, 795 bp, Artificial Sequence
  derived and/or modified sequence
atgggcggcgcccagctggagctgcccagcggcgcccggcccggcgtgtgcgtccgaaggtcctttcgggctcacgcgggtgaccaacccaggcggcctcccgggcccattcctgtcccaggcacaatgaagcaggagtcagccgcgcctaacactccgccaacctctcaaagcccgactccctctgcacagtttcccagaaacgatggcgacccccaggctctatggatttttggttatgggtcccttgtctggcgccctgattttgcctactcagactcgagagtgggattcgtgagagggtactctaggagattttggcaaggagacacattccatcgaggaagcgacaagatgcctggacgggtggtgactctgctggaggatcatgagggctgcacatggggcgtcgcgtatcaggtacagggcgaacaagtgtctaaagctcttaagtatctcaacgtcagagaggccgtccttggcggttacgatacaaaagaggttaccttctacccgcaagacgctcccgatcagccattgaaagccctggcgtacgtggcaactcctcaaaatcccggttatctgggccctgcacctgaggaggctatcgctacacagatcctcgcttgtcgcggcttctccggtcataaccttgagtacctgctaagattggccgactttatgcagctgtgcggtcctcaggctcaggacgaacacttggctgccattgtggacgcagtggggaccatgctcccatgcttttgtccgactgaacaggccctcgccctggtttag

SEQ ID NO: 214758 - DNA, 795 bp, Artificial Sequence
  derived and/or modified sequence
atgggcggagctcagttagaactgccaagcggtgcaagacccggagtgtgtgtgaggagaagcttccgggcacacgctggggatcagcctcggagacctcctggccctattcccgtgccgggaactatgaaacaggaaagcgctgcccctaacaccccccctacgagccagtcaccaaccccttctgctcagttcccccgtaatgatggagatccccaggcactttggattttcgggtacggatctttggtctggcgcccagatttcgcttattcagatagccgtgtggggttcgtccgcggatattcaagaagattctggcagggtgacacgttccacagaggttcagacaagatgcccggacgagtcgtgactcttctggaagatcacgagggttgtacgtggggggtggcgtaccaagtccagggagagcaagttagtaaggcactcaagtatctgaacgtgagggaggctgtgctcggaggatatgatactaaggaggttaccttttatcctcaggatgctcctgatcaaccactgaaagcccttgcatacgtcgcgacacctcagaaccccggataccttggacccgctcctgaagaggccattgcaactcaaatcctggcatgccggggtttctcaggacacaacctggagtatctactgcggctcgcggactttatgcaattgtgcggccctcaggctcaggatgagcatctggctgcgattgttgatgctgttggtactatgctgccgtgcttctgccctacagaacaggccctagccttagtgtag

SEQ ID NO: 214759 - DNA, 1842 bp, Artificial Sequence
  derived and/or modified sequence
ggagacgcccgcccggtgcccgccctgggcccggcgggtgccccctgcccgccgcctgacgcaatccgaggcgcccttgctgcatgccggcgctggagaaacctcccctgccgttgcatcactcctgccaggtttgccacagaggtggagctgaaccaatcagcgggcgcgctgggcccgcggcgcggttaagtgagaagcagaatccgaagttgattggccaaaaggggatttgccccaccccaatcaccgcggcagctggccgcggtgggcgtggtctcccggcaagaaggtttaaagggcgcctccatggggggcgctcagctggagctaccgagcggtgccaggccaggtgtgtgcgtccgtcggtctttccgtgcccacgccggagaccagccccggaggccgcctgggcctatccctgtgccaggcaccatgaagcaggagtctgcagccccgaacaccccgcccacctcgcagtcccctacgccgtccgctcagttcccccgaaacgacggcgaccctcaagcgctgtggattttcgggtacggctccctggtgtggaggcccgacttcgcctacagcgacagccgtgtgggcttcgtgcgcggctacagccgccgtttctggcagggagacaccttccatcggggcagcgacaagatgcctggccgtgtggtgacgctccttgaagatcatgagggctgcacttggggcgtggcataccaagtgcaaggggagcaggtaagcaaggccctgaagtacctgaatgtgcgagaggcagtgcttggtggctacgataccaaggaggtcaccttctatccccaagatgctcctgaccaaccactgaaggcattggcctatgtggccaccccacagaaccctggttacctgggccctgcgcctgaagaggccattgccacgcagatcctggcctgccggggcttctccggccacaaccttgaatacttgctgcgtctggcagacttcatgcagctctgtgggcctcaggcgcaggacgagcacctggcagccatcgtggacgctgtgggcaccatgttgccctgcttctgccccaccgagcaggctctggcgctggtgtgaggggctgagcccctgcggggagtgctcatgtggacatcagggccagacacccactccagtgcacaagacagacttgcgaccgcttgagcccactgagcagatatggtgggtggctggaggcttctctttctcagtccctgcctgtctgccagcctgcagctctcctgcttgacactgacttactacttgaaactttatttattgcaccatgttggtgtggtgggcaggtggagggcctgccctggacacaggggccctgctgagcagtggccccatcctggaacttgaccagattccccccagtgctgctgctaaccccacaccacccaggcctccacctccccagggagtctccaagagcctcgatcctctgctcactcagcccagccatccatagccctgggaattccacctgccaaggatcccagcaggctggatgagggatagtagggcatgaggagaaggagccctgtaaggactgaggccccggccagcccttctcctccaccagttccccagagcagagctggagctgatgcctggacacagctgctgagcctggcctgggcctcttacccacttggttgttttcttgtccctctgtctgtctgtctatctacttgtctgtctgggccactcctgcctgtgtgttggtctattcctgggaagctcatcactacaggccctggcaaccttcccagtctgtcccatactgttacccataaaactatctcttta

SEQ ID NO: 214760 - protein, 278 aa, Artificial Sequence
  derived and/or modified sequence
MDKSGIDSLDHVTSDAVELANRSDNSSDSSLFKTQCIPYSPKGEKRNPIRKFVRTPESVHASDSSSDSSFEPIPLTIKAIFERFKNRKKRYKKKKKRRYQPTGRPRGRPEGRRNPIYSLIDKKKQFRSRGSGFPFLESENEKNAPWRKILTFEQAVARGFFNYIEKLKYEHHLKESLKQMNVGEDLENEDFDSRRYKFLDDDGSISPIEESTAEDEDATHLEDNECDIKLAGDSFIVSSEFPVRLSVYLEEEDITEEAALSKKRATKAKNTGQRGLKM

SEQ ID NO: 214761 - DNA, 837 bp, Artificial Sequence
  derived and/or modified sequence
atggacaagagcggcatcgacagcctggaccacgtgaccagcgacgccgtggagctggccaacagaagcgacaacagcagcgacagcagcctgttcaagacccagtgcatcccctacagccccaagggcgagaagagaaaccccatcagaaagttcgtgagaacccccgagagcgtgcacgccagcgacagcagcagcgacagcagcttcgagcccatccccctgaccatcaaggccatcttcgagagattcaagaacagaaagaagagatacaagaagaagaagaagagaagataccagcccaccggcagacccagaggcagacccgagggcagaagaaaccccatctacagcctgatcgacaagaagaagcagttcagaagcagaggcagcggcttccccttcctggagagcgagaacgagaagaacgccccctggagaaagatcctgaccttcgagcaggccgtggccagaggcttcttcaactacatcgagaagctgaagtacgagcaccacctgaaggagagcctgaagcagatgaacgtgggcgaggacctggagaacgaggacttcgacagcagaagatacaagttcctggacgacgacggcagcatcagccccatcgaggagagcaccgccgaggacgaggacgccacccacctggaggacaacgagtgcgacatcaagctggccggcgacagcttcatcgtgagcagcgagttccccgtgagactgagcgtgtacctggaggaggaggacatcaccgaggaggccgccctgagcaagaagagagccaccaaggccaagaacaccggccagagaggcctgaagatgtag

SEQ ID NO: 214762 - DNA, 837 bp, Artificial Sequence
  derived and/or modified sequence
atggacaaatcagggatcgactcgttggaccatgtgaccagcgacgcagtggagttagccaataggtccgacaacagcagtgactcctcgctgtttaagacacaatgcattccttactcgcctaaaggagagaagcgcaatcctattcgcaagttcgtacggacccccgagagcgttcatgccagtgattcttcatctgactcctcattcgaaccaatcccgttgactatcaaggccatcttcgagaggttcaaaaaccggaagaaacgctacaagaaaaagaagaagcgaaggtatcaacccaccggccgccccaggggacgccctgagggtagacggaatcctatctattctctgatcgataagaagaaacagtttagatcccgcggcagcggattcccatttctggaatccgaaaacgagaaaaacgccccttggcgcaagattttgacttttgaacaagcagtggcgcgtggattcttcaattacattgaaaagctaaagtacgagcatcatctgaaggagtcattgaagcagatgaatgttggcgaggacctggaaaacgaggatttcgatagccgcaggtataaatttttggacgacgacgggagcatctcccctatcgaggaatcgactgctgaggatgaggacgcaacacacctggaagacaacgaatgcgacataaaattggctggagattcctttattgtttctagtgagttcccagtgcgactctccgtttacctggaagaagaagatataactgaggaggccgccttgagcaaaaaacgggcaactaaggctaagaacacgggtcagcggggcctgaaaatgtag

SEQ ID NO: 214763 - DNA, 837 bp, Artificial Sequence
  derived and/or modified sequence
atggacaaatcgggcatcgacagccttgaccacgtcacctctgacgccgtagagcttgctaaccgcagtgacaactcctcggatagttccctcttcaaaacccagtgtatcccatatagtcctaaaggggagaagagaaatcctatacggaagttcgtaagaaccccagagagtgttcacgcatccgacagtagttccgactcaagcttcgagccaattcctctcactatcaaagctattttcgaaaggtttaaaaataggaaaaaaagatataagaagaagaaaaagcgccgctatcaacccacggggcgaccacgcgggcggcctgagggccggcgcaacccgatttactccctgattgacaagaagaaacagtttaggtcccgtgggagtggcttccctttcctggagagcgagaacgagaagaacgctccctggagaaagatcctgacgtttgaacaggccgtggccaggggtttctttaattacatcgaaaagctaaagtatgagcaccatctgaaagagagcctgaagcagatgaatgtaggtgaggatcttgaaaacgaagactttgattctaggcgttataaatttctcgacgacgacgggtccatttctcctatcgaggagtcaacagctgaagacgaagacgccacgcatctagaggacaatgagtgtgatataaaacttgccggggattcatttatagtgtcgtccgagtttccagtccggctgtcggtctacctggaagaggaagatatcaccgaggaggctgcattaagtaagaaaagagcgacgaaggcaaaaaacaccggccagcgcggtctgaagatgtag

SEQ ID NO: 214764 - DNA, 837 bp, Artificial Sequence
  derived and/or modified sequence
atggacaaaagcggaatagattccctggatcatgtgacctctgacgccgttgagttggcaaaccgctcagacaattcctccgattctagcctcttcaagactcagtgcattccttattccccaaaaggtgaaaagagaaatccaatccggaagttcgtgcgaactccagagagcgttcatgcctctgactcctcatcagacagctcgttcgagcccatcccactcacaattaaggcgattttcgaacggttcaaaaaccgcaaaaagcggtataaaaagaagaaaaaaaggcggtaccagcctacagggcggccacgagggcggcctgagggtcggcgtaatcccatttattcattaattgataagaagaagcagtttagatcccggggctctggcttccccttcttggaatccgagaatgaaaagaacgccccatggcgcaaaatcctcacattcgagcaggccgtcgctcgcggattctttaattacatagagaagctcaagtacgagcatcacttaaaagaaagcctcaaacagatgaatgtgggggaggatttggaaaatgaggatttcgactccaggcgctacaaattcctcgatgatgatggatccattagtcccatcgaggagtctaccgccgaggatgaggacgccacacatttagaggataacgaatgtgatatcaagctcgcgggcgattcctttatagtatcaagtgagttccccgtcaggttgagcgtgtacctcgaggaagaagacatcactgaagaagccgcgctctcaaaaaagagagcaacgaaggccaaaaatactggacagcggggcctcaagatgtag

SEQ ID NO: 214765 - DNA, 837 bp, Artificial Sequence
  derived and/or modified sequence
atggacaagagcggcatcgacagcctggaccacgtgaccagtgatgctgtggagctggccaacagaagtgacaacagcagtgacagcagcctcttcaagacccagtgcatcccctacagccccaagggggagaagaggaaccccatcaggaagtttgtgaggaccccagagagcgtgcacgccagtgacagcagcagtgacagcagctttgagcccatccccctgaccatcaaggccatctttgagcgcttcaagaacaggaagaagcgctacaagaagaagaagaagaggcgctaccagcccaccggccggccccggggccggcctgagggcagaagaaaccccatctacagcctgattgacaagaagaagcagttccgcagccggggcagcggcttccccttcctggagagtgaaaatgagaagaatgccccctggaggaagatcctgacctttgagcaggccgtggcccggggcttcttcaactacatcgagaagctgaagtatgagcaccacctgaaggagagcctgaagcagatgaatgtgggggaggacctggagaatgaagattttgacagccgccgctacaagttcctggatgatgatggcagcatcagccccatcgaggagagcacagcagaagatgaagatgccacccacctggaggacaatgaatgtgacatcaagctggccggggacagcttcatcgtgtcctctgagttccctgtgcggctgtctgtgtacctggaggaggaggacatcacagaggaggccgccctgagcaagaagagggccaccaaggccaagaacacaggccagaggggcctgaagatgtag

SEQ ID NO: 214766 - DNA, 837 bp, Artificial Sequence
  derived and/or modified sequence
atggacaagagcggcatcgacagcctggaccacgtgaccagcgacgccgtggaactggctaatagaagcgacaatagtagtgacagctcgctgtttaaaacccagtgcattccttactccccaaagggagaaaaacggaatccgatcaggaagttcgtgcgaacccccgagagcgttcacgcgtctgacagttcttcggactccagttttgaaccaattcctctcactatcaaggctatctttgaaagatttaaaaaccgaaagaagaggtacaaaaagaaaaaaaagagacggtaccagccaaccggccgcccaagagggagaccagaaggtcgcagaaatcccatctattccctgatcgataagaagaagcagtttcgctcacgggggtccggatttccattcctggagtctgaaaacgagaaaaacgctccctggagaaagatcctgactttcgagcaagccgtggcaagaggattttttaattatatagagaagctgaaatatgagcaccacctgaaagagtccttaaaacagatgaacgtgggcgaggatttggagaatgaggatttcgattccagacgctacaaattcctggacgacgatgggagcatcagcccgattgaggagtctaccgccgaagacgaggacgccactcatctggaggacaacgagtgcgacatcaaactcgctggggattcatttattgtaagttcagaatttcctgtcaggttatcggtgtatctggaggaggaggatataactgaagaagccgccctgtccaaaaagcgcgccacgaaagcaaaaaacacaggccaaaggggcctgaagatgtag

SEQ ID NO: 214767 - DNA, 837 bp, Artificial Sequence
  derived and/or modified sequence
atggacaagagcggcatcgacagcctggaccacgtgaccagcgacgccgttgaattggccaacaggagcgacaattcatccgattcctccctgttcaaaacacagtgcatcccgtatagcccgaaaggcgagaagaggaaccctattcgaaagttcgtcagaacgcccgagagtgtgcacgcatctgattcctcttcagacagttccttcgaacctattcccctcactatcaaagccatttttgagcgatttaagaataggaagaaacgctacaagaagaagaagaagcgtaggtaccagcctacgggaaggcctcgagggcggccagagggacggcgtaaccccatctactcgctcatagataaaaaaaagcagttccgcagtcgcgggagcggattccccttcctggagagtgaaaacgagaaaaacgctccctggcggaagattctgacatttgaacaggcagtcgcgagagggttcttcaattacatagaaaagcttaaatacgagcaccatctgaaagaatctctgaaacagatgaatgtgggagaagatctggagaacgaagatttcgatagccggcgttacaagttcctggacgatgacgggtccatcagccccatagaggaaagtaccgcggaggacgaggatgccacacatttggaagataacgaatgcgatattaagttagccggcgactctttcattgtgtccagtgagttccctgttcggctgagtgtgtatttggaagaggaagacataactgaggaggccgccctctcaaagaaacgtgctacaaaagccaagaacaccggtcagcgcggtctgaagatgtag

SEQ ID NO: 214768 - DNA, 837 bp, Artificial Sequence
  derived and/or modified sequence
atggacaagagcggcatcgacagcctggaccacgtgaccagcgacgccgtggagctggctaaccgaagcgataactcaagtgacagctctctgttcaaaacacagtgcattccatacagcccaaagggcgaaaaacgaaaccccattcgaaaatttgtgcgcacaccagaatccgtacacgcctcggactccagtagtgacagtagcttcgaacccatcccgcttactattaaagccatttttgagaggtttaaaaacaggaaaaaaagatacaaaaaaaaaaagaagaggagatatcagcccaccggacgccctagggggagaccggaaggaagacgtaatccgatatatagcttaatcgacaagaagaaacagttccggtcaagaggaagcggctttccctttctggaatctgaaaatgagaaaaacgcgccatggcgaaagatacttacgttcgaacaggcagtggcacggggtttcttcaattacatcgagaaactgaaatatgagcaccacctgaaagagtctctgaagcagatgaacgtgggagaagaccttgaaaacgaggatttcgattccaggaggtataagtttctagacgatgacggctcgataagccccattgaagaatccactgccgaggatgaagacgcaacacacttagaagataacgaatgcgatatcaagcttgcgggtgacagctttatagtctcaagcgaattccccgtccgcctttccgtgtatcttgaagaggaagacatcaccgaggaggccgcacttagtaagaagagggccacaaaagccaagaatacggggcagagaggactcaaaatgtag

SEQ ID NO: 214769 - DNA, 837 bp, Artificial Sequence
  derived and/or modified sequence
atggacaagtccgggattgacagcctggaccacgtgactagcgacgccgtggaattggctaatcgttccgataatagcagcgattcttccctgtttaaaacccagtgcattccatactccccaaagggcgagaaaagaaaccccattcgcaaattcgtccgaactcccgagagtgtccacgcatctgactcaagttctgacagcagtttcgagcctatacctctgactatcaaagcaatattcgagagattcaagaatcgtaaaaagcgatataaaaaaaaaaagaagaggagatatcagcccacaggtcgcccaagggggagacctgaagggcgtcggaacccaatttacagcctaattgataagaagaaacaattccgctccagggggtctgggtttcccttccttgagagcgagaacgagaagaacgcaccgtggaggaagatcctcacatttgaacaggccgtggccagggggtttttcaattacatcgagaaattgaaatatgaacatcacctcaaggagtcactgaaacaaatgaacgtgggagaggatctggagaacgaggactttgactctcgtcggtataaattcctcgacgatgatggttcaatctctcctatagaagagagcacagcggaggatgaggacgcaactcacttggaggacaatgaatgcgatatcaaactcgctggggattcctttatcgttagcagtgagtttcctgttagattgtccgtatacctggaagaggaggatatcaccgaagaagctgcactgtctaagaaaagagcaacaaaagctaaaaacaccgggcagcggggactcaagatgtag

SEQ ID NO: 214770 - DNA, 837 bp, Artificial Sequence
  derived and/or modified sequence
atggataaatctgggatcgatagcctggatcatgtgacaagcgatgctgttgaattggccaataggtctgataatagcagcgacagttctctattcaagactcagtgtatcccgtacagcccgaagggcgagaaaagaaaccccatccggaagtttgttcgcacacctgaatccgtgcacgctagcgatagcagctcagactcctccttcgaacctattccactcaccatcaaagccatcttcgaacggtttaaaaaccgtaagaaaaggtataaaaagaagaagaagaggcggtatcagcctactggcagaccgagaggtagacctgaagggcgaagaaatcctatatattcactcattgataagaagaaacagttcagatctagaggttctggatttccttttctagagagtgaaaacgagaagaatgccccatggcgaaagatcttgacgtttgaacaagcggtagcccgtgggttcttcaactatatagaaaagctgaagtacgaacaccacttgaaggagtctctgaaacagatgaatgtgggtgaggatctggagaacgaagactttgactcaagacggtacaagtttttggacgacgacggaagtataagtcctatcgaagagagcaccgccgaagatgaggacgctacacaccttgaggacaacgagtgtgacataaaactggccggagatagctttattgtgtcctctgagttccccgtccggctttcagtttacctcgaggaggaggatataaccgaggaggccgctctgtccaaaaagcgcgcaacaaaagccaaaaacaccggtcagcgaggcctgaagatgtag

SEQ ID NO: 214771 - DNA, 837 bp, Artificial Sequence
  derived and/or modified sequence
atggacaagagcgggatagatagtctggaccacgtaacatcagacgctgtagagctcgctaaccgatccgataactcttcagactctagcctcttcaagacccaatgtatcccttattctccgaaaggggagaaacgcaacccaatccgaaaatttgtgcgcacgcccgaatctgttcacgcatctgattccagctccgattcctcctttgaaccaattccattaacgatcaaagccattttcgaaaggttcaagaaccggaagaagcggtataagaaaaagaagaaaagacgctatcaacctacagggaggccacgcggtagaccggagggtcgacgtaaccctatctactcccttatcgacaaaaagaagcaattcaggtcccggggaagcgggttcccatttcttgaatctgagaatgaaaaaaacgccccttggaggaagatattgacttttgaacaggccgttgcgcgtggtttttttaactacattgaaaagctcaaatacgagcaccatcttaaggagtccctgaaacagatgaacgttggggaagatctggagaacgaggatttcgacagccgaagatacaagttcttggacgacgacggtagtataagtcctatcgaagaatctacagccgaggatgaggatgcaacacatctcgaggataacgagtgcgatattaagctggcaggcgattccttcatcgtatctagcgagtttcctgtccggctctctgtttacctcgaggaggaggatatcactgaggaagcggcattaagcaagaaaagagctacaaaggccaagaataccggtcaaagaggcctgaagatgtag

SEQ ID NO: 214772 - DNA, 2540 bp, Artificial Sequence
  derived and/or modified sequence
cttttcttccgcacggttggaggaggtcggctggttatcgggagttggagggctgaggtcgggagggtggtgtgtacagagctctaggacaccaggccagtcgcgggttttgggccgaggcctgggttacaagcagcaagtgcgcggttggggccactgcgaggccgttttagaaaactgtttaaaacaaagagcaattgatggataaatcaggaatagattctcttgaccatgtgacatctgatgctgtggaacttgcaaatcgaagtgataactcttctgatagcagcttatttaaaactcagtgtatcccttactcacctaaaggggagaaaagaaaccccattcgaaaatttgttcgtacacctgaaagtgttcacgcaagtgattcatcaagtgactcatcttttgaaccaataccattgactataaaagctatttttgaaagattcaagaacaggaaaaagagatataaaaaaaagaaaaagaggaggtaccagccaacaggaagaccacggggaagaccagaaggaaggagaaatcctatatactcactaatagataagaagaaacaatttagaagcagaggatctggcttcccatttttagaatcagagaatgaaaaaaacgcaccttggagaaaaattttaacgtttgagcaagctgttgcaagaggattttttaactatattgaaaaactgaagtatgaacaccacctgaaagaatcattgaagcaaatgaatgttggtgaagatttagaaaatgaagattttgacagtcgtagatacaaatttttggatgatgatggatccatttctcctattgaggagtcaacagcagaggatgaggatgcaacacatcttgaagataacgaatgtgatatcaaattggcaggggatagtttcatagtaagttctgaattccctgtaagactgagtgtatacttagaagaagaggatattactgaagaagctgctttgtctaaaaagagagctacaaaagccaaaaatactggacagagaggcctgaaaatgtgacaggatcatgaatgtcaaaggcttttatcttgagaacatggtgtctggagttaaaggtattggcatactccacacatctgtaccattcttgagtgatcgcttaggaatgaatgtgatttgaactcattcatgttgagagggtgtcaaattgagaaccaggtagatccccaccacctacagtaaaaaggaccctaaagtaaattggttgaagaaattagatcccaaagattcttggtgaattttgaagtcttcatcagtatatccatattaaaacgagatgacagaagccaaagtaattatggcaagtaatggtttttatcttaactataagttatttgctcaagggtgtaatggtcattaccaaggcttttagaatgcagtttctcatttgctgtggacatgaccataaaaaaatttcccagtaggttttctatctgctactttgctagcaatcagcttattgggaacagttgattaactgtaatagaaatgcaatacaaataaaatgtgaaccacatgtgatttttctttaaaatcagtgagatttgaaaattctcctagatctcttgaatcatgcaaatttgctttgcctttatattgtaacccttgtgggttgctaataaccaagcagtttgtagtagagttaactcaggctcgttctagggactcattcatgttcactcactgtacactcatctctggaaatgtaaaatttacttttatactattgttatgtagggctgacaggacaactggatcagtttcattaaaaaggtatgtatgcattagaaaagacatttgtatgggtcatttcaaagagggcttatgaggctgtgaaacccagagctcttaacgctgtgaccaaagatggaagttctctataggaagccatagcactcctaatgtttggtgctatgttttcctgaggagatataaaacgtaataatccaggattgttgccatgtgagagttttaaaggttaatcaaaatttctcttcttcagggcaaacttgaagataaatcttttgactccagctctttagaggatctaaagtgaccttgatggacagtggaagaaatcacaacatggaattcctcgaataacaatttattgactttaaataattttgtctaatgctacatatacacaattaaaaaacctttacactatttctagaaagtcagcatgtatttttggctcgaagtttctctagtgttttctgtggaaggaataaaaatttgagtttcagttgtgtacttcatgcttgaaaaattaagtccttctccctcagttatactcaccttatggaattcttttgcccttgctctgttttgggcataagcttcttgttttgttttttcttccttttgttgtttcacttcagctagttgattgtataacctgtaaagaatttatatagaattagagacaaacactgcaaaaagtgaatcactaaaaaaaaaaaaaaaattaaccctaccttagacccctttggtgcctta

SEQ ID NO: 214773 - DNA, 2082 bp, Artificial Sequence
  derived and/or modified sequence
caaaggattacaaaacactcaggcacacatcccacccgtcaccctcgccacacacccgggaccagatttagaaagccaggcgacagctcagcaaacgcgagaccaccggaaacgaaccgggctgagaggctgtttcctcacagttctcatccactcacaagtgaccgcacgttttgtttttgttatttgccgaaatgttcttggctattccactcacctaaacggtcacggtagcaaaacacccagagtccggatcttcgcctaggccaaccccgcctcctcagaatacgcgagctagagctccgcccacgttagtcagtcctccctgcgcggcgagaaaaatggcgcccccacgtcgcgtctcctcccaccgctcgccttcttcccggaagctaagttgtatcgcgagatttcggcctgactattacttgggccacggaaatagccaacccttttcttccgcacggttggaggaggtcggctggttatcgggagttggagggctgaggtcgggagggtggtgtgtacagagctctaggacaccaggccagtcgcgggttttgggccgaggcctgggttacaagcagcaagtgcgcggttggggccactgcgaggccgttttagaaaactgtttaaaacaaagagcaattgatggataaatcaggaatagattctcttgaccatgtgacatctgatgctgtggaacttgcaaatcgaagtgataactcttctgatagcagcttatttaaaactcagtgtatcccttactcacctaaaggggagaaaagaaaccccattcgaaaatttgttcgtacacctgaaagtgttcacgcaagtgattcatcaagtgactcatcttttgaaccaataccattgactataaaagctatttttgaaagattcaagaacaggaaaaagagatataaaaaaaagaaaaagaggaggtaccagccaacaggaagaccacggggaagaccagaaggaaggagaaatcctatatactcactaatagataagaagaaacaatttagaagcagaggatctggcttcccatttttagaatcagagaatgaaaaaaacgcaccttggagaaaaattttaacgtttgagcaagctgttgcaagaggattttttaactatattgaaaaactgaagtatgaacaccacctgaaagaatcattgaagcaaatgaatgttggtgaagatttagaaaatgaagattttgacagtcgtagatacaaatttttggatgatgatggatccatttctcctattgaggagtcaacagcagaggatgaggatgcaacacatcttgaagataacgaatgtgatatcaaattggcaggggatagtttcatagtaagttctgaattccctgtaagactgagtgtatacttagaagaagaggatattactgaagaagctgctttgtctaaaaagagagctacaaaagccaaaaatactggacagagaggcctgaaaatgtgacaggatcatgaatgtcaaaggtgaagcatatagaaaaaacgacttcatagaaatgaataaagataaatgtggatatatgtaccagtctggtggtgaagaaattctgaaacccagaactttataacaagaaaaaaaatttttaaccctgtgaagaagtttgtgaaagaaacttgtgaagtagtaataattagaaaaaaaaccattaaaacaccagagaaaatacatagaaaaatttgagaaattgtcatttgatttctgaataagagcttacaggtgtcctgtgagtattgaaacaatgaaatgtagtgattttaattttgaaaagaaaatcttaaagtaacttgacacccaaccatcttgaagaggggatttgaaatgctgtaattttatcccagctttgttcagccatgacaagtgacctgtcagatgcttagtattgtaataacctcatttccctttccaaatttagagtatctttaatactattttttttagacagagtctcgatctgtcacccaggctgtagtgcaatggccgcagtcttggcttactgcaacctccatctcccgggttcaagcgattctgcctcagcct

SEQ ID NO: 214774 - DNA, 1735 bp, Artificial Sequence
  derived and/or modified sequence
ttttcttccgcacggttggaggaggtcggctggttatcgggagttggagggctgaggtcgggagggtggtgtgtacagagctctaggacaccaggccagtcgcgggttttgggccgaggcctgggttacaagcagcaagtgcgcggttggggccactgcgaggccgttttagaaaactgtttaaaacaaagagcaattgatggataaatcaggaatagattctcttgaccatgtgacatctgatgctgtggaacttgcaaatcgaagtgataactcttctgatagcagcttatttaaaactcagtgtatcccttactcacctaaaggggagaaaagaaaccccattcgaaaatttgttcgtacacctgaaagtgttcacgcaagtgattcatcaagtgactcatcttttgaaccaataccattgactataaaagctatttttgaaagattcaagaacaggaaaaagagatataaaaaaaagaaaaagaggaggtaccagccaacaggaagaccacggggaagaccagaaggaaggagaaatcctatatactcactaatagataagaagaaacaatttagaagcagaggatctggcttcccatttttagaatcagagaatgaaaaaaacgcaccttggagaaaaattttaacgtttgagcaagctgttgcaagaggattttttaactatattgaaaaactgaagtatgaacaccacctgaaagaatcattgaagcaaatgaatgttggtgaagatttagaaaatgaagattttgacagtcgtagatacaaatttttggatgatgatggatccatttctcctattgaggagtcaacagcagaggatgaggatgcaacacatcttgaagataacgaatgtgatatcaaattggcaggggatagtttcatagtaagttctgaattccctgtaagactgagtgtatacttagaagaagaggatattactgaagaagctgctttgtctaaaaagagagctacaaaagccaaaaatactggacagagaggcctgaaaatgtgacaggatcatgaatgtcaaaggcttttatcttgagaacatggtgtctggagttaaaggactattgttagatctgtgggaaggaattacaagacagttgctaaaagtttgaaaaagacggttgctaaacgttatgaaaaaccagataatctacttttttaccttaggtattggcatactccacacatctgtaccattcttgagtgatcgcttaggaatgaatgtgatttgaactcattcatgttgagagggtgtcaaattgagaaccaggtagatccccaccacctacagtaaaaaggaccctaaagtaaattggttgaagaaattagatcccaaagattcttggtgaattttgaagtcttcatcagtatatccatattaaaacgagatgacagaagccaaagtaattatgggctgacaggacaactggatcagtttcattaaaaagggcaaacttgaagataaatcttttgactccagctctttagaggatctaaagtgaccttgatggacagtggaagaaatcacaacatggaattcctcgaataacaatttattgactttaaataattttgtctaatgctacatatacacaattaaaaaacctttacactatttctagaaagtcagcatgtatttttggctcgaagtttctctagtgttttctgtggaaggaataaaaatttgagtttcagttgtgta

SEQ ID NO: 214775 - protein, 486 aa, Artificial Sequence
  derived and/or modified sequence
MAFLDNPTIILAHIRQSHVTSDDTGMCEMVLIDHDVDLEKIHPPSMPGDSGSEIQGSNGETQGYVYAQSVDITSSWDFGIRRRSNTAQRLERLRKERQNQIKCKNIQWKERNSKQSAQELKSLFEKKSLKEKPPISGKQSILSVRLEQCPLQLNNPFNEYSKFDGKGHVGTTATKKIDVYLPLHSSQDRLLPMTVVTMASARVQDLIGLICWQYTSEGREPKLNDNVSAYCLHIAEDDGEVDTDFPPLDSNEPIHKFGFSTLALVEKYSSPGLTSKESLFVRINAAHGFSLIQVDNTKVTMKEILLKAVKRRKGSQKVSGSRADGVFEEDSQIDIATVQDMLSSHHYKSFKVSMIHRLRFTTDVQLGISGDKVEIDPVTNQKASTKFWIKQKPISIDSDLLCACDLAEEKSPSHAIFKLTYLSNHDYKHLYFESDAATVNEIVLKVNYILESRASTARADYFAQKQRKLNRRTSFSFQKEKKSGQQ

SEQ ID NO: 214776 - protein, 132 aa, Artificial Sequence
  derived and/or modified sequence
MAFLDNPTIILAHIRQSHVTSDDTGMCEMVLIDHDVDLEKIHPPSMPGDSGSEIQGSNAQRLERLRKERQNQIKCKNIQWKERNSKQSAQELKSLFEKKSLKEKPPISGKQSILSVRLEQCPLQLNNPFNEY

SEQ ID NO: 214777 - DNA, 1461 bp, Artificial Sequence
  derived and/or modified sequence
atggccttcctggacaaccccaccatcatcctggcccacatcagacagagccacgtgaccagcgacgacaccggcatgtgcgagatggtgctgatcgaccacgacgtggacctggagaagatccacccccccagcatgcccggcgacagcggcagcgagatccagggcagcaacggcgagacccagggctacgtgtacgcccagagcgtggacatcaccagcagctgggacttcggcatcagaagaagaagcaacaccgcccagagactggagagactgagaaaggagagacagaaccagatcaagtgcaagaacatccagtggaaggagagaaacagcaagcagagcgcccaggagctgaagagcctgttcgagaagaagagcctgaaggagaagccccccatcagcggcaagcagagcatcctgagcgtgagactggagcagtgccccctgcagctgaacaaccccttcaacgagtacagcaagttcgacggcaagggccacgtgggcaccaccgccaccaagaagatcgacgtgtacctgcccctgcacagcagccaggacagactgctgcccatgaccgtggtgaccatggccagcgccagagtgcaggacctgatcggcctgatctgctggcagtacaccagcgagggcagagagcccaagctgaacgacaacgtgagcgcctactgcctgcacatcgccgaggacgacggcgaggtggacaccgacttcccccccctggacagcaacgagcccatccacaagttcggcttcagcaccctggccctggtggagaagtacagcagccccggcctgaccagcaaggagagcctgttcgtgagaatcaacgccgcccacggcttcagcctgatccaggtggacaacaccaaggtgaccatgaaggagatcctgctgaaggccgtgaagagaagaaagggcagccagaaggtgagcggcagcagagccgacggcgtgttcgaggaggacagccagatcgacatcgccaccgtgcaggacatgctgagcagccaccactacaagagcttcaaggtgagcatgatccacagactgagattcaccaccgacgtgcagctgggcatcagcggcgacaaggtggagatcgaccccgtgaccaaccagaaggccagcaccaagttctggatcaagcagaagcccatcagcatcgacagcgacctgctgtgcgcctgcgacctggccgaggagaagagccccagccacgccatcttcaagctgacctacctgagcaaccacgactacaagcacctgtacttcgagagcgacgccgccaccgtgaacgagatcgtgctgaaggtgaactacatcctggagagcagagccagcaccgccagagccgactacttcgcccagaagcagagaaagctgaacagaagaaccagcttcagcttccagaaggagaagaagagcggccagcagtag

SEQ ID NO: 214778 - DNA, 708 bp, Artificial Sequence
  derived and/or modified sequence
atgaccgtggtgaccatggccagcgccagagtgcaggacctgatcggcctgatctgctggcagtacaccagcgagggcagagagcccaagctgaagaacgccgcccacggcttcagcctgatccaggtggacaacaccaaggtgaccatgaaggagatcctgctgaaggccgtgaagagaagaaagggcagccagaaggtgagcggcagcagagccgacggcgtgttcgaggaggacagccagatcgacatcgccaccgtgcaggacatgctgagcagccaccactacaagagcttcaaggtgagcatgatccacagactgagattcaccaccgacgtgcagctgggcatcagcggcgacaaggtggagatcgaccccgtgaccaaccagaaggccagcaccaagttctggatcaagcagaagcccatcagcatcgacagcgacctgctgtgcgcctgcgacctggccgaggagaagagccccagccacgccatcttcaagctgacctacctgagcaaccacgactacaagcacctgtacttcgagagcgacgccgccaccgtgaacgagatcgtgctgaaggtgaactacatcctggagagcagagccagcaccgccagagccgactacttcgcccagaagcagagaaagctgaacagaagaaccagcttcagcttccagaaggagaagaagagcggccagcagtag

SEQ ID NO: 214779 - DNA, 1461 bp, Artificial Sequence
  derived and/or modified sequence
atggccttcctggataatcccactattatcttggcgcatattcgccagtctcacgtaacttccgatgacacaggcatgtgcgaaatggtgttaatagaccacgacgtggaccttgagaagattcacccccccagcatgccaggagattccggttctgaaattcagggatccaatggtgaaacacagggatatgtatatgcgcaatccgtcgacattacttctagttgggattttggtatacgcaggcggagtaatacagcccaaaggctcgagaggctacgcaaggaaaggcagaatcagatcaagtgcaaaaatatacaatggaaggaacgcaactctaagcagtccgcccaggagctcaagtccctgtttgagaaaaaaagtctgaaagaaaaacccccgatttccggtaaacaatcaattctgtcagtgagactcgagcaatgtcctctgcaactgaataacccgtttaacgaatatagcaaatttgatggcaaaggacatgtcggaacaacagctacaaagaaaattgatgtatatctccctttgcacagctcgcaggataggctgctccctatgactgtcgtgactatggcatcagccagagtccaggatctgattgggctcatatgctggcagtacacctctgagggtagagagcccaaacttaatgacaatgttagcgcatattgtctgcacatcgcagaagacgatggtgaagtcgacactgatttccctcctctcgacagtaacgaacccatccataagttcgggttcagcactctggctctggtagagaagtattcttcacccgggctcacatcaaaggagagtctgtttgtccgtatcaacgccgctcatgggtttagcctgatccaggtagacaataccaaggtgacaatgaaggaaatcctcctaaaggccgtgaaaaggcgaaaaggctcacagaaagtgagcggctcgagggcagatggcgtgttcgaggaggactcccagatcgatatagccaccgtgcaggacatgctttccagccaccactacaagtctttcaaggtgtccatgattcaccgactgcggtttacgacggatgtccagctcgggatttctggggataaagtcgagattgatcccgtcacaaaccagaaggcttcaactaagttctggatcaagcagaagcccatcagtatagatagtgacctgctttgtgcttgcgacctcgctgaggaaaaaagcccttcccacgccatctttaagctgacctacctctctaatcatgattataagcacctatactttgaaagcgacgccgctactgtgaatgagatcgtgcttaaagtcaactatatcttggaatcacgcgcaagtacggcgcgtgccgattacttcgcacagaaacagcgtaaacttaacagacggacctcgttcagtttccagaaagagaagaagtcaggtcagcagtag

SEQ ID NO: 214780 - DNA, 708 bp, Artificial Sequence
  derived and/or modified sequence
atgaccgtggtgacaatggcttccgcccgggtgcaagacctgatcggccttatatgttggcagtacacatccgaaggaagagaacctaaactcaagaatgctgcccacggcttttctctcatccaggtggacaacactaaggttaccatgaaggagattttgttgaaggcagtgaagaggagaaaaggctcccaaaaggtcagcgggagccgcgcagacggagtattcgaggaggacagccaaatagacattgctacggtccaggatatgttatccagccatcactataagtccttcaaagtgagcatgattcacaggctccgctttacaacagatgtgcaactcggaatcagtggagataaggtcgagattgaccccgtcactaaccaaaaagcaagcacaaagttctggatcaaacagaagccaatcagcattgactccgatttgctgtgtgcttgtgatctggcagaggaaaaatcaccaagtcatgccattttcaagctgacttacctgagcaaccacgactacaagcatctgtactttgagtccgacgctgccactgtgaacgagatcgtacttaaagtcaactatattttagagtcaagggcttctactgcccgggcagactatttcgcgcagaagcagcggaaattaaaccgccgcacctccttctcatttcaaaaagagaaaaagagcgggcaacagtag

SEQ ID NO: 214781 - DNA, 1461 bp, Artificial Sequence
  derived and/or modified sequence
atggccttcctggacaaccccaccatcatcctggcccacatccggcagagccacgtgaccagtgatgacaccggcatgtgtgagatggtgctgattgaccatgatgtggacctggagaagatccaccccccatccatgcctggggacagcggcagcgagatccagggcagcaatggagagacccagggctacgtgtatgcccagagcgtggacatcaccagctcctgggactttggcatcagaagaagaagcaacacagcccagaggctggagcggctgaggaaggagcggcagaaccagatcaagtgcaagaacatccagtggaaggagaggaacagcaagcagagcgcccaggagctgaagagcctgtttgagaagaagagcctgaaggagaagccacccatcagcggcaagcagagcatcctgtctgtgcggctggagcagtgccccctgcagctgaacaaccccttcaatgagtacagcaagtttgatggcaagggccacgtgggcaccacagccaccaagaagattgatgtgtacctgcccctgcacagcagccaggaccggctgctgcccatgacagtggtgaccatggccagcgcccgggtgcaggacctgattggcctcatctgctggcagtacaccagcgagggccgggagcccaagctgaatgacaacgtgtctgcctactgcctgcacatcgccgaggatgatggagaggtggacacagacttcccccccctggacagcaatgagcccatccacaagtttggcttcagcaccctggccctggtggagaagtacagcagccctggcctgaccagcaaggagagcctgtttgtgcgcatcaatgctgcccacggcttcagcctcatccaggtggacaacaccaaggtgaccatgaaggagatcctgctgaaggctgtgaagaggaggaagggcagccagaaggtgtctggcagcagagcagatggagtgtttgaggaggacagccagattgatattgccaccgtgcaggacatgctgagcagccaccactacaagagcttcaaggtgtccatgatccaccggctgcgcttcaccacagatgtgcagctgggcatcagcggggacaaggtggagattgatcctgtgaccaaccagaaggccagcaccaagttctggatcaagcagaagcccatcagcattgacagcgacctgctgtgtgcctgtgacctggccgaggagaagagccccagccacgccatcttcaagctgacctacctgagcaaccacgactacaagcacctgtactttgaaagtgatgctgccaccgtgaatgagatcgtgctgaaggtgaactacatcctggagagccgggccagcacagcccgggctgactactttgcccagaagcagaggaagctgaacagaaggaccagcttctccttccagaaggagaagaagagcggccagcagtag

SEQ ID NO: 214782 - DNA, 708 bp, Artificial Sequence
  derived and/or modified sequence
atgacagtggtgaccatggccagcgcccgggtgcaggacctgattggcctcatctgctggcagtacaccagcgagggccgggagcccaagctgaagaatgctgcccacggcttcagcctcatccaggtggacaacaccaaggtgaccatgaaggagatcctgctgaaggctgtgaagaggaggaagggcagccagaaggtgtctggcagcagagcagatggagtgtttgaggaggacagccagattgacatcgccaccgtgcaggacatgctgagcagccaccactacaagagcttcaaggtgtccatgatccaccggctgcgcttcaccacagatgtgcagctgggcatcagcggggacaaggtggagattgatcctgtgaccaaccagaaggccagcaccaagttctggatcaagcagaagcccatcagcattgacagcgacctgctgtgtgcctgtgacctggccgaggagaagagccccagccacgccatcttcaagctgacctacctgagcaaccacgactacaagcacctgtactttgaaagtgatgctgccaccgtgaatgaaattgtgctgaaggtgaactacatcctggagagccgggccagcacagcccgggctgactactttgcccagaagcagaggaagctgaacagaaggaccagcttctccttccagaaggagaagaagagcggccagcagtag

SEQ ID NO: 214783 - DNA, 3256 bp, Artificial Sequence
  derived and/or modified sequence
gtgcggctcggggtaatagggctgctgctcggccggccggcggcggcgagcagcaggggcatgagggctaacccgggaagcggcagctgagcgggccgggaggagcgccggtccccgtggatcccgagagtgcagagctcggggcaggggccgggaggcgtgggggagccgggccctcccctcaggaacgtgtcccggggccgacccggcccgtagtgtggaagcagcttcaggtaggtgagctcgtgaaacaatatgaagaggagaaaatagccttttaaggaaattggcccacagaaaggatggccttcttggacaatccaactatcattctagctcatattcgacagtcacatgtgaccagtgatgacacgggaatgtgtgagatggttctcattgatcatgatgttgacctagagaagattcatcctccttcaatgcctggagacagtgggtcagaaattcagggaagcaatggtgagactcagggctatgtatatgcccagtcagtcgatattacctcaagttgggactttggtattagaagacgctcaaacacagctcaaagattagaacgactccgaaaagagagacaaaaccagatcaaatgcaaaaatattcagtggaaagaaagaaattctaagcaatcagcccaggagttaaagtcactgtttgaaaaaaaatctctcaaagagaagcctccaatttctgggaagcagtcgatattatctgtacgcctagaacagtgccctctgcagctgaataacccttttaacgagtattccaaatttgatggcaagggtcatgtaggtacaacagcaaccaagaagatcgatgtctacctccctctgcactcgagccaggacagactgctgccaatgaccgtggtgacaatggccagcgccagggtgcaggacctgatcgggctcatctgctggcagtatacaagcgaaggacgggagccgaagctcaatgacaatgtcagtgcctactgcctgcatattgctgaggatgatggggaggtggacaccgatttccccccgctggattccaatgagcccattcataagtttggcttcagtactttggccctggttgaaaagtactcatctcctggtctgacatccaaagagtcactctttgttcgaataaatgctgctcatggattctcccttattcaggtggacaacacaaaggttaccatgaaggaaatcttactgaaggcagtgaagcgaagaaaaggatcccagaaagtttcaggttcaagggcagacggggtttttgaggaggattcgcaaattgacatagccacagtacaggatatgcttagcagccaccattacaagtcattcaaagtcagcatgatccacagactgcgattcacaaccgacgtacagctaggtatctctggagacaaagtagagatagaccctgttacgaatcagaaagccagcactaagttttggattaagcagaaacccatctcaatcgattccgacctgctctgtgcctgtgaccttgctgaagagaaaagccccagtcacgcaatatttaaactcacgtatctaagcaatcacgactataaacacctctactttgaatcggacgctgctaccgtcaatgaaattgtgctcaaggttaactacatcctggaatcgcgagctagcactgcccgggctgactactttgctcaaaaacaaagaaaactgaacagacgtacgagcttcagcttccagaaggagaagaaatccgggcagcagtgacactggcctccagcctcaatctgttccgtagctcagagcctgcctgccagggccaagtgccctagagtccacccggtgtcctgaagtcctcggggggaggccagcccctggctcactggcacagggcaggtgggctctcggggaaggtgtcgggggccccctaggagggagcgctggggacattgccatgggacggaagtctgcttggcagtggctttgataagcgatgcttgggggtcagaccaccccctagaggagccacgtgccgcccagccaccttcaatgcctgccaccctgcccgaggatgtacagagccgtgcccacacatttccttgcaacttgatcaaatttcttaaagcaaacaacaaaaatgtacatttctgtttttccttttaataaacaggtgtactctttatcatggttggtatgatggaccattctttggggcggaggattgattatgttactctctttaaaatctgttcccatattgaacaggcagattggaaaagctatggttcgatttctcagaagaaatgtttaggtcttagtcaatagttttaactatgccatttgtttaaatgagtgcatttgcttcgagggtagtgtcttactaaaagttaggaacagagacctagtggtgtgtccaaggccgtgtcactttccccttcagcacaccccagcttctgacctcagagcccaggagctgcgtggacagtgtggggtgccaggaggaggggcggtggctggtcctcaggcacgctgcactcccagccagacatggtctttccgtttcttaagtagcaagtgtaggtttcagctggcagttccacctgcatgttctctgcttcgctgccttggaaggggccacattccccattcctcttctccttacagcgcctgcctcctttttcaagcaggcggaaagctgctgtttctcacgtttcagggagaggggtgagcggagggagacctgtgtccgtgccgtccggctccctgggtgggaacaggcaagggatcagatgcccctgacaccacgcctctggccacaccagatgcctctgcagtcctcgacagcctcttcagtgtccctcctgcggtgatgtccttactgtccccagccagggccggggaccggtgtttcactgaggacctgcattagaaacattttttaaattgttgtacaggaagagatgtgtctaaaacagcatcttaaagctgagtgtatttctttgcacaaggggtcatgctgatgaattcttctttcattctgatctttgttcagccaacaggagcgtccttttctaatgtcttccattcctaccccccacccaaaaacaaaagaaatatttgtagcttgctatctgtatttgaatttttagcaattttatatttagatactttgaaaaatgtaaatgactaatttggtcattaaatcttgtgacatattcgatattaaaatgatattaaaataaaagtcatataaatacaca

SEQ ID NO: 214784 - DNA, 1222 bp, Artificial Sequence
  derived and/or modified sequence
gtcgatattatctgtacgcctagaacagtgccctctgcagctgaataacccttttaacgagtattccaaatttgatggcaagggtcatgtaggtacaacagcaaccaagaagatcgatgtctacctccctctgcactcgagccaggacagactgctgccaatgaccgtggtgacaatggccagcgccagggtgcaggacctgatcgggctcatctgctggcagtatacaagcgaaggacgggagccgaagctcaaaaatgctgctcatggattctcccttattcaggtggacaacacaaaggttaccatgaaggaaatcttactgaaggcagtgaagcgaagaaaaggatcccagaaagtttcaggttcaagggcagacggggtttttgaggaggattcgcaaattgacatagccacagtacaggatatgcttagcagccaccattacaagtcattcaaagtcagcatgatccacagactgcgattcacaaccgacgtacagctaggtatctctggagacaaagtagagatagaccctgttacgaatcagaaagccagcactaagttttggattaagcagaaacccatctcaatcgattccgacctgctctgtgcctgtgaccttgctgaagagaaaagccccagtcacgcaatatttaaactcacgtatctaagcaatcacgactataaacacctctactttgaatcggacgctgctaccgtcaatgaaattgtgctcaaggttaactacatcctggaatcgcgagctagcactgcccgggctgactactttgctcaaaaacaaagaaaactgaacagacgtacgagcttcagcttccagaaggagaagaaatccgggcagcagtgacactggcctccagcctcaatctgttccgtagctcagagcctgcctgccagggccaagtgccctagagtccacccggtgtcctgaagtcctcggggggaggccagcccctggctcactggcacagggcaggtgggctctcggggaaggtgtcgggggccccctaggagggagcgctggggacattgccatgggacggaagtctgcttggcagtggctttgataagcgatgcttgggggtcagaccaccccctagaggagccacgtgccgcccagccaccttcaatgcctgccaccctgcccgaggatgtacagagccgtgcccacacatttccttgcaacttgatcaaatttctt

SEQ ID NO: 214785 - DNA, 1461 bp, Artificial Sequence
  derived and/or modified sequence
atggccttcctggacaaccccaccatcatcctggcccacatccggcagtctcacgtaacatccgatgatacagggatgtgcgagatggtcttaattgatcatgacgtagatctggagaaaattcacccacccagcatgccaggcgactcaggttccgaaatccagggatctaatggggagactcaggggtacgtatatgcgcagagcgtggatatcacttcctcatgggatttcggtatcagacgccggagcaacacagcccagcggcttgaaaggctgagaaaggaaaggcagaatcaaattaagtgcaagaacattcagtggaaggaacgaaatagcaagcagtcggctcaggagctcaagagtctcttcgaaaagaaatcactcaaggagaaaccgcctatatctggaaagcagtccatactgtcagtgagattggagcagtgccctctacagctgaataatcccttcaacgagtatagtaagtttgacggcaaaggacatgtcggcacaacggcgaccaaaaagatcgacgtctacctgccactgcatagcagtcaggacaggcttctaccaatgacagtggtcacaatggcatctgcccgggtgcaagaccttatcggcctgatatgctggcaatacacatccgaggggagggagcccaagctaaatgacaatgtgtctgcatattgcctgcacatcgctgaggacgacggagaagtagacacagatttccctccactagattcaaatgagcctatccataaattcgggttctccaccctggccctggtagagaagtacagttcacccgggctaacctcaaaggagtcgttgtttgttcggatcaacgctgcacatggattctccctcatccaggtcgacaacaccaaagtcacaatgaaggagatcttactgaaggccgtaaagaggaggaaaggcagccaaaaggtctccggaagccgggcggacggagtttttgaagaggattcccagatcgatatcgcaacagtgcaggacatgctcagcagccaccactacaaatcatttaaggtgagtatgattcaccgcctgagatttaccaccgatgtgcagctgggaatttctggcgacaaggtggagatagaccccgttacaaaccagaaggcctcaactaagttttggattaagcaaaagcccatcagtatcgactcggatctgctctgcgcctgtgatcttgctgaagagaagagtcccagtcacgcaatcttcaagttgacctacttatccaatcacgattacaaacatttatacttcgaatcggatgctgctaccgttaacgagattgtgttgaaagtaaattacatcctagaatcgcgagcttccactgcaagggctgactactttgcccagaaacagcggaagttgaataggaggacttcatttagcttccaaaaagagaagaagtcgggccaacagtag

SEQ ID NO: 214786 - DNA, 708 bp, Artificial Sequence
  derived and/or modified sequence
atgaccgtggtgaccatggccagcgcccgggtgcaggacctgatcggcctcatctgctggcagtatacctcagaagggagggagcccaaacttaaaaatgcggcccacggattctccctgatccaagtggacaacacgaaagtgaccatgaaggaaattctcctcaaggctgtcaagcgtcgaaagggttcccagaaagtgagcggtagccgcgccgatggagtctttgaggaagattcccaaatagatatagctaccgtccaggatatgctatcatcacaccattataagtcctttaaagtatcaatgatccatagactccggtttaccaccgatgtgcagttgggcattagtggcgataaggttgaaatcgatcctgtgaccaaccaaaaagcctccacaaaattctggataaaacagaagcccatcagtattgattcggacctgttgtgtgcctgcgatctcgctgaagagaagtccccatctcatgcaattttcaagttaacttatctctctaatcacgattacaagcacctgtatttcgagtctgatgctgcaacagttaacgagattgtccttaaggtgaattacatactcgagtctcgcgcctctaccgccagggccgactattttgcgcaaaagcagcgcaagctcaatagaaggactagcttcagttttcagaaggaaaaaaagtctggacagcagtag

SEQ ID NO: 214787 - DNA, 1461 bp, Artificial Sequence
  derived and/or modified sequence
atggcgttcctcgacaatcccacaataatactggcacacatcaggcagtctcacgtgacgtccgatgacaccggcatgtgtgagatggtcctgatcgatcatgatgtggaccttgagaaaattcaccctccctcaatgccaggggactctgggagcgaaatccagggctcaaatggggagacccaaggatatgtctacgctcaaagtgtggatataactagctcatgggacttcggtatccggaggagatccaatacggcacaacgactggagcgcttacgcaaagaacgccagaaccagattaagtgcaagaacatccaatggaaagaaaggaattccaaacagagcgcacaggagctcaaatcactgtttgaaaagaaaagtctgaaggagaaaccccctatcagcggaaagcaatctatcctcagcgttcggctggagcaatgtcccttgcaattgaataatccctttaacgagtatagcaaatttgacggaaaaggacatgttggaactacagcaactaaaaaaatcgacgtgtatctgcctctacactcctcccaggacaggttgctccccatgaccgtggtaacgatggcgagtgctagagttcaggatctgattggtcttatctgctggcaatatacttctgagggcagggagcccaagttaaacgacaacgtgagtgcttactgtctccacatcgccgaggatgatggggaagtcgacacagatttccccccactggactccaacgagccgatacacaaattcgggttttcaaccctggctctggtcgaaaaatacagctcccctgggctgaccagcaaggagagcctgttcgtgagaattaacgcggcacacggtttcagtctcatccaagtagataatactaaggtgaccatgaaggaaatactattgaaggcagtgaaaaggagaaaagggagtcagaaggtaagcgggagtcgcgctgacggtgtgtttgaagaggattctcagattgacatcgcaacggtgcaggacatgctcagctctcatcattataaatcatttaaggtctctatgattcataggttgcggtttaccaccgacgtgcaactgggaatcagcggagacaaagtggaaattgatcccgtgacaaaccagaaggccagcactaaattttggattaagcagaaacctatttccatcgattcagatctcctctgcgcttgcgatttggctgaagaaaagagtccctctcatgcaatcttcaagttgacatatttgtctaaccacgactataaacatctgtactttgagtctgatgccgctactgtcaatgagattgtactgaaggtgaattacatactggaatctcgagctagcactgccagagcagattacttcgcccagaagcagcgcaagctgaatcgaaggacgtcattctcattccaaaaggaaaagaagtctggccagcagtag

SEQ ID NO: 214788 - DNA, 708 bp, Artificial Sequence
  derived and/or modified sequence
atgacagtggtgactatggcctcggccagagtgcaggatctgatcggcctgatatgctggcagtacacctccgaagggagggagccgaagcttaagaatgccgctcatggcttttctctgatccaggtggataatacaaaagttaccatgaaggaaatcctgttgaaagccgtaaaaagacggaaaggatctcaaaaggtctccggctcaagagccgacggcgtatttgaagaggactcccagatcgatattgctaccgtgcaggatatgctgtcaagccaccactataagtcctttaaggtgagcatgattcaccgcctgaggtttactaccgacgtccaacttggcatttcgggtgataaagtggaaattgaccctgtcaccaatcagaaagcatctacaaagttttggattaagcagaagcctatttcaattgattcagacttgctatgtgcctgtgacttagctgaggagaagtcaccctcccacgctattttcaagctgacctacctcagcaaccatgactacaagcatctgtatttcgagagtgatgctgctactgttaacgaaatagtgctgaaggtcaattacatcttggaatcccgagcctcaacagcacgcgctgattacttcgcacagaagcaacggaagctgaatcgccgtacttccttctcctttcagaaggagaagaagtctggacagcagtag

SEQ ID NO: 214789 - protein, 678 aa, Artificial Sequence
  derived and/or modified sequence
MELRSYQWEVIMPALEGKNIIIWLPTGAGKTRAAAYVAKRHLETVDGAKVVVLVNRVHLVTQHGEEFRRMLDGRWTVTTLSGDMGPRAGFGHLARCHDLLICTAELLQMALTSPEEEEHVELTVFSLIVVDECHHTHKDTVYNVIMSQYLELKLQRAQPLPQVLGLTASPGTGGASKLDGAINHVLQLCANLDTWCIMSPQNCCPQLQEHSQQPCKQYNLCHRRSQDPFGDLLKKLMDQIHDHLEMPELSRKFGTQMYEQQVVKLSEAAALAGLQEQRVYALHLRRYNDALLIHDTVRAVDALAALQDFYHREHVTKTQILCAERRLLALFDDRKNELAHLATHGPENPKLEMLEKILQRQFSSSNSPRGIIFTRTRQSAHSLLLWLQQQQGLQTVDIRAQLLIGAGNSSQSTHMTQRDQQEVIQKFQDGTLNLLVATSVAEEGLDIPHCNVVVRYGLLTNEISMVQARGRARADQSVYAFVATEGSRELKRELINEALETLMEQAVAAVQKMDQAEYQAKIRDLQQAALTKRAAQAAQRENQRQQFPVEHVQLLCINCMVAVGHGSDLRKVEGTHHVNVNPNFSNYYNVSRDPVVINKVFKDWKPGGVISCRNCGEVWGLQMIYKSVKLPVLKVRSMLLETPQGRIQAKKWSRVPFSVPDFDFLQHCAENLSDLSLD

SEQ ID NO: 214790 - protein, 302 aa, Artificial Sequence
  derived and/or modified sequence
MELRSYQWEVIMPALEGKNIIIWLPTGAGKTRAAAYVAKRHLETVDGAKVVVLVNRVHLVTQHGEEFRRMLDGRWTVTTLSGDMGPRAGFGHLARCHDLLICTAELLQMALTSPEEEEHVELTVFSLIVVDECHHTHKDTVYNVIMSQYLELKLQRAQPLPQVLGLTASPGTGGASKLDGAINHVLQLCANLDTWCIMSPQNCCPQLQEHSQQPCKQYNLCHRRSQDPFGDLLKKLMDQIHDHLEMPELSRKFGTQMYEQQVVKLSEAAALAGLQEQRVYALHLRRYNDALLIHDTVRAVDA

SEQ ID NO: 214791 - protein, 487 aa, Artificial Sequence
  derived and/or modified sequence
MELRSYQWEVIMPALEGKNIIIWLPTGAGKTRAAAYVAKRHLETVDGAKVVVLVNRVHLVTQHGEEFRRMLDGRWTVTTLSGDMGPRAGFGHLARCHHTHKDTVYNVIMSQYLELKLQRAQPLPQVLGLTASPGTGGASKLDGAINHVLQLCANLDTWCIMSPQNCCPQLQEHSQQPCKQYNLCHRRSQDPFGDLLKKLMDQIHDHLEMPELSRKFGTQMYEQQVVKLSEAAALAGLQEQRVYALHLRRYNDALLIHDTVRAVDALAALQDFYHREHVTKTQILCAERRLLALFDDRKNELAHLATHGPENPKLEMLEKILQRQFSSSNSPRGIIFTRTRQSAHSLLLWLQQQQGLQTVDIRAQLLIGAGNSSQSTHMTQRDQQEVIQKFQDGTLNLLVATSVAEEGLDIPHCNVVVRYGLLTNEISMVQARGRARADQSVYAFVATEGSRELKRELINEALETLMEQAVAAVQKMDQAEYQAKELL

SEQ ID NO: 214792 - protein, 156 aa, Artificial Sequence
  derived and/or modified sequence
MELRSYQWEVIMPALEGKNIIIWLPTGAGKTRAAAYVAKRHLETVDGAKVVVLVNRVHLVTQHGEEFRRMLDGRWTVTTLSGDMGPRAGFGHLARCHDLLICTAELLQMALTSPEEEEHVELTVFSLIVVDECHHTHKDTVYNVIMSQYLELKLQR

SEQ ID NO: 214793 - DNA, 2037 bp, Artificial Sequence
  derived and/or modified sequence
atggagctgaggtcctaccagtgggaggtaatcatgccagctcttgaggggaagaacatcataatctggctgcccacaggcgccggaaaaacacgcgcagccgcttacgtcgccaagaggcaccttgaaaccgtggatggggcgaaggtggtcgttctggtaaatagggtgcacctagttacccaacatggcgaagagtttaggcgcatgcttgatggtcggtggactgtgactaccctgagtggagatatgggacccagagcgggatttggccacctggcacgttgtcacgatctcctcatttgtacggccgagcttttacagatggccctcacatctcctgaggaggaagagcacgtggagctgacagtcttctcgctcatcgtggtggacgagtgccaccatacccacaaagacactgtttataatgtgatcatgtcccaatatcttgaactgaaactgcagcgggcccagccattgcctcaggtccttggtctgaccgcttcaccaggtaccggcggagcctctaagctcgacggagccattaaccatgtgttgcaactttgtgcaaacttggacacctggtgcataatgtccccccagaattgttgtccgcagctgcaggagcattcacagcagccttgcaagcagtataacctatgccatcgcaggagtcaggacccatttggtgacttgctaaagaaacttatggaccagattcatgatcatctggagatgcctgagctgagccgtaaattcggaacgcagatgtacgagcagcaagtcgtgaagttgtcagaagctgctgcgctagctggactgcaggagcagcgcgtctatgcacttcaccttagacggtataatgatgctcttttgatccatgacacagtcagggcagtggatgccctggcagcgttgcaggatttctatcatcgagaacacgtgaccaagactcagatcttgtgcgccgagagacggctgctggcactgtttgacgaccgcaagaacgagctcgctcaccttgccacccatggccctgaaaacccgaagcttgagatgttggagaagatcctgcagaggcaattcagttcttcaaactcaccgcgaggcataatattcacgcgaacacgacagagcgctcattctctgctactatggctacagcagcagcaggggcttcagacagtggatatcagggctcaactgctcattggagctgggaactcttcccagagcacacatatgacccagcgggaccagcaggaagtgatacaaaagtttcaagacggtaccctgaatcttctggtggcgacttccgtggccgaagaaggtctggatataccccattgcaatgtggtggtacgctacggtctgctgaccaatgagatcagcatggtgcaagcaaggggcagagcacgcgcggaccagagtgtgtatgcttttgtggccacagaaggctccagagagttaaagcgtgagcttatcaacgaggctctggagacgctgatggagcaagccgtcgcagcagttcaaaaaatggaccaggccgaatatcaggcaaaaatccgggacctgcagcaagcagcgttgaccaaaagggctgctcaggcagcgcagcgcgagaatcagcgacaacaatttccagtcgaacatgtgcagctgctatgcatcaactgtatggtggcagtaggacacggctctgaccttcgaaaggtggaaggcacgcaccacgttaacgttaatcctaacttcagcaattattacaacgtgtctagagatcccgtagtgataaacaaagtattcaaggattggaaacccggaggcgtaatctcctgccgcaactgtggcgaggtttggggtctgcagatgatttacaagtcagtgaaactgcctgtgcttaaggtgcgaagcatgttgttagagacgccacaggggcggatccaagctaaaaagtggtcacgcgtgccattcagtgtgcctgattttgactttttgcagcattgtgccgagaatctctcggacctgagcctagattag

SEQ ID NO: 214794 - DNA, 1464 bp, Artificial Sequence
  derived and/or modified sequence
atggaactgcggagttaccaatgggaggtcattatgcctgctttggagggtaaaaacattattatctggctgccaacaggcgccggcaaaacgcgggcggcagcctacgtggccaaaaggcacctggagacagtcgatggtgcaaaggtggtcgtactagtgaacagagtgcatttagtgacccaacacggcgaggaattccggcggatgctagacggcaggtggaccgtaactactctcagtggagacatgggaccaagagccggtttcggtcacctcgcaaggtgccatcatacacataaggatacagtctacaacgttatcatgagccagtaccttgaattgaaactccagcgggctcaaccactcccccaggtcctggggttgactgcctcaccaggtaccggcggtgcatctaagttggatggtgctatcaatcatgtcctgcagctgtgtgctaatctggatacatggtgcatcatgtctccacagaattgctgtccccagctccaggaacactcacaacagccctgcaaacagtacaacctctgccacaggagaagccaggatcctttcggagacctcctgaaaaagttgatggaccagatacatgatcacctggagatgccagaactctctcgaaagtttggtacccagatgtatgaacaacaggtggtgaagctgagcgaagcagccgccttggctggcttacaggaacagagggtatatgcactgcatctaagacggtacaatgacgccttactcatccatgataccgtacgggccgtggatgcactcgcggcgctccaggatttttatcacagggaacacgtcacaaaaacccagatcttgtgcgcggagcgcaggcttctagcactgttcgatgatcgaaagaatgagctggcacatctcgccactcacggccccgaaaatcctaagctggagatgctggaaaagattttacagcgacagttttcctcttctaacagtcccagaggaatcatatttactcggaccagacagtctgcccattctctgttactatggcttcaacagcaacaagggttgcagaccgtggacataagagctcaattactgataggcgcaggaaattccagccagagcacccacatgactcaacgcgaccagcaggaagtgattcagaagtttcaggatgggacattaaatctcctggtggcaaccagcgtcgccgaagagggtctggatatcccccactgcaacgtcgttgtgagatacggtctattgacgaatgagatctccatggttcaggctaggggcagggcacgcgccgatcagtctgtttacgctttcgtggcaacagagggaagccgcgagctcaagagagagcttataaacgaagccctagagactctgatggagcaggccgtggctgctgtgcaaaagatggaccaggctgaataccaagccaaagagcttctatag

SEQ ID NO: 214795 - DNA, 2037 bp, Artificial Sequence
  derived and/or modified sequence
atggagctgcggagctaccagtgggaggtgatcatgcctgccctggagggcaagaacatcatcatctggctgcccaccggggccggcaagaccagggctgctgcctacgtggccaagaggcacctggagaccgtggatggagccaaggtggtggtgctggtgaacagagtgcacctggtgacccagcacggggaggagttccggaggatgctggatggccgctggacagtgaccaccctgagcggggacatgggcccccgggccggcttcggccacctggcccgctgccacgacctgctgatctgcacagctgagctgctgcagatggccctgaccagccctgaggaggaggagcacgtggagctgactgtgttcagcctcatcgtggtggatgagtgccaccacacccacaaggacacagtgtacaacgtcatcatgagccagtacctggagctgaagctgcagagggcccagcccctgccccaggtgctgggcctgacagccagccctggcaccggcggggccagcaagctggatggagccatcaaccacgtgctgcagctgtgtgccaacctggacacctggtgcatcatgagcccccagaactgctgcccccagctgcaggagcacagccagcagccctgcaagcagtacaacctgtgccacagaagaagccaggacccctttggagacctgctgaagaagctgatggaccagatccatgaccacctggagatgcctgagctgagcaggaagtttggcacccagatgtatgagcagcaggtggtgaagctgtctgaggccgccgccctggccggcctgcaggagcagagggtgtatgccctgcacctgcggcgctacaatgatgccctgctgattcatgacacagtgcgggctgtggatgccctggccgccctgcaggacttctaccaccgggagcacgtgaccaagacccagatcctgtgtgccgagcggcggctgctggccctgtttgatgacaggaagaatgagctggcccacctggccacccacggccctgagaaccccaagctggagatgctggagaagatcctgcagaggcagttcagcagcagcaacagcccccggggcatcatcttcaccaggacccggcagagcgcccacagcctgctgctgtggctgcagcagcagcagggcctgcagacagtggacatccgggcccagctgctgattggagctggcaacagcagccagagcacccacatgacccagagggaccagcaggaggtgatccagaagttccaggacggcaccctgaacctgctggtggccacctctgtggccgaggagggcctggacatcccccactgcaatgtggtggtgcgctatggcctgctgaccaatgagatctccatggtgcaggcccggggccgggcccgggctgaccagagcgtgtatgcctttgtggccacagagggcagccgggagctgaagcgggagctgatcaatgaggccctggagaccctgatggagcaggccgtggccgctgtgcagaagatggaccaggccgagtaccaggccaagatccgggacctgcagcaggccgccctgaccaagagagctgcccaggccgcccagcgggagaaccagaggcagcagtttcctgtggagcacgtgcagctgctgtgcatcaactgcatggtggccgtgggccacggcagtgacctgaggaaggtggagggcacccaccacgtgaatgtgaaccccaacttcagcaactactacaacgtgtcccgggaccctgtggtgatcaacaaggtgttcaaggactggaagccaggcggcgtcatcagctgcaggaactgtggggaggtgtggggcctgcagatgatctacaagtctgtgaagctgcctgtgctgaaggtgcgctccatgctgctggagaccccccagggccgcatccaggccaagaagtggagccgggtgcccttctctgtgcctgactttgacttcctgcagcactgtgccgagaacctgagtgacctgagcctggactag

SEQ ID NO: 214796 - DNA, 1464 bp, Artificial Sequence
  derived and/or modified sequence
atggagctgcggagctaccagtgggaggtgatcatgcctgccctggagggcaagaacatcatcatctggctgcccaccggggccggcaagaccagggctgctgcctacgtggccaagaggcacctggagaccgtggatggagccaaggtggtggtgctggtgaacagagtgcacctggtgacccagcacggggaggagttccggaggatgctggatggccgctggacagtgaccaccctgagcggggacatgggcccccgggccggcttcggccacctggcccgctgccaccacacccacaaggacacagtgtacaacgtcatcatgagccagtacctggagctgaagctgcagagggcccagcccctgccccaggtgctgggcctgacagccagccctggcactggaggagccagcaagctggatggagccatcaaccacgtgctgcagctgtgtgccaacctggacacctggtgcatcatgagcccccagaactgctgcccccagctgcaggagcacagccagcagccctgcaagcagtacaacctgtgccaccggcgcagccaggacccctttggagacctgctgaagaagctgatggaccagatccatgaccacctggagatgcctgagctgagcaggaagtttggcacccagatgtatgagcagcaggtggtgaagctgtctgaggccgccgccctggccggcctgcaggagcagagggtgtatgccctgcacctgcggcgctacaatgatgccctgctgattcatgacacagtgcgggctgtggatgccctggccgccctgcaggacttctaccaccgggagcacgtgaccaagacccagatcctgtgtgccgagcggcggctgctggccctgtttgatgacaggaagaatgagctggcccacctggccacccacggccctgagaaccccaagctggagatgctggagaagatcctgcagaggcagttcagcagcagcaacagcccccggggcatcatcttcaccaggacccggcagagcgcccacagcctgctgctgtggctgcagcagcagcagggcctgcagacagtggacatccgggcccagctgctgattggagctggcaacagcagccagagcacccacatgacccagagggaccagcaggaggtgatccagaagttccaggacggcaccctgaacctgctggtggccacctctgtggccgaggagggcctggacatcccccactgcaatgtggtggtgcgctatggcctgctgaccaatgagatctccatggtgcaggcccggggccgggcccgggctgaccagagcgtgtatgcctttgtggccacagagggcagccgggagctgaagcgggagctgatcaatgaggccctggagaccctgatggagcaggccgtggccgctgtgcagaagatggaccaggccgagtaccaggccaaggagctgctgtag

SEQ ID NO: 214797 - DNA, 2037 bp, Artificial Sequence
  derived and/or modified sequence
atggagctgcggagctaccagtgggaggtgatcatgcccgccctggagggtaagaatataatcatctggctgccaaccggagcggggaagacacgagcagctgcatacgtagccaagaggcacctggagacagtagatggcgctaaagtggtggtgctggtcaatagggtgcacttggtcacacaacatggcgaggagttccggcggatgttggatgggcgatggaccgtcaccacattgtctggggatatgggaccaagagcaggttttggccacctggccagatgtcacgacctactcatttgtacagcagagcttctgcagatggctcttacctcgccagaagaggaggaacacgtcgagcttacagtcttcagtcttatcgtggtagacgagtgtcaccatacccataaagatacagtctacaacgtcatcatgtcacaatacctcgaactgaagcttcagcgcgcgcagccactaccacaggtgctagggttgacagcctccccgggaacaggaggggccagcaagctggacggggcaatcaaccacgttctccagctgtgcgctaacctcgatacatggtgtattatgagcccacagaattgttgccctcagcttcaggaacattcccagcagccttgcaagcagtacaatctgtgtcacaggagatctcaggacccttttggagatctgctcaagaagcttatggaccaaatccatgaccacctcgaaatgcccgagctgtctcgcaagttcggcacacagatgtacgagcaacaggtcgtgaaattgtcggaggctgcagcacttgcaggcctgcaggaacaaagggtgtacgcactccacctccgtaggtacaacgacgctcttctcatacacgacacagtcagagccgtggacgcactagcggctttacaggacttttatcacagggagcatgtaacgaaaacacagatactttgtgccgagaggcgcctccttgcactcttcgacgatcggaagaatgaactggcccatctagcgactcatggccccgaaaaccctaaattggaaatgttagaaaagatcctgcagaggcagtttagcagtagcaattcaccgcggggcatcatattcaccaggacccgtcagagcgcccacagcctgctgctttggttgcagcagcaacagggccttcaaacagtggatattcgagcccaattgctcattggagcaggaaactcctcacagtcaacacacatgacgcagcgggaccaacaggaggtgattcagaagtttcaggacggcaccctcaacctccttgtggcaaccagcgttgcggaggagggtctagatattccccattgcaacgtcgtcgtgaggtacggattgctgacaaacgagattagtatggtgcaagcacgcgggagggcaagagccgaccagtccgtgtatgccttcgtcgccaccgagggttctcgagaattgaaaagagaattgattaacgaggcactggagacattgatggagcaggcagtggctgccgttcagaagatggaccaggccgagtaccaggccaaaatccgcgacctacagcaggccgcattaacaaaacgagcagcacaagctgcccaacgggagaatcaaagacagcagttcccagtcgagcacgtccagctcctttgtatcaattgcatggttgcggtgggacatggatccgaccttagaaaggttgagggtacgcatcacgtgaacgttaatccaaacttcagtaactattacaacgtgagccgtgaccccgtggttatcaataaagtgtttaaggattggaaaccggggggcgtgatctcttgtaggaactgcggggaagtctgggggctgcagatgatatacaagagtgtaaagctgccagtcttgaaggtgagatccatgttacttgagacgccccagggcagaatccaagctaagaagtggagccgggtcccattctctgtccctgacttcgacttcctacagcactgcgctgaaaacctgagtgacctaagcttggattag

SEQ ID NO: 214798 - DNA, 1464 bp, Artificial Sequence
  derived and/or modified sequence
atggagctgcggagctaccagtgggaggtgatcatgcccgccctggagggaaaaaacatcattatttggctgcccaccggggcaggaaaaacccgggccgccgcttatgttgccaaaagacacctggagacagtggatggagccaaggtggtagtgcttgtgaaccgagtccacctggtgacgcagcacggcgaggagttccgccggatgttggacgggcgttggaccgtgactactctgtccggggacatgggcccccgcgcaggttttggacacctagcgcgttgccatcatacacacaaagataccgtgtataacgtgattatgtctcagtacttggagttgaagctgcagagagcacaaccgctacctcaggttctgggcctcaccgcttccccagggacaggcggagccagtaagctggacggggcaattaaccacgtccttcagttgtgtgccaatctcgatacatggtgcatcatgtccccccaaaattgctgcccccagctgcaggagcactctcagcagccgtgcaagcaatacaacctgtgccacaggcggtcccaggacccctttggtgatctcctcaaaaagctgatggatcagatccacgatcacctagaaatgccggagctgagtcggaagttcggcacgcaaatgtatgagcaacaagtcgtaaaactgtccgaggcggcagccctggcagggttacaggaacagcgtgtttacgcactacacctgaggaggtacaatgatgccctactgatacacgatacagttagggcagtggatgcccttgcagctctgcaggacttctaccacagggaacacgttaccaaaactcagatcctctgcgcggaacgccggctgttggcactgtttgacgataggaagaacgaactggctcatctcgcaacacatggaccggaaaatccgaagttagagatgttggaaaaaatcctccagcgccagttttcttcgtctaattctcctagagggataattttcacccgcacgcgtcagagcgctcattccctgctcttatggttacagcagcagcaaggactccagaccgtggacattcgtgctcagctgctcatcggagccgggaacagtagccagagcacccacatgactcagcgtgatcagcaagaggtcatccagaagttccaggatgggacactgaacctgctagtcgctacatctgttgccgaagaaggccttgacattccccactgcaatgttgtggtgaggtacgggctgctgaccaacgaaatcagtatggtgcaagcgaggggacgcgccagggctgatcagagtgtctacgccttcgtggcaaccgaaggttcacgggaactcaagcgtgaactcatcaatgaagccctggaaacgctaatggagcaggcagtggcagcggttcaaaagatggatcaggcagagtaccaggctaaggaattactttag

SEQ ID NO: 214799 - DNA, 2037 bp, Artificial Sequence
  derived and/or modified sequence
atggaactgcgctcctatcagtgggaggtgattatgcctgctctggagggaaagaatatcattatatggcttccaacaggagccggtaaaactcgcgcagccgcatacgttgccaagaggcaccttgagaccgtggatggagccaaggtcgtggtcttggtaaatcgagttcacttggtgactcagcacggagaagagtttcgcagaatgctggacggtcgttggactgtaaccactctcagtggcgacatgggtcccagggctggtttcggacacctagcgaggtgtcatgatcttctaatctgtaccgcagagctgctacaaatggccctgacaagcccggaggaggaggaacacgtggagctgaccgtcttctctttgatagtggtggacgagtgtcaccacacccataaagatacagtatacaatgttatcatgagccagtacttggagttgaagctgcagagagcgcaacccctgccccaggtactgggcctgacagcatcgccgggaaccgggggtgcgagtaaattggacggtgctattaatcatgtcctccagctgtgtgccaacctagacacctggtgtatcatgagtccgcagaactgttgccctcaattgcaggaacatagccaacagccatgcaaacaatacaacctctgccataggcgcagccaggatcctttcggagatctgctaaaaaaactgatggatcagattcacgatcatctagagatgcccgagttgagccggaagtttggtacccagatgtatgagcagcaagtggtaaagctgagtgaggccgcagctttagcaggcctacaggagcagcgggtgtatgccctgcacctgcggagatacaacgatgcactcctgatacacgatacagtgagagcagttgacgcactggccgctctgcaggacttctatcacagagagcacgtcacgaaaacacagattctctgtgcggagagacgcctgttggctctctttgacgatagaaagaatgagctggctcacctggccacgcacggcccagaaaatcctaagctggagatgctcgaaaaaattcttcagcgccagttttcctcgtcaaacagccctcggggtatcattttcacacggacaagacagtctgcccactccctgctcttatggctacaacaacagcagggtctccagaccgtcgacatcagagctcagctcttaataggggctggtaatagcagccagtcaacccacatgacccaacgcgatcagcaagaagtgatccagaagttccaggatggcactcttaatttgctcgttgctaccagcgtcgctgaggagggcttggacattccccactgcaacgtggttgtgagatacggacttcttaccaatgaaataagtatggtgcaggcacggggacgtgcacgagctgaccagagtgtgtatgcctttgtggccacagaaggatccagggagctcaagcgggaactcattaatgaggctctcgaaacactcatggagcaagcagtggctgccgtgcagaaaatggaccaagcagagtatcaagctaagatcagggatctacagcaagccgctctgactaagagggccgcacaggcggctcagagggagaaccagcgacaacaattccctgttgagcacgtccagctgttgtgcatcaattgcatggtggctgtaggccatggttccgacctgcggaaggtcgagggaactcatcacgtgaacgtgaaccctaatttctccaattactataacgtttctcgagaccccgtggtgatcaacaaagttttcaaggactggaagccgggaggcgtaattagctgtcggaactgtggcgaagtatgggggctgcagatgatctacaagtctgtgaaacttcccgtactgaaggtgcgaagcatgctcttagagactcctcagggacggatacaggccaagaagtggtctagggtccccttttcagttcccgactttgacttcttgcagcactgcgccgaaaacttgtcggacctctccttagattag

SEQ ID NO: 214800 - DNA, 1464 bp, Artificial Sequence
  derived and/or modified sequence
atggagctaagatcgtaccagtgggaagtgattatgcctgccctggaggggaagaacataatcatatggctacccaccggggcaggcaaaaccagggccgctgcctacgtagctaagcgccatctggagacagtggacggcgctaaagtggtggtgttagtcaaccgggttcacctggtgacgcagcacggggaggaatttcgcagaatgctggacgggaggtggacggttactaccctctccggggacatgggcccaagagcgggattcggtcaccttgccaggtgtcatcatacacataaagataccgtatataacgtgattatgagccaatatcttgaactcaagttgcagagagcgcagccactcccgcaagttttgggtctgacggcctctccaggtactggaggagcttccaagctggacggcgcaatcaaccatgtacttcagctttgcgccaacctggacacctggtgcatcatgtcaccccagaactgttgtccacagctgcaagagcactctcagcagccctgcaaacagtacaacctctgccacaggcgcagtcaagatccttttggggacctgctgaagaaactgatggaccagattcacgatcatctggagatgccggagctttcaaggaaattcggcacacagatgtatgaacaacaggttgtcaagttgtccgaggccgcagcccttgctggactgcaggagcaacgcgtgtatgccctgcaccttcgcaggtataacgacgcccttctgatccacgatacagtcagagctgtcgacgccttggcggcactccaggacttttatcaccgtgagcatgtcacgaagacgcagatcttgtgcgcggaaagacgacttttggccctcttcgatgatcgaaagaatgagcttgcccatttagcaacccacggtcctgagaaccccaaattagaaatgctggaaaagatcttgcagaggcaattttctagttctaacagccccaggggaatcatatttacccgaactaggcagagcgcccactccttgctgctgtggctccagcagcaacagggactgcagaccgtcgatatccgagcccagctgctgattggtgccggtaactcttctcagtctacccacatgacgcagagagaccagcaagaggtgatccaaaaattccaagatggcacacttaacctactggtggcaacttcagtcgccgaggaaggtctcgatatacctcactgtaacgtggtcgtgagatacggcctcctgacaaacgaaattagcatggtgcaggccagaggtcgagcacgtgccgaccagtcagtctatgccttcgtcgctaccgaaggctcgcgagaactcaagcgggaattgatcaacgaggccctggagaccctgatggaacaggcagttgcagccgttcagaaaatggaccaggccgagtaccaagccaaagaattgctctag

SEQ ID NO: 214801 - DNA, 2037 bp, Artificial Sequence
  derived and/or modified sequence
atggagctgagaagctaccagtgggaggtgatcatgcccgccctggagggcaagaacatcatcatctggctgcccaccggcgccggcaagaccagagccgccgcctacgtggccaagagacacctggagaccgtggacggcgccaaggtggtggtgctggtgaacagagtgcacctggtgacccagcacggcgaggagttcagaagaatgctggacggcagatggaccgtgaccaccctgagcggcgacatgggccccagagccggcttcggccacctggccagatgccacgacctgctgatctgcaccgccgagctgctgcagatggccctgaccagccccgaggaggaggagcacgtggagctgaccgtgttcagcctgatcgtggtggacgagtgccaccacacccacaaggacaccgtgtacaacgtgatcatgagccagtacctggagctgaagctgcagagagcccagcccctgccccaggtgctgggcctgaccgccagccccggcaccggcggcgccagcaagctggacggcgccatcaaccacgtgctgcagctgtgcgccaacctggacacctggtgcatcatgagcccccagaactgctgcccccagctgcaggagcacagccagcagccctgcaagcagtacaacctgtgccacagaagaagccaggaccccttcggcgacctgctgaagaagctgatggaccagatccacgaccacctggagatgcccgagctgagcagaaagttcggcacccagatgtacgagcagcaggtggtgaagctgagcgaggccgccgccctggccggcctgcaggagcagagagtgtacgccctgcacctgagaagatacaacgacgccctgctgatccacgacaccgtgagagccgtggacgccctggccgccctgcaggacttctaccacagagagcacgtgaccaagacccagatcctgtgcgccgagagaagactgctggccctgttcgacgacagaaagaacgagctggcccacctggccacccacggccccgagaaccccaagctggagatgctggagaagatcctgcagagacagttcagcagcagcaacagccccagaggcatcatcttcaccagaaccagacagagcgcccacagcctgctgctgtggctgcagcagcagcagggcctgcagaccgtggacatcagagcccagctgctgatcggcgccggcaacagcagccagagcacccacatgacccagagagaccagcaggaggtgatccagaagttccaggacggcaccctgaacctgctggtggccaccagcgtggccgaggagggcctggacatcccccactgcaacgtggtggtgagatacggcctgctgaccaacgagatcagcatggtgcaggccagaggcagagccagagccgaccagagcgtgtacgccttcgtggccaccgagggcagcagagagctgaagagagagctgatcaacgaggccctggagaccctgatggagcaggccgtggccgccgtgcagaagatggaccaggccgagtaccaggccaagatcagagacctgcagcaggccgccctgaccaagagagccgcccaggccgcccagagagagaaccagagacagcagttccccgtggagcacgtgcagctgctgtgcatcaactgcatggtggccgtgggccacggcagcgacctgagaaaggtggagggcacccaccacgtgaacgtgaaccccaacttcagcaactactacaacgtgagcagagaccccgtggtgatcaacaaggtgttcaaggactggaagcccggcggcgtgatcagctgcagaaactgcggcgaggtgtggggcctgcagatgatctacaagagcgtgaagctgcccgtgctgaaggtgagaagcatgctgctggagaccccccagggcagaatccaggccaagaagtggagcagagtgcccttcagcgtgcccgacttcgacttcctgcagcactgcgccgagaacctgagcgacctgagcctggactag

SEQ ID NO: 214802 - DNA, 1464 bp, Artificial Sequence
  derived and/or modified sequence
atggagctgagaagctaccagtgggaggtgatcatgcccgccctggagggcaagaacatcatcatctggctgcccaccggcgccggcaagaccagagccgccgcctacgtggccaagagacacctggagaccgtggacggcgccaaggtggtggtgctggtgaacagagtgcacctggtgacccagcacggcgaggagttcagaagaatgctggacggcagatggaccgtgaccaccctgagcggcgacatgggccccagagccggcttcggccacctggccagatgccaccacacccacaaggacaccgtgtacaacgtgatcatgagccagtacctggagctgaagctgcagagagcccagcccctgccccaggtgctgggcctgaccgccagccccggcaccggcggcgccagcaagctggacggcgccatcaaccacgtgctgcagctgtgcgccaacctggacacctggtgcatcatgagcccccagaactgctgcccccagctgcaggagcacagccagcagccctgcaagcagtacaacctgtgccacagaagaagccaggaccccttcggcgacctgctgaagaagctgatggaccagatccacgaccacctggagatgcccgagctgagcagaaagttcggcacccagatgtacgagcagcaggtggtgaagctgagcgaggccgccgccctggccggcctgcaggagcagagagtgtacgccctgcacctgagaagatacaacgacgccctgctgatccacgacaccgtgagagccgtggacgccctggccgccctgcaggacttctaccacagagagcacgtgaccaagacccagatcctgtgcgccgagagaagactgctggccctgttcgacgacagaaagaacgagctggcccacctggccacccacggccccgagaaccccaagctggagatgctggagaagatcctgcagagacagttcagcagcagcaacagccccagaggcatcatcttcaccagaaccagacagagcgcccacagcctgctgctgtggctgcagcagcagcagggcctgcagaccgtggacatcagagcccagctgctgatcggcgccggcaacagcagccagagcacccacatgacccagagagaccagcaggaggtgatccagaagttccaggacggcaccctgaacctgctggtggccaccagcgtggccgaggagggcctggacatcccccactgcaacgtggtggtgagatacggcctgctgaccaacgagatcagcatggtgcaggccagaggcagagccagagccgaccagagcgtgtacgccttcgtggccaccgagggcagcagagagctgaagagagagctgatcaacgaggccctggagaccctgatggagcaggccgtggccgccgtgcagaagatggaccaggccgagtaccaggccaaggagctgctgtag

SEQ ID NO: 214803 - DNA, 2617 bp, Artificial Sequence
  derived and/or modified sequence
agtttcagtttccatttctgatttctgctctctgcgctgagcacagcggcaccaggctgagctaagcagggccgccttgggcaggcctacgtggtggtgcaggcgagacccaggctgggcaaggcgcagtttcagtttccatcttgggtctctgagctgagcagagtggcaccaggctgagttaagtgggactgccctgggcagacctacctactagagcagaatggagcttcggtcctaccaatgggaggtgatcatgcctgccctggagggcaagaatatcatcatctggctgcccacgggtgccgggaagacccgggcggctgcttatgtggccaagcggcacctagagactgtggatggagccaaggtggttgtattggtcaacagggtgcacctggtgacccagcatggtgaagagttcaggcgcatgctggatggacgctggaccgtgacaaccctgagtggggacatgggaccacgtgctggctttggccacctggcccggtgccatgacctgctcatctgcacagcagagcttctgcagatggcactgaccagccccgaggaggaggagcacgtggagctcactgtcttctccctgatcgtggtggatgagtgccaccacacgcacaaggacaccgtctacaacgtcatcatgagccagtacctagaacttaaactccagagggcacagccgctaccccaggtgctgggtctcacagcctccccaggcactggcggggcctccaaactcgatggggccatcaaccacgtcctgcagctctgtgccaacttggacacgtggtgcatcatgtcaccccagaactgctgcccccagctgcaggagcacagccaacagccttgcaaacagtacaacctctgccacaggcgcagccaggatccgtttggggacttgctgaagaagctcatggaccaaatccatgaccacctggagatgcctgagttgagccggaaatttgggacgcaaatgtatgagcagcaggtggtgaagctgagtgaggctgcggctttggctgggcttcaggagcaacgggtgtatgcgcttcacctgaggcgctacaatgacgcgctgctcatccatgacaccgtccgcgccgtggatgccttggctgcgctgcaggatttctatcacagggagcacgtcactaaaacccagatcctgtgtgccgagcgccggctgctggccctgttcgatgaccgcaagaatgagctggcccacttggcaactcatggcccagagaatccaaaactggagatgctggaaaagatcctgcaaaggcagttcagtagctctaacagccctcggggtatcatcttcacccgcacccgccaaagcgcacactccctcctgctctggctccagcagcagcagggcctgcagactgtggacatccgggcccagctactgattggggctgggaacagcagccagagcacccacatgacccagagggaccagcaagaagtgatccagaagttccaagatggaaccctgaaccttctggtggccacgagtgtggcggaggaggggctggacatcccacattgcaatgtggtggtgcgttatgggctcttgaccaatgaaatctccatggtccaggccaggggccgtgcccgggccgatcagagtgtatacgcgtttgtagcaactgaaggtagccgggagctgaagcgggagctgatcaacgaggcgctggagacgctgatggagcaggcagtggctgctgtgcagaaaatggaccaggccgagtaccaggccaagatccgggatctgcagcaggcagccttgaccaagcgggcggcccaggcagcccagcgggagaaccagcggcagcagttcccagtggagcacgtgcagctactctgcatcaactgcatggtggctgtgggccatggcagcgacctgcggaaggtggagggcacccaccatgtcaatgtgaaccccaacttctcgaactactataatgtctccagggatcctgtggtcatcaacaaagtcttcaaggactggaagcctgggggtgtcatcagctgcaggaactgtggggaggtctggggtctgcagatgatctacaagtcagtgaagctgccagtgctcaaagtccgcagcatgctgctggagacccctcaggggcggatccaggccaaaaagtggtcccgcgtgcccttctccgtgcctgactttgacttcctgcagcattgtgccgagaacttgtcggacctctccctggactgaccacctcattgctgcagtgcccggtttgggctgtagggggcgggagagtctgcagcagactccaggcccctccttcctgaatcatcagctgtgggcatcaggcccaccagccacacaggagtcctgggcaccctggcttaggctcccgcaatgggaaaacaaccggagggccagagcttagtccagacctaccttgtacgcacatagacattttcatatgcactggatggagttagggaaactgaggcaaaagaatttgccatactgtactcagaatcacgacattccttccctaccaaggccacttctattttttgaggctcctcataaaaataaatgaaaaaatgggatagaaaa

SEQ ID NO: 214804 - DNA, 2227 bp, Artificial Sequence
  derived and/or modified sequence
tttctcttggttctttttcctggggcggggatgggagattcctaagtcggctcagctggctccttccctcagtttcagtttccatcttgggtctctgagctgagcagagtggcaccaggctgagttaagtgggactgccctgggcagacctacctactagagcagaatggagcttcggtcctaccaatgggaggtgatcatgcctgccctggagggcaagaatatcatcatctggctgcccacgggtgccgggaagacccgggcggctgcttatgtggccaagcggcacctagagactgtggatggagccaaggtggttgtattggtcaacagggtgcacctggtgacccagcatggtgaagagttcaggcgcatgctggatggacgctggaccgtgacaaccctgagtggggacatgggaccacgtgctggctttggccacctggcccggtgccaccacacgcacaaggacaccgtctacaacgtcatcatgagccagtacctagaacttaaactccagagggcacagccgctaccccaggtgctgggtctcacagcctccccaggcactggcggggcctccaaactcgatggggccatcaaccacgtcctgcagctctgtgccaacttggacacgtggtgcatcatgtcaccccagaactgctgcccccagctgcaggagcacagccaacagccttgcaaacagtacaacctctgccacaggcgcagccaggatccgtttggggacttgctgaagaagctcatggaccaaatccatgaccacctggagatgcctgagttgagccggaaatttgggacgcaaatgtatgagcagcaggtggtgaagctgagtgaggctgcggctttggctgggcttcaggagcaacgggtgtatgcgcttcacctgaggcgctacaatgacgcgctgctcatccatgacaccgtccgcgccgtggatgccttggctgcgctgcaggatttctatcacagggagcacgtcactaaaacccagatcctgtgtgccgagcgccggctgctggccctgttcgatgaccgcaagaatgagctggcccacttggcaactcatggcccagagaatccaaaactggagatgctggaaaagatcctgcaaaggcagttcagtagctctaacagccctcggggtatcatcttcacccgcacccgccaaagcgcacactccctcctgctctggctccagcagcagcagggcctgcagactgtggacatccgggcccagctactgattggggctgggaacagcagccagagcacccacatgacccagagggaccagcaagaagtgatccagaagttccaagatggaaccctgaaccttctggtggccacgagtgtggcggaggaggggctggacatcccacattgcaatgtggtggtgcgttatgggctcttgaccaatgaaatctccatggtccaggccaggggccgtgcccgggccgatcagagtgtatacgcgtttgtagcaactgaaggtagccgggagctgaagcgggagctgatcaacgaggcgctggagacgctgatggagcaggcagtggctgctgtgcagaaaatggaccaggccgagtaccaggccaaggaactactataatgtctccagggatcctgtggtcatcaacaaagtcttcaaggactggaagcctgggggtgtcatcagctgcaggaactgtggggaggtctggggtctgcagatgatctacaagtcagtgaagctgccagtgctcaaagtccgcagcatgctgctggagacccctcaggggcggatccaggccaaaaagtggtcccgcgtgcccttctccgtgcctgactttgacttcctgcagcattgtgccgagaacttgtcggacctctccctggactgaccacctcattgctgcagtgcccggtttgggctgtagggggcgggagagtctgcagcagactccaggcccctccttcctgaatcatcagctgtgggcatcaggcccaccagccacacaggagtcctgggcaccctggcttaggctcccgcaatgggaaaacaaccggagggccagagcttagtccagacctaccttgtacgcacatagacattttcatatgcactggatggagttagggaaactgaggcaaaagaatttgccatactgtactcagaatcacgacattccttccctaccaaggccacttctattttttgaggctcctc

SEQ ID NO: 214805 - protein, 345 aa, Artificial Sequence
  derived and/or modified sequence
MLRPAGLWRLCRRPWAARVPAENLGRREVTSGVSPRGSTSPRTLNIFDRDLKRKQKNWAARQPEPTKFDYLKEEVGSRIADRVYDIPRNFPLALDLGCGRGYIAQYLNKETIGKFFQADIAENALKNSSETEIPTVSVLADEEFLPFKENTFDLVVSSLSLHWVNDLPRALEQIHYILKPDGVFIGAMFGGDTLYELRCSLQLAETEREGGFSPHISPFTAVNDLGHLLGRAGFNTLTVDTDEIQVNYPGMFELMEDLQGMGESNCAWNRKALLHRDTMLAAAAVYREMYRNEDGSVPATYQIYYMIGWKYHESQARPAERGSATVSFGELGKINNLMPPGKKSQ

SEQ ID NO: 214806 - DNA, 1038 bp, Artificial Sequence
  derived and/or modified sequence
atgttgcgtcccgccgggctctggaggctgtgtcgaagaccatgggcagcccgtgtaccggccgagaacttaggacgtagggaggtcactagcggagtgagccctcgaggatctacaagccccaggaccctgaacatctttgatcgtgatctcaagcggaaacagaaaaactgggccgccagacagccagaacctactaaatttgactatctaaaggaggaagtgggttcccgaattgctgacagagtatatgatatacctcggaactttccgctggccttggatcttgggtgcggtagggggtatattgcacagtacttgaataaggaaactatcggtaagttttttcaggctgacatcgctgagaacgctctaaaaaacagctcagagacggaaataccaaccgtgtcagtgcttgctgacgaggaattcctgcctttcaaagaaaatacctttgatctggtggttagctccctgtcactccactgggtgaacgacctgccacgggctctggaacagatccactacatcctgaaaccagatggtgtgtttattggggcaatgtttgggggcgacacgctgtatgagctcagatgttcactgcagctggctgagactgagcgcgagggagggttcagcccacacatttcccctttcaccgcagtgaatgatttaggacatttactgggccgagccggcttcaacacactcactgtcgacacggatgaaatacaggtgaattacccgggtatgtttgagctaatggaagatctccagggaatgggcgagagcaactgcgcctggaaccggaaggcactgctgcatcgggacactatgctcgcggccgcagcggtgtatcgggaaatgtataggaacgaagatggcagcgttcctgcgacgtatcaaatctactacatgatcggatggaaataccacgagagccaagctaggcccgccgagcgcggctctgctacagtgagcttcggagagctgggaaaaattaacaacttaatgccccccggcaagaagagccagtag

SEQ ID NO: 214807 - DNA, 1038 bp, Artificial Sequence
  derived and/or modified sequence
atgctgcggcctgctggcctgtggaggctgtgccggcggccctgggccgcccgggtgcctgctgagaacctgggccggcgggaggtgaccagcggcgtgagcccccggggcagcaccagccccaggaccctgaacatctttgaccgggacctgaagaggaagcagaagaactgggccgcccggcagcctgagcccaccaagtttgactacctgaaggaggaggtgggcagcagaattgctgacagagtgtatgacatccccaggaacttccccctggccctggacctgggctgcggccggggctacatcgcccagtacctgaacaaggagaccatcggcaagttcttccaggccgacattgctgaaaatgccctgaagaacagcagcgagacagagatccccaccgtgtctgtgctggctgatgaggagttcctgcccttcaaggagaacacctttgacctggtggtgagcagcctgagcctgcactgggtgaatgacctgccccgggccctggagcagatccactacatcctgaagccagatggagtcttcatcggggccatgtttggaggagacaccctgtatgagctgcgctgcagcctgcagctggccgagacagagcgggagggcggcttcagcccccacatcagccccttcaccgctgtgaatgacctgggccacctgctgggccgggccggcttcaacaccctgactgtggacacagatgagatccaggtgaactacccaggcatgtttgagctgatggaggacctgcagggcatgggagagagcaactgtgcctggaacaggaaggccctgctgcaccgggacaccatgctggccgctgctgctgtgtaccgggagatgtacagaaatgaagatggctctgtgcctgccacctaccagatctactacatgattggctggaagtaccacgagagccaggcccggcctgctgagcggggcagcgccaccgtgtcctttggagagctgggcaagatcaacaacctgatgcctcctgggaagaagagccagtag

SEQ ID NO: 214808 - DNA, 1038 bp, Artificial Sequence
  derived and/or modified sequence
atgctgcggcccgccggcctgtggcggctgtgccggcggccctgggctgcgcgcgttccggctgaaaatttgggcagaagagaggttaccagcggggtctctcccagagggtctacaagcccccgcaccctgaatatcttcgaccgagacctgaagcgcaaacagaagaattgggctgcccgtcagcctgagccgaccaagtttgattacctgaaggaagaagtggggagtcggatagccgacagagtgtacgacatccctaggaacttcccactggctctggatttgggatgtggccgcggttacattgcacagtaccttaacaaggagaccattggcaaattttttcaggctgacatcgccgagaatgcacttaagaactcttcagagactgagatccccaccgtgtccgtgttggccgacgaagaattcctgcccttcaaagagaacactttcgatttggtggtttcgtctttatccctgcactgggtcaacgatctgcccagggcactcgaacagatacattatatcctgaaacccgatggagtgttcataggcgccatgttcggaggagacacactgtatgagttgaggtgctccctgcagcttgcagaaacggaaagggagggcggtttcagtccgcatatctctccattcaccgccgtgaacgacctgggacatctgcttgggcgcgccggcttcaacaccctcaccgtggataccgacgaaatccaggtgaactacccaggcatgtttgagcttatggaggacctccaaggaatgggagaatccaactgcgcatggaataggaaggctctgctccatcgtgacacaatgctagccgccgcagccgtctacagggagatgtatcgcaacgaagacgggtcggtgcctgctacttatcagatatactacatgattggatggaagtatcacgagtcccaagctagacctgcggagagaggaagcgccaccgtgtccttcggggaattgggcaaaatcaataatttgatgccacccggcaagaagtcacaatag

SEQ ID NO: 214809 - DNA, 1038 bp, Artificial Sequence
  derived and/or modified sequence
atgctccggcctgcaggcttgtggagactgtgtcggcgaccttgggccgctcgggttccggctgaaaacctgggccgacgggaggtcacctccggggttagtccgagaggtagcacttcacctagaactctgaatatctttgatcgggatctgaaaagaaagcaaaaaaactgggccgcacggcagccagaaccgacaaagtttgactatttgaaggaagaggtaggatctcgcatcgccgatcgagtgtacgatatcccccgtaactttccgctggctctcgatctcggctgtggacgcggttacattgctcagtaccttaataaggagacgatcggcaagttcttccaggcagatatcgctgagaatgccttgaaaaattcaagcgaaactgagattcctacggtgagtgtgctggctgacgaagagtttcttccgttcaaagaaaacacattcgacctcgtcgtatcatctctctcactccactgggtgaatgatctgccccgtgccttagaacagattcattacatactgaaacccgacggggtctttatcggggcaatgtttggaggggatactctgtacgagctgcgatgtagtctccaactggcagaaacagagcgggaagggggattctccccgcacattagcccttttacggctgttaatgatttgggacacctccttggtcgggctggatttaatacccttactgtcgatacagatgaaatccaggtgaattacccagggatgtttgaactcatggaagatttacaggggatgggtgaaagcaattgcgcttggaataggaaagctctgctgcatcgcgatacaatgttggccgctgctgccgtttaccgggagatgtataggaacgaggacggtagtgtccccgcaacgtaccagatttattacatgatcgggtggaaataccacgagtcccaggcgaggcccgctgaacgcggttctgctaccgtttctttcggagagttgggtaagatcaataatctcatgcccccaggcaaaaagtcccaatag

SEQ ID NO: 214810 - DNA, 2368 bp, Artificial Sequence
  derived and/or modified sequence
ggcaagcgaactaggccaaactacttgcacgttccctcgagaagatctttggagtagacacaaaagccgcgctggcgcatgcgcacaaaaagcgccggcaattggggtcgcagctggagatgctgcggccggcagggctctggcgcttatgtcggcgaccttgggcggcgagggtcccagcggagaatcttggccgtagggaagtcacctctggtgtctctccccgcggtagcacctcgcccagaaccctgaatattttcgaccgggatttgaaaaggaaacagaagaactgggcagcccggcagcccgagccgaccaaatttgactacctgaaggaggaggttggaagtcggatcgcagaccgtgtatatgacatacccagaaatttcccccttgctttggatcttggttgtggaagaggttacattgcacaatatttgaataaggaaactattggaaagtttttccaagctgacattgcagaaaatgctttgaaaaattcctcagaaacagaaatacctactgtcagcgttttagctgatgaagaattccttcccttcaaagaaaatacatttgacctggtggttagcagtttaagtttgcattgggtgaatgaccttcctagagcacttgagcagattcattatattttaaaaccagatggagtgtttatcggtgcaatgtttggaggcgacacactctatgaacttcggtgttccttacagttagcggaaacggaaagggaaggaggattttctccacacatttctcctttcactgctgtcaatgacctgggacatctgcttgggagagctggctttaatactctgactgtggacactgatgaaattcaagttaactatcctggaatgtttgaattgatggaagatttacaaggtatgggtgagagtaactgtgcttggaatagaaaagccctgctgcatcgagacacaatgctggcagctgcggcagtgtacagagaaatgtacagaaatgaagatggttcagtacctgctacataccagatctattacatgataggatggaaatatcatgagtcacaggcaagaccagctgaaagaggttccgcaactgtgtcatttggagagctaggaaaaataaacaaccttatgccaccggggaaaaaatcacaataaatatttattcagtgttaatgtcgtccagaattttcatcagaaatggatagctttaacatctaaaattattatattttgaagcaagaagcactctaagctatttactaataggcttttcatataattaggaaaacctaatatcacatctatagtaaccatttcagtttcatattgtttctgttctcataaggatactgctgagtgtctttgcagattcagcctaaaagcaaagaaaatatttccctaaaatatttgcaaataatgttcacatatgtaaatgccttggaaaatattactcatgctgaccttttacacctttttcatttgtcatactgttttctttgccttgaagaggaacagatgaatatgcaccttctccagagttatgtggttttagaatttagaagagcatgtatctttattaaatccctcctcaactctttttttttaaagcatctgaatttaaccttatttcttttttatctccatggtgtgggtgggaccaccatggttttacaccccaccctaccttagggaagaagaaaacattttaaagaataccagaagtagaatcacatgtaacagtctctgcacagtcatcagtttattgttaagctttcctttgtaatttcagggcttaagcactattatcctaatccaagttcacagtcctgttgttgtcgaggagggttcaaaatcatttggagataatcaagctcagacagcttaggataggtgagaagaacatagaggaagcagggagaaggctgagaagcaagcaggagtgagcgctaagtgttttgtttccagttagctgttcgctgtcttttccatttaacctgggcactgccctagcctcatcttcagccttcagtgatctataatagcatttccttctgtctcctctcagtctctcttctgccttccttccctcctttactgtattagcaacaagctgtccatgggtgggggctgtgtgttagcctgtacgtagcacatgggactttccacatagtagatattcagttacattttgaactaattatataacaaacttgccctttgaaagactaagttatagttaaaaaccaagatttgtaggagaaaaagaaattattgttcccttcagtttgaaaaatcatcgatatttgaaactgggatacgcttggtagcttttttgttttaacacaaagtaaacctgtgaagtagaa

SEQ ID NO: 214811 - DNA, 2330 bp, Artificial Sequence
  derived and/or modified sequence
aattggggtcgcagctggagatgctgcggccggcagggctctggcgcttatgtcggcgaccttgggcggcgagggtcccagcggagaatcttggccgtagggaagtcacctctggtgtctctccccgcggtagcacctcgcccagaaccctgaatattttcgaccgggatttgaaaaggaaacagaagaactgggcagcccggcagcccgagccgaccaaatttgactacctgaaggaggaggttggaagtcggatcgcagaccgtgtatatgacatacccagaaatttcccccttgctttggatcttggttgtggaagaggttacattgcacaatatttgaataaggaaactattggaaagtttttccaagctgacattgcagaaaatgctttgaaaaattcctcagaaacagaaatacctactgtcagcgttttagctgatgaagaattccttcccttcaaagaaaatacatttgacctggtggttagcagtttaagtttgcattgggtgaatgaccttcctagagcacttgagcagattcattatattttaaaaccagatggagtgtttatcggtgcaatgtttggaggcgacacactctatgaacttcggtgttccttacagttagcggaaacggaaagggaaggaggattttctccacacatttctcctttcactgctgtcaatgacctgggacatctgcttgggagagctggctttaatactctgactgtggacactgatgaaattcaagttaactatcctggaatgtttgaattgatggaagatttacaagaacaaaagtccagaatgttgacctaattttacaaaacaagctgcatatcagctgatgaatgcatgagaaattttcaaggctttcacagtggtcttaaggtatgggtgagagtaactgtgcttggaatagaaaagccctgctgcatcgagacacaatgctggcagctgcggcagtgtacagagaaatgtacagaaatgaagatggttcagtacctgctacataccagatctattacatgataggatggaaatatcatgagtcacaggcaagaccagctgaaagaggttccgcaactgtgtcatttggagagctaggaaaaataaacaaccttatgccaccggggaaaaaatcacaataaatatttattcagtgttaatgtcgtccagaattttcatcagaaatggatagctttaacatctaaaattattatattttgaagcaagaagcactctaagctatttactaataggcttttcatataattaggaaaacctaatatcacatctatagtaaccatttcagtttcatattgtttctgttctcataaggatactgctgagtgtctttgcagattcagcctaaaagcaaagaaaatatttccctaaaatatttgcaaataatgttcacatatgtaaatgccttggaaaatattactcatgctgaccttttacacctttttcatttgtcatactgttttctttgccttgaagaggaacagatgaatatgcaccttctccagagttatgtggttttagaatttagaagagcatgtatctttattaaatccctcctcaactctttttttttaaagcatctgaatttaaccttatttcttttttatctccatggtgtgggtgggaccaccatggttttacaccccaccctaccttagggaagaagaaaacattttaaagaataccagaagtagaatcacatgtaacagtctctgcacagtcatcagtttattgttaagctttcctttgtaatttcagggtcctgttgttgtcgaggagggttcaaaatcatttggagataatcaagctcagacagcttaggataggtgagaagaacatagaggaagcagggagaaggctgagaagcaagcaggagtgagcgctaagtgttttgtttccagttagctgttcgctgtcttttccatttaacctgggcactgccctagcctcatcttcagccttcagtgatctataatagcatttccttctgtctcctctcagtctctcttctgccttccttccctcctttactgtattagcaacaagctgtccatgggtgggggctgtgtgttagcctgtacgtagcacatgggactttccacatagtagatattcagttacattttgaactaattatataacaaacttgccctttgaaagactaagttatagttaaaaaccaagatttgtaggagaaaaagaaattattgttcccttcagtttgaaaaatcatcgatatttgaaactgggatacgcttggtagcttttttgttttaacacaaagtaaacctgtgaagt

SEQ ID NO: 214812 - DNA, 1038 bp, Artificial Sequence
  derived and/or modified sequence
atgctgagacccgccggcctgtggagactgtgcagaagaccctgggccgccagagtgcccgccgagaacctgggcagaagagaggtgaccagcggcgtgagccccagaggcagcaccagccccagaaccctgaacatcttcgacagagacctgaagagaaagcagaagaactgggccgccagacagcccgagcccaccaagttcgactacctgaaggaggaggtgggcagcagaatcgccgacagagtgtacgacatccccagaaacttccccctggccctggacctgggctgcggcagaggctacatcgcccagtacctgaacaaggagaccatcggcaagttcttccaggccgacatcgccgagaacgccctgaagaacagcagcgagaccgagatccccaccgtgagcgtgctggccgacgaggagttcctgcccttcaaggagaacaccttcgacctggtggtgagcagcctgagcctgcactgggtgaacgacctgcccagagccctggagcagatccactacatcctgaagcccgacggcgtgttcatcggcgccatgttcggcggcgacaccctgtacgagctgagatgcagcctgcagctggccgagaccgagagagagggcggcttcagcccccacatcagccccttcaccgccgtgaacgacctgggccacctgctgggcagagccggcttcaacaccctgaccgtggacaccgacgagatccaggtgaactaccccggcatgttcgagctgatggaggacctgcagggcatgggcgagagcaactgcgcctggaacagaaaggccctgctgcacagagacaccatgctggccgccgccgccgtgtacagagagatgtacagaaacgaggacggcagcgtgcccgccacctaccagatctactacatgatcggctggaagtaccacgagagccaggccagacccgccgagagaggcagcgccaccgtgagcttcggcgagctgggcaagatcaacaacctgatgccccccggcaagaagagccagtag

SEQ ID NO: 214813 - protein, 179 aa, Artificial Sequence
  derived and/or modified sequence
MFKVIQRSVGPASLSLLTFKVYAAPKKDSPPKNSVKVDELSLYSVPEGQSKYVEEARSQLEESISQLRHYCEPYTTWCQTAMTISKMHLLFFPRLGVIGFAGLIGLLLARGSKIKKLVYPPGFMGLAASLYYPQQAIVFAQVSGERLYDWGLRGYIVIEDLWKENFQKPGNVKNSPGTK

SEQ ID NO: 214814 - protein, 198 aa, Artificial Sequence
  derived and/or modified sequence
MFKVIQRSVGPASLSLLTFKVYAAPKKDSPPKNSVKVDELSLYSVPEGQSKYVEEARSQLEESISQLRHYCEPYTTWCQETYSQTKPKMQSLVQWGLDSYDYLQNAPPGFFPRLGVIGFAGLIGLLLARGSKIKKLVYPPGFMGLAASLYYPQQAIVFAQVSGERLYDWGLRGYIVIEDLWKENFQKPGNVKNSPGTK

SEQ ID NO: 214815 - DNA, 540 bp, Artificial Sequence
  derived and/or modified sequence
atgtttaaagttattcagcgctcagtgggaccagccagtctcagtctcctgacttttaaggtttacgccgcaccgaagaaagattcccctcccaagaatagcgtaaaggtcgacgagctcagtctttacagtgtacccgaaggccagtccaagtatgtcgaagaggctcggtcccagctggaagagtctatctctcaattgcggcattattgtgaaccatacaccacgtggtgccagacagcaatgacaatctccaaaatgcatttattgttttttcctaggctcggagtcatcggatttgccggtttaatagggctgctactggcgcgcgggtcaaaaataaagaaattagtatacccgcctgggtttatgggtttagctgcttctttgtactacccccagcaggcgatagtgttcgctcaggtgtccggagagcgcctatacgattggggcctgaggggctacatagtgatcgaagatttgtggaaggaaaacttccagaagccgggcaatgtgaagaactcgcccggtacaaagtag

SEQ ID NO: 214816 - DNA, 597 bp, Artificial Sequence
  derived and/or modified sequence
atgtttaaggtgattcagagatcagtgggtccagccagcctgtccctgcttaccttcaaggtatatgccgcccctaagaaggatagccctcctaaaaactcagtaaaggtcgacgaactgtcactatactctgtgcccgaaggccagagcaaatatgtagaggaagccagaagccagctcgaagaatctatttctcagctgaggcactactgtgaaccctatacgacatggtgccaggaaacttattcccagactaagcccaagatgcagagcctcgtccagtggggccttgattcctatgattatctgcagaacgcccctcctggcttctttccaagattgggcgtgatcggatttgccggactcatagggctactactagcacgcggttctaagataaaaaaactggtctatcccccaggattcatgggccttgccgccagcctttattaccctcagcaagcaattgtcttcgcccaggtgagcggggaaagactctatgactgggggttgcgtggatatatcgtcatcgaagacctgtggaaggaaaacttccaaaaacccggaaacgtgaaaaatagtccaggaactaaatag

SEQ ID NO: 214817 - DNA, 537 bp, Artificial Sequence
  derived and/or modified sequence
gtctacgcagcgcctaagaaagatagccctcccaagaacagtgtcaaggtcgacgagttgagtctgtattccgtgcccgagggtcagtccaaatacgtggaggaagcccgctcccagctcgaagagagcatatcccagctgagacattattgcgaaccttataccacatggtgtcaggaaacgtactctcagactaagcctaaaatgcaatcactggtccaatgggggctagattcctacgattatctgcaaaatgcacctccagggttctttcctcggctgggtgtaattggtttcgcagggctcattggattgttgctggcacggggttccaagatcaaaaagctcgtttatcctccaggattcatgggattggccgcctcactttactatccccagcaagctattgtcttcgcccaagttagcggtgagcggctctacgactggggacttaggggctatatagtgatcgaagacctttggaaagagaacttccagaagcccggcaatgtgaagaacagtcctggcaccaaatag

SEQ ID NO: 214818 - DNA, 540 bp, Artificial Sequence
  derived and/or modified sequence
atgttcaaggtgatccagaggtctgtgggccctgccagcctgagcctgctgaccttcaaggtgtatgctgcccccaagaaggacagcccccccaagaacagcgtgaaggtggatgagctgagcctgtacagcgtgcctgagggccagagcaaatatgtggaggaggcccggagccagctggaggagagcatcagccagctgcggcactactgtgagccctacaccacctggtgccagacagccatgaccatcagcaagatgcacctgctcttcttcccccggctgggcgtcatcggctttgctggcctcatcggcctgctgctggcccggggcagcaagatcaagaagctggtgtacccacctggcttcatgggcctggccgccagcctgtactacccccagcaggccatcgtgtttgcccaggtgtctggagagcggctgtatgactggggcctgcggggctacatcgtgattgaggacctgtggaaggagaacttccagaagccaggaaatgtgaagaacagccctggcaccaagtag

SEQ ID NO: 214819 - DNA, 597 bp, Artificial Sequence
  derived and/or modified sequence
atgttcaaggtgatccagaggtctgtgggccctgccagcctgagcctgctgaccttcaaggtgtatgctgcccccaagaaggacagcccccccaagaacagcgtgaaggtggatgagctgagcctgtacagcgtgcctgagggccagagcaaatatgtggaggaggcccggagccagctggaggagagcatcagccagctgcggcactactgtgagccctacaccacctggtgccaggagacctacagccagaccaagcccaagatgcagagcctggtgcagtggggcctggacagctatgactacctgcagaatgcccctcctggcttcttcccccggctgggcgtgattggatttgctggcctgattggcctgctgctggcccggggcagcaagatcaagaagctggtgtacccacctggcttcatgggcctggccgccagcctgtactacccccagcaggccatcgtgtttgcccaggtgtctggagagcggctgtatgactggggcctgcggggctacatcgtgattgaggacctgtggaaggagaacttccagaagccaggaaatgtgaagaacagccctggcaccaagtag

SEQ ID NO: 214820 - DNA, 537 bp, Artificial Sequence
  derived and/or modified sequence
gtgtatgctgcccccaagaaggacagcccccccaagaacagcgtgaaggtggatgagctgagcctgtacagcgtgcctgagggccagagcaaatatgtggaggaggcccggagccagctggaggagagcatcagccagctgcggcactactgtgagccctacaccacctggtgccaggagacctacagccagaccaagcccaagatgcagagcctggtgcagtggggcctggacagctatgactacctgcagaatgcccctcctggcttcttcccccggctgggcgtgattggatttgctggcctgattggcctgctgctggcccggggcagcaagatcaagaagctggtgtacccacctggcttcatgggcctggccgccagcctgtactacccccagcaggccatcgtgtttgcccaggtgtctggagagcggctgtatgactggggcctgcggggctacatcgtgattgaggacctgtggaaggagaacttccagaagccaggaaatgtgaagaacagccctggcaccaagtag

SEQ ID NO: 214821 - DNA, 540 bp, Artificial Sequence
  derived and/or modified sequence
atgttcaaggtgatccagcggagcgtgggccccgccagcctgagcctgttgacctttaaagtgtatgccgctccgaagaaagactcaccccccaaaaatagcgtcaaagtggacgaactctcactgtatagcgtccccgaaggacaatcaaagtatgttgaggaggcccgcagccagctggaagaatcgatttcacagcttagacactactgtgagccatacactacctggtgccagaccgccatgactatatctaaaatgcacttgcttttttttcccaggcttggcgtcattgggttcgctgggctgatcggactgctcctagcaaggggatccaaaatcaagaagttggtgtacccacccggattcatgggtttggccgcttccctatattacccccaacaggcaattgtctttgcccaggttagcggcgaacgactgtacgattgggggctcagggggtacatcgtgattgaagacctttggaaagaaaatttccagaagccaggaaatgttaagaacagccctgggaccaaatag

SEQ ID NO: 214822 - DNA, 597 bp, Artificial Sequence
  derived and/or modified sequence
atgttcaaggtgatccagcggagcgtgggccccgccagcctgagcctgcttacctttaaggtatatgcagcccctaaaaaggacagtcctcctaaaaactcagtcaaagtggatgagctctcactgtactccgtccctgaaggccagtctaagtatgtggaagaggcaagaagccagctggaggaatccatatcccagctccgccattactgtgagccttacaccacttggtgccaagaaacatattcccaaaccaaaccaaagatgcaatctctcgtgcagtggggcctggattcgtatgattacctacagaacgctccccccggcttctttccgcggctgggcgtgattgggtttgccggtttaatagggctacttctcgcacgcggctccaagattaaaaaattggtttatcccccaggctttatggggctcgcagcgagtctgtactacccccaacaggcaatcgttttcgctcaggtcagcggggagcgtctttacgactggggtctgagaggctacatcgttatcgaagatctctggaaggagaatttccagaagcctggcaatgtaaagaactcacctggcaccaagtag

SEQ ID NO: 214823 - DNA, 537 bp, Artificial Sequence
  derived and/or modified sequence
gtgtacgccgcccccaagaaggacagcccccccaagaacagcgtgaaggtagacgaattgagtctgtactctgtgcctgagggccagtccaagtacgttgaagaagcccggtcacaactcgaagagagcatttcgcagctcagacattactgcgagccttacactacctggtgtcaagaaacctattctcagaccaagcctaaaatgcaaagccttgtgcaatgggggttagactcttacgactacctgcagaacgccccaccaggtttcttcccacggctgggcgtgataggcttcgcagggctcatagggctgctccttgctagagggtccaaaattaaaaagctggtatatccgcccggtttcatgggcctggccgcaagcctctactaccctcagcaggcaattgtttttgcccaggtgtccggcgaacgtctttatgattgggggctgcggggatacattgtaattgaggatctttggaaggaaaatttccagaagccaggtaacgttaaaaactcccctggcaccaagtag

SEQ ID NO: 214824 - DNA, 540 bp, Artificial Sequence
  derived and/or modified sequence
atgtttaaggtgattcagcgtagtgtggggccagcttctttgtccctcctgacttttaaggtgtatgctgctcccaaaaaggattcccccccaaagaactctgtcaaggtggacgaattgagcttgtactcagtgcctgagggccagagcaaatacgtcgaagaagctagatcccagttagaagagtccatcagccagttacgacactactgtgaaccatacactacctggtgccaaactgccatgacgatctccaaaatgcacttgctctttttccccagactcggggtcatcggtttcgccggattaatagggcttttgctcgccagaggatccaagatcaaaaagttggtttatccccctggttttatgggccttgccgcttcgttgtactacccacaacaggctatagtgttcgctcaagtgtctggagagcggctgtacgactggggcctaaggggatatatcgtgattgaggatctatggaaggaaaattttcaaaagcctgggaatgtaaagaattcccctgggacgaagtag

SEQ ID NO: 214825 - DNA, 597 bp, Artificial Sequence
  derived and/or modified sequence
atgtttaaagtgatccaacgtagtgttgggcctgctagcctttcccttttaaccttcaaggtgtatgcggcaccgaagaaggatagtccccctaagaacagcgtgaaagtagatgaattgagcctctactcagtacctgaaggtcaaagcaagtacgtcgaggaggctcgatctcagctcgaagagagcatatctcagctgcgccactattgcgaaccgtatactacttggtgtcaagaaacttactcccagacaaaacccaaaatgcaatccctggtgcagtggggactcgattcctatgattacctccagaatgctcccccaggattctttcccaggttaggcgttataggctttgccggtttgattggactgctcctggccagaggttcaaaaataaagaaacttgtgtatccaccaggcttcatgggactcgccgcttccctctattacccccagcaggccatagttttcgcccaggtgtcgggcgaacgactgtatgattggggcctgcgtggctacatcgtgattgaggatctgtggaaggagaatttccaaaaacctggtaatgttaaaaattcaccgggtaccaaatag

SEQ ID NO: 214826 - DNA, 537 bp, Artificial Sequence
  derived and/or modified sequence
gtatacgctgccccaaagaaagattctcctcccaagaactccgtcaaggtggacgaactcagcctgtacagtgttcctgagggccaatctaaatatgttgaagaggctcgctctcaactagaggagtcaatttcccagctgcgacactactgtgaaccgtatacgacctggtgtcaagagacttactctcagactaaacctaagatgcagagcctcgttcagtgggggctggacagctatgattacctccagaatgccccacccggattcttccccaggctgggggtaattgggttcgcagggcttattggactactgttggcccgaggcagcaagatcaagaagttggtctatcccccaggtttcatgggactcgctgccagcctgtactacccacaacaggccattgtgtttgcgcaggtgagcggagaacgcttgtacgactgggggcttagggggtacattgtgatcgaagacctgtggaaagagaatttccagaaacccggtaatgtcaagaacagcccaggaacaaaatag

SEQ ID NO: 214827 - DNA, 1056 bp, Artificial Sequence
  derived and/or modified sequence
gggtttgcgttcacccgctgcccgggcgcgacgcgctgcggctcagcgacgcggcttctagaaccgggtgattgaactaaaccttcgccgcaccgagtttgcagtacggccgtcacccgcaccgctgcctgcttgcggttggagaaatcaaggccctaccgggcctccgtagtcacctctctatagtgggcgtggccgaggccggggtgaccctgccggagcctccgctgccagcgacatgttcaaggtaattcagaggtccgtggggccagccagcctgagcttgctcaccttcaaagtctatgcagcaccaaaaaaggactcacctcccaaaaattccgtgaaggttgatgagctttcactctactcagttcctgagggtcaatcgaagtatgtggaggaggcaaggagccagcttgaagaaagcatctcacagctccgacactattgcgagccatacacaacctggtgtcagacagctatgactatctccaaaatgcacctcctgttttttccgagacttggtgttattggttttgctggccttattggactccttttggctagaggttcaaaaataaagaagctagtgtatccgcctggtttcatgggattagctgcctccctctattatccacaacaagccatcgtgtttgcccaggtcagtggggagagattatatgactggggtttacgaggatatatagtcatagaagatttgtggaaggagaactttcaaaagccaggaaatgtgaagaattcacctggaactaagtagaaaactccatgctctgccatcttaatcagttataggtaaacattggaaactccatagaataaatcagtatttctacagaaaaatggcatagaagtcagtattgaatgtattaaattggctttcttcttcaggaaaaactagaccagacctctgttatcttctgtgaaatcatcctacaagcaaactaacctggaatcccttcacctagagataatgtacaagccttagaactcctcattctcatgttgctatttatgtacctaattaaaacccaagtt

SEQ ID NO: 214828 - DNA, 1118 bp, Artificial Sequence
  derived and/or modified sequence
gcgttcacccgctgcccgggcgcgacgcgctgcggctcagcgacgcggcttctagaaccgggtgattgaactaaaccttcgccgcaccgagtttgcagtacggccgtcacccgcaccgctgcctgcttgcggttggagaaatcaaggccctaccgggcctccgtagtcacctctctatagtgggcgtggccgaggccggggtgaccctgccggagcctccgctgccagcgacatgttcaaggtaattcagaggtccgtggggccagccagcctgagcttgctcaccttcaaagtctatgcagcaccaaaaaaggactcacctcccaaaaattccgtgaaggttgatgagctttcactctactcagttcctgagggtcaatcgaagtatgtggaggaggcaaggagccagcttgaagaaagcatctcacagctccgacactattgcgagccatacacaacctggtgtcaggaaacgtactcccaaactaagcccaagatgcaaagtttggttcaatgggggttagacagctatgactatctccaaaatgcacctcctggattttttccgagacttggtgttattggttttgctggccttattggactccttttggctagaggttcaaaaataaagaagctagtgtatccgcctggtttcatgggattagctgcctccctctattatccacaacaagccatcgtgtttgcccaggtcagtggggagagattatatgactggggtttacgaggatatatagtcatagaagatttgtggaaggagaactttcaaaagccaggaaatgtgaagaattcacctggaactaagtagaaaactccatgctctgccatcttaatcagttataggtaaacattggaaactccatagaataaatcagtatttctacagaaaaatggcatagaagtcagtattgaatgtattaaattggctttcttcttcaggaaaaactagaccagacctctgttatcttctgtgaaatcatcctacaagcaaactaacctggaatcccttcacctagagataatgtacaagccttagaactcctcattctcatgttgctatttatgtacctaattaaaacccaagttaaaaaaaaaaa

SEQ ID NO: 214829 - DNA, 714 bp, Artificial Sequence
  derived and/or modified sequence
gtctatgcagcaccaaaaaaggactcacctcccaaaaattccgtgaaggttgatgagctttcactctactcagttcctgagggtcaatcgaagtatgtggaggaggcaaggagccagcttgaagaaagcatctcacagctccgacactattgcgagccatacacaacctggtgtcaggaaacgtactcccaaactaagcccaagatgcaaagtttggttcaatgggggttagacagctatgactatctccaaaatgcacctcctggattttttccgagacttggtgttattggttttgctggccttattggactccttttggctagaggttcaaaaataaagaagctagtgtatccgcctggtttcatgggattagctgcctccctctattatccacaacaagccatcgtgtttgcccaggtcagtggggagagattatatgactggggtttacgaggatatatagtcatagaagatttgtggaaggagaactttcaaaagccaggaaatgtgaagaattcacctggaactaagtagaaaactccatgctctgccatcttaatcaggaaaaactagaccagacctctgttatcttctgtgaaatcatcctacaagcaaactaacctggaatcccttcacctagagataatgtacaagccttagaactcctcattctcatgttgctatttatgtacctaattaaaacccaagtta

SEQ ID NO: 214830 - DNA, 540 bp, Artificial Sequence
  derived and/or modified sequence
atgttcaaggtgatccagagaagcgtgggccccgccagcctgagcctgctgaccttcaaggtgtacgccgcccccaagaaggacagcccccccaagaacagcgtgaaggtggacgagctgagcctgtacagcgtgcccgagggccagagcaagtacgtggaggaggccagaagccagctggaggagagcatcagccagctgagacactactgcgagccctacaccacctggtgccagaccgccatgaccatcagcaagatgcacctgctgttcttccccagactgggcgtgatcggcttcgccggcctgatcggcctgctgctggccagaggcagcaagatcaagaagctggtgtacccccccggcttcatgggcctggccgccagcctgtactacccccagcaggccatcgtgttcgcccaggtgagcggcgagagactgtacgactggggcctgagaggctacatcgtgatcgaggacctgtggaaggagaacttccagaagcccggcaacgtgaagaacagccccggcaccaagtag

SEQ ID NO: 214831 - DNA, 597 bp, Artificial Sequence
  derived and/or modified sequence
atgttcaaggtgatccagagaagcgtgggccccgccagcctgagcctgctgaccttcaaggtgtacgccgcccccaagaaggacagcccccccaagaacagcgtgaaggtggacgagctgagcctgtacagcgtgcccgagggccagagcaagtacgtggaggaggccagaagccagctggaggagagcatcagccagctgagacactactgcgagccctacaccacctggtgccaggagacctacagccagaccaagcccaagatgcagagcctggtgcagtggggcctggacagctacgactacctgcagaacgccccccccggcttcttccccagactgggcgtgatcggcttcgccggcctgatcggcctgctgctggccagaggcagcaagatcaagaagctggtgtacccccccggcttcatgggcctggccgccagcctgtactacccccagcaggccatcgtgttcgcccaggtgagcggcgagagactgtacgactggggcctgagaggctacatcgtgatcgaggacctgtggaaggagaacttccagaagcccggcaacgtgaagaacagccccggcaccaagtag

SEQ ID NO: 214832 - DNA, 537 bp, Artificial Sequence
  derived and/or modified sequence
gtgtacgccgcccccaagaaggacagcccccccaagaacagcgtgaaggtggacgagctgagcctgtacagcgtgcccgagggccagagcaagtacgtggaggaggccagaagccagctggaggagagcatcagccagctgagacactactgcgagccctacaccacctggtgccaggagacctacagccagaccaagcccaagatgcagagcctggtgcagtggggcctggacagctacgactacctgcagaacgccccccccggcttcttccccagactgggcgtgatcggcttcgccggcctgatcggcctgctgctggccagaggcagcaagatcaagaagctggtgtacccccccggcttcatgggcctggccgccagcctgtactacccccagcaggccatcgtgttcgcccaggtgagcggcgagagactgtacgactggggcctgagaggctacatcgtgatcgaggacctgtggaaggagaacttccagaagcccggcaacgtgaagaacagccccggcaccaagtag

SEQ ID NO: 214833 - protein, 274 aa, Artificial Sequence
  derived and/or modified sequence
MLNLLLLALPVLASRAYAAPAPGQALQRVGIVGGQEAPRSKWPWQVSLRVRDRYWMHFCGGSLIHPQWVLTAAHCVGPDVKDLAALRVQLREQHLYYQDQLLPVSRIIVHPQFYTAQIGADIALLELEEPVNVSSHVHTVTLPPASETFPPMPCWVTGWGDVDNDERLPPPFPLKQVKVPIMENHICDAKYHLGAYTGDDVRIVRDDMLCAGNTRRDSCQGDSGGPLVCKVNGTWLQAGVVSWGEGCAQPNRPGIYTRVTYYLDWIHHYVPKKP

SEQ ID NO: 214834 - DNA, 825 bp, Artificial Sequence
  derived and/or modified sequence
atgctgaacctgctgctgctggccctgcccgtgctggccagcagagcctacgccgcccccgcccccggccaggccctgcagagagtgggcatcgtgggcggccaggaggcccccagaagcaagtggccctggcaggtgagcctgagagtgagagacagatactggatgcacttctgcggcggcagcctgatccacccccagtgggtgctgaccgccgcccactgcgtgggccccgacgtgaaggacctggccgccctgagagtgcagctgagagagcagcacctgtactaccaggaccagctgctgcccgtgagcagaatcatcgtgcacccccagttctacaccgcccagatcggcgccgacatcgccctgctggagctggaggagcccgtgaacgtgagcagccacgtgcacaccgtgaccctgccccccgccagcgagaccttcccccccatgccctgctgggtgaccggctggggcgacgtggacaacgacgagagactgcccccccccttccccctgaagcaggtgaaggtgcccatcatggagaaccacatctgcgacgccaagtaccacctgggcgcctacaccggcgacgacgtgagaatcgtgagagacgacatgctgtgcgccggcaacaccagaagagacagctgccagggcgacagcggcggccccctggtgtgcaaggtgaacggcacctggctgcaggccggcgtggtgagctggggcgagggctgcgcccagcccaacagacccggcatctacaccagagtgacctactacctggactggatccaccactacgtgcccaagaagccctag

SEQ ID NO: 214835 - DNA, 825 bp, Artificial Sequence
  derived and/or modified sequence
atgttgaatctgctgctgttggctcttcctgttttggcttccagagcctatgccgcccccgcccctggccaggcgctacagcgagtcgggattgtcggggggcaggaagccccacgatcaaagtggccctggcaagtgagcctgcgggtccgagaccgctattggatgcatttctgtggcgggtccctgattcacccccagtgggtgctaaccgctgcacattgtgtcgggccagatgtcaaggacctggccgccctgcgagtgcagctgagggaacaacatctgtactatcaggaccagctgctgcccgtttccaggatcatcgttcatcctcagttttacaccgcacagatcggggcagatatcgctcttctggagctggaagaacctgtgaatgtgtcttcacacgtccacacggtcactctgccacctgcaagcgaaacttttccccccatgccctgttgggtgaccgggtggggcgatgtcgacaacgacgaacgtctccccccgccatttcctctgaagcaggtgaaggtccctattatggagaaccatatatgtgacgctaagtaccaccttggcgcttataccggcgacgacgtcagaatcgtgagggatgacatgctctgtgcaggaaatactagacgcgactcctgtcaaggtgacagcggcgggccactggtgtgcaaggtgaacgggacttggcttcaggcaggtgtagtcagctggggcgagggttgcgcccagcctaacagacctggcatctatactcgggtgacctattacttggattggatccaccattatgtgccaaagaagccttag

SEQ ID NO: 214836 - DNA, 825 bp, Artificial Sequence
  derived and/or modified sequence
atgctgaacctgctgctgctggccctgcctgtgctggccagccgggcctatgctgccccagcccctggccaggccctgcagagggtgggcatcgtgggcggccaggaggcccccaggagcaagtggccctggcaggtgtccctgcgggtgcgggaccgctactggatgcacttctgtggcggcagcctcatccacccccagtgggtgctgacagctgcccactgtgtgggcccagatgtgaaggacctggccgccctgcgggtgcagctgcgggagcagcacctgtactaccaggaccagctgctgcctgtgagccgcatcatcgtgcacccccagttctacacagcccagatcggggctgacatcgccctgctggagctggaggagcctgtgaatgtgagcagccacgtgcacacagtgaccctgcccccagccagcgagaccttcccccccatgccctgctgggtgacaggctggggagatgtggacaatgatgagcggctgcccccacccttccccctgaagcaggtgaaggtgcccatcatggagaaccacatctgtgatgccaagtaccacctgggcgcctacacaggagatgatgtgagaattgtgagagatgacatgctgtgtgccggcaacacccggcgggacagctgccagggcgacagcggcggccccctggtgtgcaaggtgaatggcacctggctgcaggccggcgtggtgtcctggggcgagggctgtgcccagcccaacagacctggcatctacaccagggtgacctactacctggactggatccaccactacgtgcccaagaagccctag

SEQ ID NO: 214837 - DNA, 825 bp, Artificial Sequence
  derived and/or modified sequence
atgctgaacctgctgctgctggccctgcccgtgctggccagccgggcctacgctgctcccgcacctggacaagctctccagagggtaggaatcgtgggaggacaggaagcgccccgaagcaagtggccctggcaggtgtccttgcgagtgcgcgaccggtactggatgcacttttgcggtggtagcctgatccaccctcaatgggtgctgaccgctgcacattgtgtaggccccgacgtgaaggacctggccgcactgcgcgttcagttaagagaacaacacctgtattaccaagatcaattgcttccagtgagtagaatcatcgtccaccctcaattttataccgcacagataggagccgacatcgccctcctcgaactagaggagcccgtcaatgtaagctctcacgtgcacactgtgaccctacctcctgcttcagaaacgtttccaccaatgccttgttgggttacaggatggggtgatgtagacaatgacgagagactgcctccacccttccctttaaagcaggtgaaggttccgatcatggaaaaccacatatgcgacgccaagtaccatctcggcgcctatactggggacgatgtcaggattgtcagagacgatatgctatgtgccggcaatacccgacgggatagctgtcaaggtgactctggcgggcccctggtctgtaaagtaaacggcacctggttgcaggctggtgtcgtcagctggggcgaagggtgcgcacagccaaataggccaggaatctatacccgtgtgacatattacctcgattggatccaccattatgtccctaagaagccctag

SEQ ID NO: 214838 - DNA, 825 bp, Artificial Sequence
  derived and/or modified sequence
atgcttaacctgctcctgctggcactgcctgtcctcgcctctagagcctatgccgctcccgctcctggacaggccttacagagggtcggcattgtgggtggccaggaggctccaagatctaagtggccttggcaggtgtcgcttagggtcagggatcgctactggatgcacttctgtggaggaagtctgattcacccccagtgggtgctgaccgccgcacactgtgtgggcccagacgtgaaagatttggccgcactgcgagtgcagcttcgggaacagcatctttattaccaggatcagctcctcccagtttcacggattattgtccacccacagttttacaccgctcagattggagccgacattgcattgctagagttagaggaacctgtgaacgtgtcatcccacgttcacaccgtcaccttaccccctgcatcagagacttttccgcctatgccttgttgggtgacaggttggggagacgtagataacgacgagaggctccctcctccctttccattgaagcaggtgaaagtaccaataatggagaaccacatttgcgacgctaaataccacctgggggcttatacaggcgatgatgtcagaatcgtcagagatgatatgctgtgtgcaggtaacactaggagagatagttgtcaaggcgatagtggcggtccgctggtctgcaaagtcaatggcacctggctgcaggctggcgtcgtgtcctggggtgaagggtgtgcgcagcccaaccgccctggcatctacacacgggtcacatattacctggattggatccaccactacgttcctaagaaaccgtag

SEQ ID NO: 214839 - DNA, 1191 bp, Artificial Sequence
  derived and/or modified sequence
ataaatggggaggggagagcccactgggtagaaggaacagggagcggccaggatgctgaatctgctgctgctggcgctgcccgtcctggcgagccgcgcctacgcggcccctgccccaggccaggccctgcagcgagtgggcatcgttgggggtcaggaggcccccaggagcaagtggccctggcaggtgagcctgagagtccgcgaccgatactggatgcacttctgcgggggctccctcatccacccccagtgggtgctgaccgcagcgcactgcgtgggaccggacgtcaaggatctggccgccctcagggtgcaactgcgggagcagcacctctactaccaggaccagctgctgccggtcagcaggatcatcgtgcacccacagttctacaccgcccagatcggagcggacatcgccctgctggagctggaggagccggtgaacgtctccagccacgtccacacggtcaccctgccccctgcctcagagaccttcccccccatgccgtgctgggtcactggctggggcgatgtggacaatgatgagcgcctcccaccgccatttcctctgaagcaggtgaaggtccccataatggaaaaccacatttgtgacgcaaaataccaccttggcgcctacacgggagacgacgtccgcatcgtccgtgacgacatgctgtgtgccgggaacacccggagggactcatgccagggcgactccggagggcccctggtgtgcaaggtgaatggcacctggctgcaggcgggcgtggtcagctggggcgagggctgtgcccagcccaaccggcctggcatctacacccgtgtcacctactacttggactggatccaccactatgtccccaaaaagccgtgagtcaggcctggggtgtccacctgggtcactggagagccagcccctcctgttcaaaacaccactgcttcctacccaggtggcgactgccccccacaccttccctgccccgtcctgagtgccccttcctgtcctaagccccctgctctcttctgagccccttcccctgtcctgaggacccttccccatcctgagcccccttccctgtcctaagcctgacgcctgcaccgggccctccggccctcccctgcccaggcagctggtggtgggcgctaatcctcctgagtgctggacctcattaaagtgcatggaaatca

SEQ ID NO: 214840 - protein, 224 aa, Artificial Sequence
  derived and/or modified sequence
MSFVEDVTIGEGESIPPDTQFVKTWRIQNSGAEAWPPGVCLKYVGGDQFGHVNMVMVRSLEPQEIADVSVQMCSPSRAGMYQGQWRMCTATGLYYGDVIWVILSVEVGGLLGVTQQLSSFETEFNTQPHRKVEGNFNPFASPQKNRQSDENNLKDPGGSEFDSISKNTWAPAPDTWAPAPDQTEQDQNRLSQNSVNLSPSSHANNLSVVTYSKGLHGPYPFGQS

SEQ ID NO: 214841 - protein, 298 aa, Artificial Sequence
  derived and/or modified sequence
MEGMDVDLDPELMQKFSCLGTTDKDVLISEFQRLLGFQLNPAGCAFFLDMTNWNLQAAIGAYYDFESPNISVPSMSFVEDVTIGEGESIPPDTQFVKTWRIQNSGAEAWPPGVCLKYVGGDQFGHVNMVMVRSLEPQEIADVSVQMCSPSRAGMYQGQWRMCTATGLYYGDVIWVILSVEVGGLLGVTQQLSSFETEFNTQPHRKVEGNFNPFASPQKNRQSDENNLKDPGGSEFDSISKNTWAPAPDTWAPAPDQTEQDQNRLSQNSVNLSPSSHANNLSVVTYSKGLHGPYPFGQS

SEQ ID NO: 214842 - DNA, 675 bp, Artificial Sequence
  derived and/or modified sequence
atgagttttgtggaggacgttactataggcgaaggtgaaagcatcccgccggatacgcaattcgtgaaaacctggagaattcaaaactctggcgcagaggcatggcctcctggggtgtgcctgaagtacgtgggtggggaccaattcggccacgttaacatggtgatggtgcggtcactggaacctcaagaaatagctgatgtatccgttcagatgtgtagcccttccagagcaggcatgtatcagggacagtggcgcatgtgtactgcgaccgggctgtattatggcgacgtgatctgggtgatcctctctgtggaggttggggggcttttgggagtgacacagcaactgtctagctttgaaacagagtttaacactcaacctcatagaaaagtggaaggcaactttaatccatttgcgtctccccaaaagaatcggcagagcgatgagaacaatttgaaggatcccggcggaagtgagttcgactcgatcagtaagaatacgtgggccccagctcccgacacttgggctccagcccctgaccagaccgagcaggatcagaatagactgagccaaaattcagtcaacctgtcccccagttcccacgccaacaatctttccgttgtgacttactcgaaaggattgcacggaccttacccctttgggcagtcctag

SEQ ID NO: 214843 - DNA, 897 bp, Artificial Sequence
  derived and/or modified sequence
atggagggtatggacgttgatcttgaccccgaacttatgcaaaaattctcctgtctgggcactactgataaggacgtgttgatctccgagtttcagaggttactggggttccagctgaaccccgccgggtgcgccttctttctcgacatgacgaattggaacctgcaggctgcgattggggcatactacgacttcgaaagccccaacatcagcgtgccttcgatgagcttcgttgaggacgtgacaattggcgagggagagtccatccctccagacacacagttcgtcaaaacatggcggattcaaaacagcggtgctgaagcgtggcctcctggagtttgcctgaaatacgtcgggggtgatcaatttggccatgtgaatatggtcatggtccggtctctagaaccccaagagatcgccgacgttagcgtccaaatgtgttccccgtcccgggctgggatgtaccaggggcaatggcgaatgtgtactgctacaggcctttactatggtgatgtgatatgggttattctctccgtggaagtcggaggtctgctgggcgtgacccaacaactgtcaagctttgagaccgaattcaacacgcagcctcataggaaggtggaaggaaactttaatccttttgcctccccccaaaaaaacaggcagagcgacgaaaacaaccttaaggacccaggcggaagcgaattcgacagcataagcaagaacacctgggcccctgcccctgacacttgggccccagcgcctgaccagacagagcaggaccagaaccggctttctcagaattcagtcaacctgagtccaagctctcacgctaacaatctgagcgtggttacttactctaagggtctgcatggaccctatccttttggccagagttag

SEQ ID NO: 214844 - DNA, 675 bp, Artificial Sequence
  derived and/or modified sequence
atgagctttgtggaggatgtgaccatcggggagggggagagcatccccccagacacccagtttgtgaagacctggaggatccagaacagcggggctgaggcctggcccccaggagtgtgcctgaagtatgtgggcggggaccagtttggacatgtgaacatggtgatggtgcgcagcctggagccccaggagattgctgatgtgtctgtgcagatgtgcagccccagccgggccggcatgtaccagggccagtggaggatgtgcacagccaccggcctgtactatggagatgtgatctgggtgatcctgtctgtggaggtgggcggcctgctgggcgtgacccagcagctgagcagctttgaaacagagttcaacacccagccccacaggaaggtggagggcaacttcaacccctttgccagcccccagaagaaccggcagagtgatgagaacaacctgaaggaccccggcggcagcgagtttgacagcatcagcaagaacacctgggccccagccccagacacctgggccccagccccagaccagacagagcaggaccagaaccggctgagccagaacagcgtgaacctgagccccagcagccacgccaacaacctgtctgtggtgacctacagcaagggcctgcacggcccctaccccttcggccagagctag

SEQ ID NO: 214845 - DNA, 897 bp, Artificial Sequence
  derived and/or modified sequence
atggagggcatggatgtggacctggaccctgagctgatgcagaagttcagctgcctgggcaccacagacaaggatgtgctgatcagcgagttccagaggctgctgggcttccagctgaacccagctggctgtgccttcttcctggacatgaccaactggaacctgcaggccgccatcggggcctactatgactttgagagccccaacatctctgtgcccagcatgagctttgtggaggatgtgaccatcggggagggggagagcatccccccagacacccagtttgtgaagacctggaggatccagaacagcggggctgaggcctggcccccaggagtgtgcctgaagtatgtgggcggggaccagtttggacatgtgaacatggtgatggtgcgcagcctggagccccaggagattgctgatgtgtctgtgcagatgtgcagccccagccgggccggcatgtaccagggccagtggaggatgtgcacagccaccggcctgtactatggagatgtgatctgggtgatcctgtctgtggaggtgggcggcctgctgggcgtgacccagcagctgagcagctttgaaacagagttcaacacccagccccacaggaaggtggagggcaacttcaacccctttgccagcccccagaagaaccggcagagtgatgagaacaacctgaaggaccccggcggcagcgagtttgacagcatcagcaagaacacctgggccccagccccagacacctgggccccagccccagaccagacagagcaggaccagaaccggctgagccagaacagcgtgaacctgagccccagcagccacgccaacaacctgtctgtggtgacctacagcaagggcctgcacggcccctaccccttcggccagagctag

SEQ ID NO: 214846 - DNA, 675 bp, Artificial Sequence
  derived and/or modified sequence
atgagcttcgtggaggacgtgaccatcggcgagggcgagagcatccctccagatacccagtttgtcaaaacctggcgcatacagaattcaggggctgaggcctggccacccggagtctgtttgaaatatgtgggtggcgatcagtttggtcacgtaaatatggttatggtgcggagcttagaacctcaagagattgcggacgtgagcgtccagatgtgttctccttcccgggccggcatgtatcaggggcagtggagaatgtgcacagccacaggactgtattacggcgacgttatctgggtcattctatctgtggaagtggggggtctgctgggggtgacgcaacagctgagtagttttgagacagagtttaacacacagccgcacagaaaagttgaggggaattttaaccccttcgcaagtccccagaagaatagacagtcggacgagaataacctgaaggatccaggtggctcagagttcgactccattagcaagaatacgtgggcgcctgcccccgacacatgggcaccagctcctgaccagactgaacaggaccaaaatcgtctctcccagaattctgtgaacctcagtccctccagtcacgctaataatttgagcgtggttacctactccaaaggcctgcacggtccgtacccctttggccaatcatag

SEQ ID NO: 214847 - DNA, 897 bp, Artificial Sequence
  derived and/or modified sequence
atggagggcatggacgtggacctggaccccgagctgatgcagaagtttagctgccttggcaccactgacaaagatgtgttaatatcggaatttcagagactcctaggattccaactgaaccctgctggctgcgcattttttctggatatgactaactggaacttgcaggccgccattggcgcctactatgacttcgaaagcccaaacatctcagtcccttctatgtcatttgtggaagatgtgaccattggagaaggcgagtccatccccccggatacacagttcgtgaaaacatggcggatccagaattccggcgccgaagcctggcctcctggagtgtgtctgaaatacgtggggggcgatcagtttggccatgtcaatatggtgatggtcagatctctcgaaccccaagagatcgccgatgtatctgtgcagatgtgttccccctcccgggcgggaatgtatcagggccagtggaggatgtgcacagccaccgggctctactacggagacgtgatctgggtcattttgtctgtggaagtaggcggccttctcggggtcactcagcagctgagcagttttgagaccgagttcaatactcagccgcaccggaaagtggagggaaacttcaacccgtttgcctcccctcaaaagaaccgacagagtgatgagaataacttgaaggaccctggcggtagtgagtttgattccatatcaaaaaatacttgggcccctgctcccgatacttgggcccctgctcctgaccaaactgaacaggatcagaatcgcctgtctcaaaacagcgtaaacttgagcccctcttcacatgccaataatctgtcagtagtgacatattccaagggtcttcatggaccgtacccctttggacagtcttag

SEQ ID NO: 214848 - DNA, 675 bp, Artificial Sequence
  derived and/or modified sequence
atgtccttcgtggaggatgtgaccattggggagggcgaaagcatcccgccagacacacaattcgtgaaaacttggaggatccagaattctggcgcagaggcgtggccaccaggtgtctgcctgaaatacgttgggggagaccagtttggtcatgtcaatatggtaatggtgaggtccctggaaccccaggaaattgccgacgtcagcgtgcagatgtgtagcccctctcgggctggaatgtaccagggccagtggcggatgtgtactgccacaggcctttactatggggacgtcatatgggtcatcctctcagtggaagtagggggactgctcggtgtgacgcagcagctaagctcgttcgagactgagttcaatacccagccgcatcggaaagtagagggaaacttcaatccattcgcatctcctcagaagaacagacagtccgacgagaacaatctaaaggaccccggtggctccgagtttgattcaatctctaaaaacacgtgggctccagctccagacacatgggccccagccccagatcagactgagcaggatcagaatcgactgagccagaacagcgttaacttgagtccgtccagccacgcaaataacctgagcgtagttacctatagcaaaggcctgcatggcccttatcccttcggacagtcttag

SEQ ID NO: 214849 - DNA, 897 bp, Artificial Sequence
  derived and/or modified sequence
atggagggaatggatgtcgacctggaccctgagctgatgcagaagtttagttgtcttggaacaactgataaggatgttctcatttctgagttccagaggctcctaggatttcagttgaatcctgccggatgcgccttcttcttagatatgaccaactggaatctacaggccgctattggtgcgtactacgattttgaatcccccaatatatcagtgcccagtatgtccttcgtggaagacgtgactataggcgagggggagagtatacctcccgacactcagtttgttaagacctggagaatacagaactctggggctgaggcgtggcctccaggggtgtgtttaaagtacgtggggggtgatcagttcggacacgtcaacatggtgatggttcggtctcttgaacctcaggagattgctgatgtgagtgttcagatgtgttcgccttccagggcgggaatgtatcagggccagtggagaatgtgtacagccactgggctgtactacggcgacgtgatttgggtgatcctgtcagtggaagtggggggactgctgggagtgactcagcagcttagctcgtttgagactgagttcaatacgcagccccatcggaaagtggaaggaaacttcaatccctttgcttcgcctcagaaaaatcgccaaagcgatgagaacaacctcaaggatcccggaggcagtgaatttgacagcatttcgaaaaacacttgggcccctgctcccgatacatgggcacctgccccagaccagacagaacaagaccagaatcggctatcacaaaactccgtgaatctgagcccttcttctcatgccaacaacctttcggttgtgacttactcaaagggcctgcacgggccatatcccttcgggcaatcatag

SEQ ID NO: 214850 - DNA, 916 bp, Artificial Sequence
  derived and/or modified sequence
gtgtaacctctcctgtttttgtacatgtgtttattcctgaactgttttgggctactcattgttaaccaggttgctgctctacttttcccactgctggctaaggaagattcaactttttcaggaacctacaagcagcaattggcgcctattatgactttgagagcccaaacatcagtgtgccctctatgtcctttgttgaagatgtcaccataggagaaggggagtcaatacctccggatactcagtttgtaaaaacatggcggatccagaattctggggcagaggcctggcctccaggggtttgtcttaaatatgtcgggggagaccaatttggacatgtgaacatggtgatggtgagatcgctagagccccaagagattgcagatgtcagcgtccagatgtgcagccccagcagagcaggaatgtatcagggacagtggcggatgtgcactgctacaggactctactatggagatgtcatctgggtgattctcagtgtggaggtgggtggacttttaggagtaacgcagcagctgtcatcttttgaaacggagttcaacacacagccgcatcgtaaggtagaaggaaacttcaacccttttgcctctccccaaaagaaccgacaatcagatgaaaacaacttaaaagaccctgggggctccgagttcgactcgatcagcaaaaacacatgggctcctgctcctgacacatgggctcctgctcctgaccaaactgagcaagaccagaatagactgtcacagaactctgtaaatctgtctcccagcagtcacgcaaacaacttatcagtagtgacttacagtaaggggctccatgggccttaccccttcggccagtcttaaacgggtgtcagcaagaagaaaaattaacaaaagacagaaggcctgactttgggggg

SEQ ID NO: 214851 - DNA, 4418 bp, Artificial Sequence
  derived and/or modified sequence
ggcggagtggcgagaggcgagaggcggcggaggcggcggagctggggggggtgggaggggggggagagtgagtgagtggcagagtgagtttacccctatgagactgtgagaggcccggggcctacctcaaaggagcggggtcgcgaagctagctagcagcggcccccctccaggtccccgggcccggcggcgcggcggcggcttggttgtgaagaggcggggaagcgggtgtccggtccccgccatggagggcatggacgtagacctggacccggagctgatgcagaagttcagctgcctgggcaccaccgacaaggacgtgctcatctccgagttccagaggctgctcggcttccagctcaatcctgccggttgcgccttcttcctggacatgaccaactggaacctacaagcagcaattggcgcctattatgactttgagagcccaaacatcagtgtgccctctatgtcctttgttgaagatgtcaccataggagaaggggagtcaatacctccggatactcagtttgtaaaaacatggcggatccagaattctggggcagaggcctggcctccaggggtttgtcttaaatatgtcgggggagaccaatttggacatgtgaacatggtgatggtgagatcgctagagccccaagagattgcagatgtcagcgtccagatgtgcagccccagcagagcaggaatgtatcagggacagtggcggatgtgcactgctacaggactctactatggagatgtcatctgggtgattctcagtgtggaggtgggtggacttttaggagtaacgcagcagctgtcatcttttgaaacggagttcaacacacagccgcatcgtaaggtagaaggaaacttcaacccttttgcctctccccaaaagaaccgacaatcagatgaaaacaacttaaaagaccctgggggctccgagttcgactcgatcagcaaaaacacatgggctcctgctcctgacacatgggctcctgctcctgaccaaactgagcaagaccagaatagactgtcacagaactctgtaaatctgtctcccagcagtcacgcaaacaacttatcagtagtgacttacagtaaggggctccatgggccttaccccttcggccagtcttaaacgggtgtcagcaagaagaaaaattaacaaaagacagaaggcctgactttggggggttagggcaaggggttcctctggattgcagaccacatcgcacagacccctggctctgaccccctctcatcccggaagaagaggaagaagcagaacagactagttttgagtaaactcagtatgcatgtgtgaatgctgaatcacaggaatggtgttgaggctaccaagaagaaatccatgcagccactttgggttttgttataggcatcagtctaacaagtcattaggtcactcgggaagggggaaaaagtttaaaatgggggaaaaaaagccatctttttaaacaaaaattattttgcctacagaaaggttgtagttttgagcacatgttaatttttttccctctttccccacttttatttttttaaataagggataacatattctttatagaatagtgcttgttctggaagagattcaggtgaaaagttggcgtggcatgtttgaggactctgcggatcagtgctacaggagtacatctgccctgccacatgactccagaagtctctgaccccatttgtttttaatggcatcagccaatgagttatcacccttttcctcctcttttctctttaatcttctgttgatttacacctttgacatttgtattcgtcaaccctgtggcttgttagcatcagaacctctctgaagaccaaacttccctgtgtggccagcagaggaagccttgaggatagatctcgggtgacgtgggattttctaagcctgagaggtgtccttctgcacacccttgtaacaattaaaattgcttttcttccatgtttctcttggcagagagaaatgccatcatgcttactgctcttttggattcttcatgcagtggcttcccatttgctctgggaacagtgcctctgtgctggttatatgtatgcaccacatgtgcacacacgggtgttggtgcaactcaccagcaggtgtgcagtaggcaagcttgaaggtggcccatgcttctctgttgtcacacaacacctttccctgtttctcttcagttgtcctctgatattttcacagcctgttagtggcggctgatctgtagaggtatgaaaatacagccccaaagggggaatttgtcatggggaagggccagccactgactacttgatcttggagaccacatttagatggaaatgagaggacctccacagccccgcctccctgccaggatgctagattattggctgggaggtgggcaagtggcagcccagctgaagcaagaggctgattgactggctgctcactcaggcaggtggcctgccctggcatcctgtagattctgagcaggttgagatgtggatatctccatgggaagcttgaaccaggctagaacagctgtctgccaaagatacaagaatatgcaaagtccctcttacccccctccttccctcaagtcttagttggtttgagagccagggatatggatccagggtgctgttgcagggtcacctgcctgttaccacacccccatccagctgggtggtgggtgagggtgtgagacaggcagggagaccaggtaatgagtggctgcaaggagtcatatagcctgggtgtgggtgagggtctgcctgcctgtttctgtctgggtgtctgagttccaaaaaatgtgtgttgtttgttcctcctcatcctcttctgagactgttgtttttttagagcttgattgtgggagaaaagcttgtgtgaaattccctcttcacctccccaccccccaaaaaataaaagggggcataaactttattccactggagaagccctgggggtggctggagccagcctgctgagaagcgtggtgcagctgggtctgggacttcactagagcttactctggagcacctattttctgtgcacatgggagtgctccactccctagcagagcagagggaagtctctgccaggtacccacgccacaggcctcaggatggctttttgtctgagggcctcattaggcccagactgctgctgctggtaccagtctcctgagacactgcctccctggagcccatgcatgcccagctgttcttactgcttagtagccttgaagcagcacatctccactgtccctggcaggattgtgggaggcttcacaacccctgctttcctgacttcctcttctgcccaacactgggtgccccttcccagtttcccagcaggggcttcatgggccaccgtcagtgggtctgggcctgccagagtcgtcttgctcttcctcttgcttctaggcaaccacacttggcaagttaaatgtcccaagcaccttgtctcccttcccaagaacaaaccatttctgtgcacatccttggaggcgagatgagctccttgcagagggccagagtaagtgcaagtcatggagtgcaggcagaggggtccatggcttccccagcccagggagggtatcagtatcattcattctctctcccctcactggtatgggttcagagcaatgcctagggcccctctctgctcccctgcctagtggggtggtagtggctacctctcagccccaatagtccctgctcctcttagaatcttcaccaagtggcaggccacctctgggcaggaccacctgcgtctggcacccaggaggtgaggcagacaccatggttaggtgatagggtctgaacccagttggggagacagaggggttcagacttgggaagaatctgtcagtgtgcatggagtgaggtgtgtgtgtgtggatggatgtgcacgtgtgcatgctttttttctttttgccgtgaggacagttgaatttggggcatttttctacaagaagcagtcagccttctctcccccataaggactggctgtaaccttaagcccatcaaagttacttccagcctggagagaacctcaccaaacagctggtgtggcctgagggtggccatggtgggaaatgggcatgagaataaatacctccccaaattcaatctgagcccagcaggagaggatggtagggttgccagggctcagaagtgcaagctgattactcaccccaccctgcctcgccgcacctttcctttgtttccttgggtgaatgcaggagcagcagtggctgcccttcccacctggacagtggtgtgtgtagaaagccagctggatgtttgtggtggggcctcatggtgcctaggaggagataaagatgaggaggtttttccttattgtataaatgaatatttgtatgattaaattaacacacacaccaaaaaaa

SEQ ID NO: 214852 - DNA, 675 bp, Artificial Sequence
  derived and/or modified sequence
atgagcttcgtggaggacgtgaccatcggcgagggcgagagcatcccccccgacacccagttcgtgaagacctggagaatccagaacagcggcgccgaggcctggccccccggcgtgtgcctgaagtacgtgggcggcgaccagttcggccacgtgaacatggtgatggtgagaagcctggagccccaggagatcgccgacgtgagcgtgcagatgtgcagccccagcagagccggcatgtaccagggccagtggagaatgtgcaccgccaccggcctgtactacggcgacgtgatctgggtgatcctgagcgtggaggtgggcggcctgctgggcgtgacccagcagctgagcagcttcgagaccgagttcaacacccagccccacagaaaggtggagggcaacttcaaccccttcgccagcccccagaagaacagacagagcgacgagaacaacctgaaggaccccggcggcagcgagttcgacagcatcagcaagaacacctgggcccccgcccccgacacctgggcccccgcccccgaccagaccgagcaggaccagaacagactgagccagaacagcgtgaacctgagccccagcagccacgccaacaacctgagcgtggtgacctacagcaagggcctgcacggcccctaccccttcggccagagctag

SEQ ID NO: 214853 - DNA, 897 bp, Artificial Sequence
  derived and/or modified sequence
atggagggcatggacgtggacctggaccccgagctgatgcagaagttcagctgcctgggcaccaccgacaaggacgtgctgatcagcgagttccagagactgctgggcttccagctgaaccccgccggctgcgccttcttcctggacatgaccaactggaacctgcaggccgccatcggcgcctactacgacttcgagagccccaacatcagcgtgcccagcatgagcttcgtggaggacgtgaccatcggcgagggcgagagcatcccccccgacacccagttcgtgaagacctggagaatccagaacagcggcgccgaggcctggccccccggcgtgtgcctgaagtacgtgggcggcgaccagttcggccacgtgaacatggtgatggtgagaagcctggagccccaggagatcgccgacgtgagcgtgcagatgtgcagccccagcagagccggcatgtaccagggccagtggagaatgtgcaccgccaccggcctgtactacggcgacgtgatctgggtgatcctgagcgtggaggtgggcggcctgctgggcgtgacccagcagctgagcagcttcgagaccgagttcaacacccagccccacagaaaggtggagggcaacttcaaccccttcgccagcccccagaagaacagacagagcgacgagaacaacctgaaggaccccggcggcagcgagttcgacagcatcagcaagaacacctgggcccccgcccccgacacctgggcccccgcccccgaccagaccgagcaggaccagaacagactgagccagaacagcgtgaacctgagccccagcagccacgccaacaacctgagcgtggtgacctacagcaagggcctgcacggcccctaccccttcggccagagctag

SEQ ID NO: 214854 - protein, 251 aa, Artificial Sequence
  derived and/or modified sequence
MSDIGDWFRSIPAITRYWFAATVAVPLVGKLGLISPAYLFLWPEAFLYRFQIWRPITATFYFPVGPGTGFLYLVNLYFLYQYSTRLETGAFDGRPADYLFMLLFNWICIVITGLAMDMQLLMIPLIMSVLYVWAQLNRDMIVSFWFGTRFKACYLPWVILGFNYIIGGSVINELIGNLVGHLYFFLMFRYPMDLGGRNFLSTPQFLYRWLPSRRGGVSGFGVPPASMRRAADQNGGGGRHNWGQGFRLGDQ

SEQ ID NO: 214855 - protein, 151 aa, Artificial Sequence
  derived and/or modified sequence
MSDIGDWFRSIPAITRYWFAATVAVPLVGKLGLISPAYLFLWPEAFLYRFQACYLPWVILGFNYIIGGSVINELIGNLVGHLYFFLMFRYPMDLGGRNFLSTPQFLYRWLPSRRGGVSGFGVPPASMRRAADQNGGGGRHNWGQGFRLGDQ

SEQ ID NO: 214856 - DNA, 756 bp, Artificial Sequence
  derived and/or modified sequence
atgagcgacatcggcgactggttcagaagcatccccgccatcaccagatactggttcgccgccaccgtggccgtgcccctggtgggcaagctgggcctgatcagccccgcctacctgttcctgtggcccgaggccttcctgtacagattccagatctggagacccatcaccgccaccttctacttccccgtgggccccggcaccggcttcctgtacctggtgaacctgtacttcctgtaccagtacagcaccagactggagaccggcgccttcgacggcagacccgccgactacctgttcatgctgctgttcaactggatctgcatcgtgatcaccggcctggccatggacatgcagctgctgatgatccccctgatcatgagcgtgctgtacgtgtgggcccagctgaacagagacatgatcgtgagcttctggttcggcaccagattcaaggcctgctacctgccctgggtgatcctgggcttcaactacatcatcggcggcagcgtgatcaacgagctgatcggcaacctggtgggccacctgtacttcttcctgatgttcagataccccatggacctgggcggcagaaacttcctgagcaccccccagttcctgtacagatggctgcccagcagaagaggcggcgtgagcggcttcggcgtgccccccgccagcatgagaagagccgccgaccagaacggcggcggcggcagacacaactggggccagggcttcagactgggcgaccagtag

SEQ ID NO: 214857 - DNA, 3286 bp, Artificial Sequence
  derived and/or modified sequence
acctggctccgccccccaggacgccgagcctcggccgggcggtaaaatcggcgcttaccctttaagcggcgggacttctggtcacgtcgtccgcggtcgccggaaggggaagtttcgcctcagaaggctgcctcgctggtccgaattcggtggcgccacgtccgcccgtctccgccttctgcatcgcggcttcggcggcttccacctagacacctaacagtcgcggagccggccgcgtcgtgagggggtcggcacggggagtcgggcggtcttgtgcatcttggctacctgtgggtcgaagatgtcggacatcggagactggttcaggagcatcccggcgatcacgcgctattggttcgccgccaccgtcgccgtgcccttggtcggcaaactcggcctcatcagcccggcctacctcttcctctggcccgaagccttcctttatcgctttcagatttggaggccaatcactgccaccttttatttccctgtgggtccaggaactggatttctttatttggtcaatttatatttcttatatcagtattctacgcgacttgaaacaggagcttttgatgggaggccagcagactatttattcatgctcctctttaactggatttgcatcgtgattactggcttagcaatggatatgcagttgctgatgattcctctgatcatgtcagtactttatgtctgggcccagctgaacagagacatgattgtatcattttggtttggaacacgatttaaggcctgctatttaccctgggttatccttggattcaactatatcatcggaggctcggtaatcaatgagcttattggaaatctggttggacatctttattttttcctaatgttcagatacccaatggacttgggaggaagaaattttctatccacacctcagtttttgtaccgctggctgcccagtaggagaggaggagtatcaggatttggtgtgccccctgctagcatgaggcgagctgctgatcagaatggcggaggcgggagacacaactggggccagggctttcgacttggagaccagtgaaggggcggcctcgggcagccgctcctctcaagccacatttcctcccagtgctgggtgcacttaacaactgcgttctggctaacactgttggacctgacccacactgaatgtagtctttcagtacgagacaaagtttcttaaatcccgaagaaaaatataagtgttccacaagtttcacgattctcattcaagtccttactgctgtgaagaacaaataccaactgtgcaaattgcaaaactgactacattttttggtgtcttctcttctcccctttccgtctgaataatgggttttagcgggtcctagtctgctggcattgagctggggctgggtcaccaaacccttcccaaaaggacccttatctctttcttgcacacatgcctctctcccacttttcccaacccccacatttgcaactagaagaggttgcccataaaattgctctgcccttgacaggttctgttatttattgacttttgccaaggcttggtcacaacaatcatattcacgtaattttccccctttggtggcagaactgtagcaatagggggagaagacaagcagcggatgaagcgttttctcagcttttggaattgcttcgacctgacatccgttgtaaccgtttgccacttcttcagatatttttataaaaaagtaccactgagtcagtgagggccacagattggtattaatgagatacgagggttgttgctgggtgtttgtttcctgagctaagtgatcaagactgtagtggagttgcagctaacatgggttaggtttaaaccatgggggatgcaacccctttgcgtttcatatgtaggcctactggctttgtgtagctggagtagttgggttgctttgtgttaggaggatccagatcatgttggctacagggagatgctctctttgagaggctcctgggcattgattccatttcaatctcattctggatatgtgttcattgagtaaaggaggagagaccctcatacgctatttaaatgtcacttttttgcctatcccccgttttttggtcatgtttcaattaattgtgaggaaggcgcagctcctctctgcacgtagatcattttttaaagctaatgtaagcacatctaagggaataacatgatttaaggttgaaatggctttagaatcatttgggtttgagggtgtgttattttgagtcatgaatgtacaagctctgtgaatcagaccagcttaaatacccacacctttttttcgtaggtgggcttttcctatcagagcttggctcataaccaaataaagttttttgaaggccatggcttttcacacagttattttattttatgacgttatctgaaagcagactgttaggagcagtattgagtggctgtcacactttgaggcaactaaaaaggcttcaaacgttttgatcagtttcttttcaggaaacattgtgctctaacagtatgactattctttcccccactcttaaacagtgtgatgtgtgttatcctaggaaatgagagttggcaaacaacttctcattttgaatagagtttgtgtgtacctctccatatttaatttatatgataaaataggtggggagagtctgaaccttaactgtcatgttttgttgttcatctgtggccacaataaagtttacttgtaaaattttagaggccattactccaattatgttgcacgtacactcattgtacaggcgtggagactcattgtatgtataagaatattctgacagtgagtgacccggagtctctggtgtaccctcttaccagtcagctgcctgcgagcagtcattttttcctaaaggtttacaagtatttagaactcttcagttcagggcaaaatgttcatgaagttattcctcttaaacatggttaggaagctgatgacgttattgattttgtctggattatgtttctggaataattttaccaaaacaagctatttgagttttgacttgacaaggcaaaacatgacagtggattctctttacaaatggaaaaaaaaaatccttattttgtataaaggacttccctttttgtaaactaatcctttttattggtaaaaattgtaaattaaaatgtgcaacttgaaggttgtctgtgttaagtttccatgtccctgctctgctgtctcttagatatcacataatttgtgtaaccaattatctcttgaagagcatttaggaagtacccagtattttttgctggattaattcctgg

SEQ ID NO: 214858 - DNA, 756 bp, Artificial Sequence
  derived and/or modified sequence
atgagtgatattggcgattggttcagatcgatccctgccattaccaggtactggttcgctgcgaccgtggcagtccctctcgtaggaaagctggggctgatcagcccagcttacctctttctgtggcccgaggcgttcttatataggttccaaatctggcggcctatcacggctacgttttacttcccagtaggtccaggtactggattcctttatctggtgaacctatattttctgtatcagtactctactcggctggagacaggggccttcgacggccggccagctgattatctcttcatgcttctctttaattggatttgtattgtgattacaggcttggcgatggatatgcagcttctgatgatcccactgatcatgagcgtcctgtatgtgtgggctcagctgaatcgcgacatgatcgtctccttctggttcgggacaagattcaaggcttgctatctcccctgggtcattttaggcttcaattatataattggcggtagcgtcatcaacgaattgatcggaaatctcgtagggcatctctatttttttctgatgtttagatatccgatggatcttgggggtaggaattttctgtctacaccccagtttctatacaggtggcttccttctcgacggggaggggtgagtggctttggtgtgccgcccgcttcaatgcgcagagcggctgatcaaaacggcggaggtggccgccacaactggggacaagggttccggttgggagatcagtag

SEQ ID NO: 214859 - DNA, 756 bp, Artificial Sequence
  derived and/or modified sequence
atgtctgacatcggggactggttccgcagcatcccagccatcacccgctactggtttgctgccaccgtggccgtgcccctggtgggcaagctgggcctcatcagccctgcctacctgttcctgtggccagaggccttcctgtaccgcttccagatctggaggcccatcacagccaccttctacttccctgtgggccctggcaccggcttcctgtacctggtgaacctgtacttcctgtaccagtacagcacccggctggagaccggggcctttgatggccggcctgctgactacctgttcatgctgctcttcaactggatctgcatcgtcatcaccggcctggccatggacatgcagctgctgatgatccccctcatcatgtctgtgctgtatgtgtgggcccagctgaacagagacatgattgtgtccttctggtttggcacccgcttcaaggcctgctacctgccctgggtgatcctgggcttcaactacatcatcggcggcagcgtcatcaatgagctgattggcaacctggtgggccacctgtacttcttcctgatgttccgctaccccatggacctgggcggcaggaacttcctgagcaccccccagttcctgtaccgctggctgcccagcagaagaggaggagtgtctggcttcggcgtgcccccagcctccatgagaagagctgctgaccagaatggaggcggcggccgccacaactggggccagggcttccggctgggggaccagtag

SEQ ID NO: 214860 - DNA, 756 bp, Artificial Sequence
  derived and/or modified sequence
atgagcgacatcggcgactggttccggagcatccccgccatcacccgctactggtttgcagctaccgtggctgtgccactggtggggaagctgggcttgatcagcccggcgtacttatttctgtggccagaagccttcctttacaggtttcagatttggaggccaattacagctactttctattttccggtgggaccggggacaggcttcctgtacctcgttaacctgtattttctttaccagtattccacaaggttggaaacaggggcttttgatggccgacctgcggactacctgtttatgctactgttcaattggatctgcatcgtgatcactggactggcgatggacatgcagctcctgatgatcccactgattatgtctgtgctgtacgtctgggctcagctaaatagggacatgattgtttcgttttggtttgggacaaggtttaaggcctgctatctgccctgggtgatactggggtttaattatataataggcggcagcgtgataaatgaactcatcggaaatttggtgggccacctgtacttttttctgatgttcaggtacccaatggacctcggcggccggaactttctgtcaactccacaatttttatacaggtggctgccatcgagaaggggtggcgtgtctgggtttggagtgccacccgccagcatgagacgggcagcagaccaaaatggcggtggcggccgtcacaactggggtcagggtttccgcctgggcgatcaatag

SEQ ID NO: 214861 - DNA, 756 bp, Artificial Sequence
  derived and/or modified sequence
atgtctgatataggagattggttccggtccattcccgcaattacgcgttactggtttgctgcaaccgtcgcagtccccctcgtgggaaagctgggactgatctcacccgcatacctgtttttatggccagaggccttcttgtacagattccagatttggcgacctatcactgctacgttttactttccagtaggccctggcactggtttcctctaccttgtgaacctttattttttgtatcagtattcaactaggcttgagacgggagcgttcgatgggaggcccgctgactacttatttatgctgttatttaattggatctgtatcgttatcaccggactggccatggatatgcagctgcttatgataccgctgatcatgagtgtcctatatgtgtgggcccagttaaacagggacatgattgtgtctttttggtttggaacgcgtttcaaggcgtgctacctaccatgggtcatactcggcttcaattatattataggaggatctgtcatcaatgagctaatcggaaacttggtgggacacctttatttttttctgatgtttaggtatcccatggacctgggcggacgcaatttcctgagtaccccacaattcctttatcgttggctgcccagcagaagagggggagtttctggctttggtgtcccccctgccagcatgcgccgagctgcggatcagaatggcggaggagggcgacacaattggggccagggcttccgcctgggcgaccaatag

SEQ ID NO: 214862 - protein, 158 aa, Artificial Sequence
  derived and/or modified sequence
MLEAMAEPSPEDPPPTLKPETQPPEKRRRTIEDFNKFCSFVLAYAGYIPPSKEESDWPASGSSSPLRGESAADSDGWDSAPSDLRTIQTFVKKAKSSKRRAAQAGPTQPGPPRSTFSRLQAPDSATLLEKMKLKDSLFDLDGPKVASPLSPPCAANTP

SEQ ID NO: 214863 - protein, 403 aa, Artificial Sequence
  derived and/or modified sequence
MLEAMAEPSPEDPPPTLKPETQPPEKRRRTIEDFNKFCSFVLAYAGYIPPSKEESDWPASGSSSPLRGESAADSDGWDSAPSDLRTIQTFVKKAKSSKRRAAQAGPTQPGPPRSTFSRLQAPDSATLLEKMKLKDSLFDLDGPKVASPLSPTSLTHTSRPPAALTPVPLSQGDLSHPPRKKDRKNRKLGPGAGAGFGVLRRPRPTPGDGEKRSRIKKSKKRKLKKAERGDRLPPPGPPQAPPSDTDSEEEEEEEEEEEEEEMATVVGGEAPVPVLPTPPEAPRPPATVHPEGVPPADSESKEVGSTETSQDGDASSSEGEMRVMDEDIMVESGDDSWDLITCYCRKPFAGRPMIECSLCGTWIHLSCAKIKKTNVPDFFYCQKCKELRPEARRLGGPPKSGEP

SEQ ID NO: 214864 - DNA, 477 bp, Artificial Sequence
  derived and/or modified sequence
atgcttgaggctatggcggagccaagccctgaagatccaccgcctacattaaaaccggaaacccaaccgcccgaaaagcggcggcgaaccatcgaagacttcaacaagttttgcagttttgtgttggcctatgcaggatacatcccaccatctaaggaagagtctgactggcccgccagcggctcttcttctcccctcagaggcgagagcgccgctgactctgatggttgggactctgcaccatccgatctgcggaccatccagacattcgtgaaaaaggcaaagtcctccaagcgcagggctgctcaagcaggaccaacccagccgggccctccccgctcaacattcagtcgtcttcaggcgcccgatagcgctactctgctggagaagatgaaattaaaggattcgttgttcgatttagacggccccaaggttgcatcccccctcagtccaccttgcgcagccaacactccatag

SEQ ID NO: 214865 - DNA, 1212 bp, Artificial Sequence
  derived and/or modified sequence
atgctggaggctatggctgagccatccccagaggacccaccccccactctgaagccagagacacagcctccagagaagcgcagacggactatcgaagattttaacaaattctgtagctttgtgctggcctacgccggttatatcccaccctctaaagaggagtccgattggcctgcttctggttcctcttctccactgaggggagagtcggctgccgattcagacggatgggactccgcaccctcagatctcagaacgattcaaacctttgttaaaaaggcaaagagttcaaaaagacgcgcggcgcaggctgggccaacccagccaggccctcctaggagtacattctctagactccaggctcccgacagtgctacattattggagaagatgaaactcaaagattccctctttgatttggatggacccaaggtggcttctcccttatcaccaacgagccttacccatacctcccggccacccgctgctcttacacccgtacctttgtcgcaaggggatctgtcccatccaccacgcaagaaggatagaaagaatagaaagctcgggcctggcgctggcgccgggtttggcgttttgcgcagacccaggccaacgccaggcgacggagaaaaaaggtcacggatcaaaaaatcaaagaagaggaaattaaagaaggcagagcgcggcgaccggctgccccccccgggccctccacaggcgccaccatcagacaccgattccgaggaggaggaagaggaagaagaggaagaagaagaggaggagatggcaaccgtcgtgggcggagaagcacccgtgccagttttgccaactccaccggaggctccaagaccacctgctacggttcaccctgaaggggtgcccccagctgactctgagtccaaagaggtggggtctacagagacctcgcaggacggagatgcctcatccagcgagggcgagatgcgcgtcatggacgaggatatcatggttgagagcggtgatgacagttgggatttgatcacctgctactgtaggaagccttttgctgggcgtcccatgatcgaatgtagtctgtgtggcacctggatccatctctcatgtgctaaaattaagaagaccaatgtgcctgacttcttttattgtcaaaagtgcaaggaactcaggccagaggcaagaagactaggagggccacccaagtccggagagccctag

SEQ ID NO: 214866 - DNA, 477 bp, Artificial Sequence
  derived and/or modified sequence
atgctggaggccatggccgagcccagcccagaagatcctccacccaccctgaagccagagacccagcccccagagaagagaagaaggaccatcgaggacttcaacaagttctgcagctttgtgctggcctatgccggctacatcccccccagcaaggaggagagtgactggccagccagcggcagcagcagccccctgcggggggagagcgctgctgacagtgatggctgggacagcgcccccagcgacctgcggaccatccagacctttgtgaagaaggccaagagcagcaagagaagagctgcccaggccggccccacccagcccggccccccaagaagcaccttcagccggctgcaggccccagacagcgccaccctgctggagaagatgaagctgaaggacagcctgtttgacctggatggccccaaggtggccagccccctgagccccccctgtgccgccaacaccccctag

SEQ ID NO: 214867 - DNA, 1212 bp, Artificial Sequence
  derived and/or modified sequence
atgctggaggccatggccgagcccagcccagaagatcctccacccaccctgaagccagagacccagcccccagagaagagaagaaggaccatcgaggacttcaacaagttctgcagctttgtgctggcctatgccggctacatcccccccagcaaggaggagagtgactggccagccagcggcagcagcagccccctgcggggggagagcgctgctgacagtgatggctgggacagcgcccccagcgacctgcggaccatccagacctttgtgaagaaggccaagagcagcaagagaagagctgcccaggccggccccacccagcccggccccccaagaagcaccttcagccggctgcaggccccagacagcgccaccctgctggagaagatgaagctgaaggacagcctgtttgacctggatggccccaaggtggccagccccctgagccccaccagcctgacccacaccagccggcccccagctgccctgacccctgtgcccctgagccagggcgacctgagccacccccccaggaagaaggacaggaagaacaggaagctgggccctggggccggggccggcttcggcgtgctgcggcggccccggcccaccccaggagatggagagaagaggagccgcatcaagaagagcaagaagaggaagctgaagaaggccgagcggggggaccggctgcccccacctggccccccccaggcccccccaagtgacacagattctgaggaggaggaggaggaggaggaggaggaggaggaggaggagatggccaccgtggtgggcggggaggcccctgtgcctgtgctgcccaccccacctgaggccccccggcccccagccaccgtgcaccctgagggcgtgcccccagctgacagcgagagcaaggaggtgggcagcacagagaccagccaggatggagatgccagcagcagcgagggggagatgagggtgatggatgaggacatcatggtggagagcggagatgacagctgggacctgatcacctgctactgcaggaagccctttgctggccggcccatgattgaatgttccctgtgtggcacctggatccacctgagctgtgccaagatcaagaagaccaacgtgcctgacttcttctactgccagaagtgcaaggagctgcggcctgaggcccggcggctgggcggcccccccaagagcggggagccctag

SEQ ID NO: 214868 - DNA, 477 bp, Artificial Sequence
  derived and/or modified sequence
atgctggaggccatggccgagcccagccccgaggaccccccccccactctcaagccagaaacacagccccccgagaagcgcaggaggaccatcgaagactttaacaaattctgctcttttgttctggcctacgccggttacattccaccatccaaagaggaaagcgattggccagcatcaggttccagcagccctctgcgcggcgagtctgccgccgattccgatggctgggactctgcgccatcagacctgcggaccatacagacttttgtgaagaaggcaaagtcgagtaaaaggcgtgcggctcaagccggcccaacacagcctggtccccctcgaagtacctttagccgtcttcaagcgccagactccgcaaccctgctcgagaagatgaagctcaaggattccctgttcgacctcgacgggccaaaggtcgcatcgcctcttagccccccgtgcgccgccaacactccttag

SEQ ID NO: 214869 - DNA, 1212 bp, Artificial Sequence
  derived and/or modified sequence
atgctggaggccatggccgagcccagccccgaggaccccccccccaccctgaaacccgagactcagccacccgaaaagcgccggcggacaatcgaggattttaataagttttgcagtttcgttcttgcatacgcaggatacattcctcctagcaaagaggagtccgactggcctgcaagcggcagctcctccccacttaggggggagtccgctgcggactctgatggctgggattcagcgccatctgacttaagaaccattcagacctttgttaagaaggcaaagtcatcaaagcggcgggccgcacaggccgggccaacacagcccggacccccccgttcgaccttttctcgcctccaggcaccggactctgcgacccttctggaaaagatgaagctgaaggactccttatttgatttggatggtccaaaggtggcctctcccctttctcctacgtcccttacccatacttcaagaccaccggcggcgctgaccccagtgcctctcagccagggagatctgagccacccccctcggaaaaaggaccgcaagaacaggaagctcggcccaggcgccggcgctggattcggcgtcctgaggagacctcgcccgacccctggtgatggcgagaagagaagtcgaattaagaagtccaaaaagcgtaaactcaagaaagccgaacgcggtgatagactgcccccacctggaccacctcaggcccctccatctgacacagacagcgaggaggaagaagaggaggaagaggaagaagaggaggaagagatggcgactgtggtgggcggcgaggccccagtgcctgtgctccctactcccccagaagcaccaaggccaccagccaccgtacatcccgagggtgtgcccccagccgactccgaaagcaaagaagtcgggagcacggagacgtctcaggatggggacgccagcagcagtgagggagagatgagggtgatggacgaagatatcatggtagagtccggggacgatagctgggatttaatcacctgctattgcagaaaaccttttgctggaagaccaatgatagagtgttctctgtgtgggacctggattcacctaagctgcgccaaaataaaaaaaactaacgtgcccgattttttctattgccagaagtgcaaggaactgcggcctgaggccagacgcctgggaggaccccctaaatccggggagccttag

SEQ ID NO: 214870 - DNA, 637 bp, Artificial Sequence
  derived and/or modified sequence
agagggaggtggcggcagcggctagcggactcgagtctcaaccgggctgaggcggacacttctgtggagcgaagcagtgggagcatcgagcactagaggcggcaccgggatccccggctccggggaggggggcgccggaccgggaggaggggagggggcgatgctggaagccatggcggagcccagtcccgaagatccacctccgacccttaagccagagactcagccaccagagaaacggcggagaacaattgaggatttcaacaaattctgcagttttgttttggcatatgctggttacattccccctagcaaagaggaaagtgactggccagcctctggctccagctctccattgcgaggagagagtgcggccgacagtgatggctgggactcggccccctcagatcttcgaaccatccagacttttgttaagaaagcaaagtcatccaagagaagggcagctcaagcaggtcccacccagccaggacccccaaggtccactttctctcgtctgcaggcccccgacagtgctaccttgcttgagaagatgaagctcaaggactctctctttgatctggatgggcccaaagtggcatctcctttgtcccctccctgtgctgccaacaccccctga

SEQ ID NO: 214871 - DNA, 2034 bp, Artificial Sequence
  derived and/or modified sequence
aggagggagcaggcggccggcggcgcggggggagggggcccggtccgggagtgcgggaggcagtggtagagggaggtggcggcagcggctagcggactcgagtctcaaccgggctgaggcggacacttctgtggagcgaagcagtgggagcatcgagcactagaggcggcaccgggatccccggctccggggaggggggcgccggaccgggaggaggggagggggcgatgctggaagccatggcggagcccagtcccgaagatccacctccgacccttaagccagagactcagccaccagagaaacggcggagaacaattgaggatttcaacaaattctgcagttttgttttggcatatgctggttacattccccctagcaaagaggaaagtgactggccagcctctggctccagctctccattgcgaggagagagtgcggccgacagtgatggctgggactcggccccctcagatcttcgaaccatccagacttttgttaagaaagcaaagtcatccaagagaagggcagctcaagcaggtcccacccagccaggacccccaaggtccactttctctcgtctgcaggcccccgacagtgctaccttgcttgagaagatgaagctcaaggactctctctttgatctggatgggcccaaagtggcatctcctttgtcccccacatccctgacacatacctcccggccccctgctgctcttacccccgtgcccctttcccagggggacctctcccatcctcctcgaaagaaggaccgaaagaaccgaaagttggggccaggagctggggctggctttggggtgcttcggaggcctcggccaactcctggggatggggaaaagagatctcgaatcaagaagagcaagaagcggaagttaaaaaaggcagaacggggggatagactcccacctcctgggcctccccaggcaccccccagtgatacagactctgaagaggaggaggaagaggaggaagaggaagaagaagaagagatggcaacagtggtagggggtgaagccccagtccctgtgctgccaacaccccctgaggctcctaggccccctgccacagtgcaccctgaaggagtccctcctgctgacagtgaaagcaaggaggtgggcagcactgaaacaagccaagatggagatgccagctccagtgaaggcgagatgcgggtcatggacgaggacatcatggtagaatcaggtgatgactcatgggatctgatcacatgttactgtcgaaagccctttgcagggcggcccatgattgagtgcagcctgtgtgggacgtggatccacctctcctgtgctaagattaagaagaccaacgtccccgacttcttttattgccagaaatgcaaggaactgaggccagaggcccggcggttaggggggcctcccaaatctggagagccctgatggcaccaactttagcctggaacttccaaatgacaacatgatttgggaactgagcctcagggtcctcagcctatcccctggagcttggatactgtctgcacttcaaggcaggaattctcaagggagacttgtttgaaaatgagtgtctcactttcccaccctatccttcctccccactctgtggacttgaaattgaatccattacggttggggatgggaggctgtctgtgtcccgacacataatctctgtctcttggacctgccaccatcactttctgggtcaggattggaattgggatggaatgggacagttgtctataaaactctagtgtaaatattagcactcccctccctcatcttttcttctatttcactccccatttattttcttctacaccggttgtatttttaattttggacttcccctattgggcatggcagctcaaaggtggagtactagagcctggccaagtgaggaaggaaagcagaaaggtgacgattctcactcacctcttttgtttttaataatatcggccgctgtttgtacagacagcctgcgtgttgtaaataaagcagagtgggctcttttgtgttt

SEQ ID NO: 214872 - DNA, 477 bp, Artificial Sequence
  derived and/or modified sequence
atgctggaagcgatggcagagccatccccggaagacccacctccaactctcaagcctgaaacccaacccccagaaaagcgccgtcgaaccatcgaagactttaacaaattttgcagcttcgtgctagcctacgctgggtacattcccccttcaaaagaggagtcagactggcctgcctccgggagcagcagtccactgaggggtgagtcagccgctgactccgacggttgggatagcgctccttccgacctgcggacaatacaaaccttcgttaagaaggccaagtcctccaagcgcagggccgcacaagcaggacccacccagcccggaccacctagatccacattcagtagactgcaggctccagatagcgccacactgttagaaaagatgaaactgaaggattctttgtttgacctggacgggccaaaagtggcctctccgctgtccccaccatgtgctgccaacactccctag

SEQ ID NO: 214873 - DNA, 1212 bp, Artificial Sequence
  derived and/or modified sequence
atgctggaagccatggcggagccatccccagaagatccacctccaactctaaagcccgagacgcaaccaccggagaagcggagacgcaccatcgaagatttcaataaattttgttcctttgtgcttgcctacgccggatacatccctccatcaaaggaagagtcggactggcctgcaagcggaagctcctcgcctctgagaggggaaagcgcagctgacagtgatggatgggattccgctcctagtgatctgcgaacaatccagacctttgttaagaaggccaaatccagtaagcgcagggcggctcaggccggacctacccagccaggcccacccagatcaacatttagcaggttgcaggctcccgactctgctacactgttggagaaaatgaagttgaaggatagcctcttcgatttagacggccctaaggtagcatctccacttagcccaacaagtctgacccataccagcagacctccggcagccctgacacccgtgcccttgtcccagggcgatctgtcacatccaccaagaaaaaaggaccggaagaatcgcaaactggggccaggcgcaggcgctggattcggagtcttgcggagaccaaggcccacacccggtgatggggaaaagaggtccagaattaagaaatcgaaaaagaggaagttgaagaaggctgagaggggggatagattgcccccacctggacctccgcaggcccctccgtcagacaccgatagcgaagaggaagaggaagaggaggaggaggaagaggaagaggagatggctaccgttgtcgggggagaggcacccgtgccagttttgcccaccccccctgaggccccacggccaccggcaacggtgcatccggagggtgtaccacctgctgattcagagtccaaggaggtcgggtccacagaaacctcccaggatggcgacgcaagctcttccgagggagaaatgcgggtgatggatgaggatattatggtcgagagtggtgacgacagctgggatctgatcacttgctactgtagaaaacctttcgcgggtagacctatgattgagtgctcactgtgtggaacgtggatccacctcagctgtgcgaagatcaagaaaacgaacgtgcccgatttcttttattgtcagaaatgcaaagagttgcggcctgaagccaggaggctggggggtcctcctaagagcggtgagccctag

SEQ ID NO: 214874 - DNA, 477 bp, Artificial Sequence
  derived and/or modified sequence
atgctcgaggccatggccgagcccagtcctgaagaccctcctcctacccttaagcctgaaacacaacccccagaaaaacgtagacgaactatagaggattttaataagttttgttcttttgttctcgcctacgctggatatatacccccatcaaaagaagaatctgattggcccgcctccggatcttctagtccattaaggggcgaatccgccgccgactcagacggatgggattccgcacctagtgatctacgcactatacaaacatttgtcaaaaaagcgaaatcctccaaaagaagggccgctcaggccggacccacacagccaggcccaccccgcagcaccttcagccgactgcaggcaccagattcagcaaccctgctcgagaaaatgaagctaaaggactctctgtttgaccttgatgggccaaaggtcgcaagtcccctctcacccccttgcgccgcaaataccccttag

SEQ ID NO: 214875 - DNA, 477 bp, Artificial Sequence
  derived and/or modified sequence
atgctcgaggccatggccgagcccagtcctgaagaccctcctcctacccttaagcctgaaacacaacccccagaaaaacgtagacgaactatagaggattttaataagttttgttcttttgttctcgcctacgctggatatatacccccatcaaaagaagaatctgattggcccgcctccggatcttctagtccattaaggggcgaatccgccgccgactcagacggatgggattccgcacctagtgatctacgcactatacaaacatttgtcaaaaaagcgaaatcctccaaaagaagggcagctcaagccggacctactcagcccggaccacctagaagtactttttcacggttgcaggctccagactcggccacactgctagaaaaaatgaagctgaaggactccctgtttgatctcgacgggccaaaggttgcgagcccgctcagccccccatgcgccgccaacaccccttag

SEQ ID NO: 214876 - DNA, 477 bp, Artificial Sequence
  derived and/or modified sequence
atgctggaggccatggccgagcccagccccgaggaccccccccccaccctgaagcccgagacccagccccccgagaagagaagaagaaccatcgaggacttcaacaagttctgcagcttcgtgctggcctacgccggctacatcccccccagcaaggaggagagcgactggcccgccagcggcagcagcagccccctgagaggcgagagcgccgccgacagcgacggctgggacagcgcccccagcgacctgagaaccatccagaccttcgtgaagaaggccaagagcagcaagagaagagccgcccaggccggccccacccagcccggcccccccagaagcaccttcagcagactgcaggcccccgacagcgccaccctgctggagaagatgaagctgaaggacagcctgttcgacctggacggccccaaggtggccagccccctgagccccccctgcgccgccaacaccccctag

SEQ ID NO: 214877 - DNA, 1212 bp, Artificial Sequence
  derived and/or modified sequence
atgctggaggccatggccgagcccagccccgaggaccccccccccaccctgaagcccgagacccagccccccgagaagagaagaagaaccatcgaggacttcaacaagttctgcagcttcgtgctggcctacgccggctacatcccccccagcaaggaggagagcgactggcccgccagcggcagcagcagccccctgagaggcgagagcgccgccgacagcgacggctgggacagcgcccccagcgacctgagaaccatccagaccttcgtgaagaaggccaagagcagcaagagaagagccgcccaggccggccccacccagcccggcccccccagaagcaccttcagcagactgcaggcccccgacagcgccaccctgctggagaagatgaagctgaaggacagcctgttcgacctggacggccccaaggtggccagccccctgagccccaccagcctgacccacaccagcagaccccccgccgccctgacccccgtgcccctgagccagggcgacctgagccacccccccagaaagaaggacagaaagaacagaaagctgggccccggcgccggcgccggcttcggcgtgctgagaagacccagacccacccccggcgacggcgagaagagaagcagaatcaagaagagcaagaagagaaagctgaagaaggccgagagaggcgacagactgcccccccccggccccccccaggccccccccagcgacaccgacagcgaggaggaggaggaggaggaggaggaggaggaggaggaggagatggccaccgtggtgggcggcgaggcccccgtgcccgtgctgcccaccccccccgaggcccccagaccccccgccaccgtgcaccccgagggcgtgccccccgccgacagcgagagcaaggaggtgggcagcaccgagaccagccaggacggcgacgccagcagcagcgagggcgagatgagagtgatggacgaggacatcatggtggagagcggcgacgacagctgggacctgatcacctgctactgcagaaagcccttcgccggcagacccatgatcgagtgcagcctgtgcggcacctggatccacctgagctgcgccaagatcaagaagaccaacgtgcccgacttcttctactgccagaagtgcaaggagctgagacccgaggccagaagactgggcggcccccccaagagcggcgagccctag

SEQ ID NO: 214878 - protein, 85 aa, Artificial Sequence
  derived and/or modified sequence
MPSVTQRLRDPDINPCLSESDASTRCLDENNYDRERCSTYFLRYKNCRRFWNSIVMQRRKNGVKPFMPTAAERDEILRAVGNMPY

SEQ ID NO: 214879 - protein, 44 aa, Artificial Sequence
  derived and/or modified sequence
MPSVTQRLRDPDINPCLSESDASTRCLDENNYDRERCSTYFLRY

SEQ ID NO: 214880 - protein, 97 aa, Artificial Sequence
  derived and/or modified sequence
MHQTRTGKKTVRMPSVTQRLRDPDINPCLSESDASTRCLDENNYDRERCSTYFLRYKNCRRFWNSIVMQRRKNGVKPFMPTAAERDEILRAVGNMPY

SEQ ID NO: 214881 - DNA, 294 bp, Artificial Sequence
  derived and/or modified sequence
atgcatcagacgcggactggcaaaaagaccgtccgcatgccatctgtaacacagagactccgcgacccggacatcaacccttgtctcagtgaaagtgacgccagcactcgatgcctagacgaaaataactacgaccgagagcgatgtagtacctattttctgagatataagaactgccgcagattctggaattctattgtgatgcagagaagaaaaaacggagtgaagccgttcatgcccacagccgctgaacgagacgaaatcctgagagctgttgggaacatgccttactag

SEQ ID NO: 214882 - DNA, 294 bp, Artificial Sequence
  derived and/or modified sequence
atgcaccagaccaggacaggcaagaagacagtgaggatgcccagcgtgacccagaggctgcgggaccctgacatcaacccctgcctgtctgagagtgatgccagcacccgctgcctggatgagaacaactatgaccgggagcgctgcagcacctacttcctgcgctacaagaactgccgccgcttctggaacagcatcgtgatgcagaggaggaagaatggagtgaagcccttcatgcccacagctgctgagagagatgagatcctgcgggctgtgggcaacatgccctactag

SEQ ID NO: 214883 - DNA, 294 bp, Artificial Sequence
  derived and/or modified sequence
atgcaccagacccggaccggcaagaagaccgtgcggatgcccagcgtcacacagaggttgcgcgaccctgatattaatccatgtctctctgagagcgatgcgagcactagatgtcttgacgagaacaactacgatcgtgaacgatgtagtacttattttctgcggtataaaaactgcagacgtttctggaattcaattgtcatgcagcgaagaaaaaacggcgtgaagcctttcatgccaacagcagcagagcgcgatgagatcttgagagccgtcggtaatatgccctattag

SEQ ID NO: 214884 - DNA, 294 bp, Artificial Sequence
  derived and/or modified sequence
atgcaccaaactcggacaggcaaaaaaacagtgcgtatgccaagtgtgacacaacgtctcagggaccccgacatcaacccttgtttgtcagagagtgatgcatccacaagatgtctcgacgaaaacaactacgacagggaacgatgcagcacatattttttgcgctataaaaactgtcgcaggttctggaactcaatcgtgatgcagcggaggaagaatggcgtgaagccatttatgcctacagctgccgagcgggacgaaattttacgggctgtgggcaacatgccctattag

SEQ ID NO: 214885 - DNA, 1805 bp, Artificial Sequence
  derived and/or modified sequence
gctggagacggcctgggtgctggcgaagcggaggccggagttaatacacgaggaactcatgcaaaggaggggactttcggaaatccaaacttagagtgccttgtatttagaatccggaaggaaaaggaaatgaaatgtgaagaaactcatgcaccaaactcgaactggtaagaagactgttagaatgccctcggtaacacagaggctgagagatcctgacataaatccttgtttgtcggaatctgatgcttccaccagatgtctggatgaaaataactatgacagggaaaggtgttccacttacttcttgaggtacaaaaactgccggagattctggaattctatcgtgatgcagagaagaaagaacggagtgaagccatttatgcctacggcagcagaaagagatgaaatcttgagagcagtgggaaatatgccctattgaatgtttgcattaaaagtgtttatataacttagaagcagatgaatatttctaataaatgattgctgtaatatttaagactgtacacccctcacccagacagaccttaagttcttcaagtggagacagtgaagtcaccccgtgtcctttttgcttgctctcagtgccatgccgatggtatgttgctgttggctgtgttgtggcatgagtttgcatgactttctggaggcatggagttaggtaaggctacatgagaaattgagcttttccactgggttttgaaagaagagtatgatgtgaacaagtaaagactgaatggggctgagatgaaggcaatgtttccaaggaaaggaaatgttatgagcaagagtgtgaggcaagagaagctggaaccacattcagagagtatcctgtagattgctccacctagaatctcaggtgggtggagcagtggtgggagaagactggaaaggtaagttgaaggtaaggaatgtgtggtgggcctcagatcccaggctcattcctcaaatcacttcttacttccctcacttatctttgtttaaataaggttagtacattcactaggggcaaatgggtttttctaaataaatgacataaaaaagaactggttgtctttctttaaagaaagtcttagttacaggattctgtgattaaaatccttaaatattgggttgccttctgcagctgtagtatcagtttttgaaccacagtaatgggaagaaagacaaatggattcccttagaagtaagatttctatttgcaggatgagttgggcagggaaaagggtcagggttcatcaggtgaactcaacactgggatgagactagaacttcactttatgatataaacacaatacgattattcaatgtggtgactggggtagactgtgaagcagccctccttatgcccactgccttttagaatcgtttgttttattcatggtagttttatgaagacatactattattgaatgaaatttaatgtgtacttgaaaacattgcttttgtcccttctcttcatctggtcttgggtcaagaacattgttttaatggctgccgacaatgaactgtctgtctgagtctaaaaccaagctcaggtttctaagccacatgaccttgattgttaaatgtagttatatttgaataaaaaatgaatcatttccaaaattcttttgatttgtattgactgctataaaaatgatggattaaaataggaccagaaaagaatgaatgcctacctgtgtaagaagtatttttgtatttttaagcacacttgttaaagggcttggaattttaatgtcactcctttgaaggtacataccaatatcaacattcatcttgtaact

SEQ ID NO: 214886 - DNA, 1670 bp, Artificial Sequence
  derived and/or modified sequence
gctggagacggcctgggtgctggcgaagcggaggccggagttaatacacgaggaactcatgcaaaggaggggactttcggaaatccaaacttagagtgccttgtatttagaatccggaaggaaaaggaaatgaaatgtgaagaaactcatgcaccaaactcgaactggtaagaagactgttagaatgccctcggtaacacagaggctgagagatcctgacataaatccttgtttgtcgatcctgttctaccttttaaatgatgcctctcttatatctgtaaggaatctgatgcttccaccagatgtctggatgaaaataactatgacagggaaaggtgttccacttacttcttgaggtacaaaaactgccggagattctggaattctatcgtgatgcagagaagaaagaacggagtgaagccatttatgcctacggcagcagaaagagatgaaatcttgagagcagtgggaaatatgccctattgaatgtttgcattaaaagtgtttatataacttagaagcagatgaatatttctaataaatgattgctgtaatatttaagactgtacacccctcacccagacagaccttaagttcttcaagtggagacagtgaagtcaccccgtgtcctttttgcttgctctcagtgccatgccgatggtatgttgctgttggctgtgttgtggcatgagtttgcatgactttctggaggcatggagttaggtaaggctacatgagaaattgagcttttccactgggttttgaaagaagagtatgatgtgaacaagtaaagactgaatggggctgagatgaaggcaatgtttccaaggaaaggaaatgttatgagcaagagtgtgaggcaagagaagctggaaccacattcagagagtatcctgtagattgctccacctagaatctcaggtgggtggagcagtggtgggagaagactggaaaggtaagttgaaggtaaggaatgtgtggtgggcctcagatcccaggctcattcctcaaatcacttcttacttccctcacttatctttgtttaaataaggttagtacattcactaggggcaaatgggtttttctaaataaatgacataaaaaagaactggttgtctttctttaaagaaagtcttagttacaggattctgtgattaaaatccttaaatattgggttgccttctgcagctgtagtatcagtttttgaaccacagtaatgggaagaaagacaaatggattcccttagaagtaagatttctatttgcaggatgagttgggcagggaaaagggtcagggttcatcaggtgaactcaacactgggatgagactagaacttcactttatgatataaacacaatacgattattcaatgtggtgactggggtagactgtgaagcagccctccttatgcccactgccttttagaatcgtttgttttattcatggtagttttatgaagacatactattattgaatgaaatttaatgtgtacttgaaaacattgcttttgtcccttctcttcatctggtcttgggtcaagaacattgttttaatggctgccgacaatgaactgtctgtctgagtctaaaaccaagctcaggtttctaagccacatgaccttgattgttaaatgtagttatatttgaataaaaaatgaatcatttccaaaa

SEQ ID NO: 214887 - DNA, 294 bp, Artificial Sequence
  derived and/or modified sequence
atgcaccagaccagaaccggcaagaagaccgtgagaatgcccagcgtgacccagagactgagagaccccgacatcaacccctgcctgagcgagagcgacgccagcaccagatgcctggacgagaacaactacgacagagagagatgcagcacctacttcctgagatacaagaactgcagaagattctggaacagcatcgtgatgcagagaagaaagaacggcgtgaagcccttcatgcccaccgccgccgagagagacgagatcctgagagccgtgggcaacatgccctactag

SEQ ID NO: 214888 - protein, 519 aa, Artificial Sequence
  derived and/or modified sequence
MVARVGLLLRALQLLLWGHLDAQPAERGGQELRKEAEAFLEKYGYLNEQVPKAPTSTRFSDAIRAFQWVSQLPVSGVLDRATLRQMTRPRCGVTDTNSYAAWAERISDLFARHRTKMRRKKRFAKQGNKWYKQHLSYRLVNWPEHPEPAVRGAVRAAFQLWSNVSALEFWEAPATGPADIRLTFFQGDHNDGLGNAFDGPGGALAHAFLPRRGEAHFDQDERWSLSRRRGRNLFVVLAHEIGHTLGLTHSPAPRALMAPYYKRLGRDALLSWDDVLAVQSLYGKPLGGSVAVQLPGKLFTDFETWDSYSPQGRRPETQGPKYCHSSFDAITVDRQQQLYIFKGSHFWEVAADGNVSEPRPLQERWVGLPPNIEAAAVSLNDGDFYFFKGGRCWRFRGPKPVWGLPQLCRAGGLPRHPDAALFFPPLRRLILFKGARYYVLARGGLQVEPYYPRSLQDWGGIPEEVSGALPRPDGSIIFFRDDRYWRLDQAKLQATTSGRWATELPWMGCWHANSGSALF

SEQ ID NO: 214889 - DNA, 1560 bp, Artificial Sequence
  derived and/or modified sequence
atggtggccagagtgggcctgctgctgagagccctgcagctgctgctgtggggccacctggacgcccagcccgccgagagaggcggccaggagctgagaaaggaggccgaggccttcctggagaagtacggctacctgaacgagcaggtgcccaaggcccccaccagcaccagattcagcgacgccatcagagccttccagtgggtgagccagctgcccgtgagcggcgtgctggacagagccaccctgagacagatgaccagacccagatgcggcgtgaccgacaccaacagctacgccgcctgggccgagagaatcagcgacctgttcgccagacacagaaccaagatgagaagaaagaagagattcgccaagcagggcaacaagtggtacaagcagcacctgagctacagactggtgaactggcccgagcaccccgagcccgccgtgagaggcgccgtgagagccgccttccagctgtggagcaacgtgagcgccctggagttctgggaggcccccgccaccggccccgccgacatcagactgaccttcttccagggcgaccacaacgacggcctgggcaacgccttcgacggccccggcggcgccctggcccacgccttcctgcccagaagaggcgaggcccacttcgaccaggacgagagatggagcctgagcagaagaagaggcagaaacctgttcgtggtgctggcccacgagatcggccacaccctgggcctgacccacagccccgcccccagagccctgatggccccctactacaagagactgggcagagacgccctgctgagctgggacgacgtgctggccgtgcagagcctgtacggcaagcccctgggcggcagcgtggccgtgcagctgcccggcaagctgttcaccgacttcgagacctgggacagctacagcccccagggcagaagacccgagacccagggccccaagtactgccacagcagcttcgacgccatcaccgtggacagacagcagcagctgtacatcttcaagggcagccacttctgggaggtggccgccgacggcaacgtgagcgagcccagacccctgcaggagagatgggtgggcctgccccccaacatcgaggccgccgccgtgagcctgaacgacggcgacttctacttcttcaagggcggcagatgctggagattcagaggccccaagcccgtgtggggcctgccccagctgtgcagagccggcggcctgcccagacaccccgacgccgccctgttcttcccccccctgagaagactgatcctgttcaagggcgccagatactacgtgctggccagaggcggcctgcaggtggagccctactaccccagaagcctgcaggactggggcggcatccccgaggaggtgagcggcgccctgcccagacccgacggcagcatcatcttcttcagagacgacagatactggagactggaccaggccaagctgcaggccaccaccagcggcagatgggccaccgagctgccctggatgggctgctggcacgccaacagcggcagcgccctgttctag

SEQ ID NO: 214890 - DNA, 1560 bp, Artificial Sequence
  derived and/or modified sequence
atggtggccagggtaggcttgttactgcgcgcattacagctgttactctgggggcacctggatgcccagccagccgagcgtggcggccaggaactccgcaaggaggcagaggcgtttctagaaaagtatggctacctcaacgaacaggtgcccaaagcaccaacttccacccggtttagcgatgctattcgcgccttccagtgggttagccagctgcccgtgtcaggggttctggaccgagcgacgctgagacagatgacaagaccacggtgcggcgtaaccgatacgaactcatatgcggcctgggccgaacggatcagcgatctgttcgcccgacacaggaccaaaatgaggaggaaaaaaagattcgctaagcagggtaacaaatggtacaaacagcacttaagttatcgtctggtgaattggccagagcaccctgaacccgctgtgagaggtgcagtgagggccgccttccagctctggtccaacgtgagcgctctggagttctgggaggctcccgcaaccggcccagctgacattcggcttaccttctttcaaggcgatcacaatgacgggctgggaaatgcctttgacggccccggcggagcgttggcccacgctttccttcctcgtcgaggagaggcacacttcgatcaagatgagcggtggtccctatctagacgccgggggcgtaacctgttcgtcgtgttggcacacgagattggtcacactctgggattaacacactctcctgcgcctcgggctctgatggccccatactataagcggctgggtcgggatgcactcttaagctgggatgatgttcttgccgtgcagtccctctacggaaagccactcggtggctcggtagcggtgcagcttccagggaaactgttcacagatttcgagacctgggattcctactctccacaaggaagacgacccgaaacccagggcccaaagtattgccacagttcgttcgatgcgattactgtggacagacagcaacagctatatatattcaaggggagccacttttgggaggtagctgccgacggcaacgtatcagaacctagacccctacaagaacgttgggtagggctcccgccaaacatcgaggccgctgctgttagcctgaacgatggtgacttctactttttcaagggcggtcgatgttggcggttccggggacctaaacccgtgtggggccttccgcagctgtgcagagccggtggcctccctcggcatccagatgccgctttatttttcccaccgctgcgacgactcatcctgttcaagggagcccggtactacgtgctggcaagaggcggccttcaggtagaaccctactatcctcgatccctccaagattggggcggcatccccgaagaagtgagcggtgctctgccacgtcccgacggttctataattttcttccgcgacgataggtactggagactggaccaggccaagttacaagccaccacaagtgggagatgggcaactgaactgccttggatggggtgctggcatgccaactccggctctgctctcttttag

SEQ ID NO: 214891 - DNA, 1560 bp, Artificial Sequence
  derived and/or modified sequence
atggtggcccgggtgggcctgctgctgcgggccctgcagctgctgctgtggggccacctggatgcccagcctgctgagcggggcggccaggagctgaggaaggaggccgaggccttcctggagaagtatggctacctgaatgagcaggtgcccaaggcccccaccagcacccgcttcagtgatgccatccgggccttccagtgggtgtcccagctgcctgtgtctggagtgctggaccgggccaccctgcggcagatgacccggccccgctgtggggtgacagacaccaacagctatgctgcctgggccgagcgcatcagtgacctgtttgcccggcacaggaccaagatgaggaggaagaagagatttgccaagcagggcaacaagtggtacaagcagcacctgagctaccgcctggtgaactggccagagcaccctgagcctgctgtgagaggagctgtgcgggccgccttccagctgtggagcaatgtgtctgccctggagttctgggaggccccagccactggacctgctgacatccggctgaccttcttccagggcgaccacaatgatggcctgggcaatgcctttgatggccctgggggcgccctggcccacgccttcctgcccaggagaggagaggcccactttgaccaggatgagcgctggagcctgagcagaagaagaggaagaaacctgtttgtggtgctggcccatgaaattggccacaccctgggcctgacccacagccctgccccccgggccctgatggccccctactacaagaggctgggcagagatgccctgctgtcctgggatgatgtgctggccgtgcagagcctgtatggcaagcccctgggcggctctgtggccgtgcagctgcccgggaagctgttcacagactttgagacctgggacagctacagcccccagggcagaagacctgagacccagggccccaagtactgccacagcagctttgatgccatcaccgtggaccggcagcagcagctgtacatcttcaagggcagccacttctgggaggtggccgcagatggaaatgtgtctgagccccggcccctgcaggagcgctgggtgggcctgccccccaacatcgaggccgctgctgtgtccctgaatgatggagacttctacttcttcaagggcggccgctgctggaggttccggggccccaagcctgtgtggggcctgccccagctgtgccgggccggcggcctgcccaggcacccagatgctgccctcttcttcccccccctgcggcggctcatcctcttcaagggggcccgctactacgtgctggcccggggcggcctgcaggtggagccctactaccccaggagcctgcaggactggggcggcatccctgaggaggtgtctggggccctgcccaggccagatggcagcatcatcttcttcagagatgaccgctactggaggctggaccaggccaagctgcaggccaccaccagcggccgctgggccacagagctgccctggatgggctgctggcacgccaacagcggcagcgccctcttctag

SEQ ID NO: 214892 - DNA, 1560 bp, Artificial Sequence
  derived and/or modified sequence
atggtggcccgggtgggcctgctgctgcgggccctgcagctgctgctctgggggcatctagatgctcagccagcggagagaggaggccaagaacttcgtaaagaggccgaagccttcctcgagaagtatgggtatctgaacgaacaggttcccaaggcacctacaagcacacgattttctgatgccattagagcgttccaatgggtctcccagctgcccgtgtctggcgtcctagatcgtgcgacactgagacagatgacacgtccaagatgcggagtgactgataccaacagctacgctgcctgggccgagaggatctctgacctttttgcaagacaccgaacaaagatgcgaaggaagaaaaggtttgcaaagcagggcaataagtggtacaaacagcacctgagttatcgtctcgtgaactggcctgagcaccccgagccagccgttaggggcgccgtcagagctgcctttcaactttggtccaacgttagtgctctggaattttgggaggcacccgccaccggcccagctgatatccgactgacgttctttcagggtgaccacaatgatggactaggcaacgcttttgatgggcctggaggcgccctggcccacgcatttctaccccggcggggcgaagcccatttcgatcaagacgagaggtggtctctttctcgcaggagagggaggaatttattcgtcgtactggcacacgaaattggacatacacttggcctgactcactcgcctgctcctagagctttaatggcaccttactacaagaggttaggcagggacgcactgctgtcctgggacgatgtgttggccgtacagagcttgtacggaaaaccacttggcggatccgttgctgttcagcttccagggaaattgtttacggactttgagacgtgggattcttatagtcctcaggggcggcgcccagagacccagggtccaaaatattgtcactcgtcttttgacgccattaccgtggaccggcagcaacagttatacattttcaagggaagccacttctgggaggtcgccgcagacggaaatgtctcagaaccacggccgctgcaggagagatgggtgggcctaccccccaatattgaagccgccgctgtctcgttaaatgacggggatttctactttttcaagggcggccgttgttggagattccggggccctaaacctgtatgggggttgccacagctgtgccgggccgggggactgcccaggcacccagatgccgccctcttttttcctcccctgagacgcctgatcctgttcaaaggggcgcgatactatgttctggccagggggggactgcaggttgaaccttactaccccagaagcctccaggactggggcggcataccagaggaagtgtctggggccttacctaggcctgatgggtctatcatcttcttcagagatgacagatactggagactggaccaggcaaaacttcaagccacaaccagtggcagatgggctacagagctgccgtggatggggtgctggcatgcaaactctggctcggccctgttctag

SEQ ID NO: 214893 - DNA, 1560 bp, Artificial Sequence
  derived and/or modified sequence
atggtggccagggtcggtctgttgctcagggcgctacagttactgctgtgggggcatctagacgcacagcctgcggaaagaggagggcaggagctacggaaagaagccgaagcattcttagaaaagtacggatatctcaatgagcaagtgcctaaggcgcctacaagtacacgattcagcgacgcaatccgagcctttcagtgggtatcacaactacccgtgtcaggtgtcttggaccgggctacactccgccaaatgactagacccaggtgcggagtgaccgacacaaactcctacgcagcatgggccgagcggatctccgacctgttcgcccgacatagaacgaagatgaggaggaagaagcgatttgctaaacaaggcaataaatggtacaaacaacacctcagctacagattggtgaactggcctgagcatccagagccagcagtaagaggcgctgtgcgcgcagctttccagctgtggagcaacgtctctgccctggagttctgggaggccccagcaacaggccctgcagatatacgcctgacgttcttccagggtgaccacaacgacggtctggggaatgctttcgatggcccaggtggtgctcttgcccacgcttttttgccccgacgaggagaggcgcactttgatcaggatgagcgatggtctcttagccgtcgcaggggccgtaacctatttgtagtactggcacacgagattggccacactcttgggctgactcactctcctgcccctcgagctcttatggcaccttattataagagattagggagggatgctcttctgtcttgggacgatgtgctggctgtgcagagcctctacggcaagccattgggtggttctgtagctgttcagttaccaggaaaactgttcaccgactttgagacttgggactcatacagcccccagggccgtcgaccagagacacagggccctaaatattgccattcctcctttgatgccatcaccgtggatcgtcagcagcagttgtatatcttcaaaggcagtcacttttgggaagttgccgcagatggcaacgtgtccgagcctcggcctttgcaggagcgctgggttgggcttccgcctaatatagaggccgcagctgtgtcactgaacgacggagatttttatttttttaaaggaggacgatgttggagatttcggggaccaaaacctgtctggggactgccacagctctgccgagccggtggcctccccaggcatccagatgcagcactctttttccctccgctgcggcgactaatcctgttcaaaggtgctcgctattacgtcctggctcgaggagggctgcaggtggagccatactaccctcggagtttgcaagactgggggggaatccctgaggaagtgtctggcgctctaccgcgaccagatggctcaattatcttcttcagggacgatcggtattggcgactggatcaggccaagctgcaggcaacaacatctggtagatgggcaactgagctaccctggatgggctgttggcatgcgaactcaggctccgcgctgttttag

SEQ ID NO: 214894 - DNA, 1560 bp, Artificial Sequence
  derived and/or modified sequence
atggtcgcacgcgttgggctgctgctgcgggctctccagttactgctttggggacatcttgacgcacagccagcggaaagggggggacaggagctgcgcaaagaagcagaagcattcctcgaaaaatacggataccttaacgaacaagtccctaaggcacccactagcactcgcttttcagacgcgatacgagctttccaatgggtcagccagcttccagtctctggggttctggacagggccacattacgacagatgaccaggcccaggtgcggggtgaccgatacaaatagctatgccgcctgggctgagaggatatccgacttgttcgcaagacatcggactaaaatgaggcgtaagaagcgttttgccaaacaaggaaataaatggtataaacagcatctgtcctaccgtctggtgaattggcctgagcatccagaacccgctgtgaggggagctgtccgcgcggccttccagctgtggtctaacgtctctgctctggaattttgggaggcgcctgcgactgggcctgccgatattaggttgaccttttttcagggagaccacaacgacggcctggggaacgctttcgacggcccgggtggagccctcgcccatgcttttcttccccgtagaggagaagctcacttcgatcaggatgagcgttggtcactctcacgtcgtagagggcggaatctcttcgttgtcttggctcatgagataggacacactctggggctgacccattcacccgcccctagagcacttatggcaccctactataaacggttgggcagagatgccttgctgagttgggacgatgtgctggccgtgcagagcctttatgggaagcccctgggggggtctgtggcggtgcaactgcccggcaagcttttcaccgacttcgaaacctgggactcttactctccacaaggacgccgcccagagactcaaggccccaagtattgtcattccagtttcgatgctattaccgttgaccggcaacaacaactctatatctttaagggttcccacttttgggaagtggccgccgacgggaacgtgagcgaaccaagaccgctgcaggaacgatgggtaggcctccctcctaacatcgaggcagcagccgtgagtctgaacgatggagatttttacttcttcaagggcggcagatgctggcggttccgaggaccgaaaccggtgtggggcctaccccagctgtgtagagccggtggcctcccacgacaccctgacgcagcactgttttttcccccactgaggcgtctgattctgtttaaaggggctcgctactatgttttggcgcggggcgggctacaggttgaaccttactacccaaggtccttacaagactggggcggtatcccagaagaagtgagcggcgccctccccagaccggacggaagtatcattttttttcgcgacgaccggtactggcgcttagaccaggccaagcttcaggctactaccagcggcaggtgggcaacggagttgccgtggatgggctgctggcatgccaactccggcagtgcgctgttctag

SEQ ID NO: 214895 - DNA, 1560 bp, Artificial Sequence
  derived and/or modified sequence
atggtggccagagtgggcctgcttctccgcgctctgcagttactattatggggtcatttggatgcccagccagcagaacgtggtggccaagagttgagaaaagaagccgaggcttttctcgaaaagtatggctacttaaacgagcaagttcccaaggctccaaccagcaccaggttttctgacgccattagagcatttcagtgggtgagtcagcttcctgtgagtggcgtgttggacagagcgaccctgcgccagatgacaaggcccaggtgcggtgtcactgatacaaattcttacgcggcctgggctgaacggatatccgaccttttcgctagacatcggaccaagatgagacggaaaaagaggtttgcgaaacaaggaaataaatggtataaacagcatctgtcatatcgcctggtgaactggcccgaacaccccgaacctgctgtgcgtggagccgtgagagccgcgtttcagctgtggagtaatgtttctgctctggaattctgggaggcccctgcgaccggacctgctgatattcgactgactttctttcaaggggatcataacgacggcctcggcaatgcattcgacgggccgggaggggctcttgcacacgcgtttttgcctcgcaggggtgaggctcacttcgaccaagatgagcggtggagcttgtctagacggcgaggccgcaatttatttgtagtcctggcgcacgagatcgggcataccctaggactcacccactccccagcaccaagagctttaatggcaccctattacaaacgtctaggaagggacgcactcctgtcatgggatgatgtcctggctgttcagtccctttatggaaaaccgctaggaggttccgtcgccgttcaactgcccgggaaactgttcaccgatttcgaaacttgggacagttatagtccacagggcagaaggccagagactcagggacctaagtattgtcactcatcctttgacgcgattacagttgataggcagcagcaactttatatctttaagggaagccatttttgggaagtcgccgccgatgggaacgtgagtgaaccccgcccattgcaggaacggtgggtcggcctccccccaaacatcgaagccgcagccgtttccctcaacgacggggatttctatttctttaaaggcggtcggtgctggcgctttcgcggacctaagcctgtgtgggggctgccacaactttgccgcgcgggtggactccccagacaccctgacgccgctcttttctttccacccctaaggaggctaattttgtttaagggggcccgatattatgtgctcgctaggggaggtctgcaggttgagccatattacccgagatcgttgcaggactggggcggaattcccgaagaagtttcaggcgccctgcctcgaccagatggcagcatcatcttctttagagacgacaggtactggcggctggatcaagcaaagctgcaggcaacaaccagtggacgctgggcaacagaattaccttggatgggctgttggcatgcaaactcaggcagcgcactcttttag

SEQ ID NO: 214896 - DNA, 2462 bp, Artificial Sequence
  derived and/or modified sequence
tccctcggtccccggggccggcggacccgcgggcaggcactgcccgggctggacgacgtctggccggctcccggcgaagggcagcggaggagcggcccagagcgcgcagctagggcactggcgaaaccccgggacagtccctctccgtgcgggggcggcgcagagcagtcccatccccggggtcccgggcgcggctgactgccggctggttccctgcgcgcagtagctccccgagccgggctgcaccggaggcggcgagatggtcgcgcgcgtcggcctcctgctgcgcgccctgcagctgctactgtggggccacctggacgcccagcccgcggagcgcggaggccaggagctgcgcaaggaggcggaggcattcctagagaagtacggatacctcaatgaacaggtccccaaagctcccacctccactcgattcagcgatgccatcagagcgtttcagtgggtgtcccagctacctgtcagcggcgtgttggaccgcgccaccctgcgccagatgactcgtccccgctgcggggttacagataccaacagttatgcggcctgggctgagaggatcagtgacttgtttgctagacaccggaccaaaatgaggcgtaagaaacgctttgcaaagcaaggtaacaaatggtacaagcagcacctctcctaccgcctggtgaactggcctgagcatccggagccggcagttcggggcgccgtgcgcgccgccttccagttgtggagcaacgtctcagcgctggagttctgggaggccccagccacaggccccgctgacatccggctcaccttcttccaaggggaccacaacgatgggctgggcaatgcctttgatggcccagggggcgccctggcgcacgccttcctgccccgccgcggcgaagcgcacttcgaccaagatgagcgctggtccctgagccgccgccgcgggcgcaacctgttcgtggtgctggcgcacgagatcggtcacacgcttggcctcacccactcgcccgcgccgcgcgcgctcatggcgccctactacaagaggctgggccgcgacgcgctgctcagctgggacgacgtgctggccgtgcagagcctgtatgggaagcccctagggggctcagtggccgtccagctcccaggaaagctgttcactgactttgagacctgggactcctacagcccccaaggaaggcgccctgaaacgcagggccctaaatactgccactcttccttcgatgccatcactgtagacaggcaacagcaactgtacatttttaaagggagccatttctgggaggtggcagctgatggcaacgtctcagagccccgtccactgcaggaaagatgggtcgggctgccccccaacattgaggctgcggcagtgtcattgaatgatggagatttctacttcttcaaagggggtcgatgctggaggttccggggccccaagccagtgtggggtctcccacagctgtgccgggcagggggcctgccccgccatcctgacgccgccctcttcttccctcctctgcgccgcctcatcctcttcaagggtgcccgctactacgtgctggcccgagggggactgcaagtggagccctactacccccgaagtctgcaggactggggaggcatccctgaggaggtcagcggcgccctgccgaggcccgatggctccatcatcttcttccgagatgaccgctactggcgcctcgaccaggccaaactgcaggcaaccacctcgggccgctgggccaccgagctgccctggatgggctgctggcatgccaactcggggagcgccctgttctgaaggcacctcctcacctcagaaactggtggtgctctcagggcaaaatcatgttccccacccccggggcagaacccctcttagaagcctctgagtccctctgcagaagaccgggcagcaaagcctccatctggaagtctgtctgcctttgttccttgaagaatgcagcattgtctttgtctgtccccaccacatggaggtgggggtgggatcaatcttaggaaaagcaaaaaagggtcccagatcccttggccctttcctccgaggacttctatcctccccaggcctttgtttcttcggctaaaggtacagttcctttcaagaggtaacagcactgggatccaagcagggggatgaaaaactcagcagagaaattcgagaccattttgcaagactgtgcccttctcctcaggaccccctggctcagttcttgaaaaacggtgtcatatttagtcagaggccccacccccaggaagcatggatggggatgaaggcacaggcgtctccaacctcagaggccctttgtggggtcaggacacagagtgggagggagactgatgcaggcctaccagtccctggctttttgtctggggctggaataaagaggtgccttcagctggtgggccgagaggcaggaagcagcctt

SEQ ID NO: 214897 - DNA, 2459 bp, Artificial Sequence
  derived and/or modified sequence
tccttcctccctccctcggtccccggggccggcggacccgcgggcaggcactgcccgggctggacgacgtctggccggctcccggcgaagggcagcggaggagcggcccagagcgcgcagctagggcactggcgaaaccccgggacagtccctctccgtgcgggggcggcgcagagcagtcccatccccggggtcccgggcgcggctgactgccggctggttccctgcgcgcagtagctccccgagccgggctgcaccggaggcggcgagatggtcgcgcgcgtcggcctcctgctgcgcgccctgcagctgctactgtggggccacctggacgcccagcccgcggagcgcggaggccaggagctgcgcaaggaggcggaggcattcctagagaagtacggatacctcaatgaacaggtccccaaagctcccacctccactcgattcagcgatgccatcagagcgtttcagtgggtgtcccagctacctgtcagcggcgtgttggaccgcgccaccctgcgccagatgactcgtccccgctgcggggttacagataccaacagttatgcggcctgggctgagaggatcagtgacttgtttgctagacaccggaccaaaatgaggcgtaagaaacgctttgcaaagcaaggtaacaaatggtacaagcagcacctctcctaccgcctggtgaactggcctgagcatctccggagccggcagttcggggcgccgtgcgcgccgccttccagttgtggagcaacgtctcagcgctggagttctgggaggccccagccacaggccccgctgacatccggctcaccttcttccaaggggaccacaacgatgggctgggcaatgcctttgatggcccagggggcgccctggcgcacgccttcctgccccgccgcggcgaagcgcacttcgaccaagatgagcgctggtccctgagccgccgccgcgggcgcaacctgttcgtggtgctggcgcacgagatcggtcacacgcttggcctcacccactcgcccgcgccgcgcgcgctcatggcgccctactacaagaggctgggccgcgacgcgctgctcagctgggacgacgtgctggccgtgcagagcctgtatgggaagcccctagggggctcagtggccgtccagctcccaggaaagctgttcactgactttgagacctgggactcctacagcccccaaggaaggcgccctgaaacgcagggccctaaatactgccactcttccttcgatgccatcactgtagacaggcaacagcaactgtacatttttaaagggagccatttctgggaggtggcagctgatggcaacgtctcagagccccgtccactgcaggaaagatgggtcgggctgccccccaacattgaggctgcggcagtgtcattgaatgatggagatttctacttcttcaaagggggtcgatgctggaggttccggggccccaagccagtgtggggtctcccacagctgtgccgggcagggggcctgccccgccatcctgacgccgccctcttcttccctcctctgcgccgcctcatcctcttcaagggtgcccgctactacgtgctggcccgagggggactgcaagtggagccctactacccccgaagtctgcaggactggggaggcatccctgaggaggtcagcggcgccctgccgaggcccgatggctccatcatcttcttccgagatgaccgctactggcgcctcgaccaggccaaactgcaggcaaccacctcgggccgctgggccaccgagctgccctggatgggctgctggcatgccaactcggggagcgccctgttctgaaggcacctcctcacctcagaaactggtggtgctctcagggcaaaatcatgttccccacccccggggcagaacccctcttagaagcctctgagtccctctgcagaagaccgggcagcaaagcctccatctggaagtctgtctgcctttgttccttgaagaatgcagcattgtctttgtctgtccccaccacatggaggtgggggtgggatcaatcttaggaaaagcaaaaaagggtcccagatcccttggccctttcctccgaggacttctatcctccccaggcctttgtttcttcggctaaaggtacagttcctttcaagaggtaacagcactgggatccaagcagggggatgaaaaactcagcagagaaattcgagaccattttgcaagactgtgcccttctcctcaggaccccctggctcagttcttgaaaaacggtgtcatatttagtcagaggccccacccccaggaagcatggatggggatgaaggcacaggcgtctccaacctcagaggccctttgtggggtcaggacacagagtgggagggagactgatgcaggcctaccagtccctggctttttgtctggggctggaataaagaggtgccttcagctggtgggccgaga

SEQ ID NO: 214898 - RNA, 1560 nt, Artificial Sequence
  derived and/or modified sequence
auggucgcacgcguugggcugcugcugcgggcucuccaguuacugcuuuggggacaucuugacgcacagccagcggaaagggggggacaggagcugcgcaaagaagcagaagcauuccucgaaaaauacggauaccuuaacgaacaagucccuaaggcacccacuagcacucgcuuuucagacgcgauacgagcuuuccaaugggucagccagcuuccagucucugggguucuggacagggccacauuacgacagaugaccaggcccaggugcggggugaccgauacaaauagcuaugccgccugggcugagaggauauccgacuuguucgcaagacaucggacuaaaaugaggcguaagaagcguuuugccaaacaaggaaauaaaugguauaaacagcaucuguccuaccgucuggugaauuggccugagcauccagaacccgcugugaggggagcuguccgcgcggccuuccagcuguggucuaacgucucugcucuggaauuuugggaggcgccugcgacugggccugccgauauuagguugaccuuuuuucagggagaccacaacgacggccuggggaacgcuuucgacggcccggguggagcccucgcccaugcuuuucuuccccguagaggagaagcucacuucgaucaggaugagcguuggucacucucacgucguagagggcggaaucucuucguugucuuggcucaugagauaggacacacucuggggcugacccauucacccgccccuagagcacuuauggcacccuacuauaaacgguugggcagagaugccuugcugaguugggacgaugugcuggccgugcagagccuuuaugggaagccccugggggggucuguggcggugcaacugcccggcaagcuuuucaccgacuucgaaaccugggacucuuacucuccacaaggacgccgcccagagacucaaggccccaaguauugucauuccaguuucgaugcuauuaccguugaccggcaacaacaacucuauaucuuuaaggguucccacuuuugggaaguggccgccgacgggaacgugagcgaaccaagaccgcugcaggaacgauggguaggccucccuccuaacaucgaggcagcagccgugagucugaacgauggagauuuuuacuucuucaagggcggcagaugcuggcgguuccgaggaccgaaaccgguguggggccuaccccagcuguguagagccgguggccucccacgacacccugacgcagcacuguuuuuucccccacugaggcgucugauucuguuuaaaggggcucgcuacuauguuuuggcgcggggcgggcuacagguugaaccuuacuacccaagguccuuacaagacuggggcgguaucccagaagaagugagcggcgcccuccccagaccggacggaaguaucauuuuuuuucgcgacgaccgguacuggcgcuuagaccaggccaagcuucaggcuacuaccagcggcaggugggcaacggaguugccguggaugggcugcuggcaugccaacuccggcagugcgcuguucuag

SEQ ID NO: 214899 - RNA, 1560 nt, Artificial Sequence
  derived and/or modified sequence
augguggccagagugggccugcuucuccgcgcucugcaguuacuauuauggggucauuuggaugcccagccagcagaacgugguggccaagaguugagaaaagaagccgaggcuuuucucgaaaaguauggcuacuuaaacgagcaaguucccaaggcuccaaccagcaccagguuuucugacgccauuagagcauuucagugggugagucagcuuccugugaguggcguguuggacagagcgacccugcgccagaugacaaggcccaggugcggugucacugauacaaauucuuacgcggccugggcugaacggauauccgaccuuuucgcuagacaucggaccaagaugagacggaaaaagagguuugcgaaacaaggaaauaaaugguauaaacagcaucugucauaucgccuggugaacuggcccgaacaccccgaaccugcugugcguggagccgugagagccgcguuucagcuguggaguaauguuucugcucuggaauucugggaggccccugcgaccggaccugcugauauucgacugacuuucuuucaaggggaucauaacgacggccucggcaaugcauucgacgggccgggaggggcucuugcacacgcguuuuugccucgcaggggugaggcucacuucgaccaagaugagcgguggagcuugucuagacggcgaggccgcaauuuauuuguaguccuggcgcacgagaucgggcauacccuaggacucacccacuccccagcaccaagagcuuuaauggcacccuauuacaaacgucuaggaagggacgcacuccugucaugggaugauguccuggcuguucagucccuuuauggaaaaccgcuaggagguuccgucgccguucaacugcccgggaaacuguucaccgauuucgaaacuugggacaguuauaguccacagggcagaaggccagagacucagggaccuaaguauugucacucauccuuugacgcgauuacaguugauaggcagcagcaacuuuauaucuuuaagggaagccauuuuugggaagucgccgccgaugggaacgugagugaaccccgcccauugcaggaacggugggucggccuccccccaaacaucgaagccgcagccguuucccucaacgacggggauuucuauuucuuuaaaggcggucggugcuggcgcuuucgcggaccuaagccugugugggggcugccacaacuuugccgcgcggguggacuccccagacacccugacgccgcucuuuucuuuccaccccuaaggaggcuaauuuuguuuaagggggcccgauauuaugugcucgcuaggggaggucugcagguugagccauauuacccgagaucguugcaggacuggggcggaauucccgaagaaguuucaggcgcccugccucgaccagauggcagcaucaucuucuuuagagacgacagguacuggcggcuggaucaagcaaagcugcaggcaacaaccaguggacgcugggcaacagaauuaccuuggaugggcuguuggcaugcaaacucaggcagcgcacucuuuuag

SEQ ID NO: 214900 - protein, 372 aa, Artificial Sequence
  derived and/or modified sequence
MAPAPPPAASFSPSEVQRRLAAGACWVRRGARLYDLSSFVRHHPGGEQLLRARAGQDISADLDGPPHRHSANARRWLEQYYVGELRGEQQGSMENEPVALEETQKTDPAMEPRFKVVDWDKDLVDWRKPLLWQVGHLGEKYDEWVHQPVTRPIRLFHSDLIEGLSKTVWYSVPIIWVPLVLYLSWSYYRTFAQGNVRLFTSFTTEYTVAVPKSMFPGLFMLGTFLWSLIEYLIHRFLFHMKPPSDSYYLIMLHFVMHGQHHKAPFDGSRLVFPPVPASLVIGVFYLCMQLILPEAVGGTVFAGGLLGYVLYDMTHYYLHFGSPHKGSYLYSLKAHHVKHHFAHQKSGFGISTKLWDYCFHTLTPEKPHLKTQ

SEQ ID NO: 214901 - protein, 159 aa, Artificial Sequence
  derived and/or modified sequence
MFPGLFMLGTFLWSLIEYLIHRFLFHMKPPSDSYYLIMLHFVMHGQHHKAPFDGSRLVFPPVPASLVIGVFYLCMQLILPEAVGGTVFAGGLLGYVLYDMTHYYLHFGSPHKGSYLYSLKAHHVKHHFAHQKSGFGISTKLWDYCFHTLTPEKPHLKTQ

SEQ ID NO: 214902 - DNA, 1119 bp, Artificial Sequence
  derived and/or modified sequence
atggcccccgcccccccccccgccgccagcttcagccccagcgaggtgcagagaagactggccgccggcgcctgctgggtgagaagaggcgccagactgtacgacctgagcagcttcgtgagacaccaccccggcggcgagcagctgctgagagccagagccggccaggacatcagcgccgacctggacggccccccccacagacacagcgccaacgccagaagatggctggagcagtactacgtgggcgagctgagaggcgagcagcagggcagcatggagaacgagcccgtggccctggaggagacccagaagaccgaccccgccatggagcccagattcaaggtggtggactgggacaaggacctggtggactggagaaagcccctgctgtggcaggtgggccacctgggcgagaagtacgacgagtgggtgcaccagcccgtgaccagacccatcagactgttccacagcgacctgatcgagggcctgagcaagaccgtgtggtacagcgtgcccatcatctgggtgcccctggtgctgtacctgagctggagctactacagaaccttcgcccagggcaacgtgagactgttcaccagcttcaccaccgagtacaccgtggccgtgcccaagagcatgttccccggcctgttcatgctgggcaccttcctgtggagcctgatcgagtacctgatccacagattcctgttccacatgaagccccccagcgacagctactacctgatcatgctgcacttcgtgatgcacggccagcaccacaaggcccccttcgacggcagcagactggtgttcccccccgtgcccgccagcctggtgatcggcgtgttctacctgtgcatgcagctgatcctgcccgaggccgtgggcggcaccgtgttcgccggcggcctgctgggctacgtgctgtacgacatgacccactactacctgcacttcggcagcccccacaagggcagctacctgtacagcctgaaggcccaccacgtgaagcaccacttcgcccaccagaagagcggcttcggcatcagcaccaagctgtgggactactgcttccacaccctgacccccgagaagccccacctgaagacccagtag

SEQ ID NO: 214903 - DNA, 1119 bp, Artificial Sequence
  derived and/or modified sequence
atggcaccagcccccccgcctgccgcaagcttcagcccttcagaggtgcagcgcagactagccgccggtgcttgctgggtgagaagaggagccagactctacgacctctcgtctttcgtcaggcaccatcctggaggcgaacaactgcttagagcccgagcaggccaggacatcagcgcagacttggatggaccaccgcacaggcacagcgccaacgccaggaggtggctggaacaatactacgttggtgaacttcgaggcgaacagcagggatcaatggaaaacgaaccagttgcactggaagagacccaaaaaacagacccagctatggaaccccgctttaaggtggtggattgggataaagacctcgtagactggagaaaacctctgctgtggcaggtcggccacctcggcgagaagtacgatgagtgggtgcaccagccagtaacaagacccatccgtctttttcactctgacttaattgaaggcttgtctaagacggtttggtatagcgtccccattatctgggtgcctctggttttgtatctatcctggagttattaccgcactttcgctcaaggaaatgtgagactgttcacctcctttacgacggaatataccgtcgcagtgccaaaaagcatgttcccaggcctctttatgcttggaacattcctgtggagcctgatcgaatatttgattcacaggtttttatttcatatgaagccgccttctgacagttactatctcatcatgttgcattttgttatgcacggccagcatcataaagcgccatttgacggctctaggctggtgtttcctcccgtgcctgcctcccttgttattggcgtgttctacctgtgtatgcagctgatacttccggaagctgtcggggggaccgttttcgctggtgggttactgggctacgtgttgtacgatatgacacattactatctgcacttcggcagtccacacaaggggagctatctctacagtctcaaagcgcatcacgtgaagcatcatttcgcccatcagaaaagtggctttggtatcagtactaagctgtgggactactgtttccacaccttaactccagaaaagcctcatttaaagacccagtag

SEQ ID NO: 214904 - DNA, 1119 bp, Artificial Sequence
  derived and/or modified sequence
atggccccagcccctcctcctgctgccagcttcagccccagcgaggtgcagaggcggctggccgccggggcctgctgggtgcggcggggggcccggctgtatgacctgagcagctttgtgcgccaccaccctggaggagagcagctgctgcgggcccgggccggccaggacatctctgctgacctggatggccccccccaccgccacagcgccaatgcccggcgctggctggagcagtactacgtgggggagctgcggggggagcagcagggctccatggagaatgaacctgtggccctggaggagacccagaagacagatcctgccatggagccccgcttcaaggtggtggactgggacaaggacctggtggactggaggaagcccctgctgtggcaggtgggccacctgggggagaagtatgatgagtgggtgcaccagcctgtgacccggcccatccgcctcttccacagcgacctgattgagggcctgagcaagacagtgtggtacagcgtgcccatcatctgggtgcccctggtgctgtacctgtcctggagctactaccgcacctttgcccagggcaatgtgcggctcttcaccagcttcaccacagagtacacagtggccgtgcccaagtccatgtttcctggcctcttcatgctgggcaccttcctgtggagcctgattgagtacctgatccaccgcttcctgttccacatgaagccacccagcgacagctactacctgatcatgctgcactttgtgatgcacggccagcaccacaaggccccctttgatggcagccggctggtgtttcctcctgtgcctgccagcctggtgattggagtcttctacctgtgcatgcagctgatcctgcctgaggccgtgggcggcaccgtgtttgctgggggcctgctgggctacgtgctgtatgacatgacccactactacctgcacttcggcagcccccacaagggcagctacctgtacagcctgaaggcccaccacgtgaagcaccactttgcccaccagaagagcggcttcggcatcagcaccaagctgtgggactactgcttccacaccctgaccccagagaagccccacctgaagacccagtag

SEQ ID NO: 214905 - DNA, 1119 bp, Artificial Sequence
  derived and/or modified sequence
atggcccccgcccccccccccgccgccagcttcagccccagcgaggtgcagcgtcggttggcagcaggggcatgttgggtcaggaggggggccagattgtatgatcttagctcgttcgtccgccaccatcccgggggcgagcagctgttaagggctagggcaggccaggacatatctgctgacctggacggccctccacaccgacactccgcgaacgcgcgtcgctggctggaacagtactacgtaggagaattaagaggggaacagcaggggtctatggagaatgagcccgttgccctcgaagagacccagaaaaccgatccagcgatggagcccaggttcaaggtggtagattgggacaaggacttggtcgactggcgcaagcccttgctttggcaggtgggacatctcggtgagaaatacgatgagtgggtgcaccagcccgttaccagacccatcaggctttttcattctgatctgattgagggactttcaaagaccgtctggtactccgttccgatcatatgggtgcccctcgttctttatctgagctggagttattatcgcacgtttgctcaggggaacgtcaggttattcaccagctttacgaccgaatatactgtagcagtgcccaagagcatgtttccagggctattcatgctgggcacattcttgtggtcgctcattgagtatctgatacaccggtttctattccatatgaagccaccttcagattcttattatctcataatgttgcacttcgtgatgcacggtcagcaccataaagcgccttttgacggcagtcgattagtgttcccacctgtccccgcctcactggtcataggggttttctatctttgcatgcagcttatactgcccgaagcggtaggggggacagtgttcgctggaggactcctgggatacgtcttatacgacatgactcactattatcttcattttggaagtccccataagggtagctatctgtatagcctgaaagctcaccacgtgaaacatcactttgctcaccagaagagcgggttcggcattagtacaaaactgtgggactattgcttccacacgctgacacccgagaagccccacttaaaaacacaatag

SEQ ID NO: 214906 - DNA, 1119 bp, Artificial Sequence
  derived and/or modified sequence
atggcacccgcaccacctcctgcggcaagcttcagtcccagcgaggtccaacggaggcttgccgcaggagcctgctgggtgaggagaggagccaggctgtatgatctttcctccttcgtgcgccatcatcctggaggagagcagttgctacgcgcaagggccggacaggacatctccgcagacctggatgggcctcctcaccgacactctgcaaacgctcggagatggctggagcagtattatgtgggcgagttgagaggcgaacagcaagggtctatggaaaatgagcccgtcgctctggaagagacacagaaaactgacccggctatggagcccaggttcaaagtggttgattgggacaaagaccttgtggactggaggaaaccactcctgtggcaggtcggacacctcggagagaagtatgacgaatgggtccaccaaccagtgacaagacctataaggttgttccactcggacctcatcgagggtttgtctaaaactgtgtggtattccgtgccaatcatctgggtacccctcgtgctgtacttgagctggagctactacagaacctttgctcaaggaaatgtgcggctgttcacttcttttactactgagtacacggttgcagtccctaagtccatgtttcccggattatttatgctggggacattcttatggtcactcatcgaatatctgatccatcggtttttgtttcatatgaaaccaccctctgacagctattatctaatcatgctgcacttcgttatgcacggtcagcaccacaaagctccttttgatggatctaggctggtctttcctcccgtgcctgcttctttggtgattggcgtgttttacctttgtatgcagctcattcttcccgaggcagtgggagggactgtcttcgccggaggtctcctaggctatgtgctgtatgacatgacacactactatctgcacttcggttcgccgcataaaggctcttacctctactccctgaaggcccatcacgtcaagcaccactttgctcaccaaaagagtggcttcggaattagtaccaagctgtgggactactgcttccacactctgactcccgagaagcctcacttaaaaacccagtag

SEQ ID NO: 214907 - DNA, 2431 bp, Artificial Sequence
  derived and/or modified sequence
tcccgggatgttagaggcgctcagggtggcagcagagcagacgccgggctgcgcgctgggagctgcggtctccggccatggcccccgctccgccccccgccgcctccttctcgccctccgaggtccagcggcgcctggcggccggcgcgtgctgggtccgccgcggggcccgcctctacgacctctccagcttcgtgcggcaccacccggggggcgagcagctgctgcgggccagggcgggccaggacatcagcgccgacctggacgggccgccgcacaggcactcggccaacgcgcgccgctggctggagcagtactacgtgggagagctccgcggggagcagcagggctccatggagaacgagcctgtagcccttgaggaaactcagaagacagatcctgctatggaaccacggttcaaagtggtggattgggacaaggacctggtggactggcgaaagcctctcctgtggcaggtgggccacttgggagagaagtacgatgagtgggttcaccagccggtgaccaggcccatccgcctcttccactcagacctcattgagggcctctctaagactgtctggtacagtgtccccatcatctgggtgcccctggtgctgtatctcagctggtcctactaccgaacctttgcccagggcaacgtccgactcttcacgtcatttacaacagagtacacggtggcagtgcccaagtccatgttccccgggctcttcatgctggggacattcctctggagcctcatcgagtacctcatccaccgcttcctgttccacatgaagccccccagcgacagctattacctcatcatgctgcacttcgtcatgcacggccagcaccacaaggcacccttcgacggctcccgcctggtcttcccccctgtgccagcctccctggtgatcggcgtcttctacttgtgcatgcagctcatcctgcccgaggcagtagggggcactgtgtttgcggggggcctcctgggctacgtcctctatgacatgacccattactacctgcactttggctcgccgcacaagggctcctacctgtacagcctgaaggcccaccacgtcaagcaccactttgcacatcagaagtcaggatttggtatcagcactaaattgtgggattactgtttccacaccctcactccagagaaaccccacctgaagacgcagtgacaactcccaccccctccgtcctgccctcagcccggccctggccccttcccgacccccacccgccattcagaccccattaagaaggttggcttggccaggcaggatgggctgtgtccggccctgcagcctagtggaaggtgctgagggggccctgaggcaggaccgccctcctgacccctggtaggagggtcacatccacttggtggccaggtggcccttggtgacccacttcttcctggagcgtccctgcctagagctcagcccacaggactgcttcaggccgtggccacaggtagcagccgcaaggggaaatgaagaaaactgagccctcgtggccacctgtgtcacccttgtgccttagcctcatgggctgcctaggagctgcctgcacggcacagctcgctttcacagtcagaagtgggtctgtgggatctgtggtccctgtcctccctgctgtcccttctggggaggctttggtggctctgaggtggacaaagagctctcgcaagaagagacagcgtgatgcctcccacagtccaccccagaccctggggcagcccctctggccctgccagctgcctgcgtcgttgggcccagggtggctggcaggagtcccagctgcttgctttaggacctggcagcttttcttgccgtccctcccctgcctccagaatcacagcccttctccccaagggaggctgaggaggcttctccaccagtggcagccccaccccgtccctggccattcttggcctccaccccgctcaggcccctactcgggcgctcccagaaggagccacctctcagtgcctcacctccccctgcctcccagcctccgcagatgaggttcctgccccttcctcctcgtaaccaaaaccctcactgctcccaggacggtcttatttataaaccagatacatgttcttagtctggtcccagaccaaggagctggtcagacggccctttctaatcctacatgttgagcttatgtaaaaaatgttgtttcctcctgtttttggttcctttcttacccacaaaccattactacttgaaacttaaaaaactcgccaagtgtaaaggctaaagagaagcagtttgacggaccttgtgatttgtactgtttgctgcggagctatttaaagattttggaataaatatacaaaactacggttgtgaaataaaaacttaaattgtatattttgaaaaataaaacactgaaaagaaaccaacaaaaa

SEQ ID NO: 214908 - protein, 256 aa, Artificial Sequence
  derived and/or modified sequence
MAQRSDLLELDCQLTRDRVVVVSHDENLCRQSGLNRDVGSLDFEDLPLYKEKLEVYFSPGHFAHGSDRRMVRLEDLFQRFPRTPMSVEIKGKNEELIREIAGLVRRYDRNEITIWASEKSSVMKKCKAANPEMPLSFTISRGFWVLLSYYLGLLPFIPIPEKFFFCFLPNIINRTYFPFSCSCLNQLLAVVSKWLIMRKSLIRHLEERGVQVVFWCLNEESDFEAAFSVGATGVITDYPTALRHYLDNHGPAARTS

SEQ ID NO: 214909 - protein, 318 aa, Artificial Sequence
  derived and/or modified sequence
MSLLLYYALPALGSYAMLSIFFLRRPHLLHTPRAPTFRIRLGAHRGGSGELLENTMEAMENSMAQRSDLLELDCQLTRDRVVVVSHDENLCRQSGLNRDVGSLDFEDLPLYKEKLEVYFSPGHFAHGSDRRMVRLEDLFQRFPRTPMSVEIKGKNEELIREIAGLVRRYDRNEITIWASEKSSVMKKCKAANPEMPLSFTISRGFWVLLSYYLGLLPFIPIPEKFFFCFLPNIINRTYFPFSCSCLNQLLAVVSKWLIMRKSLIRHLEERGVQVVFWCLNEESDFEAAFSVGATGVITDYPTALRHYLDNHGPAARTS

SEQ ID NO: 214910 - DNA, 771 bp, Artificial Sequence
  derived and/or modified sequence
atggcccagagaagcgacctgctggagctggactgccagctgaccagagacagagtggtggtggtgagccacgacgagaacctgtgcagacagagcggcctgaacagagacgtgggcagcctggacttcgaggacctgcccctgtacaaggagaagctggaggtgtacttcagccccggccacttcgcccacggcagcgacagaagaatggtgagactggaggacctgttccagagattccccagaacccccatgagcgtggagatcaagggcaagaacgaggagctgatcagagagatcgccggcctggtgagaagatacgacagaaacgagatcaccatctgggccagcgagaagagcagcgtgatgaagaagtgcaaggccgccaaccccgagatgcccctgagcttcaccatcagcagaggcttctgggtgctgctgagctactacctgggcctgctgcccttcatccccatccccgagaagttcttcttctgcttcctgcccaacatcatcaacagaacctacttccccttcagctgcagctgcctgaaccagctgctggccgtggtgagcaagtggctgatcatgagaaagagcctgatcagacacctggaggagagaggcgtgcaggtggtgttctggtgcctgaacgaggagagcgacttcgaggccgccttcagcgtgggcgccaccggcgtgatcaccgactaccccaccgccctgagacactacctggacaaccacggccccgccgccagaaccagctag

SEQ ID NO: 214911 - DNA, 957 bp, Artificial Sequence
  derived and/or modified sequence
atgagcctgctgctgtactacgccctgcccgccctgggcagctacgccatgctgagcatcttcttcctgagaagaccccacctgctgcacacccccagagcccccaccttcagaatcagactgggcgcccacagaggcggcagcggcgagctgctggagaacaccatggaggccatggagaacagcatggcccagagaagcgacctgctggagctggactgccagctgaccagagacagagtggtggtggtgagccacgacgagaacctgtgcagacagagcggcctgaacagagacgtgggcagcctggacttcgaggacctgcccctgtacaaggagaagctggaggtgtacttcagccccggccacttcgcccacggcagcgacagaagaatggtgagactggaggacctgttccagagattccccagaacccccatgagcgtggagatcaagggcaagaacgaggagctgatcagagagatcgccggcctggtgagaagatacgacagaaacgagatcaccatctgggccagcgagaagagcagcgtgatgaagaagtgcaaggccgccaaccccgagatgcccctgagcttcaccatcagcagaggcttctgggtgctgctgagctactacctgggcctgctgcccttcatccccatccccgagaagttcttcttctgcttcctgcccaacatcatcaacagaacctacttccccttcagctgcagctgcctgaaccagctgctggccgtggtgagcaagtggctgatcatgagaaagagcctgatcagacacctggaggagagaggcgtgcaggtggtgttctggtgcctgaacgaggagagcgacttcgaggccgccttcagcgtgggcgccaccggcgtgatcaccgactaccccaccgccctgagacactacctggacaaccacggccccgccgccagaaccagctag

SEQ ID NO: 214912 - DNA, 1305 bp, Artificial Sequence
  derived and/or modified sequence
agcacagtcccgcggacggctgagcgtgtggctgcaggagcttctgtgggagtacggtcatgagccttttgctgtactatgccctccctgccctgggcagctatgccatgctctccatcttcttcctgcgccggcctcatctgctgcacacgcccagggctcccaccttccgcatccgcctgggggcccaccgaggaggatctggagagctgctggagaacaccatggaggccatggagaagtgagtgtatctgcccctgcccaggctgccatgtgagggtgtgcaggtcgtggactgcatcacagcaagggacgccattcacttcctagctgggtgactggcgccccctggaggtggcctgcacatcccgccacgaactccgctctcacattcccggccacctcccagccaccatgcccctcatcccagtcccctgcccctgccccccgctgaccttcacccccacagctccatggcccagcgctcggacctcctggagctcgactgtcagctgacacgggacagagtggtggtggtgtcacatgatgagaacctgtgccgccagtcgggcctaaacagggatgtgggcagcctggacttcgaggacctgcccctctacaaggagaagctggaggtttacttctctccaggccactttgctcacgggtcagaccggcgcatggttcgtctggaggacctgttccagaggtttccaaggacacccatgagcgtagagatcaaagggaagaacgaagagctcatccgtgagatagcaggcttggtgagacgctatgaccgtaatgaaatcaccatctgggcctcggagaagagctcggtcatgaagaaatgcaaggctgccaaccccgagatgcccctgtccttcacaataagccgaggattctgggtgctgctttcctactacctggggctgctgcccttcatcccaatccctgagaagttcttcttctgcttcctgcccaacatcatcaacaggacctatttcccattttcctgctcttgcctgaaccagttattggctgtggtttcgaaatggctgatcatgaggaagagtctgatccgacacttggaggagcgaggggtgcaggtggtcttttggtgccttaatgaagagtcggattttgaagcagccttcagcgtgggagccactggcgtcataacggattatcccacagccctgcggcactacctggacaaccatggaccagctgcccggacctcctaagtccagaagcctcgaggtctcctgtttctcttcctgaaaaataaatatttgcctttcgatc

SEQ ID NO: 214913 - DNA, 1397 bp, Artificial Sequence
  derived and/or modified sequence
cctacacacccctggatcctctgaaatggcaaggggtaggcatgttggatgcgctggctacaagtaccagtgagagggagaggtcctgacagtcctgggtggtttttactcccctcatgtagcccaggacggggctgctgggggctgggaagggcctggggatatgagagccagggctacttgcctcacctcctgacactaccccagcttcagccgaaccctgcagcctggctccaagccagcccagcggcaggctcagcaggtcccaggggcgtggcagtggccagtagtagagccggcccacactggctaggcaggcagcacagtcccgcggacggctgagcgtgtggctgcaggagcttctgtgggagtacggtcatgagccttttgctgtactatgccctccctgccctgggcagctatgccatgctctccatcttcttcctgcgccggcctcatctgctgcacacgcccagggctcccaccttccgcatccgcctgggggcccaccgaggaggatctggagagctgctggagaacaccatggaggccatggagaactccatggcccagcgctcggacctcctggagctcgactgtcagctgacacgggacagagtggtggtggtgtcacatgatgagaacctgtgccgccagtcgggcctaaacagggatgtgggcagcctggacttcgaggacctgcccctctacaaggagaagctggaggtttacttctctccaggccactttgctcacgggtcagaccggcgcatggttcgtctggaggacctgttccagaggtttccaaggacacccatgagcgtagagatcaaagggaagaacgaagagctcatccgtgagatagcaggcttggtgagacgctatgaccgtaatgaaatcaccatctgggcctcggagaagagctcggtcatgaagaaatgcaaggctgccaaccccgagatgcccctgtccttcacaataagccgaggattctgggtgctgctttcctactacctggggctgctgcccttcatcccaatccctgagaagttcttcttctgcttcctgcccaacatcatcaacaggacctatttcccattttcctgctcttgcctgaaccagttattggctgtggtttcgaaatggctgatcatgaggaagagtctgatccgacacttggaggagcgaggggtgcaggtggtcttttggtgccttaatgaagagtcggattttgaagcagccttcagcgtgggagccactggcgtcataacggattatcccacagccctgcggcactacctggacaaccatggaccagctgcccggacctcctaagtccagaagcctcgaggtctcctgtttctcttcctgaaaaataaatatttgcctttcgatca

SEQ ID NO: 214914 - DNA, 771 bp, Artificial Sequence
  derived and/or modified sequence
atggcccagaggagcgacctgctcgagctggactgtcaactcacccgtgacagagtggttgtcgttagccatgacgagaatctctgtagacagtccggcttgaacagggacgtcggaagtctggactttgaagacctgccactgtacaaggagaagctggaagtgtatttttcccctggtcactttgctcatggctctgacagaaggatggttcgtctggaggacctgtttcagagatttccccggactcctatgtctgtcgagatcaagggcaaaaacgaggaattaattcgggagatagcaggtctggtgcgaaggtacgatagaaacgaaattacgatatgggcgtctgagaaaagctccgtcatgaagaaatgtaaggctgctaacccagaaatgccactgtctttcaccattagcagggggttttgggttctcctcagctattatctcggcctcttaccattcatcccgatcccagagaagtttttcttctgtttcctgcctaacatcatcaacagaacttattttccttttagttgcagttgcctgaatcagctgttggccgtggtgagtaagtggctgatcatgagaaagtcactcattcggcatttagaggagcgtggggtgcaggtggtattttggtgtttgaatgaggaatccgactttgaggcagctttctcagtcggtgcaaccggcgtgatcacagattacccaacagctctaaggcactatcttgacaaccacgggccagccgcaagaacctcgtag

SEQ ID NO: 214915 - DNA, 957 bp, Artificial Sequence
  derived and/or modified sequence
atgagcctgcttttatactacgctttaccagccttgggtagttacgcaatgctgagcattttcttcctgcgccggccccatctcctccatacgccaagagcccccaccttccgcattagattgggcgcacaccgcggtggaagtggggaactcctcgagaatacaatggaggccatggagaattcaatggcgcaacggtctgatctgttggagctcgattgtcaactgacccgcgatcgcgtggtggtggtctcccacgacgaaaatctgtgcaggcagtctgggctgaatcgcgatgtcgggagcctggatttcgaagacttaccactttacaaggagaagctggaggtctacttctcacctggccactttgcacatgggagcgaccgccgaatggtcagacttgaggatctgttccagcggtttccccgtactccaatgagtgtcgagatcaaaggaaaaaatgaagaactcattcgtgaaattgcaggacttgtgagacgatacgatcgcaatgaaatcacaatctgggctagcgagaagtctagcgtgatgaagaaatgcaaagctgccaaccctgagatgcctctgtcgttcactatatccaggggattttgggtgctgctgagctattacctcggactcctccctttcattcccataccggagaagttcttcttctgtttcctgcccaatattatcaaccggacgtattttccctttagctgttcatgcctcaaccagctgcttgccgtcgtatcaaagtggctgattatgaggaagagtctcatcagacatctggaggaaagaggagtgcaggtggtgttttggtgcctgaacgaagagtccgattttgaagccgcattctctgttggtgccacgggcgtaattaccgattaccctaccgccctaagacattacctggacaaccatggacctgccgcgcgaacgtcatag

SEQ ID NO: 214916 - DNA, 771 bp, Artificial Sequence
  derived and/or modified sequence
atggcccagaggagtgacctgctggagctggactgccagctgacccgggacagagtggtggtggtgtcccatgatgagaacctgtgccggcagagcggcctgaacagagatgtgggcagcctggactttgaggacctgcccctgtacaaggagaagctggaggtgtacttcagccctggccactttgcccacggcagtgacaggaggatggtgcggctggaggacctcttccagcgcttccccaggacccccatgtctgtggagatcaagggcaagaatgaggagctgatccgggagattgctggcctggtgagaagatatgacagaaatgagatcaccatctgggccagcgagaagagctctgtgatgaagaagtgcaaggccgccaaccctgagatgcccctgtccttcaccatcagccggggcttctgggtgctgctgagctactacctgggcctgctgcccttcatccccatccctgagaagttcttcttctgcttcctgcccaacatcatcaacagaacctacttccccttcagctgcagctgcctgaaccagctgctggccgtggtgtccaagtggctgatcatgaggaagagcctcatccgccacctggaggagcggggcgtgcaggtggtgttctggtgcctgaatgaggagagtgactttgaagctgccttctctgtgggcgccaccggggtcatcacagactaccccacagccctgcggcactacctggacaaccacggccctgctgcccggaccagctag

SEQ ID NO: 214917 - DNA, 957 bp, Artificial Sequence
  derived and/or modified sequence
atgagcctgctgctgtactatgccctgcctgccctgggcagctatgccatgctgagcatcttcttcctgcggcggccccacctgctgcacaccccccgggcccccaccttccgcatccggctgggcgcccaccggggcggcagcggggagctgctggagaacaccatggaggccatggagaacagcatggcccagaggagtgacctgctggagctggactgccagctgacccgggacagagtggtggtggtgtcccatgatgagaacctgtgccggcagagcggcctgaacagagatgtgggcagcctggactttgaggacctgcccctgtacaaggagaagctggaggtgtacttcagccctggccactttgcccacggcagtgacaggaggatggtgcggctggaggacctcttccagcgcttccccaggacccccatgtctgtggagatcaagggcaagaatgaggagctgatccgggagattgctggcctggtgagaagatatgacagaaatgagatcaccatctgggccagcgagaagagctctgtgatgaagaagtgcaaggccgccaaccctgagatgcccctgtccttcaccatcagccggggcttctgggtgctgctgagctactacctgggcctgctgcccttcatccccatccctgagaagttcttcttctgcttcctgcccaacatcatcaacagaacctacttccccttcagctgcagctgcctgaaccagctgctggccgtggtgtccaagtggctgatcatgaggaagagcctcatccgccacctggaggagcggggcgtgcaggtggtgttctggtgcctgaatgaggagagtgactttgaagctgccttctctgtgggcgccaccggggtcatcacagactaccccacagccctgcggcactacctggacaaccacggccctgctgcccggaccagctag

SEQ ID NO: 214918 - DNA, 771 bp, Artificial Sequence
  derived and/or modified sequence
atggcccagcggagcgacctgctggagctggactgccagctgaccagagacagagtagtggttgtcagccacgatgagaatctgtgcagacagagcgggctcaacagagatgtagggagcctggatttcgaagatctgcccctgtacaaagagaaactcgaagtctacttctcaccaggacacttcgcgcacggttcagatcgtaggatggtgcgactcgaagatctgttccaacgctttccacggaccccgatgtcagtggagatcaagggtaaaaatgaggagctgattagggagatcgccgggctcgtacgacggtatgatagaaatgagatcactatctgggctagtgaaaagtcctctgtgatgaagaagtgtaaggccgccaaccccgagatgcccctttccttcactataagccggggcttctgggtgctgttaagctactatctgggactccttcccttcattccgattccagagaaattctttttttgtttcctccccaacatcatcaatagaacctactttccttttagctgttcttgcctgaatcagctgctagccgtggtgagtaaatggcttataatgcgtaagtctctgatccgacacctggaggaacggggagtgcaggtggttttttggtgcctaaacgaggagtccgacttcgaagccgctttcagcgtcggcgccacaggcgtgattacagactatccgacggcactccgccattacctggacaatcacgggcccgccgcaaggacttcatag

SEQ ID NO: 214919 - DNA, 957 bp, Artificial Sequence
  derived and/or modified sequence
atgagcctgctgctgtactacgccctgcccgccctgggcagctacgccatgctgtctattttcttcctccgcagaccacacctgctccataccccacgagctcctactttccgaattcgcctgggagcccaccgtgggggatccggcgagctactcgagaacaccatggaggcaatggagaatagcatggctcagcgcagcgacttgctggaacttgactgtcaactgacacgggacagggttgtcgtggtgtcccatgacgagaatctgtgtcgacagtcaggattgaacagggatgtcggatccttagacttcgaggaccttccgttgtacaaggagaagcttgaggtctacttttctcctgggcattttgcccatggatcagaccggcggatggtcagattggaagatcttttccagcgcttccctcgcaccccaatgtccgttgaaataaagggcaaaaacgaagagttgattcgcgaaattgcgggcctggtgagaagatatgatagaaatgaaataacaatttgggcttcggagaaatcatcggtgatgaagaaatgtaaggcagcgaacccagaaatgcccctgtcctttacgatcagtcgggggttctgggttctgctctcatactatctcgggctgctgccattcatccccattccagaaaaattcttcttttgttttctgccaaacatcatcaataggacgtatttccccttctcgtgtagttgcctgaatcagctgctggcagtggttagcaagtggcttatcatgcgaaaaagcctcatacggcacctggaggagcgaggagtgcaggtggtgttctggtgtcttaatgaagagagcgatttcgaggcagctttctctgtgggagcgaccggggtgatcactgattaccccactgctctgcggcactacctagataaccacgggccagcagcccggacctcatag

SEQ ID NO: 214920 - DNA, 771 bp, Artificial Sequence
  derived and/or modified sequence
atggcacagcggtccgatctcctcgaacttgattgtcaactgacccgggatcgggtggtggtcgtcagccatgatgaaaatttatgtcggcaaagcgggttgaatagggatgtcgggtcactggatttcgaggatctgccactgtataaagagaaactggaagtttacttctcacctggacacttcgcccacgggtcggatcgtagaatggttcgacttgaagatctatttcagaggttcccaaggacaccaatgagtgtggagatcaaaggcaagaatgaagagctcatccgagagattgctggcttagttaggcgctatgatcgaaatgagatcacaatctgggcctccgagaagagctcagtcatgaaaaaatgcaaagcggctaacccagaaatgcctctatcctttactatcagtcgtggcttttgggtccttttatcctattacctcggcctgctcccattcatcccaattccggagaaatttttcttttgtttccttccaaacatcataaacaggacctacttcccattctcctgtagctgtctgaatcaacttctggcagtggtttccaaatggctgataatgaggaagtccttaatccgtcatcttgaagagcgtggcgtgcaggtggtgttttggtgtctgaacgaagagtccgacttcgaggccgcattcagcgtaggtgctactggtgtcataactgattacccaaccgccctgcgacactaccttgataatcatggaccggctgcgagaacttcttag

SEQ ID NO: 214921 - DNA, 957 bp, Artificial Sequence
  derived and/or modified sequence
atgtccctcctgctgtattacgccctccccgctctcggctcttacgcaatgctttcaatctttttcctcaggaggccacacctgctgcatacgccgcgagcaccgacgttccgtattaggctgggagcgcacaggggtggtagtggcgaactgctagagaacactatggaggctatggagaatagtatggcgcagcggtctgacctcttagagctcgattgtcagctgacacgggaccgggtggtggtcgtctcgcacgacgagaacctgtgtagacaatccgggctaaaccgggatgttggctcgctggacttcgaggatctgccattatacaaggaaaagctggaagtgtacttctctcctgggcactttgcacacgggagtgatagacggatggtgcggctggaagatctctttcagagatttccacgcacgcctatgtcggtcgaaataaaaggtaagaatgaagagctcattcgggaaattgcagggctcgtccggagatacgaccgcaatgaaattacgatttgggcctccgaaaagtcgtcagtcatgaagaaatgtaaagctgccaaccccgagatgccactttctttcacgatttcccgaggattctgggtgctcttatcctactatctggggctcttgccgttcattcccatacccgaaaagttctttttttgcttcctgcctaatattattaataggacctatttccccttctcatgttcatgtcttaatcagctcttagcagtcgtctccaagtggcttattatgagaaagagccttataagacatctggaggagcgaggagtgcaggtggtgttttggtgtctcaacgaggaaagtgattttgaggccgcattctcagtgggtgccaccggcgtcatcacagattacccaactgcgctgcggcattatttagacaaccacggtcctgcggctcgtacatcctag

SEQ ID NO: 214922 - protein, 260 aa, Artificial Sequence
  derived and/or modified sequence
MARPGMERWRDRLALVTGASGGIGAAVARALVQQGLKVVGCARTVGNIEELAAECKSAGYPGTLIPYRCDLSNEEDILSMFSAIRSQHSGVDICINNAGLARPDTLLSGSTSGWKDMFNVNVLALSICTREAYQSMKERNVDDGHIININSMSGHRVLPLSVTHFYSATKYAVTALTEGLRQELREAQTHIRATCISPGVVETQFAFKLHDKDPEKAAATYEQMKCLKPEDVAEAVIYVLSTPAHIQIGDIQMRPTEQVT

SEQ ID NO: 214923 - protein, 119 aa, Artificial Sequence
  derived and/or modified sequence
MARPGMERWRDRLALVTGASGGIGAAVARALVQQGLKVVGCARTVGNIEELAAECKSAGYPGTLIPYRCDLSNEEDILSMFSAIRSQHSGVDICINNAGLARPDTLLSGSTSGWKDMFN

SEQ ID NO: 214924 - DNA, 783 bp, Artificial Sequence
  derived and/or modified sequence
atggcccgaccaggcatggagcgttggcgcgatcggctggccctggttacaggtgcctctggagggattggggcagcagtcgccagggcactggtacagcagggcctcaaggtggtgggttgtgcacgcaccgttgggaacatagaggagctggccgcagaatgtaagtccgccggataccctgggacactgataccctaccgctgcgatctgagcaacgaagaagacatcttgtccatgttctcggcaattagatcccagcattccggcgtggatatttgcatcaataatgctggtctcgccagaccagacaccctgctctccgggagcacttctggctggaaagacatgttcaatgtaaatgtgctagcgctttcaatctgtactagagaggcatatcagagcatgaaagaacggaacgtggatgatggccacattattaacatcaactccatgtccggccaccgtgtgttgcccctatccgttacgcacttttattccgctactaagtacgcggttacagccctaactgagggtctgaggcaggaactgcgggaggcgcagacccacatcagggctacatgtatatcacctggagtcgttgagactcagtttgcctttaagcttcacgacaaggaccctgaaaaggccgcagcaacatacgagcagatgaaatgcctgaaaccggaagacgtcgccgaggcggtgatctacgtgctgagtacccctgcccacatccagataggagatatccagatgcggcctaccgaacaggttacctag

SEQ ID NO: 214925 - DNA, 783 bp, Artificial Sequence
  derived and/or modified sequence
atggcgagacctggaatggaacggtggagagaccggctggcccttgtgacgggagcgagcgggggcataggtgccgccgtggcccgcgctttggttcaacagggcctcaaagtggttggttgtgctcgtactgttgggaatatcgaggagctagctgctgaatgtaaatctgccggataccctggtacactcatcccctacagatgtgacctttctaacgaggaagacatactaagcatgttctctgcaatacgatctcaacattctggagttgacatatgtattaataacgctggtctcgccaggcccgatactttactgtccgggtcaacctcaggctggaaggacatgtttaatgtgaacgtactggccctgagcatttgtacacgagaagcataccaaagtatgaaggaacggaacgtcgacgatggtcatatcattaacattaattcaatgagtggtcaccgggtgcttcctctctccgtgacccatttttacagtgctactaagtatgccgtaacagcgttgaccgaaggattgagacaggagctcagggaggctcagactcacatccgtgccacttgcatttcccccggggtcgtcgaaacccagttcgcatttaagctacatgacaaggaccccgaaaaggccgctgccacatatgaacagatgaaatgcctgaagcctgaagatgtcgccgaagccgtcatttacgtcttatctacccccgcacacatccagatcggcgatatccagatgagacctactgagcaggtgacctag

SEQ ID NO: 214926 - DNA, 783 bp, Artificial Sequence
  derived and/or modified sequence
atggcgagacctggaatggaacggtggagagaccggctggcccttgtgacgggagcgagcgggggcataggtgccgccgtggcccgcgctttggttcaacagggcctcaaagtggttggttgtgctcgtactgttgggaatatcgaggagctagctgctgaatgtaaatctgccggataccctggtacactcatcccctacagatgtgacctttctaacgaggaagacatactaagcatgttctctgcaatacgatctcaacattctggagttgacatatgtattaataacgctggtctcgcccggcctgatacactgctctctggatctactagcggatggaaagacatgttcaacgtgaacgtcctggctctttcaatttgcacacgggaagcctaccagtccatgaaagaacggaacgtggacgacgggcatatcatcaatattaacagcatgtctggacatcgggtgctgcctcttagcgtgacccatttttatagcgccactaagtatgccgtgactgccctcaccgaaggcctgagacaggaactccgcgaagcccaaacccacatccgcgcaacttgcattagccctggagtggtagagacacagttcgctttcaaacttcatgacaaggatcctgaaaaagccgccgccacatacgaacaaatgaaatgcctgaagcccgaagatgtagcagaggcagttatttacgtgctttcgacccccgctcatatccagattggggatattcagatgagacctaccgagcaggttacctag

SEQ ID NO: 214927 - DNA, 1497 bp, Artificial Sequence
  derived and/or modified sequence
cgcggatcggacccaagcaggtcggcggcggcggcaggagagcggccgggcgtcagctcctcgacccccgtgtcgggctagtccagcgaggcggacgggcggcgtgggcccatggccaggcccggcatggagcggtggcgcgaccggctggcgctggtgacgggggcctcggggggcatcggcgcggccgtggcccgggccctggtccagcagggactgaaggtggtgggctgcgcccgcactgtgggcaacatcgaggagctggctgctgaatgtaagagtgcaggctaccccgggactttgatcccctacagatgtgacctatcaaatgaagaggacatcctctccatgttctcagctatccgttctcagcacagcggtgtagacatctgcatcaacaatgctggcttggcccggcctgacaccctgctctcaggcagcaccagtggttggaaggacatgttcaatgtgaacgtgctggccctcagcatctgcacacgggaagcctaccagtccatgaaggagcggaatgtggacgatgggcacatcattaacatcaatagcatgtctggccaccgagtgttacccctgtctgtgacccacttctatagtgccaccaagtatgccgtcactgcgctgacagagggactgaggcaagagcttcgggaggcccagacccacatccgagccacgtgcatctctccaggtgtggtggagacacaattcgccttcaaactccacgacaaggaccctgagaaggcagctgccacctatgagcaaatgaagtgtctcaaacccgaggatgtggccgaggctgttatctacgtcctcagcacccccgcacacatccagattggagacatccagatgaggcccacggagcaggtgacctagtgactgtgggagctcctccttccctccccacccttcatggcttgcctcctgcctctggattttaggtgttgatttctggatcacgggataccacttcctgtccacaccccgaccaggggctagaaaatttgtttgagatttttatatcatcttgtcaaattgcttcagttgtaaatgtgaaaaatgggctggggaaaggaggtggtgtccctaattgttttacttgttaacttgttcttgtgcccctgggcacttggcctttgtctgctctcagtgtcttccctttgacatgggaaaggagttgtggccaaaatccccatcttcttgcacctcaacgtctgtggctcagggctggggtggcagagggaggccttcaccttatatctgtgttgttatccagggctccagacttcctcctctgcctgccccactgcaccctctcccccttatctatctccttctcggctccccagcccagtcttggcttcttgtcccctcctggggtcatccctccactctgactctgactatggcagcagaacaccagggcctggcccagtggatttcatggtgatcattaaaaaagaaaaatcgcaaccaatc

SEQ ID NO: 214928 - DNA, 783 bp, Artificial Sequence
  derived and/or modified sequence
atggccagacccggcatggagagatggagagacagactggccctggtgaccggcgccagcggcggcatcggcgccgccgtggccagagccctggtgcagcagggcctgaaggtggtgggctgcgccagaaccgtgggcaacatcgaggagctggccgccgagtgcaagagcgccggctaccccggcaccctgatcccctacagatgcgacctgagcaacgaggaggacatcctgagcatgttcagcgccatcagaagccagcacagcggcgtggacatctgcatcaacaacgccggcctggccagacccgacaccctgctgagcggcagcaccagcggctggaaggacatgttcaacgtgaacgtgctggccctgagcatctgcaccagagaggcctaccagagcatgaaggagagaaacgtggacgacggccacatcatcaacatcaacagcatgagcggccacagagtgctgcccctgagcgtgacccacttctacagcgccaccaagtacgccgtgaccgccctgaccgagggcctgagacaggagctgagagaggcccagacccacatcagagccacctgcatcagccccggcgtggtggagacccagttcgccttcaagctgcacgacaaggaccccgagaaggccgccgccacctacgagcagatgaagtgcctgaagcccgaggacgtggccgaggccgtgatctacgtgctgagcacccccgcccacatccagatcggcgacatccagatgagacccaccgagcaggtgacctag

SEQ ID NO: 214929 - DNA, 783 bp, Artificial Sequence
  derived and/or modified sequence
atggcacgccctggtatggaacgctggcgcgaccgcctggctttggtgaccggcgcgtctggaggcattggggccgcagtcgcccgtgctctagttcagcaaggcctaaaggtggtcgggtgcgctcggaccgttggaaacatcgaggaattggccgccgaatgcaaatccgccggctatccgggcactttgatcccctataggtgcgacctgagtaacgaagaagacatactgtctatgttctccgccattcgatcgcagcattctggagtcgatatctgcattaataacgccggcctcgctcggccagatacgctactcagtgggtcaacctctggctggaaagatatgttcaatgtgaatgtattagcactttcaatttgtacccgggaggcctaccagagcatgaaagaacggaacgtggacgatggacatatcatcaacatcaattcaatgtcgggccaccgggtactgcccctgagcgttacccacttctacagtgccaccaagtacgccgtcactgcccttactgaaggcctcaggcaagagcttcgggaggcccagacacatatcagggctacgtgcatttctcccggcgtagttgagacccagttcgctttcaaactgcacgataaagatccggaaaaggctgctgctacctacgagcaaatgaaatgtcttaaaccagaggacgtcgccgaggccgtcatctatgtgctgtcaactccagcacacatacagattggtgatatacaaatgagacctactgagcaggtaacctag

SEQ ID NO: 214930 - DNA, 783 bp, Artificial Sequence
  derived and/or modified sequence
atggcccggcccggcatggagcgctggagggaccggctggccctggtgactggagccagcggcggcattggagctgctgtggcccgggccctggtgcagcagggcctgaaggtggtgggctgtgccaggacagtgggcaacatcgaggagctggccgctgagtgcaagtctgctggctacccaggcaccctcatcccctaccgctgtgacctgagcaatgaggaggacatcctgtccatgttcagcgccatccgcagccagcacagcggcgtggacatctgcatcaacaatgccggcctggcccggccagacaccctgctgagcggcagcaccagcggctggaaggacatgtttaatgtgaatgtgctggccctgagcatctgcacccgggaggcctaccagagcatgaaggagagaaatgtggatgatggccacatcatcaacatcaacagcatgagcggccaccgggtgctgcccctgtctgtgacccacttctacagcgccaccaagtatgctgtgacagccctgacagagggcctgcggcaggagctgcgggaggcccagacccacatccgggccacctgcatcagccctggggtggtggagacccagtttgccttcaagctgcatgacaaggaccctgagaaggccgccgccacctatgagcagatgaagtgcctgaagccagaagatgtggccgaggccgtcatctacgtgctgagcaccccagcccacatccagatcggggacatccagatgaggcccacagagcaggtgacctag

SEQ ID NO: 214931 - DNA, 783 bp, Artificial Sequence
  derived and/or modified sequence
atggcccggcccggcatggagcggtggcgggaccggctggccctggtgaccggggcatctggcggaattggcgctgcggtcgcgagggccttggtccaacagggcctaaaggtggtcggttgcgcccgcactgtgggcaatatcgaagagctggccgccgaatgtaagagcgcgggctacccagggactctcatcccctaccgctgcgatctaagcaatgaggaggacattctctctatgttttctgctatccgtagccagcattctggggtggacatatgcattaataatgcaggactggcgagacccgacacattattatccggatcaacaagtgggtggaaagacatgtttaacgtcaatgtgctggcgctatcaatttgcacccgcgaggcctaccagtccatgaaggaacgtaatgtggatgacgggcacataattaacatcaactcaatgagtggtcacagggtgctcccattaagcgttacccacttttactccgctacaaagtacgctgtgacagcccttaccgagggactgcgtcaggaactgcgcgaagcccagacacatatcagagctacctgcatatcgccaggggtggtcgaaacgcaattcgcttttaagctacacgataaggatcctgagaaagctgcagcgacatatgagcaaatgaaatgcctgaaacccgaagacgtagcagaggccgtaatttatgtactgagtactcccgctcacattcagataggcgatatccaaatgaggccaacagagcaagtgacttag

SEQ ID NO: 214932 - RNA, 783 nt, Artificial Sequence
  derived and/or modified sequence
auggcgagaccuggaauggaacgguggagagaccggcuggcccuugugacgggagcgagcgggggcauaggugccgccguggcccgcgcuuugguucaacagggccucaaagugguugguugugcucguacuguugggaauaucgaggagcuagcugcugaauguaaaucugccggauacccugguacacucauccccuacagaugugaccuuucuaacgaggaagacauacuaagcauguucucugcaauacgaucucaacauucuggaguugacauauguauuaauaacgcuggucucgccaggcccgauacuuuacuguccgggucaaccucaggcuggaaggacauguuuaaugugaacguacuggcccugagcauuuguacacgagaagcauaccaaaguaugaaggaacggaacgucgacgauggucauaucauuaacauuaauucaaugaguggucaccgggugcuuccucucuccgugacccauuuuuacagugcuacuaaguaugccguaacagcguugaccgaaggauugagacaggagcucagggaggcucagacucacauccgugccacuugcauuucccccggggucgucgaaacccaguucgcauuuaagcuacaugacaaggaccccgaaaaggccgcugccacauaugaacagaugaaaugccugaagccugaagaugucgccgaagccgucauuuacgucuuaucuacccccgcacacauccagaucggcgauauccagaugagaccuacugagcaggugaccuag

SEQ ID NO: 214933 - RNA, 783 nt, Artificial Sequence
  derived and/or modified sequence
auggcgagaccuggaauggaacgguggagagaccggcuggcccuugugacgggagcgagcgggggcauaggugccgccguggcccgcgcuuugguucaacagggccucaaagugguugguugugcucguacuguugggaauaucgaggagcuagcugcugaauguaaaucugccggauacccugguacacucauccccuacagaugugaccuuucuaacgaggaagacauacuaagcauguucucugcaauacgaucucaacauucuggaguugacauauguauuaauaacgcuggucucgcccggccugauacacugcucucuggaucuacuagcggauggaaagacauguucaacgugaacguccuggcucuuucaauuugcacacgggaagccuaccaguccaugaaagaacggaacguggacgacgggcauaucaucaauauuaacagcaugucuggacaucgggugcugccucuuagcgugacccauuuuuauagcgccacuaaguaugccgugacugcccucaccgaaggccugagacaggaacuccgcgaagcccaaacccacauccgcgcaacuugcauuagcccuggagugguagagacacaguucgcuuucaaacuucaugacaaggauccugaaaaagccgccgccacauacgaacaaaugaaaugccugaagcccgaagauguagcagaggcaguuauuuacgugcuuucgacccccgcucauauccagauuggggauauucagaugagaccuaccgagcagguuaccuag

SEQ ID NO: 214934 - protein, 429 aa, Artificial Sequence
  derived and/or modified sequence
MSRDPGSGGWEEAPRAAAALCTLYHEAGQRLRRLQDQLAARDALIARLRARLAALEGDAAPSLVDALLEQVARFREQLRRQEGGAAEAQMRQEIERLTERLEEKEREMQQLLSQPQHEREKEVVLLRRSMAEGERARAASDVLCRSLANETHQLRRTLTATAHMCQHLAKCLDERQHAQRNVGERSPDQSEHTDGHTSVQSVIEKLQEENRLLKQKVTHVEDLNAKWQRYNASRDEYVRGLHAQLRGLQIPHEPELMRKEISRLNRQLEEKINDCAEVKQELAASRTARDAALERVQMLEQQILAYKDDFMSERADRERAQSRIQELEEKVASLLHQVSWRQDSREPDAGRIHAGSKTAKYLAADALELMVPGGWRPGTGSQQPEPPAEGGHPGAAQRGQGDLQCPHCLQCFSDEQGEELLRHVAECCQ

SEQ ID NO: 214935 - protein, 322 aa, Artificial Sequence
  derived and/or modified sequence
MQQLLSQPQHEREKEVVLLRRSMAEGERARAASDVLCRSLANETHQLRRTLTATAHMCQHLAKCLDERQHAQRNVGERSPDQSEHTDGHTSVQSVIEKLQEENRLLKQKVTHVEDLNAKWQRYNASRDEYVRGLHAQLRGLQIPHEPELMRKEISRLNRQLEEKINDCAEVKQELAASRTARDAALERVQMLEQQILAYKDDFMSERADRERAQSRIQELEEKVASLLHQVSWRQDSREPDAGRIHAGSKTAKYLAADALELMVPGGWRPGTGSQQPEPPAEGGHPGAAQRGQGDLQCPHCLQCFSDEQGEELLRHVAECCQ

SEQ ID NO: 214936 - DNA, 1290 bp, Artificial Sequence
  derived and/or modified sequence
atgagcagagaccccggcagcggcggctgggaggaggcccccagagccgccgccgccctgtgcaccctgtaccacgaggccggccagagactgagaagactgcaggaccagctggccgccagagacgccctgatcgccagactgagagccagactggccgccctggagggcgacgccgcccccagcctggtggacgccctgctggagcaggtggccagattcagagagcagctgagaagacaggagggcggcgccgccgaggcccagatgagacaggagatcgagagactgaccgagagactggaggagaaggagagagagatgcagcagctgctgagccagccccagcacgagagagagaaggaggtggtgctgctgagaagaagcatggccgagggcgagagagccagagccgccagcgacgtgctgtgcagaagcctggccaacgagacccaccagctgagaagaaccctgaccgccaccgcccacatgtgccagcacctggccaagtgcctggacgagagacagcacgcccagagaaacgtgggcgagagaagccccgaccagagcgagcacaccgacggccacaccagcgtgcagagcgtgatcgagaagctgcaggaggagaacagactgctgaagcagaaggtgacccacgtggaggacctgaacgccaagtggcagagatacaacgccagcagagacgagtacgtgagaggcctgcacgcccagctgagaggcctgcagatcccccacgagcccgagctgatgagaaaggagatcagcagactgaacagacagctggaggagaagatcaacgactgcgccgaggtgaagcaggagctggccgccagcagaaccgccagagacgccgccctggagagagtgcagatgctggagcagcagatcctggcctacaaggacgacttcatgagcgagagagccgacagagagagagcccagagcagaatccaggagctggaggagaaggtggccagcctgctgcaccaggtgagctggagacaggacagcagagagcccgacgccggcagaatccacgccggcagcaagaccgccaagtacctggccgccgacgccctggagctgatggtgcccggcggctggagacccggcaccggcagccagcagcccgagccccccgccgagggcggccaccccggcgccgcccagagaggccagggcgacctgcagtgcccccactgcctgcagtgcttcagcgacgagcagggcgaggagctgctgagacacgtggccgagtgctgccagtag

SEQ ID NO: 214937 - DNA, 1290 bp, Artificial Sequence
  derived and/or modified sequence
atgagcagggaccctgggtcaggcggttgggaggaggcaccccgggccgccgcggctttatgcaccctgtatcatgaagcagggcagcgcctgagacgacttcaggaccaactggccgctagagacgcgcttattgctaggctgcgtgcgaggctagccgctctcgaaggagacgccgccccatccctcgtggacgcgctgctagagcaagtagcaaggtttagggagcagttgcggcgccaggaaggcggcgctgccgaggctcagatgcggcaagagatcgaaagactgacagagcgcttagaggagaaggaacgggagatgcagcagctgttgtcccaacctcagcatgaaagagaaaaggaggtggtgctcctccgcagatccatggctgagggggaacgagcaagagccgcaagtgacgtgctgtgtaggtctttagctaacgaaactcaccagctgagacgcacactcaccgctacagcccacatgtgtcagcacctcgccaaatgtctggacgaacgacagcatgcacaaagaaatgtcggagagcgcagcccggaccagtcagagcacactgatggacacacttccgtgcagagcgtgattgagaaactgcaggaggagaataggttgctgaaacagaaagtaacacacgtggaggacctgaatgccaaatggcaaagatataatgcaagtcgggatgaatatgtccgtgggctgcacgcgcagctgcgcgggctccagatcccgcatgagcctgaactgatgagaaaggagatcagtagactcaatagacagcttgaagagaagatcaacgactgcgccgaagtgaagcaggaactggcggcttccagaacagccagggatgccgctctagaaagagtgcagatgttggagcagcagattctggcttacaaggatgacttcatgtccgagcgggccgaccgggaacgtgcccagtcacgcatacaggaacttgaggaaaaggttgcatctctcctccaccaagtaagttggaggcaggacagccgcgagcccgatgccggcaggatacatgcagggagtaagaccgctaagtatttggcagccgatgcgttggaacttatggtgcctggcgggtggcgccccgggactggatcacagcaaccagaacctccggccgaaggagggcatccaggcgcagcccagaggggccaaggtgacttgcaatgcccccactgcttgcagtgtttttcagatgagcagggcgaggagcttctgcgccatgttgccgagtgctgccagtag

SEQ ID NO: 214938 - DNA, 1290 bp, Artificial Sequence
  derived and/or modified sequence
atgagccgggaccccggcagcggcggctgggaggaggcccccagggctgctgctgccctgtgcaccctgtaccatgaagctggccagaggctgcggcggctgcaggaccagctggccgccagagatgccctgattgcccggctgcgggcccggctggccgccctggagggagatgctgcccccagcctggtggatgccctgctggagcaggtggcccgcttccgggagcagctgcggcggcaggagggcggcgctgctgaggcccagatgaggcaggagattgaaaggctgacagagcggctggaggagaaggagcgggagatgcagcagctgctgagccagccccagcacgagcgggagaaggaggtggtgctgctgcggcgctccatggccgagggggagcgggcccgggccgccagtgatgtgctgtgccgcagcctggccaatgagacccaccagctgcggaggaccctgacagccacagcccacatgtgccagcacctggccaagtgcctggatgagcggcagcacgcccagagaaatgtgggggagaggagcccagaccagagcgagcacacagatggccacacctctgtgcagagcgtgattgagaagctgcaggaggagaaccggctgctgaagcagaaggtgacccacgtggaggacctgaatgccaagtggcagcgctacaatgccagcagagatgaatatgtgcggggcctgcacgcccagctgcggggcctgcagatcccccatgagcctgagctgatgaggaaggagatcagccggctgaaccggcagctggaggagaagatcaatgactgtgccgaggtgaagcaggagctggccgccagcaggacagccagagatgctgccctggagcgggtgcagatgctggagcagcagatcctggcctacaaggatgacttcatgtctgaaagagctgaccgggagcgggcccagagccgcatccaggagctggaggagaaggtggccagcctgctgcaccaggtgtcctggaggcaggacagccgggagccagatgctggccgcatccacgccggcagcaagacagccaagtacctggccgcagatgccctggagctgatggtgcctgggggctggaggcctggcaccggcagccagcagcctgagcccccagctgagggcggccaccctggagctgcccagaggggccagggcgacctgcagtgcccccactgcctgcagtgcttcagtgatgagcagggcgaggagctgctgcggcacgtggccgagtgctgccagtag

SEQ ID NO: 214939 - DNA, 1290 bp, Artificial Sequence
  derived and/or modified sequence
atgagccgggaccccggcagcggcggctgggaggaggccccccgggctgcggccgctttgtgtaccctgtatcacgaggcaggacagcggctgcgacgactgcaagatcagttggctgctcgtgatgcactgatagctagactgagggctcggcttgctgctctagaaggcgacgcagcaccatcactcgttgacgccctcttggagcaggtagcgaggtttcgtgagcagctgcgcaggcaggaaggcggcgctgctgaagcccagatgagacaggagatagaaaggctaacagagcgtcttgaagagaaggaacgcgaaatgcaacagctgttatctcagccgcagcacgaaagggagaaggaggtggtgttgcttaggcggagtatggccgagggtgaacgggcaagagcggccagtgatgttttatgtcgatcgctggcaaatgagactcaccagcttagacgaactctaaccgcaactgctcacatgtgccagcatctcgccaagtgcctggacgaacgacagcatgctcagcgcaatgtaggcgagagatctccagaccagtcagagcacactgacggccacacgtcagtgcaatctgtcatcgagaagctgcaggaagagaatcgcctgttaaaacaaaaggtgacacacgttgaggatcttaacgccaaatggcaacggtataacgcctccagagacgaatacgttaggggattgcacgcccagttgcgcggcctgcaaatccctcatgagcccgaactgatgaggaaggaaatttccagattaaatagacagctggaggaaaagatcaacgactgtgccgaggtgaaacaagagctggccgctagtcgcactgctagggacgccgctcttgagcgcgttcagatgctggaacaacagatcctggcctacaaagatgacttcatgagcgagcgggctgaccgagaaagagcgcaaagtcgaattcaggagcttgaggaaaaggtggcctcgctccttcaccaggtctcctggcgccaggatagccgcgaacctgatgccggtcggatccacgccggtagcaaaaccgctaagtatctcgcagccgatgctctggagctcatggtacctggcgggtggcgccctggaactggcagccagcagcctgagccccctgcagaagggggtcacccaggggcagcacagcgaggccaaggcgacttacaatgtcctcactgcttacagtgtttctccgatgagcagggagaggaacttttaagacatgtggccgaatgctgccagtag

SEQ ID NO: 214940 - DNA, 1290 bp, Artificial Sequence
  derived and/or modified sequence
atgtcgcgagaccctggaagcggcggatgggaagaagccccacgcgcagccgctgcgctatgtactctataccacgaggccggtcagagacttaggaggcttcaggatcaacttgctgctcgtgacgcccttattgccaggctgcgggcacgactggccgctctggaaggagacgccgctcctagcctcgtggatgcactgctcgagcaggtcgcacgttttagggagcagctccgccgacaagagggcggagctgccgaggctcagatgaggcaggagattgagaggttaacagagagactcgaggaaaaagaacgcgagatgcagcagctcctcagccagccccaacatgagcgtgagaaggaggtggtgttgctgcggcgttccatggctgagggggaaagggctagggctgccagcgacgtgctgtgtcgctctctcgcaaacgaaactcaccagctcagacggactctcaccgctacagcccatatgtgtcagcacctggccaaatgtcttgacgaacgccagcatgcccaacgtaatgtaggggagcgcagtccggatcagtctgagcacaccgatggacacacctcggtgcaatcagtcatcgaaaagctccaagaggagaataggttgctcaagcagaaggtgacccacgttgaggacctaaatgccaagtggcagcgctataatgcttcgagggacgagtacgtgagggggctgcatgcacaattgcggggtttgcagattccacacgaacctgagcttatgcggaaggaaataagccggctgaacagacagctcgaagagaagattaatgactgcgccgaggtgaaacaagagctggcagcttctagaaccgccagagatgccgcactcgaacgggtccagatgttggaacagcagatacttgcttacaaagatgattttatgagcgagagagctgatagggagagggcccagtcgcgaatacaggagttagaggaaaaggtggcttccctgttacatcaggtaagctggcgccaggattctagagagccagatgcgggacggatccatgcaggatccaaaaccgccaagtacctggccgctgatgcactcgaactgatggtaccagggggatggagacctggcactggcagtcaacagcccgaaccccctgctgaggggggtcacccaggggctgcgcagagagggcagggagatcttcagtgcccacactgtctgcagtgtttttctgacgagcaaggcgaagaacttctcaggcacgtggcggagtgttgtcagtag

SEQ ID NO: 214941 - DNA, 1974 bp, Artificial Sequence
  derived and/or modified sequence
ggaaagttccgggaagggcggcagccggcggggcccgggcgcggaagttgccggcggccgcgcggcctcccgggcgggcctacagccatgtcccgggacccggggtcgggcggctgggaggaggccccgcgcgcagctgccgcgctctgcaccctgtaccacgaggccggacagcggctgcgccgcctgcaggaccagctcgctgcccgcgacgccctcatcgctcgcctccgcgcccgcctggccgcgctggagggggacgccgcgccgtccctagtggacgcgctgctggagcaggttgcgcgcttccgggagcagctgcgaaggcaggagggcggcgccgccgaggcccagatgcgccaggaaattgagaggctgactgagcgactagaagaaaaagagagggagatgcagcagctgctgagccagccccaacacgagcgagagaaggaagtcgtcctgctacggaggagcatggcagaaggggagcgcgcccgggccgccagtgacgtcctgtgccgctccttggccaacgagacccatcagctgcggaggacgctgaccgccaccgcccacatgtgtcagcatctggccaagtgtctggatgaacgacagcatgcacaaaggaatgtgggggagagaagtcctgaccagtcggaacacacagatgggcacacctctgtccagagtgttattgagaagttgcaggaagaaaatcgactgttaaaacagaaggtgactcacgttgaagacctcaatgccaagtggcagcgctacaacgccagcagggacgaatacgtgagggggctccatgcgcagctcagggggctgcagatcccccacgagcccgagctgatgaggaaggagatctcccggctcaacagacagttggaagagaaaataaatgactgtgccgaagtgaagcaggagctggcggcctccaggacggcccgggatgctgcgttggagcgggtgcagatgctggaacagcagattctcgcttacaaggatgacttcatgtcagaaagggccgatcgggaacgggctcaaagtaggattcaagaactggaggaaaaggtcgcctctttgctgcaccaggtgtcctggagacaggattctcgagagccagacgccggccggattcacgctgggagcaaaactgccaagtatttggccgccgacgcattagagcttatggtgcctggtggctggaggcctgggactgggtcccagcagccagaaccccctgcagagggcgggcatcctggcgcggcccagagaggccagggggaccttcagtgccctcactgcctgcagtgcttcagtgacgagcaaggggaagagctcctcaggcatgtggctgagtgctgccagtgaccgagactcacccgtgcccttgcggcctcctggcccggtgcagctgccctcagggacagggtgggtgctctcagatgccatgggttgagctctactgagagccaaggcccctagaatagttgcggggcactctgatcgttcactttggtccctttggctatggaacaggctgggtcacagggaactgccagtgaggctggaggctggaggtggagatggggtcaggaacatctggcagagggaggtcccagtctgtgtctccatcaggcttaagccagagctatctggtgctggtgtgccagcccctcccccagcctgcctagaaaggggtggctgcctgagggagtcacttgtatggtccccagggtgggagccccatcctgttctatggaataaagcgtcgcctctctgcctcgaaccagtcaaatggagtattgcggctgcacgtcacactagggtggccacccccgccattgcgagccacatgtctgcactgagaaactgcatttcagtagcatttgtcatccagccggaagttaaagcacacttactttattcacctatttttataataaacgttcttgctgctgtgactgc

SEQ ID NO: 214942 - protein, 279 aa, Artificial Sequence
  derived and/or modified sequence
MVDHLANTEINSQRIAAVESCFGASGQPLALPGRVLLGEGVLTKECRKKAKPRIFFLFNDILVYGSIVLNKRKYRSQHIIPLEEVTLELLPETLQAKNRWMIKTAKKSFVVSAASATERQEWISHIEECVRRQLRATGRPPSTEHAAPWIPDKATDICMRCTQTRFSALTRRHHCRKCGFVVCAECSRQRFLLPRLSPKPVRVCSLCYRELAAQQRQEEAEEQGAGSPGQPAHLARPICGASSGDDDDSDEDKEGSRDGDWPSSVEFYASGVAWSAFHS

SEQ ID NO: 214943 - DNA, 840 bp, Artificial Sequence
  derived and/or modified sequence
atggtggaccacctggccaacaccgagatcaacagccagagaatcgccgccgtggagagctgcttcggcgccagcggccagcccctggccctgcccggcagagtgctgctgggcgagggcgtgctgaccaaggagtgcagaaagaaggccaagcccagaatcttcttcctgttcaacgacatcctggtgtacggcagcatcgtgctgaacaagagaaagtacagaagccagcacatcatccccctggaggaggtgaccctggagctgctgcccgagaccctgcaggccaagaacagatggatgatcaagaccgccaagaagagcttcgtggtgagcgccgccagcgccaccgagagacaggagtggatcagccacatcgaggagtgcgtgagaagacagctgagagccaccggcagaccccccagcaccgagcacgccgccccctggatccccgacaaggccaccgacatctgcatgagatgcacccagaccagattcagcgccctgaccagaagacaccactgcagaaagtgcggcttcgtggtgtgcgccgagtgcagcagacagagattcctgctgcccagactgagccccaagcccgtgagagtgtgcagcctgtgctacagagagctggccgcccagcagagacaggaggaggccgaggagcagggcgccggcagccccggccagcccgcccacctggccagacccatctgcggcgccagcagcggcgacgacgacgacagcgacgaggacaaggagggcagcagagacggcgactggcccagcagcgtggagttctacgccagcggcgtggcctggagcgccttccacagctag

SEQ ID NO: 214944 - DNA, 840 bp, Artificial Sequence
  derived and/or modified sequence
atggttgaccacttggctaacactgagatcaattcccagcgtatcgcagcggtcgagagctgcttcggggcttccggccagccgttggcgctgcctggccgagtactgctgggagagggtgtgctcacaaaggagtgtcgtaagaaagccaagccccgcattttcttcttgttcaacgacatactcgtctatggctcaattgtactgaataaaaggaaataccggagccagcacatcattcctctcgaagaagtgactctggaacttttgccggagacactccaggccaaaaacagatggatgattaagacagctaaaaaaagcttcgtcgtctcggcagccagtgctaccgagcgtcaggagtggatctcacacatcgaggagtgtgtgaggagacagttgcgagctactggtagaccaccaagtaccgagcacgctgctccctggatccctgacaaggcaacagatatctgcatgcggtgtactcagacacgattttctgccctgacgcggcggcaccattgtcggaaatgcgggttcgtggtttgcgctgaatgttccagacaacggtttctgttgcctaggttgagcccaaaacctgttcgcgtctgttcactttgctatagagagctggccgctcaacagagacaggaggaggctgaggagcagggtgccggttccccaggtcagccagcccacctggcacgacccatttgcggcgcctcttccggtgatgacgatgattccgacgaggacaaagaaggttctagagatggagactggccaagctccgttgaattctacgcttctggtgttgcgtggtccgcatttcactcatag

SEQ ID NO: 214945 - DNA, 840 bp, Artificial Sequence
  derived and/or modified sequence
atggtggaccacctggccaacacagagatcaacagccagagaattgctgctgtggagagctgcttcggggccagcggccagcccctggccctgcccggccgggtgctgctgggggagggcgtgctgaccaaggaatgtaggaagaaggccaagccccgcatcttcttcctgttcaatgacatcctggtgtatggcagcatcgtgctgaacaagaggaagtaccgcagccagcacatcatccccctggaggaggtgaccctggagctgctgcctgagaccctgcaggccaagaaccgctggatgatcaagacagccaagaagagctttgtggtgtctgctgccagcgccacagagcggcaggagtggatcagccacatcgaggagtgtgtgcggcggcagctgcgggccaccggccggccccccagcacagaacatgctgccccctggatcccagacaaggccacagacatctgcatgcgctgcacccagacccgcttcagcgccctgaccaggaggcaccactgcaggaaatgtggctttgtggtgtgtgctgaatgttcccggcagcgcttcctgctgccccggctgagccccaagcctgtgcgggtgtgcagcctgtgctaccgggagctggccgcccagcagaggcaggaggaggccgaggagcagggcgccggcagccctggccagcctgcccacctggcccggcccatctgtggggccagcagtggagatgatgatgacagtgatgaggacaaggagggcagcagagatggagactggcccagctctgtggagttctacgccagcggcgtggcctggagcgccttccacagctag

SEQ ID NO: 214946 - DNA, 840 bp, Artificial Sequence
  derived and/or modified sequence
atggtggaccacctggccaacaccgagatcaacagccagcggatcgctgcggtggagtcgtgctttggtgcctctgggcagcctctcgccttgcctgggcgagtcctgctgggggagggagtgcttaccaaggaatgccgtaaaaaggccaagcctcgtatcttcttcctgttcaacgacattctggtttatggaagcatagtccttaacaagaggaagtacaggtcacaacatatcattccattggaagaagtgacattggaattgttaccagaaacactgcaagccaaaaatcggtggatgatcaagactgccaaaaaatccttcgtggtctcagcggccagtgccaccgagcgccaggagtggatctcgcatattgaggaatgcgtacggaggcagttaagggccaccggccgccctcccagcacagaacacgccgccccgtggatcccagataaggccaccgacatttgcatgagatgcacacagacaagattttccgcacttacaagacgccatcattgtcgcaagtgtggatttgtggtgtgcgctgaatgcagtcggcaaagatttctcctccctcgcctgtccccaaagcccgtgcgcgtgtgctccttgtgttacagagaactggcagcccaacagcggcaagaggaggcagaagagcaaggggccgggagtcccgggcagcccgcgcatctcgcacgacctatttgtggcgcctctagtggcgatgacgacgactccgacgaagataaagagggcagcagagacggggactggccttcctccgttgaattttatgcctctggcgtggcctggtccgcctttcactcatag

SEQ ID NO: 214947 - DNA, 840 bp, Artificial Sequence
  derived and/or modified sequence
atggtggaccatctggccaataccgagataaacagtcagagaatcgctgcagtcgagagctgtttcggcgctagcggtcaaccactggccttgccaggccgagttcttctgggcgaaggagtccttacgaaggaatgtcgcaagaaagccaaacctaggatcttctttctgttcaatgacattttggtatacggaagcatcgttctgaataaacgtaagtacaggtctcagcacattattcccctggaggaagttacgcttgagctgctgcccgagaccttgcaggccaagaataggtggatgattaagaccgccaagaagagcttcgtggttagtgcagcaagcgccaccgagcgacaggagtggatatctcacatcgaagagtgtgtaaggcggcagcttagggccaccggcagaccaccttcaacagaacacgccgctccttggatccctgataaggcgactgatatctgtatgcgttgtacccagactcgctttagtgccctgacacggaggcaccattgtcgcaagtgtgggttcgtcgtgtgcgccgagtgctcacgtcaaagattcctgctcccaagattgagtccaaaacccgttagagtttgctctctgtgctaccgcgagttggctgcccagcagaggcaagaggaggccgaagaacagggagccggttctccagggcagcccgctcatctcgctaggccaatttgcggagcctcctctggagatgacgacgactctgacgaagataaagagggttctcgggacggcgattggccatcgtctgtggaattctatgcctctggagtggcatggtcggcctttcattcctag

SEQ ID NO: 214948 - protein, 449 aa, Artificial Sequence
  derived and/or modified sequence
MSPESKKLFNIIILGVAFMFMFTAFQTCGNVAQTVIRSLNRTDFHGSGYTSMAIIYGVFSASNLITPSVVAIVGPQLSMFASGLFYSMYIAVFIQPFPWSFYTASVFIGIAAAVLWTAQGNCLTINSDEHSIGRNSGIFWALLQSSLFFGNLYIYFAWQGKTQISESDRRTVFIALTVISLVGTVLFFLIRKPDSENVLGEDESSDDQDMEVNESAQNNLTKAVDAFKKSFKLCVTKEMLLLSITTAYTGLELTFFSGVYGTCIGATNKFGAEEKSLIGLSGIFIGIGEILGGSLFGLLSKNNRFGRNPVVLLGILVHFIAFYLIFLNMPGDAPIAPVKGTDSSAYIKSSKEVAILCSFLLGLGDSCFNTQLLSILGFLYSEDSAPAFAIFKFVQSICAAVAFFYSNYLLLHWQLLVMVIFGFFGTISFFTVEWEAAAFVARGSDYRSI

SEQ ID NO: 214949 - DNA, 1350 bp, Artificial Sequence
  derived and/or modified sequence
atgagccccgagagcaagaagctgttcaacatcatcatcctgggcgtggccttcatgttcatgttcaccgccttccagacctgcggcaacgtggcccagaccgtgatcagaagcctgaacagaaccgacttccacggcagcggctacaccagcatggccatcatctacggcgtgttcagcgccagcaacctgatcacccccagcgtggtggccatcgtgggcccccagctgagcatgttcgccagcggcctgttctacagcatgtacatcgccgtgttcatccagcccttcccctggagcttctacaccgccagcgtgttcatcggcatcgccgccgccgtgctgtggaccgcccagggcaactgcctgaccatcaacagcgacgagcacagcatcggcagaaacagcggcatcttctgggccctgctgcagagcagcctgttcttcggcaacctgtacatctacttcgcctggcagggcaagacccagatcagcgagagcgacagaagaaccgtgttcatcgccctgaccgtgatcagcctggtgggcaccgtgctgttcttcctgatcagaaagcccgacagcgagaacgtgctgggcgaggacgagagcagcgacgaccaggacatggaggtgaacgagagcgcccagaacaacctgaccaaggccgtggacgccttcaagaagagcttcaagctgtgcgtgaccaaggagatgctgctgctgagcatcaccaccgcctacaccggcctggagctgaccttcttcagcggcgtgtacggcacctgcatcggcgccaccaacaagttcggcgccgaggagaagagcctgatcggcctgagcggcatcttcatcggcatcggcgagatcctgggcggcagcctgttcggcctgctgagcaagaacaacagattcggcagaaaccccgtggtgctgctgggcatcctggtgcacttcatcgccttctacctgatcttcctgaacatgcccggcgacgcccccatcgcccccgtgaagggcaccgacagcagcgcctacatcaagagcagcaaggaggtggccatcctgtgcagcttcctgctgggcctgggcgacagctgcttcaacacccagctgctgagcatcctgggcttcctgtacagcgaggacagcgcccccgccttcgccatcttcaagttcgtgcagagcatctgcgccgccgtggccttcttctacagcaactacctgctgctgcactggcagctgctggtgatggtgatcttcggcttcttcggcaccatcagcttcttcaccgtggagtgggaggccgccgccttcgtggccagaggcagcgactacagaagcatctag

SEQ ID NO: 214950 - DNA, 1350 bp, Artificial Sequence
  derived and/or modified sequence
atgtcgccggaatctaaaaaacttttcaacatcattattctgggggtggcatttatgttcatgttcacagctttccaaacttgtggcaatgtcgcacaaacagttattagaagcttgaacaggaccgattttcacggaagtggttatacatctatggcaatcatctatggggttttttcagccagtaatcttattaccccttctgttgttgccatagtcgggccccaactgtccatgtttgcatctggccttttttactcaatgtacatcgctgtctttatccagccattcccgtggtcattctacaccgcctcagtctttattggtattgccgctgctgtgttatggacagcccagggtaactgtctgacaatcaattctgatgagcacagtattggcaggaacagtgggatcttttgggcactactgcaatccagcttattctttggcaatctgtacatctactttgcgtggcagggaaaaactcaaatatctgagagcgatcgaagaaccgtatttatagccctcaccgttatctctctcgtaggaactgtgctcttctttctgatcagaaaacctgatagcgaaaatgtcctcggagaggatgaatcatccgacgatcaggacatggaagtgaacgagtctgcgcagaataatcttacaaaggcggtggacgcgttcaagaaaagctttaagctgtgcgtcacaaaggagatgctgctgttaagcataaccaccgcctacactggactggagctcactttcttcagtggggtttacgggacctgcatcggcgcgactaataaatttggggctgaagaaaagagcctgataggattatccggcatattcataggcataggggaaatactcggggggtccctcttcggactcctgagtaagaacaaccggtttggacggaacccagttgtcctactgggcatattagtccatttcatcgcattttacctgatcttcctcaatatgcctggcgacgcccccatcgctcctgttaagggaaccgactcaagcgcatatataaaatccagtaaggaagtggctatattatgttcattccttctggggctaggtgattcctgcttcaacacacagctgctgtccattctgggatttctctactccgaagattccgcccccgcgttcgcaatttttaaattcgtgcaatccatttgcgccgccgtagcctttttttattccaactacctgctccttcattggcagcttctggtgatggtcatcttcggatttttcgggacaatcagcttcttcacagtggagtgggaggccgccgccttcgtcgcccgcggatctgattacagatctatctag

SEQ ID NO: 214951 - DNA, 2506 bp, Artificial Sequence
  derived and/or modified sequence
cccgtctccgtctgaagagtgcttctgccctcatttgcctctccctgtgaccccggccccctcagactccgctgcgtcgtctctcggccccgtccagccgttcctgactgctcttcgccggagtccgcttcccaaccccctttcgccagagcccgagagctccgtcggctctgcgtcctggcggattgtcagtggcttcgccccgaggagagctgactgccctgggctgctgcctccggcagagctgagccaaaatgtccccggaatctaaaaagcttttcaacatcattattttaggagttgcctttatgtttatgttcactgcctttcaaacttgtggaaatgtggcgcaaactgtcatcaggagcttaaataggacagattttcacggcagtggatataccagcatggctattatctatggagtgttctctgcttcaaatttgattacaccgtcagtggttgccattgtaggacctcaactctctatgtttgccagtggtttattttacagcatgtacattgccgttttcatccagcctttcccgtggtccttctacacagcctctgttttcattggaattgctgctgctgtgctttggacagcacaaggaaactgcctgacaatcaattcggatgagcacagcattgggagaaacagtgggattttctgggcacttctgcagtctagcttgttctttggaaatctctacatatattttgcctggcaagggaaaactcagatatcagagagtgaccgaagaacagtgtttattgccctaacggtgattagccttgtggggacagttctattctttctcattcggaaaccagattctgaaaatgtcctaggagaagatgagtcttctgatgaccaggacatggaagtcaacgagtctgcccagaacaatctgacaaaggcagtagatgcttttaaaaagtcttttaagttatgtgtcaccaaggagatgctccttcttagtattacaactgcttatacaggtctggaattaactttcttctctggtgtatatggaacctgtattggtgctacaaataaatttggagcagaagagaaaagccttattggactttctggcattttcatcggcattggagaaattttaggtggaagcctcttcggcctgctgagcaagaacaatcgttttggtagaaatccagttgtgctgttgggcatcctggtgcacttcatagctttttatctaatatttctcaacatgcctggagatgccccgattgctcctgttaaaggaactgacagcagtgcttacatcaaatccagcaaagaagttgccattctctgcagttttctgttgggccttggagacagctgctttaatacccagctgcttagtatcttgggctttctgtattctgaagacagcgccccagcatttgccatcttcaagtttgttcagtctatttgcgcagccgtggcatttttctacagcaactaccttctccttcactggcaactcctggtcatggtgatatttgggttttttggaacaatttctttcttcactgtggaatgggaagctgccgcctttgtagcccgcggctctgactaccgaagtatctgatctggtgtccgtgaggggacacgtatgacctcagaaacacagctggacacagagcttggtggaagaagtcgcctttgatcttcactatatattgggtgatgttcagtatggaaaatcaagggattaagactgttaaatcagccagagttggtgttcaagtttacagatatgagttatttaaagcaagtagaataagggaaagctgttctgtcaactgtaattgttcaaagatgttgtttttcatttcatctatctcaattcttataatcatgttatagaatgtaaatgttttcttctctctcctgctcttgttggaagatcctgccttgatttagaatactaggccatatgtcatataaatattttttctggatatggagtatgttttgccatgtaataatgggaagcatatgtcattccccatatgtgttggagaatgacatttaaataaatagcaaagctgggtgtggtgttgcaccgctatactcccagctgttggggaggctgagacagaaggatcacttcagcccaggagattgaggctgcggtgagctatgatcacaccactgcactccaggctgggcaacagagtgagaccctgtcttgaaaataataataggctggtcacagtggctcatgcctgtaatcccaacactttgggaggctgaggtgggtggatcacctgaggtcaggagtttgagaccagcctggccaacatggtgaaacctcatctctactaaaaatacaaaaatgtgttgggtttggtggtgcatgcctgtaatcctagctactagggaggctgaggtaagagaattcgcttgaacctgggaggcggaggttgcagtgagccgagatcgtgccattgcactccagcctggatgacaagagtgaaactccatctc

SEQ ID NO: 214952 - DNA, 1350 bp, Artificial Sequence
  derived and/or modified sequence
atgagccctgagagcaagaagctgttcaacatcatcatcctgggcgtggccttcatgttcatgttcaccgccttccagacctgtggaaatgtggcccagaccgtcatccgcagcctgaacagaacagacttccacggcagcggctacacctccatggccatcatctacggcgtcttcagcgccagcaacctgatcacccccagcgtggtggccatcgtgggcccccagctgtccatgtttgccagcggcctcttctacagcatgtacatcgctgtgttcatccagcccttcccctggagcttctacacagcctctgtgttcatcggcattgctgctgctgtgctgtggacagcccagggcaactgcctgaccatcaacagtgatgagcacagcatcggcaggaacagcggcatcttctgggccctgctgcagagcagcctcttctttggaaacctgtacatctactttgcctggcagggcaagacccagatcagcgagagtgacagaagaacagtgttcatcgccctgaccgtcatcagcctggtgggcaccgtgctcttcttcctgatcaggaagccagattctgaaaatgtgctgggagaagatgagagcagtgatgaccaggacatggaggtgaatgaaagtgcccagaacaacctgaccaaggctgtggatgccttcaagaagagcttcaagctgtgtgtgaccaaggagatgctgctgctgagcatcaccacagcctacacaggcctggagctgaccttcttctctggagtgtatggcacctgcatcggggccaccaacaagtttggagctgaggagaagagcctcatcggcctgagcggcatcttcatcggcattggagagatcctgggcggcagcctgtttggcctgctgagcaagaacaacagatttggaagaaatcctgtggtgctgctgggcatcctggtgcacttcatcgccttctacctgatcttcctgaacatgcctggagatgcccccatcgcccctgtgaagggcacagacagcagcgcctacatcaagagcagcaaggaggtggccatcctgtgcagcttcctgctgggcctgggggacagctgcttcaacacccagctgctgagcatcctgggcttcctgtacagcgaggacagcgccccagcctttgccatcttcaagtttgtgcagagcatctgtgccgctgtggccttcttctacagcaactacctgctgctgcactggcagctgctggtgatggtgatcttcggcttcttcggcaccatctccttcttcaccgtggagtgggaggccgccgcctttgtggcccggggcagtgactaccgcagcatctag

SEQ ID NO: 214953 - DNA, 1350 bp, Artificial Sequence
  derived and/or modified sequence
atgagccccgagagcaagaagctgttcaacatcatcatcctgggcgtggctttcatgttcatgtttaccgccttccaaacttgcggtaatgttgcccagaccgttattcggtccctaaacagaacagattttcacggttcaggctacaccagcatggccatcatttacggtgtattctccgcgagtaatctaattacgccctcagtcgtggccattgtgggcccacagctgtctatgtttgctagcgggctcttttactcaatgtacatcgctgtgttcatacagccttttccctggtccttttataccgcctctgtgtttataggcatagcagccgcggtgttatggaccgcccagggcaactgcctcaccatcaactccgacgaacacagcatcgggcgcaactctggcattttttgggccctgcttcagagctctctgttcttcggcaatctgtatatctacttcgcctggcaggggaagacccaaatatccgaatctgaccggcgcaccgtctttattgcactgactgtgatctccttagtcggcactgtcctgttctttctgatccgcaaacccgattcagaaaacgtgctgggagaggacgagagcagtgatgatcaggatatggaggtcaatgagtcagctcagaacaacctgacgaaagccgtcgatgccttcaagaagtctttcaagctctgcgtgacaaaagagatgctgctgttatctataacaactgcctatacagggctggagctcactttcttttcaggcgtctacggtacctgcattggagctactaataagttcggggccgaggagaagtctctcatcgggctgtcggggatcttcattggcattggcgaaattttgggggggtctttgtttggactgttgtcgaagaacaataggtttggccgaaatccggtggtcttgctggggattcttgtccattttatagccttttatctgatttttcttaatatgccaggcgacgcacctatcgcacccgtgaagggtaccgattcatctgcctatatcaagtcatccaaggaggtggccatcctgtgctctttcctcctcgggctaggagacagttgcttcaatacacagctcttatccattctggggttcctctattctgaagactctgcccccgccttcgcaattttcaaatttgtgcagtctatttgcgccgccgtggccttcttctattccaattacctgcttttacactggcagttgcttgttatggtgattttcggcttcttcggaacgatcagctttttcactgtggagtgggaggcagccgcatttgtcgcgagggggagtgattacaggtctatttag

SEQ ID NO: 214954 - DNA, 1350 bp, Artificial Sequence
  derived and/or modified sequence
atgtcaccagaatcaaaaaagctgtttaacatcatcatcttgggtgtggcttttatgtttatgtttaccgcgtttcagacttgtggaaatgtagcacagactgtgatccgcagcttaaatcggaccgactttcacggctctggatataccagcatggctatcatctatggcgttttttctgccagtaatttgattactccttcagtggtggccatagtcggtccccaactgtctatgttcgccagcggcctgttctacagtatgtatattgcggttttcatacagccttttccctggagtttctatactgccagcgtgttcatcggtatcgcagcagcggtgttgtggactgcacaggggaactgcttgaccatcaacagcgatgaacacagcattggtagaaattctggcatcttctgggctcttctgcagagttcccttttctttgggaacctgtacatctactttgcttggcagggaaagactcaaatctccgagtcagatagacgtaccgtgttcatcgcgctgacagtgatttccttagttggaaccgtgctatttttcttaatccgaaaaccagactctgaaaacgtactcggcgaggacgaaagcagtgacgaccaggatatggaggtgaacgagtccgctcagaacaatctcacaaaggcggtggatgcgttcaaaaagagttttaaactgtgtgtcactaaggaaatgctcctgctgagtatcacaacggcttacactggtctggagctcacctttttcagcggggtttacggaacttgcattggggctactaacaagttcggcgctgaggaaaagtctctaatcggactcagtgggatcttcatcggcatcggcgagatcctgggcggtagtcttttcggcctgctctccaagaataaccgcttcggcagaaatccagtcgtgctgctggggatccttgtccactttatagccttttaccttatctttcttaacatgccgggagatgctccaattgcgccagtgaaaggaacagatagctcagcgtacattaagtcatccaaagaggtcgccattctgtgtagtttcctactgggcctgggagactcttgcttcaacactcaactgctgtccatccttggctttctgtactctgaagactctgctcccgcttttgccattttcaagtttgtgcagtcaatatgtgctgccgttgccttcttttattcaaattatcttcttttacactggcagctactggtgatggtgatctttgggttttttggcactattagcttttttactgtcgagtgggaggctgctgcattcgtggcacgcggttctgactaccgcagtatctag

SEQ ID NO: 214955 - protein, 1256 aa, Artificial Sequence
  derived and/or modified sequence
MLFKLLQRQTYTCLSHRYGLYVCFLGVVVTIVSAFQFGEVVLEWSRDQYHVLFDSYRDNIAGKSFQNRLCLPMPIDVVYTWVNGTDLELLKELQQVREQMEEEQKAMREILGKNTTEPTKKSEKQLECLLTHCIKVPMLVLDPALPANITLKDLPSLYPSFHSASDIFNVAKPKNPSTNVSVVVFDSTKDVEDAHSGLLKGNSRQTVWRGYLTTDKEVPGLVLMQDLAFLSGFPPTFKETNQLKTKLPENLSSKVKLLQLYSEASVALLKLNNPKDFQELNKQTKKNMTIDGKELTISPAYLLWDLSAISQSKQDEDISASRFEDNEELRYSLRSIERHAPWVRNIFIVTNGQIPSWLNLDNPRVTIVTHQDVFRNLSHLPTFSSPAIESHIHRIEGLSQKFIYLNDDVMFGKDVWPDDFYSHSKGQKVYLTWPVPNCAEGCPGSWIKDGYCDKACNNSACDWDGGDCSGNSGGSRYIAGGGGTGSIGVGQPWQFGGGINSVSYCNQGCANSWLADKFCDQACNVLSCGFDAGDCGQDHFHELYKVILLPNQTHYIIPKGECLPYFSFAEVAKRGVEGAYSDNPIIRHASIANKWKTIHLIMHSGMNATTIHFNLTFQNTNDEEFKMQITVEVDTREGPKLNSTAQKGYENLVSPITLLPEAEILFEDIPKEKRFPKFKRHDVNSTRRAQEEVKIPLVNISLLPKDAQLSLNTLDLQLEHGDITLKGYNLSKSALLRSFLMNSQHAKIKNQAIITDETNDSLVAPQEKQVHKSILPNSLGVSERLQRLTFPAVSVKVNGHDQGQNPPLDLETTARFRVETHTQKTIGGNVTKEKPPSLIVPLESQMTKEKKITGKEKENSRMEENAENHIGVTEVLLGRKLQHYTDSYLGFLPWEKKKYFQDLLDEEESLKTQLAYFTDSKNTGRQLKDTFADSLRYVNKILNSKFGFTSRKVPAHMPHMIDRIVMQELQDMFPEEFDKTSFHKVRHSEDMQFAFSYFYYLMSAVQPLNISQVFDEVDTDQSGVLSDREIRTLATRIHELPLSLQDLTGLEHMLINCSKMLPADITQLNNIPPTQESYYDPNLPPVTKSLVTNCKPVTDKIHKAYKDKNKYRFEIMGEEEIAFKMIRTNVSHVVGQLDDIRKNPRKFVCLNDNIDHNHKDAQTVKAVLRDFYESMFPIPSQFELPREYRNRFLHMHELQEWRAYRDKLKFWTHCVLATLIMFTIFSFFAEQLIALKRKIFPRRRIHKEASPNRIRV

SEQ ID NO: 214956 - protein, 490 aa, Artificial Sequence
  derived and/or modified sequence
MLFKLLQRQTYTCLSHRYGLYVCFLGVVVTIVSAFQFGEVVLEWSRDQYHVLFDSYRDNIAGKSFQNRLCLPMPIDVVYTWVNGTDLELLKELQQVREQMEEEQKAMREILGKNTTEPTKKSEKQLECLLTHCIKVPMLVLDPALPANITLKDLPSLYPSFHSASDIFNVAKPKNPSTNVSVVVFDSTKDVEDAHSGLLKGNSRQTVWRGYLTTDKEVPGLVLMQDLAFLSGFPPTFKETNQLKTKLPENLSSKVKLLQLYSEASVALLKLNNPKDFQELNKQTKKNMTIDGKELTISPAYLLWDLSAISQSKQDEDISASRFEDNEELRYSLRSIERHAPWVRNIFIVTNGQIPSWLNLDNPRVTIVTHQDVFRNLSHLPTFSSPAIESHIHRIEGLSQKFIYLNDDVMFGKDVWPDDFYSHSKGQKVYLTWPVPNCAEGCPGSWIKDGYCDKACNNSACDWDGGDCSGKDVLNCNSFIFMEYFLLNHY

SEQ ID NO: 214957 - DNA, 3768 bp, Artificial Sequence
  derived and/or modified sequence
atgctgttcaagctgctgcagcgccagacctacacctgcctgagccaccgctacggcctgtacgtgtgcttcctgggcgtggtggtgaccatcgtgagcgccttccagttcggcgaggtggtgctggagtggagccgcgaccagtaccacgtgctgttcgacagctaccgcgacaacatcgccggcaagagcttccagaaccgcctgtgcctgcccatgcccatcgacgtggtgtacacctgggtgaacggcaccgacctggagctgctgaaggagctgcagcaggtgcgcgagcagatggaggaggagcagaaggccatgcgcgagatcctgggcaagaacaccaccgagcccaccaagaagagcgagaagcagctggagtgcctgctgacccactgcatcaaggtgcccatgctggtgctggaccccgccctgcccgccaacatcaccctgaaggacctgcccagcctgtaccccagcttccacagcgccagcgacatcttcaacgtggccaagcccaagaaccccagcaccaacgtgagcgtggtggtgttcgacagcaccaaggacgtggaggacgcccacagcggcctgctgaagggcaacagccgccagaccgtgtggcgcggctacctgaccaccgacaaggaggtgcccggcctggtgctgatgcaggacctggccttcctgagcggcttcccccccaccttcaaggagaccaaccagctgaagaccaagctgcccgagaacctgagcagcaaggtgaagctgctgcagctgtacagcgaggccagcgtggccctgctgaagctgaacaaccccaaggacttccaggagctgaacaagcagaccaagaagaacatgaccatcgacggcaaggagctgaccatcagccccgcctacctgctgtgggacctgagcgccatcagccagagcaagcaggacgaggacatcagcgccagccgcttcgaggacaacgaggagctgcgctacagcctgcgcagcatcgagcgccacgccccctgggtgcgcaacatcttcatcgtgaccaacggccagatccccagctggctgaacctggacaacccccgcgtgaccatcgtgacccaccaggacgtgttccgcaacctgagccacctgcccaccttcagcagccccgccatcgagagccacatccaccgcatcgagggcctgagccagaagttcatctacctgaacgacgacgtgatgttcggcaaggacgtgtggcccgacgacttctacagccacagcaagggccagaaggtgtacctgacctggcccgtgcccaactgcgccgagggctgccccggcagctggatcaaggacggctactgcgacaaggcctgcaacaacagcgcctgcgactgggacggcggcgactgcagcggcaacagcggcggcagccgctacatcgccggcggcggcggcaccggcagcatcggcgtgggccagccctggcagttcggcggcggcatcaacagcgtgagctactgcaaccagggctgcgccaacagctggctggccgacaagttctgcgaccaggcctgcaacgtgctgagctgcggcttcgacgccggcgactgcggccaggaccacttccacgagctgtacaaggtgatcctgctgcccaaccagacccactacatcatccccaagggcgagtgcctgccctacttcagcttcgccgaggtggccaagcgcggcgtggagggcgcctacagcgacaaccccatcatccgccacgccagcatcgccaacaagtggaagaccatccacctgatcatgcacagcggcatgaacgccaccaccatccacttcaacctgaccttccagaacaccaacgacgaggagttcaagatgcagatcaccgtggaggtggacacccgcgagggccccaagctgaacagcaccgcccagaagggctacgagaacctggtgagccccatcaccctgctgcccgaggccgagatcctgttcgaggacatccccaaggagaagcgcttccccaagttcaagcgccacgacgtgaacagcacccgccgcgcccaggaggaggtgaagatccccctggtgaacatcagcctgctgcccaaggacgcccagctgagcctgaacaccctggacctgcagctggagcacggcgacatcaccctgaagggctacaacctgagcaagagcgccctgctgcgcagcttcctgatgaacagccagcacgccaagatcaagaaccaggccatcatcaccgacgagaccaacgacagcctggtggccccccaggagaagcaggtgcacaagagcatcctgcccaacagcctgggcgtgagcgagcgcctgcagcgcctgaccttccccgccgtgagcgtgaaggtgaacggccacgaccagggccagaacccccccctggacctggagaccaccgcccgcttccgcgtggagacccacacccagaagaccatcggcggcaacgtgaccaaggagaagccccccagcctgatcgtgcccctggagagccagatgaccaaggagaagaagatcaccggcaaggagaaggagaacagccgcatggaggagaacgccgagaaccacatcggcgtgaccgaggtgctgctgggccgcaagctgcagcactacaccgacagctacctgggcttcctgccctgggagaagaagaagtacttccaggacctgctggacgaggaggagagcctgaagacccagctggcctacttcaccgacagcaagaacaccggccgccagctgaaggacaccttcgccgacagcctgcgctacgtgaacaagatcctgaacagcaagttcggcttcaccagccgcaaggtgcccgcccacatgccccacatgatcgaccgcatcgtgatgcaggagctgcaggacatgttccccgaggagttcgacaagaccagcttccacaaggtgcgccacagcgaggacatgcagttcgccttcagctacttctactacctgatgagcgccgtgcagcccctgaacatcagccaggtgttcgacgaggtggacaccgaccagagcggcgtgctgagcgaccgcgagatccgcaccctggccacccgcatccacgagctgcccctgagcctgcaggacctgaccggcctggagcacatgctgatcaactgcagcaagatgctgcccgccgacatcacccagctgaacaacatcccccccacccaggagagctactacgaccccaacctgccccccgtgaccaagagcctggtgaccaactgcaagcccgtgaccgacaagatccacaaggcctacaaggacaagaacaagtaccgcttcgagatcatgggcgaggaggagatcgccttcaagatgatccgcaccaacgtgagccacgtggtgggccagctggacgacatccgcaagaacccccgcaagttcgtgtgcctgaacgacaacatcgaccacaaccacaaggacgcccagaccgtgaaggccgtgctgcgcgacttctacgagagcatgttccccatccccagccagttcgagctgccccgcgagtaccgcaaccgcttcctgcacatgcacgagctgcaggagtggcgcgcctaccgcgacaagctgaagttctggacccactgcgtgctggccaccctgatcatgttcaccatcttcagcttcttcgccgagcagctgatcgccctgaagcgcaagatcttcccccgccgccgcatccacaaggaggccagccccaaccgcatccgcgtg

SEQ ID NO: 214958 - DNA, 3768 bp, Artificial Sequence
  derived and/or modified sequence
atgctgttcaagcttctccagcggcagacgtacacttgcctgtctcatcgttacgggctctacgtttgtttcctaggagtggtcgtgaccattgtgagcgcttttcagtttggtgaagttgtgctggagtggagccgggatcaataccatgttctcttcgactcatatcgagataatatcgccgggaagtctttccagaatcgtttgtgtctgcctatgcctatcgacgtcgtttacacgtgggtgaacggcaccgatctagagttgttgaaagagttgcaacaggttagggaacagatggaagaggagcaaaaagcgatgcgggagatcctgggaaagaatacgactgagcctacgaagaagagcgaaaagcagcttgagtgtctgctcacccattgcattaaggtaccaatgctggtgctggacccagccctccccgctaacatcactctcaaggacctaccaagcttatatccctcttttcattccgcgtccgatatcttcaatgtggcgaagcccaagaatccctctaccaacgtctcagttgttgtctttgacagcactaaggacgtggaagacgctcactcaggtctactgaagggaaatagtagacaaacggtatggaggggatatctgaccactgataaagaggttccaggacttgtgttaatgcaggacctggcattcctgtctggattccctcctacctttaaggagactaatcagctcaagaccaaactacctgagaacctgtcgtcaaaagtgaagttgctgcaactgtatagcgaggcttccgtcgccctcctgaagcttaataaccctaaggactttcaggagctgaacaaacaaacaaagaaaaacatgaccattgacgggaaagagctgactatatctccagcctacctgctttgggatctttccgctatctctcagagtaaacaggatgaagacatcagtgcatcccgattcgaggataacgaagagcttcgctatagcctccgctctatagagaggcatgctccgtgggtaagaaacatattcatcgtgaccaacggacagatccctagttggttgaatctcgacaatccacgcgtgacaattgtcacgcatcaggatgttttccggaatttatcacacctgcctacgtttagcagccccgccatcgaatcacacattcacagaatagagggactttcacaaaaattcatctacttgaatgatgatgtgatgttcgggaaggacgtgtggcccgacgatttttactcccactccaaaggccagaaggtgtacctgacctggcctgtgccaaactgcgccgagggttgtcctggatcatggatcaaagacggatactgcgacaaggcatgtaacaacagcgcctgtgattgggacgggggcgactgctccgggaattcaggcggttcacgatatattgctggtggaggaggcacaggctccatcggagtcgggcaaccctggcagttcggaggcgggattaacagcgtttcgtattgcaatcaaggctgcgccaattcatggcttgcagacaagttctgcgaccaggcttgtaatgtgctgtcttgtggcttcgacgctggcgattgtggtcaggatcatttccacgagctgtacaaagtgatcttgttacccaatcagacacactatattattccgaagggggagtgtctaccctatttttcatttgctgaagttgctaagaggggagtcgagggagcctattccgataaccccataataaggcatgcaagcatcgctaataagtggaaaactatccatttgattatgcatagcggaatgaatgctaccacaatacattttaaccttacttttcagaatactaatgacgaagagttcaaaatgcagattactgtcgaggtcgacacccgggagggacctaaactcaattccaccgcgcaaaagggctatgagaacctggtgtcacctatcacgctcttgcccgaggcagagattctattcgaggacatccccaaggagaaaagatttccaaagttcaagcgccacgacgttaatagcaccaggcgagctcaggaggaggtgaaaattcctctggtgaatatttccctcctgccaaaagacgcacagttgtccctgaacacattggacctccagctagagcacggcgatattaccctcaagggttacaacctgtcaaaaagtgcactactgagaagctttctcatgaattcccagcacgcaaaaataaagaaccaggctattatcactgatgaaaccaatgactccttggtcgcccctcaggaaaagcaagtccacaaatccattctgcccaatagtttaggcgtgagtgagcgcctgcaacgcttgaccttccccgccgtgtccgtgaaagttaacggccacgatcaggggcaaaacccacctctggatctagaaacaactgctagattccgcgtagagacccatacacagaaaaccatcgggggcaatgtaactaaagagaaacctccttcgctcattgtgcccctcgagtcccaaatgaccaaggagaaaaagatcacgggaaaagaaaaagaaaactcacgcatggaagagaacgcagagaatcatatcggtgtgaccgaggtgctgttaggacgcaaattgcagcactatacggactcatacctgggctttctaccttgggagaaaaaaaaatactttcaggatctgctggacgaagaggaaagccttaaaacccagctggcctacttcacggattccaaaaacaccggtaggcagctcaaagacaccttcgccgactctctcagatacgttaataaaatcctgaactctaagtttggttttacttcccgaaaagtgcccgcacatatgcctcacatgatcgatcggattgtgatgcaagagttgcaggacatgtttcccgaggagttcgataaaacttcattccataaggttcgccactccgaggatatgcagttcgcctttagctacttctactatctgatgagcgccgtgcaacccctgaatatctcccaggtgttcgatgaggtagataccgaccagagcggagtcctctctgaccgagaaataagaacgttggccacaaggattcacgaactccccctgagtctgcaggaccttacaggcctagagcacatgctgatcaactgctcaaagatgctgccggccgatattacccaattgaataatatacctcccacccaggagtcatactacgatccaaatttgccccctgtaaccaagagcctggtgacaaattgcaagccggtcaccgataaaatccacaaagcctataaggataagaacaagtataggtttgagatcatgggcgaggaggaaattgccttcaaaatgatacgaactaacgtctcccacgtcgtaggtcaattagatgacattcgtaagaatccccgcaagtttgtctgcctcaacgacaatattgatcataatcataaagacgcccaaaccgtaaaagcagtgctgagggacttctatgagtctatgttccccatccccagccagtttgagctgccacgggagtatcgcaaccgatttctacatatgcatgagctgcaagaatggcgggcctacagggacaaattaaagttttggacacactgtgtccttgccaccctgatcatgttcaccatcttctcatttttcgccgaacagctcattgcgctgaaacgtaagattttccccaggagacggatccataaggaagccagtcctaacaggataagggtc

SEQ ID NO: 214959 - DNA, 3768 bp, Artificial Sequence
  derived and/or modified sequence
atgctcttcaagctgctccagaggcagacatacacctgtttgagccatagatacggtctctacgtgtgctttctgggagtggtggttaccatcgtcagcgctttccagttcggggaggtcgtacttgagtggtccagggatcagtaccatgtgctttttgattcctatagggacaacattgctgggaagagtttccagaacagactgtgtctgcccatgcccatcgacgtggtctatacatgggtcaacggtacggacttggagcttctgaaagaactgcagcaggtaagggagcagatggaagaggagcaaaaggccatgagagagattctggggaagaatacgactgagcctaccaaaaaatcagagaagcagctggagtgtctcctcacccattgcattaaggtgccaatgttggtactggatccagctctccccgctaacattactctgaaggaccttccgtctctctatccgtcttttcatagcgcgtccgacatttttaacgtggctaagcccaagaaccctagtacgaatgtttctgtcgtggtgttcgatagtacaaaagatgtcgaggacgcgcatagcggacttctgaaaggcaacagtagacaaaccgtatggagggggtatctgaccacagataaggaagtgcccggtctcgtgctcatgcaggaccttgccttcttgtctggctttcctccgacttttaaggaaaccaatcagctcaaaaccaaactgccggaaaacctcagtagcaaggtgaagctgctccagttgtactcagaagcgtcagtggcattgttgaaactcaataatcctaaggacttccaggagctcaacaagcagacaaagaagaatatgaccatcgatggcaaggagcttacaatcagccccgcctatctgctgtgggacctgtctgcaatcagtcaatccaaacaggacgaggacatcagcgcgtcccggtttgaagacaacgaagagctgagatatagtctcagaagtattgagaggcacgccccgtgggttcggaatatctttatagtgacaaatgggcagatcccgagctggctgaacctggataatccaagagtgactatcgtgactcaccaggatgtcttccgcaacctctcacacctgcctactttctccagccctgccatagaaagccacatccatagaattgaaggcctgtcacagaagtttatctatctgaacgatgacgtcatgttcgggaaggacgtctggccagacgacttctacagccacagcaagggccagaaagtctacctgacctggcccgtacccaattgtgccgagggatgccccggatcatggattaaggatggttattgcgacaaagcgtgtaataacagcgcctgtgactgggacggtggcgattgcagtggtaactctggaggatctaggtacattgccgggggaggaggaaccgggagcatcggcgtcgggcagccctggcagtttggcgggggtatcaactccgtttcttactgcaatcaggggtgcgccaattcttggctggccgacaaattttgtgaccaggcctgtaacgtgttgagttgtgggtttgatgcaggcgactgtggtcaagatcatttccacgagctctataaggttatcctcctgcccaaccagacccactatataatccccaagggggagtgcctgccatatttctctttcgctgaggtagccaaacgaggggttgagggtgcatacagcgataaccctattatacgacacgcctctatcgctaacaaatggaagactatccatttgatcatgcactccggaatgaatgcgaccactatccactttaacctgacctttcagaatactaatgacgaggagttcaagatgcagatcactgtagaggtggacacacgcgaggggcccaaactgaacagtactgctcaaaagggctacgaaaatcttgtgtctcccattacactgctccccgaggctgagatcctctttgaagatatccctaaagagaagcggttccctaagtttaaacggcacgacgtgaactccacccgaagggcccaagaagaagtaaagattccattggtaaacatcagcctgctgcctaaagatgcacagctgagcctcaacaccctggatctgcagttggagcacggcgacatcacactcaagggatataatctgagcaagagcgcactgctcagatcctttttgatgaattcacagcatgcaaagattaaaaatcaggcaatcatcactgacgagacgaatgactccctcgtggcccctcaggaaaagcaggtgcacaagtccattctgccaaacagcctgggtgtttccgagcgacttcagcgcctgaccttcccagctgtgtctgtgaaggtgaacggacatgatcaggggcaaaatcctcctctggacttggagactacagctcgcttccgggtggagacccatacccagaagaccattggaggtaatgttactaaagagaagcccccctctcttattgtacctctcgaatctcagatgacaaaggagaaaaagatcaccgggaaggagaaggaaaacagccgaatggaagagaacgccgaaaaccatattggagtgacagaagttctgctgggaaggaagctgcagcattacaccgattcctacctggggtttcttccctgggagaagaagaagtacttccaggacttgcttgacgaagaagagtccttgaagacccagcttgcttacttcaccgacagtaagaataccggcaggcagctcaaagacacctttgctgactccttgcgctacgtgaacaagatcctgaacagtaagtttggcttcacatccagaaaggttcccgctcatatgccccatatgatcgatagaatcgtcatgcaggagctccaagacatgttcccggaagagttcgacaagacatcctttcacaaagtgcggcacagcgaagatatgcagtttgcgttcagctatttctactacctgatgagcgccgtgcaacccctgaacatatcccaagtgttcgatgaagttgacacggaccaatccggagttctgtccgaccgcgagatcaggacacttgcaactaggattcacgagctgcctctcagcctgcaggacttgaccggcctggagcatatgctgattaattgttccaagatgctgccagcagatatcactcagcttaataatatcccaccaacacaggagtcctactacgatcctaacctgccccccgtcacgaagagtttggtgacaaactgtaagcccgtaacagacaaaatccataaggcgtataaggataagaataaataccgctttgagatcatgggggaggaggaaatcgcgttcaagatgatacggaccaatgtctcacacgtggtgggtcagctcgacgatatcaggaaaaaccccaggaagtttgtgtgtctcaatgataatatcgaccataaccacaaggatgcacaaactgtgaaggcagtgctccgcgacttctacgagagtatgtttcccattccatcacaattcgaactgccacgggagtaccggaacagatttctccatatgcacgagctgcaagagtggagggcatatagagacaagcttaagttctggacacactgtgtcctcgcgaccctcataatgtttactatctttagcttcttcgctgagcagctcatcgcactcaagcgaaagatatttccccggagacgaatccacaaggaggctagtcctaatagaataagagtg

SEQ ID NO: 214960 - DNA, 3768 bp, Artificial Sequence
  derived and/or modified sequence
atgttattcaaactactgcagaggcagacctacacctgcttgtcccacagatatggcttgtatgtttgcttcctaggggtcgtggtgacaatcgtgagcgcctttcagtttggcgaggtggtcctggagtggtcccgtgatcagtaccacgtccttttcgacagttatcgtgacaatattgctggcaaatctttccagaatcgattatgtttaccgatgcctatcgatgtggtgtatacctgggtaaacggtacggacttggaactgttgaaggaactccagcaagtgcgcgaacaaatggaggaggagcagaaggccatgagggagatactgggcaaaaacacaactgaacccacaaagaagagcgaaaagcagttggaatgcctccttacacactgcatcaaggttccaatgctcgtccttgatcctgcccttccagcgaatataaccttgaaagacctgccttctctttaccctagcttccactctgcatctgacattttcaacgtggctaagcccaaaaacccttccacaaatgtttccgtcgtggtgttcgactctacgaaagacgtcgaggacgctcacagtggcctcttgaagggaaactccagacagactgtgtggaggggctacctcactactgataaagaggttcccggtctcgtgttgatgcaggacttggcctttcttagtgggttcccgcccactttcaaagagactaaccagcttaagactaagctgcctgaaaacttgtcaagcaaggtgaaactcctccagctttacagcgaggcgtccgtggccttacttaagttgaataaccctaaggattttcaggaactgaataagcaaactaagaaaaacatgacgatcgacgggaaagagttaactatatcccccgcttatctcctttgggatctgtctgctatcagtcagtccaaacaggatgaagatatttctgcaagtaggttcgaggataatgaggagttacgctattcattgaggagtattgagcgccatgccccttgggtgaggaacatcttcatcgtaaccaatggacagatcccttcatggctgaacttggataatccccgcgtgacaatcgtgacacaccaggacgtattcaggaatctgtctcatctgccaaccttctcgagcccagcgattgagagtcacatccaccgtatcgagggactgtctcagaagtttatttatctcaacgacgatgtgatgttcggcaaggatgtgtggccggatgacttttacagccatagtaagggccagaaagtgtacctgacatggccagttccaaattgcgctgagggatgcccaggaagttggatcaaagacggctattgtgacaaggcctgtaacaatagtgcatgtgactgggacggaggggactgttccgggaacagcggcggatcaagatacattgccggcggcggcggaaccggctctattggtgtgggccagccctggcagttcggtgggggtatcaacagtgtgtcctattgtaaccagggctgtgcaaatagctggctcgccgacaagttctgcgaccaggcctgcaatgtattgtcctgcggatttgatgcaggtgattgtggccaggaccacttccacgaactgtacaaagtgatcttactcccaaatcagacccattacataattccaaagggagaatgcctaccctacttctccttcgctgaagtcgctaagagaggcgttgaaggcgcatattcagacaaccctataattcgccacgcatccattgcaaacaaatggaagactatccaccttattatgcatagtggaatgaacgccactactatacatttcaatctgacgtttcagaataccaacgacgaggagttcaagatgcagataacagtcgaggttgatactcgcgagggtcccaaacttaattctactgcccaaaagggttacgaaaatcttgtctctcctatcaccctgctgcccgaagctgaaatcttgtttgaggacataccaaaggagaaaaggttccctaaattcaaaagacacgacgtgaacagcacccgccgagctcaggaggaggtcaaaattccactggtaaatatttcgctgcttccaaaggatgcgcagctctcactcaacactcttgacctgcagcttgagcacggagatatcacactgaagggctacaatctttctaaatcagctctgcttaggtcctttctcatgaattcccagcacgccaagattaagaaccaggcaattataaccgacgaaacaaatgactccctggtcgcaccacaggagaaacaagtgcataaaagcatcttgcctaactccttgggtgtgtcggagcggcttcaaaggcttaccttccctgcggtgagtgtgaaggtgaatggacacgatcaggggcaaaacccaccgttggatctggaaaccaccgctaggtttagagtagagacccatactcagaagacaatcggcggaaacgtgaccaaggaaaagccaccttctctgatcgtgccgctggagtcacagatgaccaaggaaaaaaagattacaggcaaagagaaggagaactcccggatggaagaaaacgcagaaaatcacatcggcgtgacggaggtgctgctcggtcggaagctgcagcactacactgattcctacctgggctttctgccttgggaaaagaagaaatatttccaggaccttctggatgaggaggagtcgctgaagacccagctggcatacttcacggattccaagaacacagggcggcagctcaaggataccttcgccgattcacttagatacgtgaataagatccttaatagtaagttcgggtttacttccagaaaggtgcccgctcacatgccccacatgattgaccgaatcgtgatgcaggagcttcaggatatgttccccgaggagtttgataaaacatcgtttcacaaggtgcgacactcagaggatatgcagttcgctttttcttatttctactatctgatgtccgccgtgcagccactcaatattagccaagtttttgacgaggtcgatacagaccaaagtggcgtgctcagtgacagagaaatcaggacactcgctaccagaatccatgagctgccgttaagtttgcaggatttaacaggactggagcatatgctaataaattgttctaaaatgctgcccgccgacatcacccagttaaacaatatacccccaactcaggaatcctactacgatcctaacctgcccccagtcactaagagcctcgtcactaattgtaagccggtgacagataagatccacaaggcctacaaagacaaaaacaagtacagatttgagataatgggagaagaagagatcgcttttaaaatgatcagaactaacgtgtcgcacgtggtgggtcagctcgatgatatcaggaagaatccccggaaatttgtgtgtttaaatgacaacatcgaccataatcacaaagacgcccagacagtcaaagccgtgctgagagatttttatgagagcatgtttcccattccaagtcagtttgagctgcctcgtgagtacaggaacagatttcttcacatgcacgagctccaggaatggcgagcatatcgtgataagttaaagttttggacacactgcgtactggctacactgattatgttcaccattttctcctttttcgcagagcagttaatcgctctgaagcgtaaaatattccctcggcgccggatacacaaggaggcctcccccaatcggatccgtgta

SEQ ID NO: 214961 - DNA, 3768 bp, Artificial Sequence
  derived and/or modified sequence
atgttatttaagcttttacaaagacaaacatatacttgtcttagtcatagatatggactttatgtttgttttttaggtgttgttgtgacaattgtaagtgcttttcaatttggtgaagttgttttagaatggtcaagagaccaatatcatgtattattcgactcttacagagataatattgcaggaaaatcatttcaaaatagattatgccttccaatgccaattgatgtagtatatacttgggttaatggtacagatttggaacttcttaaagaattacaacaagttcgagaacaaatggaagaagaacaaaaagcaatgagagaaattttaggaaaaaatacaactgagccaactaaaaaatcagaaaaacaattagaatgtcttcttacacattgtattaaagttccaatgttagtactagatccagctttaccagctaatattactttaaaagatttgccttctttgtatccttcatttcatagtgctagtgatatttttaatgttgctaagccaaaaaatccatcaacaaatgtatcagtagttgtttttgacagtactaaggatgtcgaagacgctcactctggattactaaaaggaaattcccgacaaacagtttggcgtggttatttaactacagataaagaggtaccaggattagttttaatgcaagatttagcttttttatcgggattcccaccaacttttaaggaaactaatcaacttaagactaagcttcctgaaaatttatcatctaaagttaaattattacaattgtatagtgaagctagtgttgcattacttaagttgaataatccaaaggattttcaagaacttaataaacaaactaaaaaaaatatgactattgacggaaaagaattaacaatttcacctgcatatcttttatgggacctttctgcaatttcacaatctaaacaagatgaagatatttctgcttcaagatttgaagataatgaagaattaagatattcattaagaagtattgaaagacatgctccttgggtgagaaatattttcatcgtaactaatggacaaattccatcatggttaaatttagataatccacgtgttacaatagttactcatcaagatgtttttagaaacttaagtcatttaccaacattttctagtccagctattgaatctcatattcatagaattgaaggattatcacaaaaatttatttatcttaatgacgacgtaatgttcggtaaagatgtttggccagatgatttctattctcattcaaaaggacaaaaagtttatcttacttggccagttcctaattgtgctgaaggttgtccaggttcttggattaaagatggatattgtgataaagcttgtaataatagtgcttgtgattgggatggaggagattgttctggaaacagtggaggatcaagatatatagcaggaggaggaggaaccggatctattggggttggacaaccatggcaatttggaggaggaattaatagtgttagttactgtaatcaaggatgtgcaaattcttggttagctgataaattttgtgatcaagcatgtaatgttctctcatgtggatttgatgcaggagattgtggacaagaccattttcatgaattatataaagttattttacttccaaatcaaacacattatataattcctaaaggtgaatgtttaccttattttagttttgcagaagttgcaaaacgtggtgttgaaggagcttatagtgataatccaattatacgacatgcttcaatagctaataagtggaaaacaattcatttaattatgcattctggaatgaatgctaccacaatccactttaatttaacatttcaaaatactaatgatgaagaatttaaaatgcaaataacagttgaagttgatactagagaaggtccaaagcttaatagtactgcacaaaaaggatacgagaatttagtttctccaataactttattaccagaagcagagattttatttgaagatattcctaaagaaaaaagatttccaaagttcaagagacatgatgttaatagtacacgtagagcccaagaagaagttaaaattccattagtaaatatttcacttttaccaaaagatgcacaattatctctaaatacattagatcttcaattagaacatggagatattactttaaaaggttataatttgtcaaaatctgcacttcttaggtcttttcttatgaatagtcagcatgctaaaataaagaatcaagcaattattacagatgaaacaaatgactctcttgtagctcctcaagaaaaacaagtacataaatctattttacctaattctcttggagtttcagaaagacttcaaagacttacatttccagcagtttcagttaaagttaatggacatgatcaagggcaaaatccacctcttgatttagaaacaactgcaagatttagagttgaaacgcatacacaaaaaacaatagggggaaatgttactaaggaaaaacctccaagtcttattgttcctttagaatcacaaatgacaaaagaaaaaaaaattactggtaaagaaaaagaaaactcaagaatggaagaaaatgcagaaaaccatattggagtaacagaagttttattaggacgtaaattacaacattacacagattcttatcttggttttttaccatgggaaaagaaaaaatattttcaagacttattagatgaagaagaatcattaaagacacaacttgcttattttactgattctaaaaatacaggacgtcagttaaaagatacatttgcagatagtttgagatatgttaataaaattttaaattccaagttcggttttacaagtagaaaagtaccagcacatatgccacatatgattgacagaatagttatgcaagaattgcaagacatgtttccagaagaatttgataagacttcatttcataaagttagacatagtgaagatatgcaatttgctttttcatatttctattatcttatgagtgctgttcaaccacttaatatttctcaagttttcgatgaagttgatactgatcaatcaggagttttatctgatagagagattcgtacattagcaacaagaattcatgaattaccactttcattacaagatcttactggattagaacatatgttaattaattgttctaaaatgttacctgcagatattacacaattaaataatattcctccaactcaagaatcatattatgatccaaatttgcctccagtgactaaatcacttgttactaattgtaaacctgtaactgataaaattcataaagcatataaagataaaaataaataccgattcgaaattatgggagaggaagaaattgcattcaaaatgataagaacaaatgtaagtcatgttgttggacaacttgatgacattagaaaaaatcctagaaaattcgtgtgtttaaatgataatattgatcataaccataaagatgctcaaacagttaaagcagttttaagagatttttatgaaagtatgtttcctattccatcacaatttgaacttccacgtgaatataggaataggtttttacatatgcatgaacttcaagaatggagagcttatcgtgataaattaaaattctggacacattgtgttttagctactcttattatgtttacgatattctcattttttgctgaacaacttattgcacttaaacgtaaaatttttcctcgaagaagaatccataaagaagcttcaccaaatagaattcgagtt

SEQ ID NO: 214962 - DNA, 3768 bp, Artificial Sequence
  derived and/or modified sequence
atgctgtttaagctgttacagcgtcagacgtacacttgcctgtcacacaggtacggtctgtacgtgtgttttctgggcgtcgtagtgaccatcgtgtctgctttccagttcggcgaggttgtcctggagtggagccgcgaccagtatcacgtactcttcgacagttaccgcgacaatatcgccgggaagtccttccagaatcggctgtgtctacccatgccaatagatgtggtctacacatgggtaaacggcacagacctggaactgctcaaggaactccaacaggtgagagaacagatggaggaagagcagaaggccatgcgcgagattctgggcaaaaatactacagagcccaccaaaaaatcagaaaaacaactcgaatgtttactgacacactgtataaaggtacctatgcttgtcctggacccagccctgcctgcaaacatcacattgaaggatctgcccagtttatacccaagtttccactccgccagcgatattttcaacgtggcaaagccaaagaacccctctacgaatgtttcggtcgtggtgtttgacagcaccaaggatgtagaagacgcacacagtggcctacttaaaggaaacagccgccagacagtgtggcgcggttatctgactacagacaaggaggtgccaggcctggtcttgatgcaggacctggcgttcctatccggtttcccgccaacatttaaagagaccaatcaactgaagaccaaacttcctgaaaatctaagcagcaaggtgaagttgctgcagctttactccgaagcgtccgtcgctttgctcaagctgaataacccaaaagattttcaggagctgaacaagcaaaccaaaaaaaacatgaccatagatggaaaggagctgactatttctccagcgtacttattatgggacctgagcgccatcagtcaatcaaagcaggatgaggatatcagcgcatctcggtttgaggacaatgaagaattacgatatagcctgcgttccatcgaacgccatgctccttgggttcgaaatatcttcatcgtaactaacgggcagataccatcatggctgaatctcgataacccccgcgtgactatcgtgacgcatcaagacgtgttcagaaacctgtcacacctgcccaccttttcatcgcctgccatcgagagccacatccaccgcattgagggattgagtcagaaatttatttacttgaacgacgacgtaatgttcggcaaagatgtgtggccagatgacttttacagccattccaaaggccagaaagtctacttgacttggccagtgccaaattgtgcggaaggttgcccaggcagctggataaaggacggatattgcgacaaggcctgcaataactcagcctgcgattgggacggcggggactgttcaggaaactccggaggctcccgctacatcgcgggcgggggtggcacgggctcaatcggagtggggcagccgtggcaattcgggggtgggattaattctgtgagctattgtaatcagggctgcgcaaacagttggctggcagataagttttgtgaccaagcatgtaatgtgctgtcctgcggatttgacgccggcgattgcgggcaggaccacttccacgaattatacaaagttattctcttgccaaatcagactcattacattatcccgaagggtgaatgcctcccatactttagcttcgctgaggtcgcaaagcggggtgtggagggtgcatacagcgataatccgatcatcagacacgctagtatcgccaataagtggaagactatccacctcattatgcactcaggcatgaacgcaaccacaatccactttaacctgaccttccagaacaccaatgacgaggagttcaagatgcagatcacggtggaggtggacactcgggaaggccctaagcttaattcaaccgctcagaaagggtacgagaatctggtatcaccgattaccctgctccctgaagccgagattctgtttgaggatatccccaaggagaagcgtttccctaaattcaaaagacacgatgtgaactccactcgcagagcacaggaagaggtgaaaattccgctggtcaacatttcactcctcccaaaggacgctcagctttctctgaacacccttgatctccaacttgagcatggagatattacactcaaagggtacaacctgagcaaatcggcactgttgcgctcctttctgatgaacagtcagcatgccaagattaagaaccaggccatcattactgatgaaaccaacgatagcctcgttgctcctcaggagaaacaggtccacaaaagtatactgcccaattctttgggtgtcagcgagagattgcagcggttgacctttccagcagtatccgtcaaagtaaacgggcacgatcagggccagaatcccccactggacctggagactaccgccaggttcagagtggagacccacactcagaaaaccatcggaggaaacgtgacaaaggaaaagcctccaagtcttatagtgccactggagagtcagatgactaaagaaaaaaaaattacaggcaaggagaaagaaaatagtcgcatggaggaaaacgccgagaatcacattggcgtcacagaggtgctgctgggccgcaaactgcagcactacacagattcatatctaggtttccttccatgggagaagaagaagtactttcaggacttattggacgaagaggaatcgctgaaaactcagctggcgtatttcactgacagcaagaatacgggtcggcagttaaaagatacttttgctgacagcctgcgttacgtaaataaaatccttaacagcaaattcggatttacatctcgcaaggttccagcacacatgccacatatgattgaccggatagtgatgcaggaactgcaggatatgttcccggaggagtttgacaagacttcatttcataaggtccggcacagcgaagatatgcaatttgcttttagctatttctattacctgatgagcgcagtccagcccttaaatattagccaagtctttgacgaggtggacactgatcaatccggcgtactctccgatcgggagataaggaccttggccactagaatccacgaattgcctcttagtctgcaggaccttaccgggttagagcacatgcttataaactgctccaagatgttgcctgccgacatcacccagctgaataatatcccccctactcaggaatcatactacgaccccaacttgccgcccgtcactaagagcctggtgacaaattgcaagccggtgactgacaaaatccataaggcttataaagataaaaataagtatcgctttgaaattatgggggaggaggaaattgcgtttaagatgatcaggaccaacgtaagtcatgttgtggggcagctagacgacatcaggaaaaacccgcgaaagttcgtgtgcctcaatgacaacattgaccacaaccataaggatgcccagactgtgaaggcggtcctgcgtgatttttatgagtctatgtttcctataccatcacagttcgaactgccacgggagtatcgcaaccggtttctgcatatgcatgagcttcaggagtggagggcttatcgagacaaactgaaattttggacacactgcgtgctcgctacgctgatcatgtttacgatctttagctttttcgccgaacagctaatcgccctcaagcggaagattttcccgcgccggcgaatacataaggaagcttccccaaaccgtattcgtgtg

SEQ ID NO: 214963 - DNA, 3768 bp, Artificial Sequence
  derived and/or modified sequence
atgcttttcaagctcctccagcgacaaacgtatacttgtctgtcgcataggtacggactctacgtgtgttttctgggggtggtggtgaccatagtgtcagcctttcaatttggtgaagtcgtgctggaatggtcgcgcgatcagtatcacgtgctttttgattcttaccgggacaatatcgcaggtaaatccttccagaatagactttgcctgccaatgcctattgatgtcgtctacacctgggtgaacggaaccgatctggaactgctgaaagaactccaacaagtgcgagaacaaatggaggaagagcagaaagcgatgagagagattttgggtaagaataccactgaacccaccaaaaagagcgaaaagcaacttgaatgcctgctgactcattgcataaaggtgcctatgctggtgctcgatccagctcttcctgctaacataactctgaaggatctcccctcgctgtatccctccttccattcggcaagcgacatcttcaacgttgcgaagcccaagaacccttcgaccaacgtgtcggtggtggtgttcgacagcaccaaagacgtcgaagatgcacattcggggctgttgaagggcaactcaagacaaactgtgtggaggggatacttgactacggataaagaggtgcctgggctggtgctgatgcaggatctggcattcctgtcaggctttccgccaacctttaaggaaaccaatcagctcaagaccaaactcccagagaatctctccagcaaggtgaaactgctgcagttgtactcggaggcgtccgtcgcacttcttaagctgaataacccaaaggacttccaagaacttaacaaacaaaccaagaaaaacatgactattgatggcaaagaactgacgatcagccctgcgtacctgctgtgggacctttcagcaatctcacagtcgaagcaggatgaggatattagcgcgtcacgctttgaagataacgaagaacttaggtacagcttgcgcagcattgaaagacacgctccgtgggtccgcaacattttcatcgtgactaatggacaaatcccaagctggctgaacctggacaacccacgggtcacgattgtcacccatcaagacgtctttcggaacctgtcccaccttccaacctttagctcgccagcaatcgaatcccatatccacagaatcgagggactcagccaaaagttcatctacctgaatgatgatgtcatgtttggtaaggatgtgtggcccgatgacttttactctcatagcaaaggtcaaaaggtgtaccttacttggccagtcccaaactgcgctgaaggctgcccaggatcgtggattaaggacggctattgtgataaggcctgtaacaattcggcgtgtgattgggatggaggtgattgttcaggcaacagcggcggttcccgctacatcgcaggagggggtgggaccggaagcatcggggtgggtcagccatggcagttcggaggagggattaacagcgtgtcttactgtaaccagggttgcgcgaactcttggctggcggataagttctgcgaccaggcatgtaacgtcctgtcgtgtggatttgacgcaggggattgcggacaggaccacttccatgagctctacaaggtgattctccttcctaaccagacccattacattataccaaaaggagaatgccttccgtacttttcatttgctgaagtcgccaagagaggtgtggaaggtgcatattccgacaacccgattatacgtcacgcgtccatagccaataagtggaaaacgatacatctgattatgcactcgggaatgaacgcaaccaccattcatttcaatctgacttttcaaaacactaatgatgaggagttcaaaatgcaaatcactgtcgaggtggataccagagaaggcccaaagttgaactcaaccgcacaaaagggatacgaaaacctggtgagcccaatcaccttgcttcctgaagcagaaattctcttcgaagatattcctaaggagaagagatttcctaagtttaagagacatgacgtcaactcgaccagaagagcccaagaggaagtgaaaattcctttggtgaacatttccctccttccgaaggatgctcaacttagcctcaacacccttgatcttcaacttgaacatggtgatattacccttaagggatacaacctgtcgaagagcgcacttctgcgctcgttcttgatgaacagccaacatgcaaagatcaaaaatcaagcaatcattactgatgagacgaacgattccctggtggcgcctcaagaaaagcaggtgcacaaatccattctcccaaactccctgggcgtgtcagagcgacttcaaagactcacgtttcctgcagtgtccgtgaaagtgaacggacatgaccaaggacagaatcccccactcgatctggaaactaccgcgagattccgggtggaaactcacactcagaaaaccatcggcggtaacgtcactaaagaaaaaccgccatcgctgattgtccccctggaatcgcagatgaccaaggaaaagaaaatcactggaaaggagaaggaaaactcacgcatggaggaaaacgctgaaaaccatattggcgtgactgaagtgctgctgggccgcaaactgcagcattacactgatagctaccttggatttctgccttgggagaagaagaagtactttcaggatctccttgatgaagaggaatcgctcaagacgcagctcgcttactttaccgactcaaaaaacaccggccgacagctgaaggacaccttcgcagatagccttcggtacgtgaataagattctgaattcgaagtttggatttaccagccgcaaggtcccagcacatatgccccacatgattgaccggattgtgatgcaggaactgcaagacatgtttccagaagaatttgataagacctcattccacaaggtccggcattcagaggacatgcaatttgcattttcgtacttctactacctgatgtcggcggtgcagcctttgaatatctcgcaggtgttcgatgaggtggacaccgatcaatcaggcgtcctgtcggatagagaaattcgcactctggcaactaggattcatgagctgcctctgtcattgcaagatcttaccggactcgaacacatgttgatcaattgctccaagatgttgcctgcagatattacccaactcaacaatatcccacctacccaggagtcatactacgaccccaatctccctccagtgaccaagtcgcttgtcactaactgcaagccggtgaccgacaaaattcacaaagcatacaaggataagaataagtaccgcttcgagattatgggtgaagaagagattgcatttaagatgatcaggactaacgtcagccatgtggtgggacaacttgacgacataagaaagaaccctcgcaagttcgtctgccttaacgataacattgatcataaccataaagacgcacagactgtcaaggcggtgctccgcgacttttacgagagcatgttccctattccttctcaatttgaactgccaagagaataccggaaccggtttctccatatgcatgagcttcaagaatggagagcataccgagataaactcaaattctggacccattgtgtccttgcaaccctgatcatgtttactattttctcattcttcgccgaacaactgattgcgcttaaacggaagattttcccacgcagacgaatccacaaggaggcctcccccaaccgtattagggtg

SEQ ID NO: 214964 - DNA, 3768 bp, Artificial Sequence
  derived and/or modified sequence
atgctgtttaaacttctgcaaaggcaaacttacacctgtctttcccatcgctacggtctttacgtgtgttttctgggggtggttgtcaccattgtctcggcatttcagttcggagaagtcgtgctggagtggtcgagagatcagtaccacgtgctttttgatagctaccgcgataacatagcaggaaaatcttttcaaaaccgtttgtgtctgcctatgcctattgatgtcgtgtacacctgggtgaacggaacggatcttgagctgctgaaggaactgcagcaggtgcgagagcaaatggaggaagagcaaaaggcaatgagggaaatactgggtaagaacaccactgagccaaccaagaagtccgagaagcagctcgagtgtctgctgacgcactgcataaaagtccccatgctcgtgctggacccagcactgccagcgaatatcaccctgaaggacctgccttcgctttacccgtctttccactcggcaagcgacattttcaatgtggcaaagcctaagaacccgagcactaacgtgagtgtcgtcgtctttgactcgacgaaggatgtggaggatgcccattccggtctgcttaagggcaacagccggcaaactgtgtggcgtggctacctcacgactgataaggaagtgcctggactggtgttgatgcaggatctggcatttctgtcaggattcccacctacttttaaggaaactaaccagctgaaaactaagctcccagagaacctcagctcaaaggtgaagctccttcaactttacagtgaagcgtcggtggcactgctgaagctgaacaaccctaaagattttcaagagcttaacaagcaaaccaagaaaaacatgaccattgatggtaaagaactgaccatatcacctgcttacttgctttgggatctgtccgcaataagccaatcaaagcaagacgaagatatctcagcatcgagatttgaggataacgaagaactccgatactcactgcgctctatagaaaggcatgccccttgggtcagaaacatattcattgttaccaatggacaaattccttcatggctcaacctggacaacccacgagtcactatcgtgactcatcaagatgtctttcgcaatttgtcccacttgccaactttctcgtcgccagccatagaaagccatattcatcgaattgaagggctgtcacagaaattcatatacctgaacgatgatgtgatgttcgggaaagatgtgtggccagacgacttttactcacactcgaagggccaaaaggtgtatctgacttggcctgtgcctaactgtgcagaaggttgtcccggctcgtggattaaggatggttactgtgataaggcctgtaacaattcagcatgtgattgggatggaggcgactgcagcgggaactccggtggatcgcggtacatcgcaggagggggtggtactggatcaatcggtgtcggtcaaccatggcaattcggcggaggcattaactcagtgtcgtactgtaaccagggatgtgccaactcctggctggcagataagttttgtgatcaagcatgtaatgtgctttcgtgtggatttgatgcaggagactgtggtcaagaccactttcatgaactgtacaaagtgatactgctgcctaaccagacccattacattatccccaagggtgagtgtctcccatacttttccttcgcggaagtggcaaaaaggggagtggaaggtgcttattccgacaatccgatcattagacatgcgtccatagcgaataagtggaaaactatccatcttatcatgcatagcggaatgaatgccaccaccattcatttcaatctcacctttcaaaacaccaacgacgaagagttcaagatgcagattaccgtggaagtggatactagagaagggcctaagctcaactccaccgcacagaaggggtacgaaaacctggtgagcccaattactttgctgccagaagcagaaattctctttgaagatatcccgaaagaaaagcgcttccctaagttcaagcggcatgacgtcaactccacccgacgcgcacaggaagaagtgaagataccccttgtgaacatatcactgttgccaaaagatgcacagctttcacttaacacccttgatctgcaacttgaacatggtgatatcacgctgaaaggctacaacctgtcgaagtccgcacttcttagatcgtttcttatgaattcgcaacatgccaagattaagaatcaggcaatcattactgacgagactaacgacagcctggtcgctcctcaagagaagcaagtgcacaaatccattctgcccaactccctgggagtcagcgaacggttgcagagactgacctttccagcggtcagtgtgaaggtgaacggccatgatcaggggcaaaatcctccactggatctggaaaccactgcgagatttagagtggaaactcacactcagaaaaccatcggaggcaatgttaccaaggagaagccaccatctcttattgtgccccttgaatcccaaatgactaaagagaaaaagatcaccggtaaggaaaaagagaacagcagaatggaagaaaacgcggaaaatcatatcggcgtcacggaggtgctccttggtaggaagctccaacattacactgattcgtatcttggattccttccatgggagaaaaagaagtattttcaagatcttctcgatgaggaagaatcgctcaagacgcagttggcatacttcaccgactcgaagaacaccggcagacaactgaaggatacttttgccgactccctcaggtacgtgaataagatcttgaattcgaagtttggatttacctcaagaaaggtgccggctcatatgccacatatgattgatagaatcgtcatgcaggaactgcaagatatgtttcccgaggaatttgataagacttcattccataaagtcagacacagcgaagatatgcagttcgcattttcatacttttactacctcatgtcagcagtgcaaccactgaatatcagtcaagtctttgacgaagtcgacaccgaccaatcgggagtgctcagcgaccgggaaattcgtaccctggccactcgcattcacgaactgccactttcgttgcaagatttgactggcctggagcacatgctgattaactgctcgaaaatgcttccagccgatattacccaactgaataacattccaccaacccaggagtcttactacgacccaaacctgccgcctgtgacgaagtccctcgtcaccaactgcaagccggtgactgataagatccataaggcctacaaggataagaacaagtacagattcgagattatgggtgaagaagaaattgctttcaaaatgatccggaccaacgtctcgcatgtggtcggacagctggatgatatacgaaagaacccccgcaagtttgtgtgcctgaatgacaacatcgaccataaccacaaggatgcacagactgtgaaagcagtcctgcgagacttttacgaatccatgtttcctattccttcgcagtttgaacttcctcgggaataccgcaaccgctttctgcatatgcacgaacttcaagaatggcgcgcctacagagacaagttgaaattctggacccactgcgtgcttgcgacccttatcatgtttaccatcttctccttttttgcagagcagctgatcgcactcaagcgtaagatatttcctcggcgacgcatccacaaggaggcatcaccgaacagaatccgcgtc

SEQ ID NO: 214965 - DNA, 3768 bp, Artificial Sequence
  derived and/or modified sequence
atgcttttcaagttgcttcagagacaaacctacacctgcctgtcgcatcggtatggattgtacgtgtgttttctcggggtcgtcgtgaccattgtctctgcttttcagtttggtgaggtggtgctggagtggtcccgagatcaataccatgtgctttttgattcctatagagacaacatcgcaggcaagagttttcaaaaccgtctttgcttgcctatgcccatagatgtggtgtacacttgggtgaacggtactgaccttgaactgcttaaggagctccaacaggtccgggagcagatggaagaggagcagaaggcgatgagagaaattcttggtaagaatactaccgaacctactaagaagtcggaaaagcaactcgagtgtctccttacccattgtatcaaggttccaatgttggtgcttgaccctgccctcccagcgaatatcaccctgaaagatttgccatcgctgtacccctcgtttcatagcgcatcggacattttcaacgtggcaaaaccaaagaacccttcgactaacgtgtccgtggtggtatttgactcgaccaaagacgtcgaggacgcacactccggacttctcaagggtaactccagacagaccgtgtggagaggatatctgacgaccgataaagaagtcccaggcttggtactcatgcaggatcttgctttcctgagcggcttcccacctacttttaaggaaactaatcagctgaaaactaagttgcctgaaaacctcagctcaaaggtgaaacttctgcaactgtactccgaagcgtcagtcgcactcctcaagctgaacaacccaaaggattttcaagaactgaataaacaaaccaagaagaatatgaccatagatggtaaagagcttaccatctcacctgcttacctgctgtgggatctgtctgctatctcacaatcgaaacaggatgaagatatttcggcatcaagattcgaagataacgaagaactccgatacagccttaggtcaatagaaagacatgcaccctgggtcaggaacatctttattgtgaccaacggccagataccttcatggcttaatctggataatccgagagttactattgtcacccaccaggatgtctttcgcaacctgagccatctgccgaccttcagctccccagccatagaaagccacatccatcgaatcgagggactcagccaaaagttcatatacctcaatgatgatgtgatgtttggcaaggacgtctggcctgacgacttttactcgcattctaaagggcaaaaagtgtacttgacttggcccgtgcccaactgcgcagagggatgccctgggagttggattaaggatggatactgtgacaaagcatgtaacaactcagcatgtgattgggatggaggagattgttcgggaaactccgggggttcccggtacattgctgggggaggcggaaccggttcgatcggagtgggacaaccctggcaattcggaggcggaattaactccgtctcatactgtaaccagggttgtgcaaattcgtggctggctgacaagttctgtgatcaggcctgtaacgtgctgtcttgtgggtttgacgcaggcgattgcggccaggatcattttcacgaactgtacaaggttatactccttccaaaccaaactcattacattattcccaagggggaatgccttccttacttctcatttgctgaggttgcaaagcgcggcgttgaaggggcatactcagataatcccattatacggcatgcgtcgatagcaaacaaatggaaaaccatccatcttatcatgcatagcggaatgaatgccactacgattcatttcaatctgacttttcaaaacactaacgacgaagagttcaaaatgcagatcacggtggaggtggatacccgagaagggcccaaactgaattccactgcacaaaagggctatgaaaatcttgtgagccctattaccctcttgcccgaggccgaaattctgtttgaggacatcccaaaagaaaagcgcttcccaaaattcaagcgccatgatgtaaattcgaccagacgggcacaggaagaggtcaagatacctctggtgaacatcagcctgcttcctaaagatgcccagctctccctcaacacgctggacctgcagctggaacacggagatatcactcttaagggttacaacctttcaaagtcggccctgcttagatcgttcctcatgaactcacagcatgccaagattaagaaccaagccattatcaccgatgaaaccaatgacagcctcgtggcgccccaggagaagcaagtccacaaatcgattcttccaaactccttgggagtgtctgaaaggcttcagcggctcactttccctgccgtgagtgtgaaggtgaacggtcatgaccagggccagaaccctccactggatctggaaactaccgcccgattcagggtggagactcatactcaaaagactataggtggtaacgtgaccaaggagaagcctccatcccttattgtccctctggaatcccagatgacgaaagaaaagaagatcactggaaaagagaaggaaaactcgcgcatggaggaaaatgcagagaaccacattggagtgactgaggtgttgttgggcagaaaactgcaacactacacggattcctacttgggatttttgccttgggagaagaagaagtactttcaggacctcctcgatgaggaagagagccttaagacccagctggcgtactttactgactccaagaataccggaaggcaactgaaggatacctttgcagactcgctgagatacgtgaataagatccttaatagtaagttcgggtttactagccgtaaggtgccagcgcacatgccacacatgattgatcgaattgtcatgcaagagcttcaagatatgtttccagaagaattcgacaaaacgtcgtttcataaggtcaggcatagcgaagatatgcaatttgcattttcctacttttactaccttatgagcgcggtgcaacctctcaacattagtcaggtgtttgatgaagtcgacaccgaccagtcgggtgtcctctctgatagggaaataagaaccctggccacgcgaatccacgaacttcctctgtcgctgcaagatctgaccggcctcgaacatatgctcatcaattgctccaagatgcttcctgcagacatcacgcaactgaacaacatccccccgactcaagaatcatactacgatccaaatcttccccctgtcaccaagtcactggtgaccaactgcaagcctgttaccgataagattcacaaagcgtacaaggacaaaaacaaataccggttcgagattatgggagaagaggaaattgcctttaagatgatccggactaatgtgtcccatgtggtgggccaattggacgacatccggaagaatcccagaaagtttgtttgtcttaacgataacattgatcataaccacaaggacgcacagaccgtgaaagccgtcttgcgcgacttctatgaatcgatgttcccaatcccttcgcaatttgagcttccaagagaataccgcaaccggtttctgcacatgcacgaacttcaagaatggcgagcatacagagataagctcaagttctggacgcactgtgttctggcaactctgatcatgtttactatcttttcctttttcgccgaacaactgattgcacttaagaggaagatctttccacgtcggcgtattcataaggaagctagcccgaatcggatacgcgtg

SEQ ID NO: 214966 - DNA, 3768 bp, Artificial Sequence
  derived and/or modified sequence
atgctcttcaaactgctgcagcggcagacgtacacatgtctgtcccaccgatatggtctgtacgtgtgctttctgggagtggttgtcacaattgtgtctgccttccagttcggggaagtcgtgctggaatggtcccgggatcagtaccatgtgctctttgactcttaccgggacaatatcgcagggaagtccttccaaaacaggctctgcctgcctatgcccatcgatgtcgtttacacctgggtgaacggcaccgacctggagctcctgaaagaattgcagcaggtgagggaacaaatggaggaagagcagaaggcgatgagagagattctggggaagaacaccacagaaccaacaaaaaagtccgaaaaacagctggaatgtcttctcacccactgcataaaagtcccaatgctcgtcctggaccccgcgctgccagccaacatcacgctcaaggatttgccctctctgtacccctccttccattccgcaagcgacatctttaacgtggctaaaccaaagaatccctccactaacgtgagtgtggttgtcttcgactctacaaaggatgttgaggacgcccactctggcctccttaaaggcaattcgcgccagaccgtgtggaggggataccttaccaccgataaggaggtcccggggctcgtgctaatgcaggatctggcatttctgtcaggattccctcctacattcaaggagacgaaccagctgaaaacgaagctgccggagaatctgtcctctaaggttaaattgctccaactttactctgaagccagcgtggctctgttgaagctcaataaccccaaggacttccaggaactcaacaagcaaaccaagaagaacatgactatcgatggcaaggagctgacaatcagcccagcttatcttctgtgggaccttagcgccattagccagtccaaacaggacgaagatatttcagcgtcccggtttgaggataacgaagagctccggtacagcctacggagcatcgagagacatgccccatgggtgaggaacatcttcatcgtaaccaacggccagattccctcctggttgaatttagataatcccagggtcacgatagtcacccaccaggatgtgttccgaaatctgagtcacctccctacttttagttcccctgctatcgaaagccacatccaccggattgaaggtctatctcaaaagttcatatacctaaatgatgacgtcatgtttggtaaagacgtgtggcccgacgatttctactctcacagtaaaggccaaaaagtctacttaacctggcccgttcctaactgcgccgaaggctgcccagggagctggatcaaggatggctactgcgataaggcctgcaataacagtgcctgcgattgggacggcggggactgtagtggaaactctggtgggtcccgctacatcgcagggggtggcggcactgggagcatcggagttgggcaaccatggcagttcggcggcggaataaacagtgtctcgtattgcaaccaagggtgcgccaatagttggctggcagataagttttgtgatcaggcgtgcaatgtcttaagctgcgggttcgatgccggggactgcgggcaggaccacttccatgaactgtataaggtcatcttgctgcctaatcagacgcactacataatcccaaaaggggaatgtctgccttacttttccttcgcggaggtagcaaaacgtggagtggaaggcgcatacagcgataaccctatcatccgccacgccagtattgcaaataagtggaagaccatccacctcataatgcatagtgggatgaacgcaaccacaatccacttcaacctgaccttccagaacaccaacgacgaggaattcaagatgcagatcactgtggaagtcgatacacgcgagggacccaaactcaactccactgcccagaagggttacgaaaacctggtatctcctataactttgctgccagaagccgagattttgttcgaggacatccccaaggaaaagaggtttcccaagtttaaacgtcacgatgtgaatagcacgagaagggcccaggaggaggtgaagattcccttggtcaacatttcacttttacctaaagatgcgcagctgagcctcaacacattggaccttcaactcgaacatggggacattactctgaagggctacaatctttccaagagcgccctactgcgcagctttctgatgaatagccagcatgcgaagatcaagaatcaagccataatcacagatgaaaccaacgactccctagtcgctcctcaggaaaagcaggtgcataagagtatattgccaaatagcctcggagtgagtgagaggcttcagaggttaaccttccccgccgtgtctgttaaggtcaacggtcatgatcaggggcagaatccaccactggacctggagactacagcgaggtttcgcgttgagactcacacccagaagaccatcgggggaaatgtgactaaagagaagcctccctccctgatcgtcccccttgagagccagatgacgaaagagaaaaaaatcactgggaaggagaaagaaaacagtcggatggaggagaatgcagagaaccacattggcgtgaccgaggtgctgctgggccggaagctgcagcactataccgactcttacttggggtttctcccatgggaaaagaagaaatacttccaggatcttctggacgaggaagaatcattgaagacccaacttgcatactttactgattctaaaaacacagggcgacagttgaaggacacttttgctgacagtctgcgctatgtcaacaagatactgaactcaaagtttggcttcaccagccggaaggtgcccgcccatatgcctcacatgatcgacaggatcgtgatgcaggaactacaagatatgtttccagaggagttcgacaagaccagctttcacaaggtccggcacagcgaggatatgcaattcgcattctcttacttttattatttaatgagtgctgtccagcccctcaatatcagccaagtcttcgacgaggtcgataccgatcaatctggcgttttgtcggatcgggaaattagaactctcgcgacaagaatccatgagctaccactgagtttacaggatttaactggactagagcatatgctcatcaattgcagtaagatgctccccgcagatattacccaactcaataacatccctcctacacaggagtcctactatgatcctaacttgccgcctgtcacaaagagcctggtgaccaactgtaaacccgtgacggataagatccacaaagcctacaaggataagaataagtatcgctttgaaattatgggcgaggaggaaatagccttcaagatgattcggactaatgtcagccatgtggtcggccagctggacgacataaggaaaaatccccgcaaatttgtgtgcctcaatgataatatcgaccacaatcacaaagacgcccagactgtgaaagcagtcctgagagatttctatgagtccatgtttcccatcccatcccagtttgaactgcctagggaatataggaacagattcctccatatgcacgaattgcaggagtggagagcttatagggataagctcaaattttggactcactgcgtcctagctaccctgatcatgtttacgatcttctccttcttcgcagaacaactgatcgcactcaaaagaaagatttttccgaggaggagaatacacaaggaggcctcccccaatcgcattcgggtg

SEQ ID NO: 214967 - DNA, 3768 bp, Artificial Sequence
  derived and/or modified sequence
atgctgttcaagctgcttcagcggcagacctacacctgcctttcgcatcgctacgggctctacgtgtgctttctgggagtcgtcgtcactatcgtttccgcgttccaatttggcgaagtcgtgctggagtggtcccgggatcagtaccacgttctcttcgactcgtatagagacaacatcgccggaaagtcatttcagaaccgcttgtgccttcccatgcctatcgatgtcgtgtacacctgggtgaacggaactgatctggaactgctcaaggaactgcaacaggtgcgcgagcagatggaagaggagcaaaaggctatgcgcgaaatcctcggcaagaatacgaccgaacccaccaagaaatccgaaaagcaacttgaatgcctcctgacccattgcatcaaagtcccgatgctggtgctggaccctgcactgccagccaatatcaccctcaaagatctgccatcgctgtacccgtccttccacagcgcctcggatatcttcaacgtggcgaagccgaagaacccgagcactaacgtttcagttgtcgttttcgatagtactaaagacgtggaggacgctcactctggactgctcaagggcaattcaagacagaccgtgtggagaggatacctcaccaccgacaaggaagtccctggcctggtgctcatgcaggacctcgccttcttgtcgggattccctcccacgttcaaagaaaccaatcagctgaaaactaagttgccggaaaatctgtcctcgaaggtcaagctgttgcagctttacagcgaagcgtccgtggcgctcctgaagctgaataaccctaaggattttcaggagctcaacaagcagaccaaaaagaacatgaccattgacggaaaagagctgactatctcccccgcatacctgctctgggacctctcagcaatctcgcaatcaaagcaagacgaagatatcagcgcctcgcgctttgaggacaatgaggagctgagatactccctccggagcatcgaacgccatgccccatgggtgaggaacatcttcatcgtgactaatggacagattccgagctggcttaatcttgataatccgcgcgttacgatcgtgactcatcaggatgtctttcgcaatctgtcccacctgccgaccttctcgtccccggctatcgagtcccatatccaccgaatcgagggcctgtcacaaaagttcatctacctgaatgatgatgtgatgtttggtaaggacgtgtggccggatgatttctactctcactcaaagggccagaaggtgtacctgacctggccagtgccgaactgcgccgagggatgcccgggtagctggatcaaggacggatactgcgataaggcgtgcaacaattcggcctgcgactgggacggaggggactgctccgggaattcaggtggttcccggtacatagctggaggtggcgggaccggatcaatcggggtcggccagccttggcaatttgggggtggcattaactcggtgtcatactgtaaccagggctgtgccaatagctggttggctgacaagttttgcgaccaagcatgcaacgtgctcagctgcggattcgacgcgggagactgcggacaggaccactttcacgagctgtacaaagtgatcctgcttccgaaccaaacgcactacatcatcccaaagggagaatgcctgccgtacttctcattcgccgaagtggcaaagcggggggtcgagggcgcctacagcgacaatccgattatccgccatgcctcaatcgctaacaaatggaaaaccatccatctgattatgcatagcgggatgaatgcaactaccatccactttaacctgacgttccaaaataccaatgacgaggaattcaaaatgcagatcactgtcgaggtggacacgcgggaaggacctaagctgaattccaccgctcagaaggggtacgaaaaccttgtctcgccaatcaccctgctcccggaggcagagattctgttcgaagatattccgaaggaaaaaaggttcccgaaattcaagcggcacgatgtcaattcaactagaagagcacaagaggaagtcaaaatcccattggtcaacatctcgctgctcccaaaagacgcacagctgtcgctgaacactctggatcttcagctcgagcatggagacatcaccttgaagggatacaacctgtcgaaatcggctctgctgagatctttcctgatgaattcccaacacgcgaaaatcaagaaccaggcaatcattactgacgaaaccaacgactcgcttgttgccccgcaagaaaagcaagtgcacaagtccatcttgccgaactcgctcggcgtctcggagcgcctgcaacggctgactttcccggccgtgtccgtgaaggtgaacggacatgaccaggggcagaatccgcctctggacctcgagactaccgcccgcttccgcgtggagactcacactcaaaagaccatcggtggaaacgtgaccaaggagaaacctccttcgctcatcgtgcccctcgaaagccaaatgactaaggagaagaagataactggaaaggagaaagaaaattctcggatggaggaaaacgcggaaaaccatatcggagtgacggaagtgctgctcggaagaaagctgcagcactacactgactcgtacctgggattcctgccgtgggagaaaaagaagtactttcaggacctcctcgatgaagaagaatcgctcaagactcaactggcatactttaccgactcaaaaaacactggccgccagcttaaagacactttcgcggactccctgcggtacgtgaacaaaatcctcaactcaaagttcggcttcacctccaggaaagtgccggcacacatgcctcacatgatcgaccgcatcgtgatgcaggaactccaagatatgttcccggaagagtttgataagacttcgttccataaggtgcgccattcggaggatatgcaattcgctttctcgtacttctactacttgatgtctgccgtgcagccgctcaatatctcccaggtgtttgatgaagtggatactgatcagtcgggcgtgttgtcggaccgggaaatccggactctggccaccagaatccacgagctgccgctgtcgttgcaggacctcacggggctggaacacatgttgatcaactgctcaaagatgctgccagccgacatcacccaactgaacaatatccccccgacccaagaatcgtactacgaccctaacttgccaccggtgaccaagtcccttgtgactaattgcaaaccggtgactgacaagatccacaaggcctacaaggacaagaacaagtaccgcttcgagatcatgggggaagaggagatcgcgtttaagatgattcggaccaacgtctcacatgtggtgggacagctcgacgatatcaggaagaatccacgcaaatttgtgtgcctgaacgacaacatcgaccacaaccataaggatgcccagaccgtgaaggccgtcttgcgggacttttatgaatcgatgttcccgattccctcgcaattcgaactccccagggaataccgaaataggttcttgcatatgcatgagctgcaagaatggagggcctaccgtgacaaactgaaattctggactcactgcgtgctggcaaccctgatcatgttcaccatctttagctttttcgcagagcaactgatcgcgctcaagcgcaagatcttcccgcggcgtcgcatccacaaggaagctagccccaatcgcattcgcgtc

SEQ ID NO: 214968 - DNA, 3768 bp, Artificial Sequence
  derived and/or modified sequence
atgttgttcaagctgctccagcgccaaacctacacttgcctctcccatcggtacggactctacgtgtgtttcctcggggtggtggtgactatcgtgtcggctttccaattcggggaggtcgtgctggaatggtcgcgggaccagtaccatgtgctctttgactcgtaccgcgacaacatcgccggaaagtcattccagaatcggctctgcctgccgatgccgatcgacgtggtctacacttgggtgaacgggaccgatctggagttgctgaaggagctgcagcaagtgcgcgaacagatggaagaagagcagaaggccatgcgggaaatcctgggtaaaaacacgaccgaaccgaccaaaaagagcgaaaaacaattggagtgcctgctgactcactgtatcaaagtgcctatgctggtgctggacccggcgctgccagctaacatcactctcaaagatctcccctcactgtatccttcgttccattcagcgtcagacatctttaatgtggcgaaaccaaagaacccatccacgaacgtctccgttgtcgtgttcgactccaccaaagatgtcgaagatgctcattccggactcctgaagggaaactcgcgccagacggtttggagaggatacctgaccactgacaaagaggtcccgggtctggtgttgatgcaagaccttgccttcctgtccggatttccaccaactttcaaggaaaccaatcagcttaagaccaagctgcccgaaaatctgtcaagcaaggtgaaactcctgcagctttactcagaagcgtcggtcgcgctgctgaagttgaacaacccgaaggatttccaggaactgaacaaacagacgaagaaaaacatgactatcgatggaaaggaactgaccatttccccggcgtacctgctctgggatctgtcagcgatctcacagagcaagcaggacgaggacattagcgcctcgagatttgaagataacgaggaactgcgctactcgttgcggtccatcgaacggcatgccccttgggtgcgcaacatcttcatcgtgactaatgggcaaatcccgtcgtggcttaatctggacaatcctcgggtgaccatcgtgactcaccaggacgtctttaggaatctgagccacctccctaccttctcctcgccagctattgaaagccatatccaccggatcgaaggactctcgcagaagttcatttacttgaatgacgacgtcatgttcggaaaggatgtctggccggacgatttctactcccactcgaaaggacagaaggtgtacctcacctggcctgtgccgaactgcgccgagggctgtcctggatcatggatcaaggacggttactgtgacaaagcctgcaacaactcggcctgtgattgggacggtggagactgctccggcaactcgggtggatcccggtacatcgcgggaggcggagggaccgggagcatcggggtcggacagccgtggcagttcgggggcggcatcaactcggtgtcgtactgcaaccaaggctgcgctaacagctggctggcagacaaattctgcgaccaagcatgcaatgtgctgtcctgcggcttcgatgccggagattgcggccaagaccatttccatgaactctacaaggtgatcctgttgccgaaccagactcattacatcatcccgaagggggaatgtctgccatacttctctttcgcggaagtcgcaaagcgcggggtggaaggagcgtactccgacaacccaatcatccgccatgccagcattgccaataagtggaaaaccattcacctcattatgcattcgggaatgaatgcgactaccatccacttcaacctgacttttcagaacaccaacgatgaagaattcaagatgcagatcactgtggaagtggacaccagagaaggtccgaaactgaactcgaccgctcagaaggggtacgagaacttggtaagccctatcacgttgctcccagaagccgaaatcctgtttgaggatatcccgaaagagaagcggttcccgaaattcaaacggcatgatgtcaactcaactcggagagcacaagaagaagtcaagatcccactggtcaatatctcactgctgccgaaggacgcgcagctctcgctgaacactctcgacctccaactcgagcacggagatatcaccctcaagggatacaacttgtcgaagtcggccttgctcagatcgttcttgatgaattcgcagcacgccaagatcaagaaccaagcaatcatcaccgatgaaaccaacgactcgctggtcgcgcctcaggagaagcaggttcataagtcgatcctgcctaacagcctgggtgtctccgaaaggctgcagaggctgacttttccagcagttagcgtgaaggtgaacggacacgaccagggacaaaaccctcctctcgatttggaaactactgccagattccgcgtagaaacccatactcaaaagaccatcggcggaaatgtgactaaagaaaaacccccatcactcatcgtgcccctcgaatcgcagatgactaaggaaaagaagatcactgggaaggagaaagagaattcacgcatggaggagaatgcagagaaccacatcggcgtgactgaggtgttgctgggacggaagctccagcattacaccgactcgtacctcgggttcctcccatgggaaaagaagaagtacttccaggatctgctggatgaagaggaatcgctgaaaacccaactggcctacttcaccgacagcaagaatacgggccggcagctgaaggacaccttcgccgactccctccgttacgtcaacaagatcctgaattcgaagtttgggttcacttcacgcaaggtccctgctcatatgccgcacatgatcgacaggatcgtcatgcaagagcttcaggacatgtttccagaagagttcgataagacttcgttccacaaagtgagacactcagaggatatgcagtttgccttctcgtacttctactacctgatgtctgcagttcagcctctgaatatctcacaggtgttcgacgaagtcgacaccgatcagtcaggagtcctgtcggaccgggagatcagaacgctggcgaccaggatccatgagctgccactgagtctccaggacctgaccggcctggaacacatgctgattaactgcagcaaaatgcttccagccgacataactcaactgaacaacatcccgccgacgcaggagtcatactacgatccgaatcttccgccggtgactaagtcgcttgtgaccaattgcaagcctgtcactgacaaaattcacaaagcctacaaggacaagaataagtatcggttcgaaatcatgggcgaagaggagatcgcgttcaagatgatcaggaccaacgtgtcgcacgtggtggggcagctcgatgatatccggaagaatcctcgcaaatttgtgtgtctgaacgacaacattgaccacaatcataaagacgcccagaccgtgaaggctgtgctgagagacttctacgagtcgatgtttcctatccctagccagttcgagctgccgcgggaataccgaaaccgcttcctgcacatgcatgaactccaggagtggagagcgtaccgggacaaactgaagttctggactcactgcgtgttggccactctcatcatgtttaccattttctcgttcttcgccgagcagcttatcgctctcaaacgcaagattttcccacggcgcaggatccacaaggaggcatccccgaaccgtatcagggtg

SEQ ID NO: 214969 - DNA, 3768 bp, Artificial Sequence
  derived and/or modified sequence
atgctgttcaagttactgcagaggcagacgtacacctgcctgagccacaggtacggcttatacgtttgcttcctgggtgtggtcgttactatcgtgtctgcctttcagttcggcgaagtcgttcttgaatggtcaagagatcaataccatgtcctgttcgatagttacagggacaacatagccggtaaatccttccagaatcgcctgtgcctgcctatgccaattgatgttgtgtatacttgggtcaacgggactgacctggaactcttaaaggaacttcaacaagtgcgcgaacaaatggaagaagaacagaaagcaatgcgcgaaattcttggcaagaatactacagaacctactaagaagagcgaaaagcaacttgagtgcctgttaacccattgtattaaggttccgatgctggtcctggaccctgcgctccctgcaaacataaccctgaaggatttgcctagcctgtatccaagcttccacagcgcgagcgatatttttaacgttgccaaaccaaagaacccatcaacgaatgttagcgtcgtcgtttttgattcaacgaaggacgtcgaggacgcccactcaggactgctgaagggcaatagccgccaaactgtctggcgtggctatcttacgaccgacaaggaggtaccgggtttggttcttatgcaggatctggcttttctgtctgggttcccacctaccttcaaggaaactaatcagctgaagactaagctgcctgaaaacctgtctagtaaagtcaagctgctgcagctctatagcgaggcttctgtcgccctgttgaaactgaataatccaaaagattttcaagagttgaataagcaaacgaagaagaacatgacaattgacggcaaggagctgaccataagcccggcctatctcttgtgggatctgtccgctatcagtcaatcaaagcaagacgaagatatcagcgccagtcgctttgaggataacgaagaactccgctacagcctgcgcagcatcgagcgccatgctccgtgggtgagaaacatctttatcgtcaccaacggccaaattccttcctggctgaacctggacaatcctcgcgttactatcgtgacccaccaggatgtttttcgtaatctgtcgcatctgcctactttttcgagccccgccattgaatctcatatccaccgcatcgagggtttaagccagaaatttatctatctgaacgacgatgtgatgttcggcaaagacgtgtggccagacgatttctacagtcacagcaaagggcagaaggtttacctgacctggcctgttccgaactgcgccgaaggttgcccgggtagctggatcaaggatggatactgcgataaggcctgcaacaatagcgcctgcgactgggacggaggtgactgttctggaaacagcggcggttcccgctatatcgcaggcggcggcggcacaggaagcatcggcgtgggccaaccttggcagtttggtgggggtataaattccgtttcttattgtaaccaggggtgcgcaaactcttggctggcagacaaattttgtgatcaggcctgcaatgttctcagctgtggcttcgacgcgggggactgtggccaagatcattttcatgagctatacaaagttattctgttgcccaatcaaacccactacatcatccctaaaggcgaatgcttaccttactttagttttgctgaggtcgcaaaacgaggtgtcgagggcgcgtattcggacaaccctattattagacatgccagcatagccaataaatggaaaacgatccatctgatcatgcatagcggtatgaacgcgacgaccatccacttcaatctaacctttcaaaacaccaatgacgaagaattcaagatgcagattacagttgaggtcgatacccgggaaggtccgaagctcaatagcaccgcgcaaaaaggctacgagaatctggtctcaccgattacgctgctgccagaagccgaaattctctttgaagatatcccaaaggagaaacggttcccgaagttcaaaaggcacgacgtcaacagcacccgccgcgcccaggaagaagttaaaatcccgctggtgaacatatctttgctgcctaaagatgcgcagcttagcctgaacactcttgacttacaactcgagcacggagacattacgctcaaaggctacaatttaagcaagtctgcgttgctgcgcagctttctgatgaacagccagcacgcgaaaatcaagaaccaagcgatcataaccgatgaaaccaacgattcccttgttgcacctcaggagaagcaggtgcacaagagcatcctgcctaactctctgggcgtctccgagcgtctgcagcgcctgacatttccagcggtttccgtcaaagttaacggtcacgatcagggccagaatccacccctggatctggagaccaccgctcgctttcgagttgagactcatacccaaaagaccattggaggcaacgtgacaaaggagaagcctccgagtttaatcgtccctctggaaagccagatgactaaggagaagaagatcactggcaaagaaaaggaaaatagcagaatggaggaaaatgccgagaaccacatcggcgttacggaagttctgttgggtcgcaagctgcagcactatacagattcctatctgggcttccttccatgggaaaaaaagaaatacttccaagatctgctggacgaggaagaatcgctgaaaacacagctggcatacttcaccgatagtaagaatacgggccgccagctcaaggataccttcgccgatagccttcggtatgttaacaaaatcttgaacagcaaatttggctttaccagccgtaaagtccctgcacatatgccacacatgatcgatcggatcgtcatgcaggaactgcaggacatgtttccagaagaattcgacaaaaccagcttccataaggttcgccactccgaagatatgcagttcgctttcagctacttttactacctgatgtcagcagttcagccactcaatatctcgcaggtgtttgatgaagtggacacagaccagagcggtgtgctgtccgaccgagaaattagaaccctggcaacccgtatccatgagttgcctctgagccttcaggacctgacaggtctggagcacatgttgatcaactgcagcaagatgctgcctgcagacattacccagctgaacaatatcccgcctacacaggaatcctactacgatccgaatctgccgcctgttaccaagagcctggtcactaactgtaagcccgtgacggataaaatccacaaggcttacaaggacaaaaacaagtatcgttttgaaatcatgggagaagaggagatcgcgttcaagatgattcgcactaacgtcagccatgtggtgggtcagctcgacgacattcgcaagaatccgcggaaatttgtttgtctgaatgacaatattgaccataaccataaagacgcccagaccgtgaaagcagttctgcgcgatttctacgagagcatgttcccgatcccttcccagtttgagctgccgcgcgaatatcgcaatcgcttcctgcatatgcacgagctgcaggaatggcgagcgtaccgagataagctgaagttctggacccattgtgtgttggccacgctgatcatgtttacgatcttctccttcttcgccgaacaattgatcgctctgaagagaaagattttcccgcgccgtcgtatccacaaggaggcgtctcctaatcgcattagagtg

SEQ ID NO: 214970 - DNA, 3768 bp, Artificial Sequence
  derived and/or modified sequence
atgctgttcaagctcctgcagcgccagacgtatacctgcctgtcacacagatatgggctttacgtgtgtttcctcggagttgtcgtgaccatcgtctctgccttccagtttggggaggttgtgttggagtggagcagggaccaataccacgtcctgtttgacagttatagggataacatcgccgggaagtcgttccagaaccgactgtgtctcccgatgcctattgacgtcgtgtatacttgggtgaatggcaccgacttagagttgctcaaggagttacaacaagttcgtgaacagatggaagaggagcagaaagccatgagggaaatccttggcaagaatacaacggagcctactaaaaagagtgagaagcagctggaatgtctactaacacactgcattaaggtgccgatgctggtgctagacccagcattgcccgccaatataactctgaaagatctgccgtccctttatccaagtttccattctgcatctgacatattcaacgttgcaaaaccgaagaatccctccaccaatgtgtccgtagtggtcttcgacagcaccaaagacgtcgaggatgcacacagtggacttctcaagggcaacagccgccagaccgtgtggcggggctacctgactacggataaagaggtacctgggttagttcttatgcaggacctggcttttctgagtggatttcctcctacctttaaggagacaaatcagctcaagaccaagctgcccgaaaacttgagctcgaaggtcaagttgctgcaactgtactccgaggccagtgttgccctgctgaagctcaacaatcccaaggatttccaagaactgaacaagcagacaaaaaaaaacatgacgatagacggaaaggaactcaccattagcccagcctatcttctgtgggatctgtctgctatatcccaatccaaacaggatgaggacatcagtgcctccagattcgaggataacgaggaactgcggtacagcctgaggtctatcgaaaggcatgccccatgggttcgcaatatcttcatagtcactaatggccagatacctagctggctcaaccttgataaccctcgcgtgactatcgtgacccaccaggatgttttcaggaacctttctcacttgcccacattctcatcacctgcaatagagtcgcacattcacaggatcgaaggtctgagccagaaattcatctatctcaatgacgacgtgatgtttggtaaggatgtgtggccagacgacttttatagccacagcaaaggacagaaggtgtacctgacctggcctgtgcccaattgtgcagagggttgccctgggagctggataaaggatggttattgtgataaagcgtgcaacaattcagcatgcgattgggatgggggtgattgttctggtaactctggaggcagccgttacatcgcgggggggggaggcactggatctattggggtcggtcagccttggcagtttgggggcggaattaacagtgtgtcctattgtaatcaaggctgtgcaaactcctggctggccgacaaattctgtgatcaagcatgcaacgtgctctcttgcggctttgacgccggtgactgcgggcaagatcactttcacgaactgtacaaggtgattctgctgcctaatcagacccattacatcattcccaagggcgagtgccttccttacttttccttcgcagaagtcgccaaaaggggcgtggaaggcgcctattcagacaatcccatcataaggcatgcctcaatagccaacaaatggaagacgatacatctgattatgcacagtgggatgaacgccaccacaatccatttcaaccttacatttcagaacaccaatgacgaggaatttaaaatgcaaataactgtcgaggtcgacacaagagaaggaccgaaacttaattcaactgctcagaagggatatgagaatcttgtaagtccaatcactctgttaccggaggcagagatcctgttcgaggacataccaaaggagaagcgctttcccaaattcaaacgccatgatgttaatagcacacgccgagcacaagaggaagttaagatccctctggtgaacatcagtctgttacctaaagatgcccagctgtcattgaataccttggacctgcaactagaacatggcgacattaccctgaaaggatataatctctcgaaaagcgcactgcttcggtctttcttgatgaatagccagcacgcaaaaatcaagaaccaggcgatcattacggatgaaaccaatgactccctggtagctcctcaagagaagcaggttcataagtcgatcctaccgaacagcctgggcgtgtcagaacggctccaaagactcacctttccggcagtcagcgtgaaggtgaacggccatgaccagggccaaaacccccctctcgacctggagacaaccgccaggtttcgggtggagacccacacacagaaaacgattggaggcaacgttaccaaagagaagccaccatcactgattgtaccattggaatcgcagatgactaaagaaaaaaagatcacgggcaaggagaaggagaacagtaggatggaagagaacgcagagaatcacattggagtgacagaggttctcctggggcgcaagttgcagcactacactgactcttatctcgggtttctgccttgggagaagaagaagtactttcaggatctgttggacgaggaggaaagtctgaagactcagctggcctactttacggactcaaagaacaccgggaggcagcttaaggatacctttgctgatagccttcggtacgtaaataagattctgaattccaagtttggcttcacatcaagaaaggtgcctgcccacatgcctcatatgattgatcgcatcgtcatgcaggagttacaggatatgtttcccgaagagtttgacaagacatccttccacaaggtccgacatagcgaggacatgcagttcgccttttcttatttctattatctcatgagtgccgtccagcccctgaatatctcccaagtctttgatgaagtcgacactgatcagtctggggtcctgagcgatcgagagatacgcaccttggccacccgtatccacgagctgccgctatctcttcaagacctaaccgggctggagcacatgctgatcaactgttcgaaaatgctccccgcagatataactcagttgaataacatccctcccactcaggaatcttactatgacccgaatctcccgccagtgacaaagagtctggtaaccaactgcaaacccgtaactgataaaattcacaaggcctacaaggataaaaataagtaccgatttgagattatgggggaagaagaaattgcatttaaaatgatcaggacgaatgtatctcatgttgtcgggcaactcgacgacattcgaaagaacccccggaaatttgtatgcctgaatgacaatattgaccataaccacaaagacgcacaaaccgtcaaggccgtgctgcgggatttttacgagtctatgtttcccattccaagtcaattcgaactgcctcgtgaatacaggaacaggtttttgcatatgcatgaactacaggagtggcgggcctatagggataagcttaagttttggacccactgcgtcttagccacactgatcatgttcaccatatttagcttctttgcagagcagctaattgcactgaaacggaagattttccctcgacggcggattcacaaagaagcctcccctaacagaatccgcgtt

SEQ ID NO: 214971 - DNA, 3768 bp, Artificial Sequence
  derived and/or modified sequence
atgctctttaagctgctgcagaggcagacatatacttgcctctcacacagatatggtttgtacgtatgcttcttgggcgtggtagttaccatcgtgtcagctttccagttcggggaggtggttctggaatggagcagagatcaataccatgtgctgtttgattcctaccgcgacaatattgccggaaaaagcttccagaatagactgtgtctgccaatgcccatcgatgttgtttatacttgggttaatggaacagatttggaactccttaaggaacttcagcaggtacgagaacagatggaggaggagcagaaggcaatgcgcgagatcctgggtaagaacactaccgagcctactaagaagagtgagaaacaactcgaatgccttctcactcattgtattaaggtacccatgctggtgctggatccagcattgcccgcgaacatcaccctgaaagatctcccttctttgtaccctagcttccatagcgcctctgatatcttcaacgttgcaaagccaaagaatccctcaaccaacgtttcagtggtagttttcgacagtactaaggacgtagaggatgcccactcaggcttgctcaagggaaactccagacaaaccgtttggcggggttatctgacaactgataaagaggtgccggggctggtgctcatgcaagacctggcttttctgtcagggttcccaccaacttttaaggaaaccaaccagcttaagactaaactccccgagaacctgtcttctaaggtgaaactcttgcagctttactcagaagctagcgtagcacttttgaagcttaataaccccaaagacttccaggaactgaacaaacagacaaagaaaaatatgacaatcgacggcaaggaactgactataagtccagcctatcttctctgggatcttagcgctatatctcagagcaagcaagatgaggacatctctgcgtcaaggtttgaggacaacgaggaacttaggtattctctcaggagtattgagcggcacgccccttgggtgcgcaacatcttcatcgtgaccaacggccagataccttcctggctgaaccttgataatcctagagttacgattgtgactcaccaagatgtgtttcggaatctgagtcatcttcctaccttctctagccctgccattgaatcccatatccatcgcattgagggactgtcccaaaagtttatctaccttaacgacgatgtaatgttcggtaaggatgtctggccggatgacttctactctcatagcaagggacagaaagtgtatctgacatggccggtaccaaactgcgctgaggggtgccctggctcctggattaaggacggctattgtgataaagcatgcaacaattctgcttgtgactgggacgggggggattgttcaggtaacagcggtggcagtaggtacattgctggcggtgggggtaccggctccatcggagtcgggcagccatggcaattcggggggggaattaattcagtgagttactgcaaccagggttgtgctaacagctggctggccgataagttttgtgatcaagcctgtaatgtccttagctgtggatttgacgccggcgattgtgggcaggaccattttcacgaactgtataaagtgatcctgctccccaatcagacgcattatatcatccctaaaggggagtgtctgccttatttcagtttcgctgaggtggctaagaggggggtcgagggagcctattcagataatcctatcattcggcatgcatcaatcgcaaacaagtggaaaacaatacacttgattatgcattctggaatgaatgcgaccaccattcatttcaacctgacttttcagaacactaacgacgaggagttcaagatgcagattaccgtagaggttgacacacgcgaaggccctaaattgaactccaccgcacagaaaggctatgaaaatctggtatcacctattacgcttctgccagaggctgaaattctgttcgaagacatccccaaagagaaacgctttccgaagtttaagcggcatgacgtgaatagtacaagaagggctcaggaggaggtgaagatccctctggttaatatctctcttctcccaaaggacgcgcagctgtccttgaacacccttgatctgcaactggagcacggggatatcaccttgaagggatacaaccttagtaaatcagcgctgctgagaagcttcctcatgaatagccaacatgccaaaatcaagaaccaggccattatcactgacgagacaaacgatagccttgtggctccacaagaaaaacaggttcacaaatctatactgcccaacagtctgggagttagcgagaggttgcaaaggctgacgtttccagccgtgtcagtgaaggtcaacggccacgaccagggccagaatccaccacttgatctggaaaccaccgccaggtttcgcgtggaaacccacactcagaagactattggcggaaacgtgacgaaagagaagcctccctccctgatcgtccctctggagtcacaaatgaccaaggagaagaaaattaccggaaaggaaaaggagaactcaagaatggaagaaaatgcggagaaccatataggtgtgaccgaggtgcttctgggccgaaagctccagcattataccgattcctatctggggttcctcccgtgggagaaaaaaaagtactttcaggacctgcttgatgaggaagagagcctcaagacacagctggcttactttacggattctaaaaatactggtagacagctgaaggacaccttcgccgactcattgcgatacgtaaataagatcctgaatagcaagttcggttttacctctcggaaagtaccagcccacatgccacacatgatcgaccgaattgttatgcaagaactgcaagacatgttccccgaggaatttgacaaaaccagcttccacaaggtgcggcactctgaggacatgcagtttgctttttcctatttttattacttgatgagcgcagtacagcccctgaatatcagccaagtcttcgatgaggtggacaccgatcagtccggcgtgctgtctgacagggaaatccggacccttgcaacacgaattcacgaactcccgctgtctctgcaggatctgacaggcttggaacatatgctgatcaactgttccaagatgctccccgccgacataacacaactgaataatatccctcccacacaagaatcttactacgatcctaacctgccacctgtgaccaagagtctggttaccaattgcaagccagtcactgataagatacacaaggcatataaggacaagaataaatacaggttcgaaattatgggagaggaggaaatagcgtttaagatgatacggaccaacgttagccacgtcgtcggccagcttgacgacataagaaagaacccaagaaaatttgtgtgcctcaacgacaatatagaccacaaccataaagatgcccaaactgtgaaggcagtgcttcgcgacttctacgagagcatgtttcccattccgtcacagtttgagctccctcgggagtacaggaataggtttctccatatgcacgagttgcaagagtggcgggcatatagagacaagctgaagttctggactcactgtgtcctggccacgctgattatgtttaccattttcagcttttttgctgagcagctcatcgcactcaagagaaaaatctttccacggcgacgaatccacaaggaggcctcccccaaccggataagggtg

SEQ ID NO: 214972 - DNA, 3768 bp, Artificial Sequence
  derived and/or modified sequence
atgctgtttaaattacttcagaggcaaacgtacacctgcctatcacaccgatacggcctgtacgtctgcttcttgggcgtggtagtcaccattgtgagtgcatttcagtttggtgaggttgttcttgagtggtcacgagaccagtaccatgtactgttcgactcttatagggacaacatagcgggaaagagctttcagaacaggctctgcctccccatgcctatagatgtcgtatatacatgggtcaatggtacagatttagagcttttgaaggaactccagcaagtgcgtgagcaaatggaagaagaacaaaaggcaatgcgtgagattcttgggaaaaacacaacagagcccactaagaagagcgaaaagcagctcgagtgcctgctgactcattgtatcaaggtgcccatgctcgtgctggatccagcactgccagccaacataactctgaaggacctgccctccctttacccctctttccattctgcttcagatattttcaacgtggccaagcccaagaacccaagcactaacgttagtgttgtcgtatttgattcaacaaaagacgtcgaggatgcccattctggtctcctgaaaggaaactcacgacaaaccgtctggcgaggatacctgacgacagacaaggaggtgcccggactggttctcatgcaggaccttgcattcctgtctgggtttcccccgacatttaaagaaaccaaccaactcaagactaaactcccggaaaacctatcctcgaaggtgaagttgctccaactgtattcagaagcctcggtggcactgttgaagcttaataatccaaaggactttcaggagctgaacaagcagaccaaaaaaaacatgacaatcgacgggaaggaacttacgattagtcctgcttacttactgtgggacttaagcgccatctctcaatccaagcaggatgaggacatctccgcctctcgcttcgaggataacgaagaacttcggtattcactccggtcgatcgagaggcatgccccttgggttagaaacattttcattgtgacaaatggacaaattccctcatggctgaacctggacaacccccgggttactattgtgacacaccaagacgtgtttcgcaacctgagtcacttgccgactttcagcagtccggctatagagtcccacatccatcgcattgagggccttagtcaaaagttcatttatttgaacgacgatgtgatgtttggcaaggatgtatggccggacgacttttactctcacagcaagggacagaaagtgtatcttacttggcctgtcccaaactgtgcagaaggctgccccggctcatggataaaggacggttactgtgacaaggcatgtaataactcagcttgcgattgggacggcggcgactgttctggaaactctggcggttctaggtatatcgccggtggcggcgggaccgggagtatcggagttggacagccctggcagttcggtggcggcattaattctgtgtcctactgcaaccagggctgcgctaactcttggctggcagataaattctgtgatcaagcttgcaatgtccttagttgcggttttgatgctggggactgtggccaagatcattttcatgagctctataaagttatcctcctgcccaatcagacccactacataattcctaaaggggaatgtctcccatacttcagcttcgccgaggtagcgaagagaggagttgaaggcgcctactctgacaatcctatcattcgccatgcctccattgcaaacaagtggaaaactatacacctgatcatgcacagtgggatgaatgccacaacaattcacttcaacctcacctttcagaacaccaacgatgaggagtttaaaatgcagattacagtggaggtggacaccagagaggggcctaaactgaactctactgcacagaagggctatgagaacctagtatccccaatcacactgctacccgaggccgaaattctgtttgaggatatccccaaagaaaagcgattccccaagttcaaaagacacgatgtcaattctactcgcagggcacaggaggaagttaagattcccttagtcaacatcagcctgctgcccaaggacgctcaactgagtctgaatacacttgacctccagctggaacatggcgacattaccctgaaaggatataaccttagcaaaagtgcactactgcgctcttttttaatgaactcccagcatgccaagattaagaatcaggctataattaccgatgagacaaacgacagcctggtggccccacaagaaaagcaggtccacaaatcaattctgcccaattctcttggcgtatccgagcgtctccagcggctgacctttcctgccgtctctgtgaaagtgaacggccatgaccagggccagaacccaccccttgacctggaaacaaccgcgcgtttcagggttgagacgcacacccagaagacaatcgggggtaatgttaccaaggagaagcctcccagcctcatagtcccactcgagtcacagatgactaaggagaagaaaatcaccggcaaagaaaaggaaaactctcgaatggaggagaatgccgaaaatcacattggggttactgaggtgctccttgggcggaagctgcagcactacaccgacagctacttaggcttcctgccttgggagaaaaagaaatacttccaggacctgttggacgaggaggaaagtctgaaaacacagctggcgtatttcacggattctaagaataccggcaggcagctaaaggacacctttgccgattccctgcgctatgtcaacaaaatcctgaatagtaagttcgggtttacaagtcggaaagttcctgcccacatgccacatatgatcgaccggattgttatgcaagaactgcaagacatgttccctgaagagttcgacaagacttccttccataaggtcaggcacagtgaagacatgcagtttgcattcagttacttctattacttgatgtctgccgtgcagcccctgaacatttcacaggtgttcgatgaggtggatacagaccagtctggggttctgagtgatcgggaaatccgcaccctagccacacgtatacacgagctgccattgtccttgcaggatcttactggacttgaacatatgctgattaactgttccaagatgctgcccgctgatataactcagctcaataacatcccaccaacacaggagtcatattacgacccgaaccttcccccagtgactaagtccttggttacaaactgtaagcccgtgactgataagatccataaagcttacaaagataagaacaagtaccgcttcgaaattatgggcgaggaggaaattgcctttaaaatgatccggacaaacgtgtctcacgtagttggacagctagacgatattcgcaagaatccaagaaagtttgtctgcctcaacgacaatatagaccacaaccacaaggatgctcaaacggtaaaagcggtgcttcgtgacttttatgagtcaatgttcccaatcccatcacagttcgagctaccgagggaatacagaaacaggtttctacacatgcacgaactacaagagtggagggcatatagagataagttgaagttctggacccattgtgtactcgccacactaattatgttcaccatctttagcttttttgcggagcagctgattgctctgaagcgcaaaattttccccagaagaaggatacacaaagaggcaagtcccaatagaattagggtt

SEQ ID NO: 214973 - DNA, 3768 bp, Artificial Sequence
  derived and/or modified sequence
atgctctttaagctgctccaaagacagacctacacgtgtctttcccatcggtacggtctgtacgtgtgctttcttggtgtggtcgtgaccattgtgtcggcatttcaattcggcgaggtcgtgttggagtggtcccgtgatcagtaccatgtgctgtttgattcctacagagacaatatagcaggtaagagctttcaaaacaggttgtgccttccgatgcctatcgacgtggtctacacctgggttaatggtaccgacctggagcttctgaaggagctgcagcaggttcgggaacaaatggaagaagaacaaaaagcaatgcgcgaaattcttggtaaaaacaccaccgaacctacgaagaagtcggaaaagcaactggaatgtctgctgacccattgtatcaaagttcctatgctggtcctggacccagcactccccgccaatatcactcttaaggatcttcctagcctgtacccctcgtttcattccgcgtcagacatcttcaatgtcgcaaagccaaaaaacccctcgaccaatgtctcggtagtggtgtttgattcaaccaaggatgtggaagatgcacattccggtcttttgaaggggaattccagacaaactgtgtggcgaggataccttaccaccgataaagaagtccctggcttggtgctgatgcaagatctggcgtttctgtcgggctttccacctacctttaaagaaactaatcaactcaagactaagttgcctgaaaaccttagcagcaaggtcaaacttctccagctttacagcgaagcaagcgtggcactcctgaagctcaacaaccctaaagattttcaggagctgaacaaacaaacgaaaaagaatatgaccattgacggtaaagagcttactattagccctgcatacctcctgtgggacctctccgccatcagccaatcaaaacaggatgaggatatcagcgcatcccgttttgaagataacgaggaattgcggtattcgcttagatctatagagcgccacgccccttgggtgagaaatatcttcattgtgaccaacggtcaaattccatcgtggctgaacttggataatccacgcgtgactatcgtgacccatcaagatgtgtttagaaacctttcgcaccttccaaccttttcatcaccggcaatcgaaagccacattcatcgaattgaagggctttcccagaagttcatctacctgaacgatgatgtgatgttcggaaaagatgtgtggcctgacgacttttactcgcattccaaaggacagaaggtttaccttacctggcctgtccctaactgcgccgagggttgtcctggatcatggatcaaggatggttactgtgacaaagcctgcaacaattcagcctgcgattgggatgggggagattgtagcggaaattccggaggctcacggtacattgccggcggaggggggaccggaagcattggcgtcggacagccttggcaatttggcggaggtatcaattctgtgtcgtactgcaaccagggctgcgcaaattcctggctggcagataagttctgtgatcaggcgtgtaatgtgctctcgtgtggattcgatgccggcgattgtgggcaggaccattttcacgaactgtacaaggtgattctgctgccgaaccagacccattacatcatcccaaagggggagtgtttgccttacttctcatttgctgaagtcgcaaagcggggtgtggaaggtgcatacagcgataaccccataatacgccatgcatcgattgcaaacaagtggaaaaccattcatcttatcatgcattccggcatgaatgcaacgaccatacactttaatctcacctttcagaacacgaacgatgaggaattcaagatgcagattactgtggaggttgatactagagaggggcccaaactcaactctaccgcccagaagggctacgagaatctggtgtcccccatcacccttctgccagaggctgagattttgttcgaggacatccccaaagaaaagcggtttccaaagtttaaacgccatgatgtcaactcgactagaagggcacaggaggaggtgaagatccctctcgtgaacatttcactgctgccgaaggatgcacagctctcccttaacactctggaccttcagctggaacatggcgatattaccctgaagggctacaatctctcgaaatcggcccttcttaggtcattccttatgaattcccagcatgcaaagattaagaatcaagccatcattacggatgagactaacgactcccttgtggcaccacaggagaaacaagtgcataaatctattctgcctaactctcttggggtgtcggaacggctgcagaggctgacttttcctgcggtgagcgtgaaagtgaacggtcatgatcaaggtcagaatccacctctggacctggagactaccgcacggtttcgagtggaaacccatactcaaaagactattggaggtaacgtgactaaggagaaaccgccatcgttgattgtgcctctggagtcccaaatgactaaagagaaaaagatcaccggaaaggaaaaagagaactcgagaatggaagaaaacgctgagaatcatattggcgtgacggaggtgcttctcggaagaaagctgcagcattacaccgactcctaccttggattcctcccttgggagaagaagaagtacttccaagatctcctggacgaagaagaatcgctgaaaacccaactggcatacttcaccgatagcaaaaacactggcagacaacttaaggatacctttgccgattcgctcagatatgtgaataagatactgaactcaaagttcggatttacgagccggaaagtccccgcacacatgcctcacatgattgaccgcattgtcatgcaggaacttcaagacatgtttcctgaggaattcgataagacttcctttcataaggtgagacactccgaggatatgcagttcgctttttcgtacttttactaccttatgtcagcagtgcagcccctgaacatttcccaagtgttcgatgaggtcgacacggatcagtccggtgtgctgtccgatcgcgaaatccgcacccttgcgaccagaattcacgaacttcctctgagccttcaagatttgacggggttggagcacatgctgatcaattgtagcaaaatgcttcctgcggatatcactcagctgaataacatccctcccacgcaagaatcatactacgatccaaatctgccacctgtcaccaagtcactggtgactaactgcaaacctgtgactgataagattcacaaggcatacaaggataagaataagtacagatttgagatcatgggcgaagaagaaattgcatttaagatgatccgaactaatgtctcgcatgtcgtgggacaacttgatgacattaggaagaacccacgcaagttcgtgtgtcttaacgataacatcgaccataatcacaaggatgcccagaccgtgaaggctgttcttagggacttttacgaatccatgtttccaattccatcccagtttgagctccctcgggaatataggaatagatttctccacatgcacgagcttcaagaatggcgcgcctacagagataagttgaagttctggactcattgtgtgcttgcaaccctgatcatgtttacgattttctcatttttcgcggagcaactcattgcgctgaaacgtaagatttttcctaggagacgaatacataaggaagcatcccctaacagaattagagtg

SEQ ID NO: 214974 - DNA, 3768 bp, Artificial Sequence
  derived and/or modified sequence
atgctgttcaagttactgcagagacaaacttatacatgcctgtcacatagatacggcctgtacgtgtgctttctgggagtggtagtgactatagtgtccgccttccagttcggtgaggtggtgctagaatggtctagggaccagtaccatgtgttattcgactcataccgcgataacattgcagggaaatcctttcagaaccgcctgtgtctcccaatgcccattgatgtcgtgtacacctgggtcaatggcaccgatctggagctactgaaggagctgcagcaggtgcgggaacagatggaagaggagcagaaggccatgagggaaatattaggcaagaacactacagagccgacaaagaaatcagagaagcagctggagtgcctgctgacccactgcatcaaggtgcccatgctcgttctggaccccgcattaccagcaaatatcaccctgaaagacctaccatcattatacccctccttccactccgctagtgatatttttaatgtggccaagcccaaaaacccttcaacaaatgtgtccgtcgtggttttcgactcaacaaaggatgtggaggatgcccacagtggtctgcttaaaggaaattcccgacaaactgtttggcggggatatctgaccacagacaaagaggttccagggctcgtcctgatgcaggatttggccttcctatctggcttcccacctacattcaaagagactaatcagctgaaaactaagctccctgaaaacctgtcaagtaaagttaaactactacagctgtattctgaggcttctgtggcactgttgaagctgaacaatccaaaggactttcaggagctgaataaacagaccaagaagaatatgactatcgatggcaaggaactgaccatttcacccgcttacttactttgggatctgtccgccatatctcagtccaaacaggacgaagacatcagcgcttcaagatttgaggacaatgaggagttgcggtactccctgaggagcattgagaggcatgctccatgggtccggaatatatttatagttaccaatggtcagatccccagctggctgaacttagacaatcctcgcgttaccatcgttacacatcaggatgtcttcagaaatctgagccatctgcccaccttctcatctccagctatcgaatcccatattcaccgcatcgaaggactgtcccagaagtttatttacttgaatgacgatgtcatgttcggtaaggatgtctggccagatgatttctactcacactcaaaaggccaaaaggtgtatctgacatggcccgtcccaaattgtgctgaaggttgccccggttcctggatcaaagacggctactgcgataaagcctgcaacaatagcgcttgtgattgggacggcggggactgcagtggcaactccggcggctcccgatatattgctgggggagggggcactggcagcatcggcgtggggcaaccatggcagttcggcggcggcattaattccgtgagctattgcaatcagggatgcgcaaactcctggcttgccgacaagttctgtgatcaggcctgtaatgtgctgagttgtggctttgatgctggcgactgtggccaggatcatttccacgagctgtacaaggtgatcctgcttccaaaccagacacattacatcatccccaaaggagagtgtctgccttacttcagttttgccgaggtggccaaacgaggagtggaaggcgcatacagcgataatcccataataagacacgcatctatcgccaataaatggaagactatacatctaatcatgcattctggaatgaatgcaactactatccatttcaatctgacattccagaacaccaatgacgaggagtttaagatgcagatcacagtggaagtggatacccgggagggacctaagttgaactcaacagcccagaaagggtacgaaaatttggtgtcaccaattacactactaccagaagccgagatcctgtttgaagatatcccgaaggaaaagaggttcccaaagttcaagcggcatgatgtaaacagtacacgccgggctcaagaggaggttaagataccattggtaaacatctctctactgccaaaagatgctcaactcagcctcaacaccttagatctgcagctggagcacggcgatattaccctgaagggctacaatctgtcaaagagcgcactgctaagaagctttctgatgaactctcagcacgcaaaaattaagaaccaggccatcataaccgatgagaccaacgatagtctagtcgcccctcaggagaagcaggtacataagagcatactgcccaacagcctgggcgtgagtgagagattgcagagactcacattccccgccgtgtcagtgaaggtgaacgggcatgatcagggccagaacccccctctggatcttgagactactgctaggtttcgggtggaaacccatactcagaaaacaattgggggtaatgttaccaaggagaaaccacctagcctaatcgtgcccctggaatctcagatgacaaaggaaaaaaaaataaccggtaaagaaaaggagaacagtaggatggaggagaacgctgaaaatcatataggggtgaccgaggttctgctggggcggaaacttcagcactacaccgatagttacttgggtttcctgccatgggaaaaaaaaaagtattttcaggatctgcttgatgaagaggagtccctcaagacacaactggcatattttaccgactccaagaacactggtcgacaattgaaggacacattcgcagactctctgcgctacgtgaataagatcttgaatagtaagtttggattcacttcaagaaaagtgcctgcccatatgccccatatgatcgatcgaattgtgatgcaggagttacaagatatgtttcccgaggaatttgacaaaacatctttccacaaagttcgccattctgaagacatgcagttcgctttcagctacttttactacttaatgagcgcagtccaacctctgaatatctctcaggtgttcgatgaagtggataccgaccagtctggtgttctaagcgatcgggagataaggacactggccactcggatacatgaactccccctgagcctgcaagacctcactggccttgaacacatgctgattaattgctctaagatgctgcctgcagatattacccagttaaataatatacctcctacccaggagtcctactatgatccaaatcttccacccgttactaaaagcctggttaccaattgcaaaccagtgaccgacaaaatccacaaggcttacaaagataaaaataagtaccgcttcgagataatgggcgaggaagaaatcgccttcaaaatgatccgcaccaacgtgtctcacgtcgtgggacaactggacgacataaggaaaaacccacgcaagtttgtgtgtttaaatgacaatatcgaccacaatcataaggatgcccagacagtcaaggccgtgttacgcgacttttatgagtccatgttccctatccccagccagtttgagctgcctagagagtacaggaacagatttctgcatatgcacgaactgcaagagtggcgggcctaccgggacaagctgaagttttggacccactgcgtgctggctactctgataatgtttacaatattctccttttttgccgaacagctaatagccctaaaacgcaagatttttcctcgaaggcggatccacaaggaggcctctccaaacaggattagggtg

SEQ ID NO: 214975 - DNA, 3768 bp, Artificial Sequence
  derived and/or modified sequence
atgctgtttaaactccttcagaggcagacctacacttgcctcagccacaggtacggcctgtatgtctgttttttgggcgtcgtggtgacaattgtctcagcctttcagtttggcgaggtagtcctcgaatggagtcgcgaccagtaccacgtcctcttcgactcttatagagacaacattgccggaaaatcatttcagaaccggctgtgtctgccaatgcccatagatgtagtatacacatgggtgaacgggaccgacttggaactacttaaagagctgcagcaagttagagagcagatggaagaagagcagaaggcaatgagggagatcctgggtaagaacaccactgagcctacgaagaaatccgagaagcagctcgaatgtttgctaacacactgcatcaaagtccctatgctggtgctggaccctgcgctgcccgccaacattactttgaaggatcttcccagcctgtacccatcattccactccgcaagcgatattttcaatgtcgccaagccaaagaatccatctacaaatgtgtctgtggtcgtctttgactccacaaaggacgtggaagacgctcattctgggctgctgaaggggaactcccgtcagaccgtgtggaggggttacctgacaactgacaaagaggttcctggactggtgctgatgcaagacctagcattcctctcgggattcccgcctacattcaaggagacgaaccaactgaaaacaaagctgccagagaatctgagttctaaggtgaagcttcttcagctttacagcgaggccagcgttgcactcctgaagctcaataacccaaaagatttccaagagttgaacaaacagactaaaaagaatatgacgatcgatggaaaggaattaacaattagtccagcttaccttttgtgggacctctctgccatctcacagtccaagcaagatgaggacatatccgcctcacgatttgaagacaatgaagagctgcgatattcacttaggagcatcgagagacacgctccatgggtgagaaatatctttatagttactaacgggcagatcccttcctggttaaacctcgataatcctagagtgacaattgtaacacaccaagatgtattccgcaatctctctcacttgcctacattctcgagcccagctatagagtcccatatccatcgtattgagggtctgtcccagaagtttatttatcttaacgacgatgtgatgtttggtaaggatgtgtggcctgatgacttctactctcatagtaaaggccagaaggtgtacttgacctggcccgtgcccaactgcgcggagggctgcccaggctcttggatcaaagatggctactgcgacaaagcttgcaacaactcggcgtgcgattgggatggaggtgattgttcggggaacagtggcggttcccgttacatcgctggaggggggggtaccggctctatcggggtaggccaaccctggcagttcggaggcgggatcaactccgtaagctattgtaatcaaggctgtgccaactcctggctggcggacaagttttgtgaccaggcatgtaacgtgctatcttgtggcttcgatgctggagattgcggccaagaccattttcacgagctgtacaaagtgatcctactgccgaaccagacccactacatcatccctaaaggggagtgtctgccatatttcagctttgccgaggtagccaagcgcggtgtggaaggtgcctattcagacaaccctataattcggcacgcaagtatcgcaaataaatggaagaccattcacttaatcatgcattcaggcatgaacgccacgacaatccatttcaatcttacttttcaaaacacaaacgatgaggagtttaagatgcaaataaccgtcgaagtggacaccagagaggggcccaaacttaacagcaccgctcagaaaggctacgagaacctggtgagtcctattactctgcttccagaggcggagatcttgttcgaagatatccccaaggagaagaggtttcccaagttcaagagacatgatgtgaatagtacccggcgggctcaggaagaagttaagatacccctcgtgaacatatccctgctccccaaggacgctcagttgagcctgaacacgctggacctgcagctcgagcacggcgacattaccctgaaaggatacaaccttagtaaaagtgcactgcttaggagctttctcatgaacagtcaacatgcaaaaattaaaaaccaggcgataatcacggatgaaaccaatgactctttggtggctccccaggaaaagcaggtccacaaatccattctccctaactccctcggcgtgtctgagcgcctgcaacgtctaacattccctgcggtgtcagtgaaagtgaatggccatgatcagggacagaaccctccactggatctcgagacaacagcccgatttcgggtggagacacatacccagaagacaatcgggggaaatgtgacaaaagagaagcccccaagcctcatcgtgccactcgagagccagatgacgaaagagaagaagattactggcaaagaaaaggagaatagtcggatggaggaaaacgcagaaaaccacattggggtcacggaggtcctcctaggaagaaaactccaacactatacagactcatacctgggatttttgccatgggagaaaaagaagtactttcaggatttgttggatgaagaggaaagcctaaagacgcagttggcttactttaccgactccaagaatactggtcgtcaacttaaggatacatttgctgactcgttgcgatacgttaataagatattgaacagcaagtttgggtttacatcaagaaaagtgcctgcgcatatgcctcatatgatagataggatagtgatgcaagagctgcaggacatgttccctgaggagttcgacaaaaccagcttccataaggtacggcacagtgaggacatgcagtttgcttttagctacttttattatcttatgagtgccgtgcagccgctgaacatcagtcaggtgttcgatgaggtcgatactgaccaatccggcgtactttcagatcgcgaaattcgtacgctggccactcggatccatgagctaccgttgtcactgcaggacctcaccggcctagagcacatgcttatcaactgctccaagatgctgcccgccgatatcactcagctgaataacatccctccaacccaggagtcctattatgaccccaacttgccacctgtaaccaaatccctagtgaccaactgcaaacctgtgactgataaaatccacaaagcatataaggacaaaaataagtacagattcgagatcatgggcgaggaagagatagcctttaaaatgatacggactaacgtatcccatgtcgtggggcagctggacgatattcgaaaaaatcccaggaaattcgtgtgcctcaatgacaatattgatcacaaccacaaagacgcacagacagtgaaggcagttctaagagatttttatgagtccatgttccctattccttcgcaatttgaactgccccgcgagtataggaaccgcttcttgcatatgcatgaacttcaggaatggcgggcctatagagacaaactaaaattttggacgcattgcgtactggcaacccttattatgtttacaatcttttcgttttttgccgagcagctgatcgccctgaaacgaaagatcttcccgcgcaggaggatccacaaggaggcttcacccaaccggattagagtc

SEQ ID NO: 214976 - DNA, 3768 bp, Artificial Sequence
  derived and/or modified sequence
atgctctttaagctgctccagcggcagacgtacacctgcttatctcatagatatggcctctacgtttgtttcctgggagtggtggttacaatcgtgagcgcattccagttcggcgaggtggtgctcgagtggagcagggatcagtaccacgtgttgttcgacagctaccgggacaacatcgcgggcaaatcgttccagaaccgactgtgcctacccatgcccatcgacgttgtctacacctgggttaatggcacagatcttgaactgctgaaggagttgcagcaggtaagggagcagatggaggaggagcagaaggccatgagagagattctgggtaagaacaccactgagccgactaagaaatcagaaaagcagctggaatgcctgcttacccattgtataaaagtaccaatgctggtactggatccagccttgcctgctaacatcactctgaaggatctgccctccttgtatccttcgttccatagcgccagtgatatcttcaacgttgcaaaacccaaaaatccttccactaacgtcagcgtcgtggttttcgatagtactaaggatgtggaggatgcccactccggactcctgaagggaaattcccgccagaccgtgtggcgtggataccttacaactgacaaagaggtccctggcttagtcctgatgcaggacctcgcgttcctgagcggctttcctccgaccttcaaagaaacaaaccagttgaagacaaaactacccgagaacttatctagcaaagtgaagctgttgcagttgtacagcgaagctagtgtggccctattgaagctgaacaatccaaaagatttccaggagttgaacaagcagaccaagaaaaacatgaccatcgacggtaaggaactcaccatatctcctgcgtatctcttgtgggacctatctgctatctcacagagtaagcaggatgaggacattagtgccagcagattcgaggataacgaggagttgagatactcgctgcggtctatcgagaggcatgcaccctgggtgagaaacatttttatcgtgacaaacggacagataccaagttggcttaacctagataatccccgggtcacaattgttacccatcaagatgtgtttcgtaacctcagccacctgcccacattttctagtccagcaattgaatcccacattcataggatcgagggactgtcccaaaaatttatctacttgaatgacgacgtaatgtttgggaaagacgtctggcctgacgacttctatagtcatagcaagggccaaaaggtctacctgacttggccggtcccaaactgtgccgagggatgccccgggtcgtggattaaggacggatattgtgacaaggcctgcaacaattccgcctgtgactgggatggaggggactgttccggcaattctggtgggagcaggtacatagccggcggaggaggaactgggtccatcggagtcggtcagccttggcagttcggaggaggaatcaactccgtgagctactgtaaccaaggatgcgcgaacagctggctcgcggacaaattctgtgaccaggcctgtaatgtgctgtcatgcggatttgatgccggggactgtggccaggatcactttcatgaactctacaaggtgatactgctccctaatcagacacactacataatcccaaagggcgagtgtcttccctatttttccttcgccgaggtggccaaacggggagttgaaggggcgtattctgataaccctatcattcgtcatgcctccattgctaacaagtggaagactattcacctgatcatgcattcaggtatgaacgccacaactatccatttcaatctcacctttcagaacaccaacgacgaagaatttaagatgcagattaccgtagaggttgacactcgagagggcccgaaactgaacagcaccgctcaaaaaggctatgagaatctggtctcccctatcactctgctgcccgaggccgaaatcctgttcgaggatatcccgaaagaaaagcgatttccaaaattcaagagacatgacgtgaactccactcgccgggcccaagaggaggtgaaaataccccttgtgaatataagtcttctaccaaaagatgctcagctatcactgaacacactcgatctgcagctggaacacggtgatattacccttaagggctacaacctctctaagagcgcactactgcgctcattcctaatgaactctcagcacgccaagattaagaatcaggcaatcatcaccgacgaaactaatgacagccttgtcgccccgcaggagaaacaggtgcacaagtctattctcccaaactctctcggggtcagtgaacgtctgcagagactgactttccccgctgtctcagtcaaagtaaacgggcacgaccagggacaaaacccacccctggatttggaaacgacggcccggtttagagtggagacgcacactcaaaagaccataggcggtaacgtgaccaaggaaaaacctcctagccttattgtgcctctcgagagccagatgacaaaggaaaaaaaaattaccggcaaagaaaaggaaaattcacggatggaagagaatgccgagaatcacatcggcgtgacagaggtgctgctcggccgcaaattacagcactataccgattcttatttgggtttcctgccatgggagaagaaaaaatatttccaagacctcttagacgaggaagagtcactgaaaacacagctggcatacttcaccgatagtaaaaacaccggtaggcagttgaaagacacattcgccgatagtcttcggtatgtgaataaaattctcaactctaaattcgggttcaccagcaggaaggtgcccgcccatatgcctcacatgattgaccggattgtgatgcaggagttacaggatatgttccccgaagaattcgacaagactagcttccataaagtgcgccatagtgaagacatgcaatttgcatttagttatttttattacctgatgagcgccgtccagcccctcaacatttcacaggttttcgacgaggtggatactgatcaaagcggcgtgctctctgatcgggaaattagaacattggccacaagaattcatgaactgcccctctctctgcaggacctcaccgggctggagcacatgctaataaattgttccaagatgctgccagcagatataacccagctgaataatattccacccacacaggagtcgtattacgacccgaacctcccgcctgtgaccaagtccctggtcacgaattgtaaaccggtcaccgataagatacacaaagcctataaggataagaacaagtatcggtttgagatcatgggggaagaagaaattgctttcaaaatgatacgtacaaatgtgagccacgtggttggccagcttgatgacatccgcaagaacccacggaaatttgtctgtctgaacgacaacatcgatcacaatcataaggacgctcaaacggttaaagccgtcctaagagacttctatgagagcatgtttccaattccttctcagttcgaactccctagggagtaccgcaaccggttcctgcacatgcatgagctacaggagtggcgggcctaccgggataagctgaaattctggacccactgtgtcctggcgactcttatcatgttcactatcttctccttcttcgccgaacagctgatcgctctgaagcggaaaatattcccccggcggaggattcacaaggaagctagtcccaaccgcattagggtc

SEQ ID NO: 214977 - DNA, 3768 bp, Artificial Sequence
  derived and/or modified sequence
atgttgtttaagcttttgcagaggcagacatatacctgcctgtctcacagatatggcctgtatgtgtgttttctgggagtagtagtaacaattgtgtctgcttttcaatttggcgaagtcgtgctcgagtggtcgagggatcaataccatgttttgtttgattcatatagggataacatcgctggaaaatcctttcaaaataggctgtgcctgcccatgccaatcgatgttgtgtacacttgggtcaatggaacagacctcgaactcctgaaggagctccaacaggttagggagcagatggaggaggagcaaaaagccatgcgcgagattctgggaaagaacacaaccgagccgaccaagaaaagcgagaagcagctcgaatgcctccttacccattgtattaaggtgccgatgctggtgctcgatcctgctctgccagctaacatcaccctgaaggacctcccctctctctatccctcgttccacagcgccagtgacattttcaacgtggctaagcctaagaacccaagcactaatgtttctgtcgtcgtgtttgatagcaccaaggacgtggaagacgctcatagtggactgttaaaaggcaatagccgccagaccgtttggcgcggctatctgaccaccgacaaggaggtgccaggcctggtcttgatgcaagatctcgccttcctgagcggcttccctccaacatttaaagaaacaaaccaactgaagactaagctccctgaaaacttgagcagcaaggtgaagctgctgcagttgtatagcgaggctagcgtggctctgctgaaacttaataatccaaaagatttccaggaactgaacaagcagaccaagaaaaacatgaccatcgacgggaaggaactgacaatcagtcctgcctatctactttgggatctgtctgcaatctctcagtctaaacaggacgaggatatcagcgcaagcagatttgaggataacgaggagcttcggtacagtctcagatcaatcgagaggcacgccccttgggtgaggaacatctttatcgtgacaaatggccaaatcccttcttggctgaatctggacaatccccgggtgaccatcgtcacacatcaggacgtgtttcgcaacctgtcccacttaccgacattcagcagcccagcgattgagtcgcacatccaccgaattgaaggactctctcagaagttcatatacctcaatgatgacgtaatgtttgggaaagacgtctggcccgacgatttctatagccatagcaagggccagaaggtgtatctgacctggcctgtgcctaattgtgccgagggctgcccaggatcatggattaaagacggttactgcgacaaagcttgcaacaattcagcttgcgattgggacgggggcgattgttctggaaactcaggtggaagccgctatatagccggcggcggaggaaccggttcaattggggtaggccagccctggcaattcggcggcggaatcaattcagtgtcctattgtaaccagggttgcgcaaactcttggttggcagacaaattttgtgatcaggcctgcaatgtgctcagctgcggatttgacgctggcgactgtggccaggatcattttcacgagctgtacaaggtcattttactgcctaatcaaacacactatattatcccgaagggggaatgcctgccttacttctccttcgcggaagtggccaagaggggtgtggaaggtgcttactccgacaacccaatcataaggcacgcctctatcgctaacaaatggaaaacaatccacctgataatgcactcagggatgaacgcaacgaccattcattttaacctgactttccagaataccaacgatgaagaattcaagatgcagatcaccgtggaagtcgatactcgtgagggccccaagttgaactctacagcccagaagggatacgagaatctggtgtctccaatcacactgctgcctgaggcagagatactttttgaagacatcccaaaagagaagagatttcctaagttcaaacgccacgatgtgaatagcactagacgggcacaggaggaagttaaaattcctcttgtgaacatcagtttactgcctaaggacgcacagctgtcgctaaacaccctggatttgcagctggagcacggcgacattacattaaagggctacaatctgagcaagtccgcattgcttaggtctttcctgatgaattcccagcacgcaaagattaaaaaccaagctattataacagacgaaaccaacgacagcctcgtggcccctcaggaaaaacaagttcacaagtctatcctgcctaactcactaggcgtgagcgaacggttgcagaggcttacatttccagctgtatctgtcaaagtcaacggacatgaccaaggacagaatccacctctggatctggagaccacggctagattccgcgtcgaaacacatacccaaaaaaccataggcggcaacgtcaccaaagagaaaccaccctcactgatcgtcccattagaatcacagatgaccaaggaaaagaagattaccggtaaagagaaggaaaatagcagaatggaagaaaacgctgaaaaccatattggggtgacagaagtacttctcggaagaaagctacaacactatacagatagctatctcgggtttctaccttgggagaagaagaagtacttccaagatctgttggatgaggaagagtcactgaagactcagctcgcttattttacagattcaaaaaacaccggtcggcagttaaaggacactttcgcagattctcttcgctatgtgaacaagatcttgaacagcaaatttggcttcacatcccgcaaagtgcctgctcacatgccacacatgatcgacagaatcgtcatgcaagagttgcaggacatgttcccagaggagtttgataagacctcgttccacaaagtcaggcatagtgaggatatgcaatttgcattctcatacttttattatctcatgagcgccgtgcagcccctgaacatcagtcaggtgtttgatgaggtcgacacggaccagagtggggttctctctgaccgggaaatccggacattagcgaccaggatccatgagctgccactgtcgctacaggacctgaccggcctggagcacatgcttatcaactgctctaagatgctgcccgccgacatcacccaactgaacaatataccacctacccaagagtcatactacgacccgaatctacctccagtaactaagagtctcgttaccaactgcaagcctgttaccgataaaattcataaagcatataaggataaaaacaaatataggtttgagataatgggcgaagaggagattgcttttaaaatgattaggacaaacgtgagccatgtggttggacagcttgacgatatcagaaaaaacccacgaaagtttgtgtgcctaaatgataacatcgatcacaatcacaaagacgcacaaaccgttaaggccgtgttgagggatttctacgaaagcatgttccctatccctagtcaattcgaactcccaagagaatatcgcaaccgttttttacatatgcacgagcttcaagaatggagggcttatcgggataagctaaaattttggacccactgtgtcctcgctaccctgatcatgttcacaattttcagcttttttgctgaacaactcatcgcactcaaaagaaagatcttcccaaggaggcggatccacaaggaggcgagcccgaacagaatacgcgtc

SEQ ID NO: 214978 - DNA, 3768 bp, Artificial Sequence
  derived and/or modified sequence
atgttgttcaaattgctgcagcgacagacttatacatgtctatctcaccgatacggcctgtatgtttgtttcctgggcgttgtggtgactatcgtgtcagcctttcagtttggtgaggtggtccttgaatggtcacgagatcagtaccacgttctctttgacagctatcgagacaatatagcgggaaagtcatttcagaacagactctgtctgcccatgcccatcgacgtggtttacacttgggttaacggaaccgatcttgaacttttgaaggagcttcagcaagttagagagcaaatggaggaagagcagaaggcaatgagagagatcctaggtaaaaatacaacagaaccgacaaaaaagtcagagaaacaacttgaatgcctgcttacacactgtattaaagtgccaatgctggtgttggatcctgcattgccagccaatatcaccttaaaagacctgcccagcctgtacccatctttccactctgcttcagacatatttaacgtggccaaaccaaagaacccgtccactaacgtgtcagtggtggtgttcgactccactaaagacgtcgaagacgcccattccggcctgctcaagggtaactcacgacagacagtctggcgggggtatctgaccaccgacaaagaggtccccggcctggttctgatgcaggacctcgcatttttgtcgggatttccgcccaccttcaaagagaccaatcagctgaaaaccaaactgccagaaaacctatcgagcaaagtgaaattgctgcagctatactccgaggcaagcgttgccctactgaagctcaacaaccctaaggactttcaggaattaaacaaacaaacaaaaaaaaacatgaccatcgacggaaaagaactcacgatttctcctgcctacctgctgtgggacctctcggccatcagtcagtctaagcaagacgaagatatctccgctagcagattcgaagacaacgaagaacttaggtattcactgcgaagtatagagcgacacgcaccatgggtgcgaaatatcttcattgtaaccaacgggcagataccttcatggcttaacctggataaccctagagtgaccattgtaactcaccaggacgtgttcaggaacctgtctcacctccccacattcagcagtcctgccatcgagtcgcacattcacagaattgaagggctgagccagaagtttatctatcttaacgatgacgtcatgttcgggaaagacgtgtggcctgatgacttttactcccacagcaagggccagaaggtgtacctaacgtggcccgtgcccaattgtgctgaagggtgtccagggtcttggataaaggacggctactgcgacaaagcctgcaataacagtgcatgtgactgggatggcggagattgcagtggaaattctggcggaagcagatacatcgccggcggggggggcaccggatctatcggcgttggtcagccctggcaattcgggggcggcatcaattctgtgagctactgcaatcagggatgcgccaactcatggctggctgataagttctgcgaccaagcctgtaatgtcctgtcatgcggttttgatgctggcgattgtggacaggatcattttcatgagctgtacaaagtgatactgcttcctaaccaaacccactatatcatccctaaaggggaatgtctcccatatttttcttttgccgaagtcgctaagagaggtgtggagggggcctactccgataatcctataattcgacatgcatctatagctaacaaatggaagacgattcatctcattatgcatagtggcatgaatgctaccacaatccatttcaacctaacctttcagaacacaaacgacgaggagtttaaaatgcagattactgtcgaagttgatacccgggaaggccctaaactcaattcgaccgcccaaaagggctatgaaaatctcgtctctcccatcacactgctgccggaagccgagatcctgttcgaagatataccgaaggagaaacgatttccaaaattcaagaggcacgatgttaactccacgagaagagctcaggaagaagtgaaaatcccactggttaacatttcgctgctgccgaaagacgcgcagctgagcctcaacacactggacctgcagctggagcacggcgatataacattgaaaggttataacctatctaagagtgcattactgcggtcatttctgatgaacagccaacacgcaaagataaagaatcaggcaattatcactgatgagaccaacgatagcctggttgcccctcaagagaaacaggtgcataaaagtatactgccaaactctttgggcgtgtcagaacgactgcagaggctgacctttcccgctgtgtccgttaaagtgaacgggcatgaccagggccaaaatccgccactggacctcgaaacaaccgcgcgttttcgggtggagacccatactcagaaaacaatcggtggcaacgtgacaaaagagaaacctcctagcctcatcgtccctctcgaaagtcagatgaccaaggaaaagaagatcacaggcaaggaaaaggagaattctcggatggaagaaaatgctgagaatcatatcggcgtcaccgaggtgctgctgggacgtaaactgcaacactacacagattcctatctgggattcctgccctgggaaaagaaaaagtactttcaggacttactcgacgaagaggaaagcctaaagacgcagctcgcatacttcaccgatagcaagaataccggcaggcaattaaaggacacattcgccgattcattgcgatatgtcaacaagattttgaactccaagttcggattcacaagtcgcaaggtcccggctcacatgcctcacatgatagaccggatcgtgatgcaagagctgcaggatatgttccccgaagagttcgataagacttcatttcacaaagtgagacacagcgaggacatgcagttcgcgttctcctacttttactacctcatgtctgctgtgcagcctttgaatattagccaagtgttcgatgaggtcgacaccgatcagtctggcgtgctatcagacagggaaatcaggactctggccactcgaatacatgagcttcccctgtcactccaggacttgacaggactagaacacatgctgatcaattgtagtaagatgctgccagcggacatcacgcaacttaacaatattcctcccacacaagaaagctactatgaccccaatctcccacctgtaacaaaaagcctggtgaccaactgcaagcctgtgacggacaaaatccacaaggcctacaaagataagaacaaataccgatttgagatcatgggtgaggaggaaatcgcttttaaaatgattaggactaacgtttcccatgtagtcggtcagcttgacgatatcagaaagaacccgcgaaaattcgtttgccttaatgacaacatcgatcacaatcataaggacgcacagacagttaaagctgtcctgcgagacttttatgagtctatgtttcccatcccatcccaatttgaactcccaagggaatatcgaaaccgttttctgcacatgcatgaacttcaggagtggcgagcctaccgcgataagcttaagttttggacgcattgtgtcctcgcgactctaatcatgttcaccatcttcagcttttttgccgaacagctgatagcactgaagcgtaaaatctttccaagacgacggattcacaaagaagcgagtccgaatcgcatcagagta

SEQ ID NO: 214979 - DNA, 3768 bp, Artificial Sequence
  derived and/or modified sequence
atgcttttcaaattgttgcagaggcagacttatacatgtctctcccaccggtacgggctctatgtatgtttcttgggagtggtggtcactatagtgagtgctttccaattcggagaggtggtattggaatggtctcgagatcagtatcacgtgctttttgattcttaccgggacaatatcgcagggaagtcctttcagaaccggctgtgcctgccaatgcctatcgatgtggtttatacatgggtcaatgggactgacctcgaattgctcaaagaactccagcaggtcagggagcagatggaagaggagcagaaagctatgcgagagatactgggaaaaaacactactgagcccactaaaaaaagtgaaaaacaacttgaatgccttttaacacattgtatcaaagtgcctatgcttgtattagatcccgctttaccagcgaatatcacactgaaggacctaccttctctgtatcccagttttcactcggcttcggatatatttaatgttgcaaagccaaagaatccttcgacaaacgtgagtgtggtcgtttttgatagtactaaagatgtcgaggatgcacattctggactcctgaaaggaaactcaagacagactgtctggcgggggtacctgactactgataaggaagtcccaggattggtcctcatgcaggatctcgcatttttatcagggtttccaccaacattcaaagagacaaatcagctaaaaacgaaacttcctgaaaacctgtcctccaaagtgaaactgctccagctctattccgaggcttcagtcgctttactaaaacttaacaacccaaaagatttccaggaactcaacaagcagacaaaaaagaatatgacaatagatggaaaagaactcacaatttctcctgcatatcttctgtgggatctaagtgccatctcccagtccaaacaggatgaagatatctctgcctctaggttcgaggataacgaagaacttcggtattcactacggtcaatagaaaggcatgccccatgggtgcgcaatatcttcatcgtaacaaatggacagataccctcatggttgaatctggataatcctagggtcactatagtgactcatcaagacgtgttccggaaccttagtcatctgcctactttttcgagtccagccatagagtcacatatacaccgcatagagggactctcccagaaatttatttatcttaacgatgatgtgatgttcggaaaggatgtgtggcctgatgatttctatagtcattcaaaaggacaaaaagtgtacctgacgtggccagttcccaattgtgccgaaggatgtcctggaagttggataaaagatggatattgcgataaagcatgtaataacagtgcctgcgattgggatgggggagactgttcaggaaactccggaggatcacgctatatcgctgggggggggggaacaggatccataggagttggacagccctggcagttcgggggagggataaactctgttagttattgcaatcaaggatgtgctaactcttggctcgctgataaattctgtgatcaggcctgtaatgtcctctcctgtggatttgatgccggagattgcgggcaggatcattttcatgagctgtataaagtgattctcctcccaaatcagacacactatatcatacccaagggggaatgcctgccatacttctccttcgctgaggtcgccaaacgaggagtggaaggagcctatagtgataaccctataatacgccacgcctccatagccaacaaatggaaaactatccaccttatcatgcactccggaatgaacgccactacaatccattttaatttaacttttcagaacacaaacgatgaagaattcaaaatgcagattacagtagaagttgatacaagagaggggcccaaactaaactcaacagcacaaaaaggatatgagaacttggtttctcccattacattattgcctgaggccgagatcctgttcgaagatatacccaaagagaaaaggttccccaaattcaagcgacacgacgtcaactcaacacgacgggcacaggaagaagttaaaatacccctggtcaacatctctctccttccaaaggatgctcagttatcattaaacactctcgatcttcagctggaacatggagatatcactctcaaaggatataatctgtcaaaaagtgcattactgagatcttttctaatgaattcacagcacgccaagattaaaaaccaggcaatcataactgatgaaactaatgatagtctggtggccccccaagaaaaacaggtccataaatccatacttcccaacagtctcggggtatctgaacggctacagcgactaacattcccagccgtatcagttaaagttaatggacacgaccaggggcagaaccctccactggatctggaaactacagcccggtttcgcgtcgaaacacacacacagaaaacaatagggggaaacgtgacaaaagagaaacctccttccctcatagtccccttagagtcccagatgactaaggagaaaaaaattactggaaaagaaaaagagaactccagaatggaagaaaatgccgaaaatcacatcggagttactgaagtgctgctcgggcgcaaattgcagcattacactgattcctatctgggattcctgccttgggagaaaaaaaaatacttccaggatctcttagatgaggaagaatctttaaaaacacagttggcatactttacggattctaaaaacacaggaaggcagcttaaagatacttttgcagattcattaaggtacgtaaacaaaatacttaactcaaaatttgggttcacttctcgcaaagtcccagcccacatgccccatatgatcgatcgaattgtgatgcaggaactccaggatatgttccccgaagagttcgataagacttcgttccacaaagtgcgccattctgaagatatgcagttcgcattttcctatttctattatttaatgagtgcagtccagcccttaaacatatctcaagtgttcgatgaagtcgatactgaccagtctggggtgctttctgatcgagagatccgcacacttgctactcggatccatgaactgcccctatccctgcaggatctaactggactagaacatatgcttattaattgctctaaaatgttgcccgccgatataacacagcttaataatatacccccaacacaggaatcttattatgatcccaacctcccaccagtgacaaaaagtctcgtgacgaattgtaagccagttacagataagatccataaagcatataaagacaaaaataaatatagatttgagatcatgggggaagaagagatagcattcaaaatgatccgaacaaatgtgagtcacgtggttgggcagctcgacgatatcagaaagaaccccagaaaattcgtctgtctaaacgataacatagaccacaatcataaagatgctcagacagtcaaagcggtgctccgcgatttctatgaatcgatgttccctatcccctctcagtttgagctgccccgggaatatcggaacagatttctgcacatgcatgaactgcaggagtggcgcgcatacagagataagctcaaattttggactcattgtgtgctggcaactctgataatgttcacgatattttccttctttgctgagcagctgatagccctgaagcgaaagatctttcctcggcggcggatccataaggaagcaagtccaaatagaattagggtg

SEQ ID NO: 214980 - DNA, 3768 bp, Artificial Sequence
  derived and/or modified sequence
atgcttttcaagttgctgcagcggcagacatacacttgtctgtcgcatagatacgggttgtatgtgtgcttcctcggagttgtcgttaccattgtatccgcctttcagtttggcgaagtagtgctggagtggtctagggaccagtaccacgttctcttcgactcatatcgtgacaacatagctgggaaatcttttcagaaccgactgtgtctccctatgcctattgacgtggtttacacttgggtaaacggtactgatctggagctgctgaaggaattgcagcaggttcgggagcagatggaggaggagcagaaggccatgagggagattctgggtaagaatacgaccgagcccacaaaaaaaagcgagaagcagctggaatgccttctaacccattgtataaaggtgcctatgctggtactggatcccgcgctgcctgcgaatattaccctgaaggatctcccgtccctgtatccctctttccactccgcatcagatattttcaacgtggccaagccgaaaaatccaagcactaacgttagcgttgtcgttttcgacagcaccaaagatgtggaagatgcacactccggcctgttgaaaggaaacagtcgccagactgtgtggaggggctacttaactacagataaagaagtacccggactggtcctgatgcaagacttagccttcctgtccggcttccctcctaccttcaaggaaacaaaccagctcaagaccaagctgccagagaacttgagcagcaaggttaagctcctgcagctctacagcgaggctagtgtggctttgttgaaactgaataacccaaaggattttcaggaactcaataagcagaccaaaaagaacatgacaatcgacggtaaggaactgactataagcccagcttatctcctctgggatctgtccgccatctcacagagcaaacaagatgaagacatcagtgccagcagatttgaagacaatgaggaattgcgatacagtttaaggtccatagagcgccacgctccatgggtgaggaatatatttattgtgacaaatggccagattccgtcatggctcaacttggataaccccagagtcacaatcgtcacacatcaggacgttttccgcaacctcagccacctgccaacattctcgtcccctgctatcgagtcgcacatccatagaatcgagggcctcagccagaaatttatctatcttaatgatgacgtgatgtttgggaaagatgtatggcccgatgatttctactctcacagtaaggggcagaaggtgtatctcacctggcctgtacctaattgcgccgaggggtgtcccggctcttggataaaggacggatactgtgataaggcatgcaacaacagtgcatgcgattgggatgggggcgactgtagtggaaactccgggggtagcagatacattgccggcggcggcgggacgggcagcatcggcgtgggacagccttggcagttcggaggcgggatcaacagcgtgagctattgcaaccagggatgtgccaattcttggctggctgataagttctgcgatcaagcctgtaatgtgctctcctgcggctttgatgcgggtgactgcggccaggaccacttccacgagttatataaagtcatcctccttcctaaccagacccactacatcatcccaaaaggcgaatgtcttccttatttttcttttgccgaagtagccaagagaggggtggaaggcgcctatagtgacaacccgatcatccggcacgcatctatcgcaaacaaatggaagaccatccacctgatcatgcactccggcatgaacgccaccaccattcactttaacttgacattccagaacactaatgacgaagagttcaagatgcagatcaccgtggaggtggacacccgtgagggacctaaactaaactcaacggctcagaagggctatgaaaatctggtgagccctatcaccctgctgcccgaagccgagatcctgttcgaggacatacctaaggaaaaaaggttccctaagtttaaaagacatgatgtgaacagcacaagaagagcccaagaagaggtaaagatccccctcgtcaacatcagtctgttgcccaaagacgcgcagctatcactcaacaccctagacctgcaacttgagcacggtgatattacactcaagggttacaatctctctaaaagtgctcttcttcgttcatttttgatgaacagccagcatgctaagataaaaaaccaggccattatcacagatgaaacaaatgattcattggttgctccccaggagaaacaagttcacaaatccatcctgccaaatagtcttggggtttccgagaggttgcagaggcttacatttcccgccgtgagtgtgaaagttaacggtcacgaccagggacagaatcctccactggacctggagacaactgcaagattcagagtcgagactcatacccaaaagacgattggtggaaacgtgacaaaggaaaagccccctagcctcatcgtgccactagaatcacagatgactaaggagaaaaaaatcaccggaaaggaaaaggagaatagccggatggaagagaatgcggaaaaccatatcggcgtaacagaagtcctgctggggcgaaagctacagcattacaccgactcttacctcgggttcctaccatgggaaaagaaaaaatattttcaggatttgctggacgaggaagagtctctgaaaacccagctagcatactttaccgattccaaaaacactgggcgccagctaaaagacacatttgcggacagcctcaggtacgtcaacaagattctcaatagcaaattcggcttcacttctcggaaggtcccagctcatatgcctcacatgatcgacaggattgttatgcaagaactacaggacatgtttcctgaggaattcgataaaacctcttttcacaaggttcgacacagtgaggacatgcagttcgccttttcgtatttttactacctaatgtcagcggtgcaacccctgaatattagccaggtttttgacgaagtggatacagaccagagtggagttttaagcgatcgcgagattaggaccctggcaaccagaatacacgaactgcccctctctctacaggacctgacagggctggaacacatgctgattaactgttctaagatgcttccggccgacataacccagctgaacaacattccacccacacaggaatcctattatgatcctaatctgccccctgtgacaaaaagtttggtgaccaactgcaagcccgtgaccgacaagatccacaaagcctataaagataagaacaagtaccggtttgaaatcatgggagaagaggagatcgccttcaaaatgatccgcacaaatgtcagccacgttgtcgggcagctggacgatattcgcaagaacccccgaaaattcgtgtgcttgaacgataacattgatcacaatcacaaagacgcacagactgtcaaagctgtgctgcgcgacttttatgagtcaatgttccctataccgagccagttcgagctgcctcgcgagtacagaaaccggtttctgcacatgcatgaactccaggagtggcgcgcttaccgtgataagttaaagttctggacccattgtgtcctggccactttgatcatgtttacgatcttcagttttttcgctgagcagctcatagccttaaagcgaaaaatctttcccaggagacgcattcacaaggaggcctcccctaatcgcattcgtgtc

SEQ ID NO: 214981 - DNA, 3768 bp, Artificial Sequence
  derived and/or modified sequence
atgctgtttaagctcctgcagcggcagacctacacctgcctgagccaccgctacggactttacgtgtgtttcctcggagtcgtggtgaccatcgtcagcgccttccaattcggcgaggtggtgctggagtggtcgcgtgaccagtaccacgtgctcttcgacagctacagggacaacatcgccggaaagagctttcaaaataggctgtgtctgccgatgcccatcgatgtggtgtacacctgggtgaacggaactgatctggagctcctgaaggagctgcaacaagtccgcgaacaaatggaggaggagcagaaggcgatgcgggaaatcctgggaaaaaacactaccgaaccgactaagaagtcagagaaacagctggaatgcctgctgactcactgcattaaggtcccgatgctggtgctggacccagcgctcccggccaatatcaccctgaaggatctgccatcactgtacccctccttccactcggccagcgacatcttcaacgtggccaagccgaagaatcctagcaccaacgtctcggtggtggtctttgactcgaccaaagatgtggaggacgctcactccggactcctgaaaggcaactcgcggcagaccgtttggcggggctatctcactaccgacaaggaagtcccaggactcgtgctgatgcaagatctggcgttcctctccggtttcccacctacgtttaaggagactaatcagttgaaaactaaactgccagagaatctgtcctcgaaggttaaactcctgcagctgtactctgaggcctcggtggccttgcttaagctgaataaccccaaggacttccaggaactcaataagcaaactaaaaagaacatgaccatcgatggaaaagaactgacgatctctccagcgtatctgctgtgggacctctcggctatctcacaatcgaaacaagacgaggacatttcagcgtcacgattcgaggataacgaagaacttcgttactctctgcgctccattgagcgtcacgccccgtgggtccggaacatctttatcgtgaccaatggacagatccctagctggctgaacctggacaaccctcgcgtcactatcgtgacccaccaggacgtctttcggaacctgagccacctgccgactttctcctccccggccatcgagagccatatccatcgcatcgaaggactgtctcaaaagttcatttaccttaatgacgacgttatgtttggaaaggacgtgtggcctgacgatttctacagccactcgaaaggacaaaaggtgtacctgacctggcccgtgccaaattgcgccgaggggtgtccgggttcatggatcaaagacggatactgcgataaggcctgcaataactcggcatgtgattgggacggaggagactgttccgggaactcggggggttcgagatacatcgccggaggcggaggaaccggctcgataggagtgggccaaccgtggcagttcgggggaggcatcaactcggtgagctactgcaaccaaggctgcgcgaactcgtggctggcagacaagttttgcgatcaggcctgcaacgtgctgtcgtgcggattcgacgcaggtgattgcggtcaggatcatttccacgaactctacaaggtgatcctcctgcctaaccagacccactatatcattcctaaaggagaatgcttgccttacttctcgtttgcggaagtcgctaaacgcggtgtcgagggagcgtactccgacaacccgatcatccggcacgcgtcaatcgcaaacaagtggaaaactattcacctgatcatgcactccgggatgaatgccaccaccatccacttcaatctgacgtttcagaatactaacgacgaggagttcaaaatgcagatcaccgtggaggtggacactcgcgagggaccaaaactcaattctactgcccagaagggatacgaaaacctcgtctccccgatcaccctcctcccagaggcggagattctcttcgaggacatcccaaaggaaaagcgcttcccgaagtttaaacgccacgatgtgaattcaaccagaagagcacaggaagaagtgaagatccctctcgtgaacatctcgcttctgcctaaggatgcgcagctttccctcaacactttggacctccagctggaacatggtgacataactctgaaaggctacaatctctcgaagtcggcgctgctgagatctttcctcatgaactcccagcacgcgaagatcaagaaccaggcgatcattactgacgaaaccaatgatagcctggtggcgcctcaggaaaaacaagtgcacaaaagcattctccccaatagcctcggagtgtccgagaggctccagcggcttaccttccctgccgtttcagtcaaggtcaacggacatgaccaaggtcaaaatccgcctttggacctggaaacgaccgccagatttcgcgtggagactcatacccagaaaactatcgggggcaatgtgacgaaagaaaagccaccaagtctgatcgtgccactcgaatcgcaaatgaccaaagagaagaagatcacggggaaggaaaaggagaactcccggatggaagaaaacgcagaaaatcatatcggagtgactgaagtcctgcttggaagaaaactgcagcattacaccgatagctacctcggctttctgccctgggagaagaagaagtactttcaggatctcctcgatgaagaggaatcactgaaaacgcagctggcgtacttcaccgacagcaaaaacaccggacgccaactgaaagacacctttgccgattctctgcggtacgtgaacaaaatcttgaactccaagtttggattcacttcgagaaaggtgccggcgcacatgccccacatgatcgaccgcatcgtcatgcaggagttgcaggacatgtttccggaagagttcgacaagacttcattccataaggtgagacacagcgaagatatgcaattcgcattcagctatttctactacctgatgagcgcggtccagccgctgaatatctcacaggtctttgacgaagtcgatacggatcaatcaggagtcctttcggaccgcgaaatacgcactctcgcaactcgcatccatgaactgccactgtcgctgcaggacctgactggactcgagcacatgctgattaactgcagcaagatgctgccagccgacattacccagctgaataacattccgccaactcaggagtcatactacgacccaaacctgccgccagtcactaagtccctggtgaccaattgcaagccggtgaccgataagatccacaaggcatataaggataagaacaagtaccggtttgaaatcatgggagaggaggaaatcgcattcaaaatgattcggacgaatgtgtcacacgtcgtgggccagctggatgatatccgaaagaatccacgtaagttcgtgtgtttgaatgataacatcgatcataaccacaaggacgcgcaaactgtgaaggcagtgctgagagatttctatgaatcgatgttcccgataccttcccaattcgaactcccaagagaataccggaacaggttcctgcatatgcacgaactccaagagtggcgcgcctaccgcgacaagctgaagttctggacccattgcgtgttggcaactctcatcatgttcaccatcttttcgttctttgccgaacagctgatcgcgctcaagagaaagatcttcccacgccgccgcatccataaggaagcctcgccaaatcgcatccgggtc

SEQ ID NO: 214982 - DNA, 3768 bp, Artificial Sequence
  derived and/or modified sequence
atgctgttcaagctgctgcagagacagacgtacacttgcctgtcgcatcggtacgggctgtacgtctgctttctcggagtggtggtgactatcgtgtcggcctttcaattcggggaggtcgtgctggaatggagccgggaccaataccacgtgctcttcgattcgtatcgcgataacattgctggaaagtcgtttcagaaccgactgtgcttgccaatgccgatcgacgtggtctacacctgggtgaatgggaccgatctggaattgctgaaagagctccagcaagtgagagagcagatggaagaggaacagaaggcaatgcgagaaattctcggtaagaacactaccgaacccaccaaaaagtccgagaagcagctggagtgcctgctcactcactgcatcaaggtgccaatgctggtgctcgacccggccctcccggccaacatcactctcaaagacctcccctcactgtacccctcctttcactcagcctcagatatctttaacgtagccaaacctaaaaacccgagcacgaacgtctcggtcgtcgtctttgattcaaccaaggatgttgaggacgctcatagcggacttctgaaggggaactcgcggcagaccgtctggagaggatacctgaccactgacaaggaagtccccggacttgtgctgatgcaagatctggccttcctgtccggatttccgccaacttttaaggaaaccaaccagctgaaaaccaagctcccagagaacctgtcatccaaggtcaagctgttgcagctctactccgaggcatctgtcgcgctgctgaagctcaacaaccccaaggacttccaggagctcaacaaacagactaagaagaatatgacgatcgatggaaaagaattgactattagcccggcctatctgctgtgggacctttctgcaatttcgcaatcgaaacaagacgaagatatctcggcctcacgcttcgaggacaatgaagagctgcgctactcgctgcgcagcattgaacgccacgccccatgggtgcgcaacattttcatcgtcaccaacggacagatcccatcgtggctgaatctcgacaacccgcgcgtcaccatcgtcactcaccaggacgtgttccggaaccttagccatctgccgacttttagctcgcccgccatcgagagccacatccatcgcatcgagggactgtcacaaaagttcatctacctgaacgatgacgtgatgttcggcaaagacgtgtggccggacgacttctacagtcactccaagggccaaaaggtgtatctcacttggcccgtgcctaattgtgccgaaggatgtccgggatcatggattaaagatggctactgcgataaggcatgtaacaattcggcttgcgattgggatggcggggactgttcggggaattcgggaggaagcagatacattgctggaggaggcggcactggctcgatcggagtggggcagccatggcagttcggcggaggaataaacagcgtctcctactgcaatcaaggatgcgcgaacagttggctcgcggacaagttttgtgaccaggcctgcaacgtgctgtcctgcggattcgacgcaggagactgtggtcaggatcacttccatgaattgtacaaggtgatcttgctgccaaatcaaacccattacatcatcccaaagggagaatgcctgccctacttttccttcgccgaggtggcaaagagaggcgtcgagggagcgtactcagacaacccgattatccggcacgcatccattgcaaacaagtggaaaactatccacctgatcatgcattcgggaatgaatgcgaccaccatccactttaacctgaccttccagaacactaacgacgaagagtttaagatgcagattacggttgaggtcgacacccgcgaaggaccgaaattgaattcgactgcgcagaagggatacgagaacctggtgtccccaatcactctgctgccagaggcggaaatactgttcgaagatatcccgaaggagaagcgttttccgaaattcaagcggcatgacgtgaattcgacccggagggcgcaagaagaggtcaagatcccgctggtgaacatttcccttctgccaaaagacgcccagctctcactgaatacgctcgatctccagcttgagcacggggatattacccttaaaggctacaacttgtccaaaagcgccctgctgcggtcatttcttatgaattcacaacatgcgaaaatcaagaaccaagccattatcaccgacgaaaccaatgactccttggtggcaccacaggagaagcaggtgcacaagtcaattttgccgaattcattgggagtgtccgagcggctgcagcggctgaccttcccagctgtgtccgtgaaggtgaatggccacgaccagggccagaacccgcctctcgacttggagactactgctagattccgggtagaaacccacacccaaaaaactattggcggaaacgtaactaaggagaagcctccgagcctgattgtgcctctcgaatcgcagatgaccaaggagaaaaagataactggaaaagagaaggaaaactcgcgaatggaggaaaatgccgagaaccatatcggagtgaccgaagtgttgctggggcgcaaacttcaacattataccgattcatacctgggttttctgccgtgggaaaagaagaaatacttccaagacctgctggacgaagaggaatcgcttaagacccaacttgcttacttcactgacagcaagaatactggaaggcagctcaaagacacgttcgctgattccctgcggtacgtgaataagatcctcaactcaaagttcgggttcaccagtcgcaaggtcccggcgcacatgcctcatatgatcgacagaattgtgatgcaggaactgcaggacatgttccctgaagaatttgacaagactagctttcacaaagtgcgccatagcgaagatatgcagttcgcattctcatacttttactacctcatgtccgcggtgcagccgctcaacatctctcaagtctttgatgaagtcgataccgatcagtccggcgtgctctcggaccgcgagatcagaactctcgcgacccgcattcacgagctgccgctctccctgcaggacctgactggtctggagcatatgcttatcaactgctccaaaatgctcccggctgacatcacccagctgaataacatcccgccgacccaggagtcgtactatgaccccaatctcccaccggtcaccaagtcactcgtgactaactgcaagcccgtgactgacaagatccacaaggcctacaaggataagaacaagtacagatttgagatcatgggagaggaagaaatcgcgtttaagatgatccgtactaacgtatcacacgtggtgggacagctcgacgatatccggaaaaacccgaggaaattcgtctgcctgaacgacaacatcgatcataaccataaggacgctcagaccgttaaggccgtcctgagagacttttatgagagcatgttcccaatcccttcgcaattcgagctgccgcgggagtaccggaaccggtttctgcatatgcacgaacttcaagaatggcgggcctaccgggataaactgaagttctggactcactgcgtcctggcaaccctcatcatgttcactatcttttccttcttcgccgagcagctgattgcactgaagagaaagatcttcccgcgccgcagaatccacaaagaagcctccccgaacagaatccgggtg

SEQ ID NO: 214983 - DNA, 3768 bp, Artificial Sequence
  derived and/or modified sequence
atgctgttcaaacttctgcaaaggcaaacctacacctgtctttcccacagatacggcctttatgtgtgctttctcggggtggtcgtgactattgtttcggcatttcagtttggagaggtggtgctggagtggtcgcgcgatcagtaccatgtgctgttcgactcctatagggataacattgcaggcaaatccttccagaatcgcctgtgccttccaatgccaatagatgtggtgtacacctgggtgaatggtactgacctcgaactgctgaaggaacttcagcaagtgcgcgaacaaatggaagaggaacaaaaggctatgagggaaattcttggcaaaaacacgactgaaccgaccaaaaagtcggaaaagcaactcgagtgtctcctgacccattgcattaaggtgcctatgttggtgctcgaccctgcccttcccgcaaacatcacccttaaagatctgccctccctctaccctagcttccattccgctagcgatatctttaacgtcgcaaaaccaaagaacccatccaccaacgtgagcgtggtcgtgttcgattcaaccaaggatgtggaagatgcccattcgggactgctgaaaggaaacagccgccaaaccgtgtggcgaggttacctcactactgacaaggaagtgcccgggttggtgcttatgcaggacctggctttcctgtcaggcttcccgccgacctttaaggaaactaaccagttgaaaactaagctgcctgagaacctttcctcgaaggtcaaactgctgcaactgtactcggaagcatccgtggcacttctgaaacttaacaacccaaaggatttccaagagttgaacaaacaaaccaagaaaaacatgaccattgatgggaaggaacttactatttcgcccgcctacctcctttgggatctgtcggcaatttcgcaatccaagcaagatgaggatatatcagctagtcgtttcgaggataacgaagaacttaggtattcactcagaagcatcgaacgtcacgcaccgtgggtgcggaatatctttatagtcacgaatggacaaattcctagctggctcaaccttgacaaccctagagtgacgattgtgacgcatcaagacgtctttcgcaatctttcgcacctgccaaccttttcctcaccagcaattgaatctcatattcaccgcatcgagggactgtcgcagaagttcatttacctgaacgatgacgtgatgttcggtaaggatgtgtggccggatgatttctactcccattcaaaggggcagaaggtgtatttgacctggccagttcccaactgcgcagaaggttgccctggatcgtggatcaaggatggatactgcgacaaggcatgtaacaacagcgcctgtgattgggatggtggtgattgcagcggaaactccggaggaagcaggtatatcgccggtggtggaggcaccggttccataggggtgggccaaccatggcagtttgggggaggcataaactcggtgtcgtactgtaaccaaggttgcgcgaactcatggctcgcagataagttttgtgaccaagcatgtaatgtgttgtcatgtgggtttgacgccggcgattgcggtcaagaccattttcatgaactttacaaggtgattcttctgcccaatcaaacccattacattatccctaagggagagtgtttgccttacttctcgtttgcggaggtggcaaagcggggtgtggaaggtgcctactcggacaaccctatcattcggcatgccagcatcgccaacaagtggaaaacgatacatctgatcatgcactccggaatgaacgcaactaccatccactttaatctcactttccagaacactaatgatgaagaattcaagatgcaaataaccgtcgaagttgataccagggagggtccaaagctcaattcgactgcacagaaaggatacgaaaatctcgtgtccccaataacccttcttccagaagccgagatactgttcgaggatattcctaaagaaaagcgattccccaaattcaagcggcatgatgtgaactcgactcgcagggcacaagaagaagtcaagattccactcgtgaacatctcgcttctgcccaaggatgcacagttgtcacttaacacccttgacctgcagctggaacatggcgatattaccctgaaaggttacaatcttagcaagtcggcgctgctgaggtcatttctgatgaattcccaacatgcgaagatcaaaaatcaagcaatcattaccgatgaaactaacgattccctcgtggctcctcaggagaagcaggttcataagtcaatccttccaaattcgctgggcgtctccgagagacttcagcggcttaccttccctgctgtgtccgtgaaggtgaacggtcacgatcagggtcagaatcctccactggatcttgaaaccacggcacgttttagagtcgaaacccatactcaaaagacgatcggaggaaacgtgacgaaggagaagcctccatcgctgattgtcccacttgaatcccagatgactaaggagaagaagatcaccggtaaggaaaaagagaactcccgtatggaagagaatgcagaaaaccacatcggcgtcactgaagttctcctgggaagaaagctccagcattacaccgactcctatctcggctttctcccatgggaaaagaagaaatactttcaggacctgctggacgaagaagaatcgttgaaaactcagttggcttacttcaccgattctaagaataccggcagacagcttaaggacacgtttgctgactcgttgcgatacgtgaacaagattcttaactccaagtttggtttcacctcccggaaggtccctgctcatatgcctcatatgatcgatcggattgtgatgcaggagcttcaagatatgtttcctgaagagtttgacaagacttcgtttcacaaagtgagacatagcgaagatatgcagtttgcatttagctacttctactacctgatgagcgccgtgcaaccactgaacatttcccaggtgttcgatgaggtggatactgaccagtccggtgtcctgtccgatagagagattcggacccttgctactcgaattcatgaactccccctctcccttcaagacctcaccgggcttgaacatatgctgataaactgctccaaaatgttgcctgccgatattactcaacttaacaacatcccacctacccaagagtcgtactatgacccaaatctgcccccggtgaccaagtcgttggtcaccaattgcaagcctgtgaccgacaagattcataaagcctacaaagataagaacaagtacaggttcgagattatgggagaagaagaaatcgcttttaagatgatcagaaccaacgtgtcccacgtggttggacagctcgatgatatacgcaagaacccaagaaagtttgtctgcctgaacgataacatcgaccataatcataaagacgcgcaaactgtcaaggcagtcttgcgtgacttttacgaatcgatgtttcctattccctcgcaatttgagctccccagagagtatcgcaatagattcctgcatatgcatgagcttcaggagtggcgggcataccgggacaaactcaagttttggacccattgtgtgctcgccaccctgatcatgttcaccattttctcgttcttcgcagaacaacttatagcacttaagagaaagatcttcccaaggcgcagaatccacaaggaggcatcacctaacagaatccgggtg

SEQ ID NO: 214984 - DNA, 3768 bp, Artificial Sequence
  derived and/or modified sequence
atgttattcaaactgctgcagcgacaaacttacacatgcttgtctcaccgctatggcttgtatgtatgttttctaggggtcgtggtaaccatcgtcagcgcatttcagtttggggaagttgttctggagtggagtcgggaccagtaccatgtgctgttcgactcctatcgcgataatatcgccggtaaatcttttcagaacagactttgtttgccgatgcctattgacgtcgtgtatacatgggtgaacggaacagatctggagctgctcaaagagttgcaacaggtaagggaacagatggaggaagagcaaaaggccatgagagaaattttaggcaaaaacactaccgagccaacaaagaaaagtgaaaaacaactcgagtgcctccttacacactgtattaaagtgccaatgctagttctggaccctgccttacccgcaaacattaccctgaaagacctgccctctctgtaccccagcttccatagcgcctcagatattttcaacgtagccaagccaaaaaatccttccaccaacgtttccgtggtggtgttcgactctactaaagatgtggaagacgcacactctggtctattaaaagggaacagcagacagactgtgtggagaggctacctgaccaccgataaggaggtcccgggtctagtcctgatgcaggacttggcctttctttctggctttccacctacattcaaagaaaccaatcagctgaagaccaagctgccagagaatctctcctcaaaagtgaagctcctgcaactctattccgaagcaagcgtggcactcctgaagctgaataatcctaaagattttcaggaacttaacaagcagactaagaaaaatatgaccatcgatggcaaagaactgactatctctccagcctatctgctttgggatctgtcagcgataagtcagtctaagcaagacgaagacatctcagcttcacgcttcgaggataacgaagagttacgttattctctgcggtcaattgagaggcacgctccatgggttcggaatatttttatcgtgaccaacgggcagatcccttcatggttaaacttggacaaccctcgcgtgacgatcgtaacgcaccaagatgtgttccgcaacttgtctcacttgccaacgttcagcagccctgcaatcgagtcgcatatccatcgtattgaaggactgagccagaagtttatatacctgaatgacgacgtgatgtttggcaaagatgtgtggccggatgatttctactctcactccaagggtcaaaaggtttacctgacctggcccgtgcccaactgcgccgagggatgcccaggctcgtggataaaagatggatactgcgataaagcttgtaataactccgcgtgtgattgggacggcggcgactgctctggaaactcgggagggtcgcgatacatcgctggaggaggcggcaccggctccattggggtcggacagccgtggcagttcggcggaggtataaattctgtatcttattgcaaccaggggtgcgccaattcctggctggccgataaattctgcgaccaggcatgtaacgtgctgagctgtggcttcgacgctggggactgtggccaagaccatttccacgagttgtacaaggtaatattactgccaaaccagactcactatataattcctaaaggcgagtgtctaccttattttagcttcgctgaagtcgcaaaaaggggggttgagggagcatactcggacaatccaatcattcggcatgcctcaatcgctaacaagtggaaaactattcaccttattatgcattccggtatgaacgccacgactatccactttaatctgacattccaaaacaccaatgacgaagagtttaagatgcagatcaccgtcgaggtagatacccgcgagggacctaaactgaactccactgcacagaagggttatgaaaaccttgtatcacccattactcttctgccggaagccgaaattttattcgaagatataccaaaggaaaagaggttcccaaaattcaagcgccatgacgtgaactcgacccgtagagcccaggaagaagtgaaaattcccctcgtcaatataagccttttacccaaagacgcgcagttgagtctgaataccttagacctgcagctcgagcatggggatattactcttaagggctataacctgagtaaatccgccctgcttagatcattcctaatgaactcccaacatgccaagattaaaaaccaggctataatcaccgatgagacaaatgactctctggtggcaccacaggagaagcaagtgcataagtccattctcccaaacagcctcggggtgagcgagcggcttcaacgcctgaccttcccagcagtctctgtcaaggtaaacggacacgatcagggccagaaccccccactggacttggaaacaaccgcccgttttcgggtagaaacacacactcaaaagactatcggtggcaacgtgactaaggagaaaccccctagtttgatcgtcccactagaatctcagatgacaaaggagaagaagatcacaggcaaagagaaagagaactcacgaatggaggagaacgccgagaatcatatcggtgtgacggaagttctcctgggccgtaaactgcagcactatactgactcatacctcggttttttaccttgggagaaaaagaagtatttccaagatctgctcgatgaggaggaatcacttaaaactcaactcgcatacttcaccgatagcaagaacacagggcggcagttaaaggatacctttgcagactcactgcggtatgtgaataagatcctaaactctaaatttggattcaccagccgtaaggtaccagcccacatgccccacatgatagatagaattgttatgcaggagctacaggatatgtttcccgaagaatttgataagaccagtttccacaaggtgcgccactctgaggatatgcagttcgccttctcttacttttactacctgatgtccgccgtgcagcctctgaacatctcacaggtgttcgacgaggtagacacagaccaaagcggcgtcttgagcgaccgcgaaatcagaaccctcgcaaccaggattcatgagcttccgctctctctgcaggatctcacgggactcgagcacatgctgattaactgttctaaaatgctccctgccgacatcactcagctaaacaacatccctcccacgcaggaatcttactatgacccgaacctccccccagtgacgaagagcttggttacaaattgcaagccggttaccgacaagatacacaaagcgtataaggataagaataagtacagatttgagatcatgggggaagaggaaatcgccttcaagatgatccgcacaaacgtttctcacgttgttggtcagctcgacgacattcggaagaatccacgcaagttcgtatgccttaatgacaacatcgaccacaatcacaaggatgcacagactgtgaaggccgtgttgcgagacttttatgagagcatgtttccgataccttctcagttcgaattgcccagagaataccggaatcgcttcttgcacatgcatgaactgcaagagtggcgcgcttaccgcgataagctgaaattttggactcactgtgtgctcgccacactgataatgtttaccattttctccttcttcgctgagcagctcattgctctgaagaggaaaatctttccgcgacggcgtatacataaagaggcctctcctaacagaatccgtgtt

SEQ ID NO: 214985 - DNA, 3768 bp, Artificial Sequence
  derived and/or modified sequence
atgctctttaagctgttgcagcgccagacctacacttgtctttcgcatcgttacgggctctacgtgtgctttctgggggtggtggtgactattgtgtcagcctttcaatttggggaagtggtgctggaatggtccagagatcaataccatgtgctgtttgattcataccgagataacattgcaggtaaatcgtttcagaacaggctctgcctgcccatgccaattgatgtagtctacacttgggtgaatggtaccgacctggaactgctgaaggagctccaacaggtgagagaacagatggaagaggaacagaaggccatgagagaaattctcggaaagaataccactgagcctactaagaagagcgagaagcaacttgagtgtctccttacccactgcatcaaggtgccaatgcttgtgctggatcctgcacttccagccaacattacccttaaggatttgccttccctttacccgagcttccattccgcatcggacattttcaacgtggcaaagcctaagaacccttccaccaacgtttcggtggtggtgtttgactcgaccaaggatgtcgaggatgcgcacagcggacttctcaagggtaacagcagacaaactgtgtggcgcggctatctgaccactgataaggaagttccagggctggtcttgatgcaagatttggcgtttctgagcggatttccgcctactttcaaggagactaatcagcttaaaaccaagctcccggaaaacctgagctccaaggttaaacttcttcagctgtactccgaagccagcgtggcactgctcaaacttaacaatcccaaagattttcaagaacttaacaagcaaactaagaagaacatgactattgacggtaaagaattgaccatctccccggcttacctgctgtgggaccttagcgccatttcacaatctaaacaagatgaagatatctccgcgtcgagatttgaggacaacgaggaactgaggtacagcctgcgttcgattgagcgccacgcgccgtgggtgcggaacatcttcatcgtgactaacggacaaatcccatcgtggctgaacctcgataatccgcgggtcaccatcgtgacccatcaggacgtctttaggaacctttcgcatctgcctactttttcgtctccagcaattgaatcccatatccatcgcattgagggactgtcccagaagtttatctacctcaatgacgatgtgatgtttggtaaggatgtgtggccagacgacttttactcgcattccaaaggacaaaaggtgtacctcacgtggccagtgcctaattgcgccgagggttgcccgggatcatggatcaaggacgggtattgtgacaaggcatgcaataacagcgcgtgcgattgggatggaggagattgttcgggaaatagcgggggatcgcgctacatagcgggcggcggcggtacgggttcgatcggtgtgggccagccatggcagtttggcggaggaatcaactcagtgtcctactgtaatcaaggatgtgcgaactcctggctcgcagacaaattctgtgatcaagcctgtaatgtgctctcctgcggttttgacgctggagattgtggccaggatcactttcatgaactctataaggtgattcttttgcctaaccagactcattacattattcccaagggcgaatgccttccctacttctcgttcgcagaagtggctaagcgaggggtcgaaggcgcatactccgacaaccctatcatacgacatgcctccattgccaacaaatggaaaactattcaccttatcatgcactccgggatgaacgcaaccacgattcatttcaatctcacttttcaaaatactaacgatgaggaattcaaaatgcagattactgtcgaagtggatacccgtgagggccccaagctgaactccaccgcgcagaagggatacgaaaacctggtcagccccatcacgttgctccccgaagcagagattctttttgaggatataccgaaggagaaacggtttccaaaattcaagcgacatgatgtgaactccactcgcagagcccaggaggaggtgaagatcccccttgtaaacatctcgctgttgcctaaggacgcgcaactctcactgaacaccctggacctccaactcgagcatggggacattactctgaaaggttacaacctgtcgaagtcggcactgcttcggagctttttgatgaattcccagcatgcaaaaatcaagaaccaagctattatcacggatgaaaccaacgattcactcgtggcaccacaggaaaagcaggtgcataagagcatccttcctaactccctgggagtgtcagaacggctgcagaggctgacttttccagctgtgtccgtgaaggtgaacgggcacgaccagggacaaaaccccccactggatcttgaaaccaccgctcgcttccgggtcgagactcatactcaaaagaccattggcggtaatgtgaccaaagaaaagccgccatcccttatagtccctcttgagtcccagatgaccaaggaaaagaaaatcacgggaaaggaaaaagagaattccaggatggaggaaaacgccgaaaaccatatcggagtcactgaagtcctgctgggaagaaagctgcagcattacactgactcctacctgggattcctgccttgggaaaagaagaagtacttccaggatctgctcgatgaagaagaaagtcttaagacgcagctggcatactttactgattcgaagaatactggtcgtcaactgaaagacacctttgccgactcgctccgctacgttaacaaaatacttaactcgaaatttgggtttacttcgaggaaggttccagcccacatgccacatatgatcgatagaattgtgatgcaagagcttcaagacatgttccctgaagaattcgataagacttcctttcataaggtgcgacattccgaggacatgcaatttgctttttcatacttctattacctcatgtcggcggtgcagcctttgaacattagccaggtgttcgacgaggtcgacaccgatcaatcgggagtgctctccgacagagaaatcagaaccttggcaaccagaatccacgaactcccactttccctgcaagacctgaccggacttgaacacatgctgatcaactgttcgaagatgcttcctgcagacattactcaactgaacaacataccccctacccaggaatcatactatgaccctaatttgcctccggtgactaaaagcctcgtgacgaattgtaagcccgtgactgacaagatccataaggcctacaaagataagaataagtaccggttcgagattatgggcgaggaggaaattgcctttaagatgatccgtactaacgtgagccacgtggtgggtcaacttgatgatatccgcaagaaccctagaaagtttgtgtgcctgaacgataacatcgaccacaaccataaggatgcacagacggtgaaggcagtcctgcgcgatttctacgaatcaatgttcccaattccatcacagttcgaactccctcgtgagtaccgcaatcgatttctgcacatgcatgaattgcaagaatggcgggcctacagggataagctcaagttttggactcattgtgtccttgcaactctgattatgtttaccattttctcgttttttgcggaacagctgattgcccttaagaggaagatttttcctcgtcgtcgtattcataaagaagctagccctaacagaatacgcgtg

SEQ ID NO: 214986 - DNA, 3768 bp, Artificial Sequence
  derived and/or modified sequence
atgttgttcaagctgttgcaaagacaaacttacacttgtctttcgcatagatacgggctgtacgtctgctttctgggagtcgtggtgactatcgtgtccgcattccaattcggcgaagtcgtgctcgaatggagcagagatcagtaccatgtcttgtttgattcttacagagataacatagcaggcaagagcttccaaaaccgcctttgtctgcctatgcctatcgatgtcgtgtacacttgggtgaacggaactgatctcgagcttttgaaggaacttcagcaggtccgtgagcagatggaggaagagcagaaggcaatgagagagattctcggaaaaaacacgactgagccgaccaagaaaagcgaaaaacaactcgaatgtctcttgactcattgtattaaggtccccatgttggtgctggatcctgccctccccgcgaacattactctgaaggaccttccttcgctttaccctagctttcatagcgcgtcggatatcttcaacgtggccaaaccaaagaatccttcgaccaacgtgtcagtggtggtgtttgactcaaccaaggacgtggaagatgcacattccggcttgcttaaaggaaattcaagacaaactgtctggaggggatatctcactaccgataaggaggtgcctggtctggtccttatgcaggacttggcatttctgtcgggatttccaccgacgtttaaggagactaatcaactgaaaaccaagctgcctgagaaccttagctccaaagtgaaacttctccaactttacagcgaagcatctgtcgcgcttcttaaacttaacaaccccaaagatttccaggagctgaataagcaaacgaaaaagaacatgaccattgatggtaaagaactcactatatcgcctgcatacctgctgtgggatctttcggcgatctcccagtcgaaacaggatgaagatatttctgctagcaggttcgaggataacgaagagctcagatactcactcagatccattgaacgacacgcaccctgggtgcgcaacatattcatagttaccaacggacagattccttcctggctgaatctggataacccccgggtgaccatcgtgacccatcaagatgtgttcaggaatctgagccatcttccaacgttttcgtcccctgcaatagagtcacatattcatcgcattgaagggctttcccagaagttcatttaccttaacgacgatgtgatgttcggaaaggatgtgtggccggatgacttctactcacacagcaagggtcaaaaggtgtaccttacttggcccgtgcctaattgtgctgaaggatgtcctggatcttggattaaggacgggtactgtgataaggcatgtaacaactccgcatgcgattgggatggaggagattgctccggaaatagcggaggctcacggtatattgcaggaggagggggcaccggttcgatcggagtgggacaaccttggcaattcggtgggggtataaactcggtttcatactgtaaccaaggttgtgcaaactcctggcttgccgacaagttttgtgatcaagcctgtaacgtgctgtcatgtggtttcgacgctggcgactgcggccaagatcatttccacgaactttacaaggtcattctccttcctaaccagactcactacattattcctaagggcgaatgtttgccatacttttcgtttgccgaggtcgccaagcgcggtgtggaaggagcttacagcgataatcccattattcgtcatgcatcaatcgctaacaaatggaaaaccatccatttgatcatgcacagcggtatgaatgcaaccaccattcatttcaatctgacctttcagaacaccaacgatgaggagttcaaaatgcagattaccgtggaagtggacactagagagggaccgaaacttaactcaaccgcgcagaaggggtacgaaaacctggtgtccccaattaccctgctgcctgaggcagagattctgtttgaagatatacctaaggagaagagatttcctaagtttaagcggcacgacgtgaactcaactaggagagcacaggaagaagtcaaaatccctttggtcaacatttcccttcttccaaaagatgcacagctcagccttaacaccctggatcttcaactggaacatggtgatattactcttaaggggtacaatctgtccaagagcgccctcctgcgatcctttctcatgaactcacaacatgccaaaatcaagaaccaagcaatcattaccgacgagacgaatgatagcctcgtggcaccacaggaaaagcaagtccataaatcgatactcccgaacagcctcggagtttcggaaagactgcagcgactgacgtttcccgcagtgtcggtgaaagtgaacggacatgatcagggtcaaaatccacctttggatttggaaaccaccgccagatttcgcgtggaaacccatacccaaaagactataggcggtaatgttactaaggaaaagcctccatcgttgattgtcccgctcgagtcacaaatgaccaaggaaaagaagattaccggaaaggagaaggagaattccagaatggaagagaacgctgaaaaccacattggagtcacggaagtgctcctgggcagaaagctccagcattacaccgattcgtacctgggatttctgccatgggaaaagaaaaagtacttccaagatctcttggatgaagaagaatcgctcaagactcagctggcttacttcaccgactccaagaatactggaaggcagctcaaggatacctttgccgactcgcttcgatatgtcaataagattctgaactcgaagttcggatttacctcgcggaaagtgcccgcacatatgccccatatgattgaccgtattgtcatgcaagagctccaagacatgtttccagaagagttcgacaaaacttcctttcataaggtcagacactccgaagatatgcagtttgcgttcagctacttctactacctcatgagcgccgtgcaaccactgaacattagccaagtgttcgatgaggtcgatactgaccaatcaggcgtcctctcggacagggaaattagaactctcgcaaccaggatccacgaactgcctctttcgctgcaggaccttactgggcttgaacatatgctgattaactgctccaagatgcttcctgcggatataacccagctgaacaacattccacctacccaagaatcctattatgaccctaatcttccaccagtcaccaaaagtcttgtcaccaactgtaagcccgtcactgacaagattcataaggcctacaaagacaaaaacaagtacagatttgaaatcatgggtgaggaagaaatcgctttcaagatgattcggactaatgtgtcccatgtggttgggcagctcgacgatattcggaaaaatccaaggaaatttgtctgtctgaacgacaatatcgaccataaccacaaagatgcccaaactgtgaaggccgtgctgagggatttctacgaatcgatgtttccgataccaagccagttcgaacttccaagagaatacagaaaccgttttttgcatatgcatgaacttcaagagtggagagcctaccgggataagctgaaattctggacgcattgtgtgctcgccactctcataatgtttaccatcttcagttttttcgcagaacaacttatcgcgctgaaaaggaagatattccctagacgtcgtatccacaaggaggcatcgcctaaccgaattagggtc

SEQ ID NO: 214987 - DNA, 3768 bp, Artificial Sequence
  derived and/or modified sequence
atgctgttcaagctgctgcagaggcagacatatacgtgtctctctcacagatacggtctgtatgtttgctttctcggcgttgtcgtgacgatcgtttcagccttccaatttggagaagtggttctggaatggtcgcgggaccagtaccatgtgctgtttgactcgtatagagataacattgctggcaagtccttccagaaccgactgtgcttacccatgccaatcgacgtcgtgtacacctgggttaatggaaccgacctcgagttgctcaaagagctacagcaagtgcgagagcagatggaggaggagcaaaaagccatgagggaaatcctagggaagaataccacagaaccaaccaaaaagtctgaaaagcagctggaatgtctactgacacattgcattaaagtgcctatgctcgtgctcgacccagctctgccagccaacatcacactgaaagatttgccaagcttatatccctccttccattctgcttccgacatatttaatgtagctaagcccaagaacccatccacaaacgtaagcgtggtggtattcgattccacgaaagacgtggaggacgcccactccggactcttgaaagggaactcgcgacaaactgtctggcgaggatacctgaccactgacaaggaggtgccaggcttggtgctgatgcaggatttggcttttctatctggctttcctcccacgttcaaagagacaaaccagctcaagaccaagctgcccgagaatctgagttctaaggtcaaattactgcagctttacagtgaggcctctgtagcgctgctgaagctgaacaaccctaaggacttccaagaattgaacaaacaaactaagaaaaatatgacgattgacggtaaggagttaaccatcagtcctgcttacctattatgggacctgtccgccatttcacagagcaaacaggacgaggacatttctgcgagccggtttgaggacaatgaggaactcaggtactcactgagatccattgagaggcacgcaccatgggtcaggaacatcttcattgttaccaatggccagatcccctcttggttgaatctcgacaacccccgggtaacgatcgttacccaccaggacgtttttcggaacctcagccatctccccacctttagttccccagcgattgagagccacatccatagaatcgaggggctctcccagaagtttatctatctgaacgatgacgttatgttcggcaaggatgtgtggccagacgatttctattcccacagtaaaggccagaaggtgtatctaacatggccagttccaaactgcgccgaggggtgccctggaagttggatcaaagatgggtactgtgataaggcctgtaacaactccgcctgcgattgggatggcggtgactgcagcggaaattccgggggatcacgctacattgcaggcggaggcggtacgggttctatcggagtcgggcagccatggcagttcggcggcggcatcaactcagtcagctattgcaaccaggggtgcgccaatagctggctcgcagataagttctgcgaccaggcctgtaatgtgctatcttgtggattcgatgctggagactgtggccaggatcacttccacgaattgtataaagtaattctgctcccgaatcagacacactacattattcccaagggtgagtgcctcccttatttctcattcgccgaggtggcaaaaagaggggtagaaggcgcttactctgataatcccattatcaggcatgcatccatagctaacaaatggaagactattcatctcatcatgcattcaggcatgaacgcaacaacaatccatttcaatctgacctttcagaatactaatgatgaagaattcaagatgcagatcactgtagaagtggatactcgtgagggccccaaactgaactcaacagcgcagaagggctatgaaaacctcgtgtcaccgatcacactgcttcctgaggcggagatcctgttcgaggacatacccaaggagaaaaggtttcccaagtttaaacgacacgacgttaatagcaccagaagagcccaggaggaagttaaaattcccctggtgaatatctcactgctcccgaaagatgcccaattatcactgaacactctggaccttcagctagaacacggcgacattactctcaaggggtacaacctaagcaagagtgcgctcctgcgttctttcctcatgaactcacaacatgccaagataaagaaccaggcaattattaccgacgagactaatgattccttggtggctcctcaagagaagcaggtgcacaagagtatcctgcctaattccctcggggtcagcgaaaggctccaacgactgacctttccagctgtgtccgtaaaagtgaacggccatgaccagggtcagaatccccccctggatctggaaaccacagccagattcagggtcgagactcacacccagaagaccattggcggaaacgtcacaaaagagaaacctccttcgctgattgtaccacttgagagccaaatgactaaagaaaagaaaattacgggcaaggagaaagagaattcgaggatggaggagaacgctgagaaccacatcggcgttaccgaagtgctgttagggcgaaagttgcagcactatacagactcctacttaggattcctgccctgggaaaagaagaagtacttccaggacttactcgatgaggaggaatctctgaaaacccagttagcctatttcaccgacagcaaaaataccggccgccagctgaaggacacctttgctgatagcttgaggtatgtgaataaaattcttaactcaaaatttggcttcacatccagaaaagtgcccgctcacatgccgcacatgattgacaggatcgtcatgcaggaacttcaagacatgttccctgaggagtttgataagacgtcttttcataaggtgcgacatagcgaagacatgcagtttgctttctcatacttctactatcttatgtcagccgttcagccactcaacattagtcaggtattcgacgaagtcgatactgatcaaagcggagtcctgtccgacagggaaatcagaacgttagcgactcgtatccacgaactcccactctcattgcaagatctgaccggcctggagcatatgttgatcaactgtagtaagatgctgcctgcagatattacccagctgaataacatcccacctactcaggagtcttactatgatccgaatctgcccccagtcaccaaaagcctggtaacgaactgtaaacccgtaaccgataaaatccacaaggcttacaaagataagaataaataccggtttgagatcatgggtgaagaagagatcgccttcaagatgatcaggacaaatgtcagtcatgtggtcggccagctcgacgacattagaaaaaacccccgaaaatttgtctgcctaaatgacaacatagaccataaccacaaggacgctcaaacagtcaaagcagtgctgagggacttttacgaatccatgtttcccattcctagccagttcgaactgcctagggaatacaggaataggtttctgcatatgcacgaactgcaggaatggagagcatatagagataagctgaaattttggacccactgtgtcctggccaccctgatcatgtttactatcttcagttttttcgcagaacaactgatcgctttaaaaagaaaaatttttccgaggcgacgaattcacaaagaagcttcacccaataggattagagtg

SEQ ID NO: 214988 - DNA, 3768 bp, Artificial Sequence
  derived and/or modified sequence
atgctgttcaaactcctgcaacggcagacttacacttgcctgtcccatcggtacgggctctacgtctgctttctgggagtggtcgtcactattgtgtcggctttccagtttggggaggtcgtgctcgaatggtcccgcgatcaataccacgtgctgttcgactcataccgggacaacattgcgggcaagtcattccagaatagactctgtctgcctatgccgattgatgtcgtctacacttgggtcaatgggaccgacctggaactcctcaaagaactgcagcaggtgagggaacaaatggaagaggagcagaaggctatgagagaaatactggggaagaacaccactgagccgaccaagaaaagcgaaaagcaactggaatgccttctcactcactgtatcaaggtccccatgttggtgctggacccggcactccccgccaatatcaccctcaaggaccttccgtcactttacccatcattccactccgcctctgatatcttcaatgttgcgaaaccgaaaaatccgtctactaacgtgagcgtcgtcgtgttcgattcgactaaagacgtggaggacgcgcactccggacttctgaaaggcaattcacgtcagaccgtctggcgcggctatctcaccaccgataaggaggtgccgggcctcgtgctcatgcaggacctggccttcctcagcggcttcccacctaccttcaaagaaacgaaccagctgaaaacgaaactgccagagaacctgtcaagcaaggtcaagctcctgcagctttactctgaggcttcagtggctctgctgaagttgaataacccgaaggatttccaagaactgaacaaacaaactaagaagaatatgaccattgacggcaaggaactgactatttcccccgcatacctcctctgggatctgagcgccattagccagtctaagcaagatgaagatatctcggcgtcacggtttgaagataacgaggagctgcgctactcgctccgctccatcgagcggcacgcgccctgggtcagaaacatcttcatcgtgacgaatgggcagatcccgtcgtggctgaacctggataatccgcgggtgactatcgtgacccatcaggacgtgttcagaaacctttcgcatctgccgacgttctccagccccgccatcgagtcccacattcacagaatcgaaggattgtcccagaaattcatctacttgaatgacgacgtcatgtttggtaaggacgtgtggccagacgacttttactcccactcaaagggccagaaggtgtaccttacttggccagttccaaattgcgccgagggttgccctggttcctggatcaaagacggatactgcgataaggcctgtaataactccgcatgcgattgggacggaggagattgctcaggaaattcaggaggaagccggtacatcgctggcggtggaggtactggatccatcggcgttgggcagccgtggcagttcggaggaggaatcaattcggtttcctactgcaaccaaggctgcgcgaatagctggctggcagacaagttttgcgaccaggcatgtaacgttctctcgtgcggattcgacgcgggagactgtggccaggatcacttccatgagctgtataaggtgattctcctcccgaaccagacccactacattatcccgaaaggagaatgtctgccgtatttctcctttgccgaggtggctaagcgcggagtcgaaggtgcttactcggataacccgatcatccgccacgccagcatcgcgaataagtggaaaacgatccatctgatcatgcactccggcatgaacgcgactaccatccacttcaatctgacctttcaaaataccaacgacgaagagtttaagatgcaaatcactgttgaggtggatacccgggaaggtccgaagctgaactcgactgcccagaagggttacgaaaatctcgtgtctccaatcaccctgcttccagaagcggagatcttgtttgaagatatccccaaggaaaagaggttcccgaaattcaagcgccatgacgtgaactccactcgtcgagctcaggaggaagtgaaaatccctctggtcaacatctcgctgctcccgaaagacgctcagctgtcactcaacacccttgacctgcagctcgagcatggagacatcactctgaagggttacaacctctcgaagtccgcccttctcagatcctttctgatgaactcgcaacacgccaagatcaaaaatcaggctattatcaccgatgaaaccaacgacagcctggtggccccacaagagaagcaagtgcacaagagcatcttgccaaactcgcttggagtgtcagagcggctgcaacggctgacctttcctgcagtgagcgtgaaggttaacgggcatgaccaggggcaaaaccctcctctggacttggagactactgcacgcttccgggtggagactcacacccaaaagaccatcggcggaaacgtgactaaggaaaaaccgccgtcgctgattgtgccactcgaaagccagatgaccaaggagaagaaaatcactggaaaagaaaaagaaaattctcgaatggaagagaacgcggaaaaccacattggggtcacggaggtgcttctgggacggaagctgcagcactatactgactcgtacctcggcttcctgccttgggagaagaagaagtacttccaagaccttctggatgaggaggagtctctgaaaacccagttggcctatttcaccgattcgaagaacactggtcgacagttgaaggacaccttcgcagacagcctgcgctacgtcaacaaaatactgaattccaagttcggattcaccagccggaaggtgccagcccacatgccgcacatgatcgaccgcatcgtgatgcaggaactgcaggacatgtttccagaagaatttgataaaacctccttccacaaagtgcggcactcggaagatatgcaatttgccttcagctacttctactacctgatgtctgccgtgcaaccgctgaacatctcgcaagtgttcgatgaagtggatactgaccaaagcggcgtgctgagcgatcgcgaaatccggactctggccacgcggatccatgaactgccattgtctcttcaagatttgaccggactcgagcacatgctgatcaattgttcgaagatgctgccagccgacatcactcaactcaataacattccccccacccaggaatcgtactacgatccgaacctcccgccagtgaccaagagcctggtgaccaactgcaagccagtgactgacaaaatccataaggcatacaaggacaagaataagtaccgctttgagattatgggggaggaggagatcgccttcaagatgattcgcacgaatgtttcccatgtcgtgggacagctggatgacattaggaagaaccctcgcaaattcgtctgcctcaacgacaatattgatcataatcacaaggacgcacagaccgtcaaggctgtgctgcgcgatttctacgagagcatgttcccaatcccttcacagttcgaattgccgcgagaataccggaacaggtttctccatatgcatgaactgcaggaatggcgggcctaccgcgacaagttgaaattctggacccattgtgtgttggccactctcattatgtttactatcttctcgttcttcgcggagcagctgatcgctcttaagcgcaagatctttccgcgccggcgcatccataaggaggcatcgcctaatcggatccgggtt

SEQ ID NO: 214989 - DNA, 3768 bp, Artificial Sequence
  derived and/or modified sequence
atgctgttcaagctgctgcagaggcaaacgtacacctgcctcagtcatagatacggtctgtacgtgtgctttttgggagttgtagtcactatagtgtctgcctttcagttcggcgaggtcgtgttggagtggagccgcgatcagtatcacgtgctgtttgatagttatagagataacatcgccgggaagtcattccagaacaggctgtgtctacctatgccaatcgatgtggtttacacctgggttaatggtaccgatcttgaactgcttaaagaactgcaacaagtacgggaacagatggaggaggagcaaaaggcaatgcgtgaaatattgggcaaaaacacgactgaacccacaaagaaaagcgaaaagcagttagaatgcctccttacgcactgtatcaaagttcctatgctggtgctggaccctgccctcccagcaaatatcaccctcaaggacctgcctagcctgtacccatcttttcactcagcatccgacatcttcaatgtagcgaagccgaagaatcccagcacaaatgtgtcagttgtggtgttcgattctacaaaggacgttgaagacgcccatagtggtctactaaaggggaactcccggcagactgtctggcggggctatctcaccactgataaggaggtcccaggactggttttaatgcaagatctggcttttctgagcgggttccctccaacatttaaagagacgaaccagttgaagaccaagcttcccgagaatctgtcctcaaaggtgaagttactgcagctctactcagaggcttccgtggccctcctgaaactgaacaatcctaaagatttccaagagctgaacaagcagacaaaaaaaaacatgacaattgacgggaaggaactgacaattagtcccgcatatctgctttgggatctgagcgctattagccagagcaaacaggacgaagatatctccgcgtcaagattcgaggacaatgaggaactccgctacagcctgcggagcattgagcggcacgccccctgggtgcgaaatattttcatagtgacaaacggccagatcccttcatggctcaatcttgacaatcctcgcgtgaccatcgtcactcatcaagatgtgttccgaaacctgagccacctccccacattctcgagtccggcaattgaatcccacatccatcggattgaagggctaagccagaagttcatttatttaaacgacgacgtcatgtttggaaaagacgtgtggcctgacgacttttactctcatagcaagggccagaaggtgtatttaacatggcctgttccgaactgtgcggagggttgtccaggatcatggatcaaggacgggtactgtgataaagcatgcaacaactcagcctgtgactgggacggcggggattgttccggaaacagtggcggcagccggtatatagccggcggcgggggtaccggctccatcggcgtaggccagccatggcaatttggcggcggaatcaattctgtgagctattgtaaccagggttgcgccaactcctggctagccgataagttttgtgatcaggcctgtaacgtgctaagttgcgggttcgatgccggcgattgcggtcaggaccactttcacgagttgtataaggttatcctccttcccaaccagacacattacatcatcccaaaaggcgagtgcttgccttatttttcattcgcagaggtcgccaagcgaggggttgagggagcttattccgacaatccaattatccgccatgcttctatagctaacaaatggaaaactatccacttaatcatgcattccggaatgaacgcaaccacgatccactttaacttgactttccaaaatacgaacgatgaggagtttaagatgcagatcacagtggaggtcgatacaagggagggtcctaaacttaacagcaccgctcaaaaaggctatgagaacctggtgtcacctattacactgcttccagaggccgagatattgttcgaagacattcctaaagagaagcggttcccaaagttcaaaagacacgatgtgaatagcaccaggcgcgctcaggaggaggtgaagatccccttggtgaacatctctctgctgccaaaggacgcccagctgtcattaaatactcttgatctacagctcgaacacggggatattaccctaaaggggtacaatttgtcgaagtctgctttgctgcgttcatttttgatgaatagtcagcacgccaaaatcaagaaccaggctataatcaccgatgaaaccaatgactctctggtggcaccccaggagaagcaagttcacaagagcatactcccaaacagcctgggcgtctctgagaggttacagcggttgacatttcctgcagtgtctgtaaaggttaacggacacgatcagggccagaatccaccgctggatttggaaactaccgcccgcttccgggtggagacacacacacaaaaaaccattggtgggaacgtgactaaggaaaaaccaccatctctcatagtgcccctggagagccagatgaccaaggaaaaaaagattacgggaaaggaaaaggaaaatagtaggatggaggagaatgcggaaaatcatatcggtgtgactgaagtccttttgggtcgcaagcttcagcactataccgactcctacctgggattccttccatgggagaaaaagaagtattttcaggatctattggatgaagaagagagcctcaagacccagctggcatatttcactgactctaaaaatacgggtcggcagttgaaagacacctttgcagacagtctgcgctacgtcaataagattctcaactcaaagttcggattcacatcaaggaaggtccctgcccacatgccccacatgattgaccgcatcgtgatgcaggagctccaggatatgttccccgaggaatttgacaagactagtttccataaggtccggcatagcgaggacatgcagttcgccttctcgtacttttattacctgatgagtgccgttcaaccactgaatatcagccaggtctttgacgaagtcgacactgatcagagtggggtgctaagtgatcgagagatccgcaccctggcaaccaggatccacgaactcccactaagtctccaggacctgactgggctggaacacatgttgattaattgcagcaagatgctgcccgctgacattacccagttgaacaacatcccacctacacaggagtcttattatgatcctaacctaccacccgtgaccaagagcctcgtcaccaattgcaagccagtcacggacaagattcacaaggcatacaaagataagaataaatatcggttcgaaattatgggtgaggaggaaattgcctttaagatgattagaaccaacgtgtctcacgttgtaggacagctggatgacatcaggaagaatccccgcaagtttgtttgtctgaatgacaacatcgatcataaccataaggatgcccagactgtgaaagccgtgctgagggacttttatgaatccatgttcccaatcccatcccagtttgaattgccaagagagtaccggaatcgctttctgcacatgcatgaattgcaagaatggagagcttatcgggataagttgaagttctggacacactgcgtcttggccacactgatcatgttcacaatcttttctttctttgccgagcagctgatagccctcaaaaggaaaatcttccctagacgaaggatccacaaggaagcgtcgccaaaccggatccgagta

SEQ ID NO: 214990 - DNA, 3768 bp, Artificial Sequence
  derived and/or modified sequence
atgttgtttaaactgcttcagagacagacatacacatgcctgtcccatcgctatggcctgtatgtgtgtttcctcggggtggtcgtgactattgtctccgccttccagtttggggaagtggtgctagagtggagccgagatcagtaccacgtcctctttgactcatacagggacaacatagctggaaagagcttccagaacaggctttgcctcccgatgccaattgacgtcgtgtacacctgggtgaacggaactgatctggagctgctgaaggagctgcaacaggtgcgggagcaaatggaagaagagcagaaagccatgagagagatcttgggaaagaatacaaccgaacctaccaagaagtcagagaagcagctcgaatgtctgctgactcactgtatcaaagtaccgatgctggttctcgatcccgctctaccagccaatattacactgaaagatctgccgtcactgtatccatccttccattcagcgtctgacatcttcaatgtggctaagccgaagaaccccagcactaacgtcagtgtggtagtgttcgatagcaccaaagatgtggaggatgcgcattccggactcctaaaagggaatagccggcagacagtgtggcgaggttatctgaccacggacaaagaagtgccagggctcgtcctgatgcaggatcttgcattccttagtggcttcccccctacctttaaggaaaccaaccaattgaagaccaagctccccgagaatctctcttctaaggtaaagctgctgcagctctactccgaggcttcagtggcgctgctgaagctcaataacccgaaggacttccaggaactgaacaagcaaaccaagaagaatatgacgatcgacggcaaggagttgactattagccctgcatacctgctgtgggacctttctgccatcagccagtctaagcaagacgaagacataagcgcctcaagattcgaggataacgaggagctccgatacagcctgagatccattgagcggcatgctccctgggtgagaaacatttttatcgttaccaatggacagatcccgtcctggctgaaccttgacaatccaagagtcacaatcgtgacacaccaggacgtgtttcgcaacttatctcatctgcccacttttagcagcccggcaatcgagagtcacatacaccgcatcgaagggctttcccagaagtttatctaccttaatgatgatgtcatgttcggaaaggacgtctggcccgacgacttttacagccatagtaagggccagaaggtctaccttacttggcctgttccaaactgcgccgaaggttgtcctggatcttggataaaagacggttactgcgacaaggcctgcaacaactccgcttgcgattgggatgggggagattgcagtggcaacagcggaggcagtaggtatatcgcaggcggagggggtacaggcagtattggggtggggcagccttggcaattcggagggggcatcaactcagttagctactgtaaccagggatgtgctaacagctggctggcggacaaattctgtgatcaagcatgtaacgtgctgtcatgtggtttcgatgctggcgactgcggtcaagaccatttccacgagctgtataaagtgattttgctgcctaatcaaacacactacatcatccctaagggcgagtgcctgccttatttctcctttgccgaggtggccaagcgaggagtggagggtgcatatagtgataatccgatcattaggcatgcgagcattgcaaataagtggaagacaatccacttgattatgcatagcggcatgaacgctactacaatacatttcaatctgacttttcagaatacaaacgacgaggaattcaaaatgcaaatcaccgttgaggttgatacccgggagggccccaaactcaactccacggcccagaaaggctatgaaaacctggtgtcgcccattaccctcctgcctgaagcggagattctattcgaggacattcctaaggaaaaaaggttccctaaatttaagcgccacgatgtgaattctacacgtcgagctcaggaagaggtgaaaatccctctggtgaacatctccctgctgcccaaggacgcacagctctcattaaatacactggatctgcagttggagcatggagacattacactgaagggctacaacctgtccaagtctgcattgctgcggagtttcctgatgaactcacagcacgcgaagattaaaaaccaggccatcataaccgacgagacgaacgatagcctggttgctccccaagagaagcaggtgcacaagagtatcctgcccaatagtctgggcgtgtcagagcgcctacaacggctgacatttccggccgtgagcgtgaaggtgaatgggcacgatcagggccagaaccctcctctggatctggaaactactgcccgttttagagtcgagacacacactcaaaaaactattgggggcaatgtaacgaaggagaaaccgccatcactcatcgtcccgcttgagagccagatgaccaaggagaagaaaatcactgggaaggaaaaagaaaatagtcggatggaggaaaatgccgaaaaccatattggcgttacagaagtactgcttggcaggaaactgcagcactacacagactcctatctgggatttctgccctgggagaaaaaaaagtatttccaggatcttctggacgaggaggaaagcttgaaaactcagctggcatactttacggacagcaagaacacagggaggcagctaaaagacactttcgcagacagtctaaggtacgttaacaagatcctcaactcgaagttcggatttacgtcccgaaaggtccctgcacacatgccacatatgattgaccgtattgtgatgcaagagctccaagacatgttccctgaggagttcgataagacatcttttcataaggtacgacacagcgaagatatgcaattcgctttctcatacttctattatctgatgagcgcggtccagccactaaacatatcccaggtgttcgacgaagttgacacagaccaatcgggcgttctgagcgatcgtgaaattcgcacgctcgcgacacgcatccacgagctgcctctctcactccaggatttaactggcttagaacacatgctgatcaactgctcgaaaatgctcccagcggatattacacagctaaataacataccgccgacccaggagagctattatgaccctaacctgcctcccgtcaccaaaagtcttgtgacaaactgcaaacctgtcaccgataagatacacaaagcatacaaagacaaaaacaagtatagattcgaaataatgggtgaggaggaaattgcctttaagatgatccgcacgaatgtgagccacgtagtcgggcagctggacgacattaggaagaatccccgcaagttcgtctgtttaaacgataatattgatcacaaccacaaagacgcacaaaccgtaaaggccgtgttgagggacttctatgaatcaatgtttcctattccctcccagttcgagctcccccgggaatacagaaatcgatttctccatatgcacgagcttcaggaatggagagcctatagagacaagttaaaattctggactcactgcgttctggcaacgctcattatgttcaccatcttctcattttttgctgaacaacttatcgcattgaagcggaaaatatttcccaggcgcaggatacacaaagaggcatcccccaaccgaatccgcgta

SEQ ID NO: 214991 - DNA, 3768 bp, Artificial Sequence
  derived and/or modified sequence
atgcttttcaagttgcttcagaggcagacatatacctgtttgagccacagatacggactgtacgtctgcttcctgggcgtggtggtgacaatcgtcagcgcttttcagttcggagaggtggtgctcgagtggtctagggatcagtaccacgtccttttcgattcctacagagacaacattgccggtaaatccttccaaaaccgcctctgcttgccaatgcccatcgacgtggtgtacacatgggttaacggcacggatctcgagcttcttaaagagctgcaacaagtcagggagcagatggaggaggagcagaaggctatgcgcgagattctgggcaaaaatacaaccgaaccgacaaagaagtccgaaaagcagttggagtgtttgctcacccactgcatcaaggtccctatgctcgtgctggacccagctctgccagcaaacatcaccctgaaggatctccccagcctttacccatcctttcactctgcttctgacatttttaacgtcgccaaaccgaaaaatccaagtaccaacgtaagcgtagtagtattcgactccactaaagatgtggaagacgctcactcaggccttctgaaaggcaattcccgccagactgtgtggagaggttacctcaccacggacaaggaagtgcccggtctcgtcctgatgcaagacctggcattcctttccggcttcccaccaacatttaaagaaacaaatcaactgaagaccaagctccctgagaatctttcttcaaaagtcaaactgttgcagctttacagtgaagcttccgtggccctgctgaagcttaacaaccccaaggacttccaggagctcaacaagcagaccaagaagaacatgactattgatggcaaagagctcactatctcacctgcttatctgctctgggacctgtcagcaattagccagtcaaagcaggacgaggatatatctgcaagcaggttcgaggataatgaggaacttcgctactccctgagatctatcgagcgccacgcaccatgggtgaggaacattttcatcgtgaccaacggacagattccaagctggctcaacctggacaatccaagagttactatcgttactcatcaagatgtgttcaggaacttgtctcacctgcccacattttcatctcccgccatagagagtcacatccacagaatcgaaggactgagtcagaagttcatttacctcaacgacgatgtaatgtttggtaaagacgtgtggccggacgatttctactctcattctaaaggtcagaaggtatatcttacctggcctgtgcctaactgtgctgaaggctgcccaggaagctggatcaaggatggatactgtgacaaggcgtgtaacaacagtgcttgcgactgggacggcggcgactgttctggtaatagtggtggcagtcgctacatcgcaggcggcggaggcacaggctccatcggtgtaggccagccgtggcagtttggaggaggaatcaactccgtatcctactgtaatcagggctgtgctaacagttggctcgctgataaattttgcgaccaagcctgtaatgtccttagttgtggtttcgatgccggcgactgcggtcaagaccacttccacgagctgtacaaggtgattctgcttccgaatcagactcattacatcatcccaaaaggagaatgcctcccctatttctcttttgccgaagtggctaagaggggcgtcgagggcgcttactccgataaccccatcatcagacacgcgagcatcgcaaataagtggaagacgatccacctcatcatgcatagcggaatgaacgcaactaccatccattttaacctgacattccagaacactaacgacgaagagtttaaaatgcaaattacagtggaggtggatactcgcgaaggaccgaagctcaacagtacagcccagaagggctacgaaaaccttgttagcccaatcactctgttgcccgaagcagaaatcctgttcgaggacatcccgaaggagaagcgcttcccgaagtttaagcgccatgacgtaaatagtaccagaagggcgcaagaggaggttaagatcccccttgtgaacatctcccttctcccaaaggacgcccagttgagcctgaacactttggaccttcagcttgagcacggagacattactctgaagggatataaccttagcaaatctgcccttttgagaagcttcctcatgaactctcagcatgctaagatcaagaatcaggccattataaccgatgaaactaacgacagcctcgtggccccacaagaaaagcaggtccataagtccattttgcccaacagtttgggtgtgtcagaacgcctccagaggttgacttttcccgcggttagcgtgaaggtgaacggacacgatcaaggccaaaacccccctctcgatttggagaccactgctagattccgcgtagagacgcatacccagaagaccattggcggtaacgtgaccaaggagaaacctccttcccttatcgttccgttggagtctcaaatgaccaaggagaagaagattaccggaaaagagaaagaaaactctaggatggaggagaatgctgagaatcatatcggtgtgacagaggtactgctcggtcgcaagttgcagcactatacagactcctacctgggttttcttccgtgggaaaaaaagaagtactttcaggacctgcttgacgaagaggagagcctgaaaactcagctggcctatttcaccgactcaaagaacactggaaggcagctcaaagacactttcgccgattctttgaggtatgttaataaaatccttaattccaaattcggatttacatctcgcaaggttccagcccacatgcctcacatgatcgatcgcattgtaatgcaggaattgcaagacatgtttcccgaagaatttgacaagacctcttttcataaggtgaggcacagcgaggatatgcagtttgctttctcttatttttattacctgatgtccgcagttcaacctttgaatatttcccaggtattcgatgaggtggacacggaccagtccggcgtactcagcgatcgcgaaattaggaccctggcaacaaggatccacgagctccccctctctttgcaggatttgacaggcctggagcatatgctgataaactgttctaagatgctgccggccgacattactcagctcaacaacatcccacctacgcaggagtcttactacgatccaaaccttccccctgttacaaagtcactcgtaacaaactgcaagccggttaccgacaagatccacaaagcttacaaagataagaacaaatacaggttcgagataatgggtgaggaggagattgcattcaaaatgattagaactaacgtgagccatgtggtcggacagctggatgacattagaaaaaatcccaggaaatttgtgtgcctcaacgacaacattgaccataaccacaaggacgcgcagaccgtgaaggcggtgcttagggatttctatgagtctatgtttccaattccatctcagtttgaactgcctagagagtatcgcaaccgcttcttgcatatgcacgagctgcaagagtggagagcttacagggacaaactcaaattctggacgcactgtgttcttgctaccctgatcatgttcacaatcttcagctttttcgccgagcaattgatagctctgaaaaggaagatctttccgagaagacgcatccataaagaagcgtccccaaataggattagggtc

SEQ ID NO: 214992 - DNA, 3768 bp, Artificial Sequence
  derived and/or modified sequence
atgctctttaagctgcttcaacgccaaacctacacttgcctctcacaccggtacggcctgtacgtgtgcttcctgggggtggtcgtgactatagtctccgccttccagttcggagaggtcgttctcgagtggtcacgcgatcagtaccacgtgctctttgattcctaccgggacaacattgcggggaaatccttccagaatcggctgtgtctgccgatgccaatcgacgtcgtgtacacttgggtgaacgggaccgacctggaactgctgaaagagctgcagcaagtccgcgaacagatggaagaagagcagaaagccatgcgggaaatcctgggcaagaataccaccgagccaactaagaagtctgagaaacaacttgagtgtctcctgacgcattgcatcaaagtgccaatgctggtcctggatccggcgcttcctgctaatatcactctgaaagacctgccctcgctctaccctagcttccactcggctagcgacatattcaatgtggccaaaccgaagaacccttctactaatgtgtcagtggtggtgttcgatagcaccaaggatgtcgaggatgcacatagcggactcctgaaaggaaactcccgccagaccgtgtggcggggatacttgactacggataaagaagtcccgggcctggttctcatgcaggatcttgccttcctgtcgggattcccaccgactttcaaagaaaccaatcaacttaagactaagctgccggaaaacctgtcgagcaaggtgaaacttctgcagctgtactccgaagcgtcagtcgccctgctcaagctgaacaacccgaaggactttcaagaactcaacaaacagactaagaagaacatgaccatcgatgggaaggaactgactatctcacccgcgtatctcctgtgggatctctcagccatttctcaaagcaagcaggacgaggatatctctgcatcccgcttcgaagataatgaagaacttcggtactcgctccgctcaatcgaacgccacgcgccctgggtccgcaacatcttcattgtgactaatggtcagattccctcgtggctgaatctcgacaaccctcgggtgaccatcgtaacccaccaagatgtctttcggaacctgtcccacctccctaccttctcgagccccgctatcgaatcccacatccataggatcgagggcctgtcacagaaattcatctacctgaacgatgacgtgatgttcggcaaagacgtgtggcccgacgatttctactcccatagcaagggccagaaagtgtaccttacgtggccagtcccgaactgcgccgaaggatgccccggatcgtggatcaaggacggatattgcgacaaggcgtgcaacaacagcgcatgtgattgggatggcggagactgttccggcaactcgggaggatcgcgctatattgcaggtggaggcgggactggatcgatcggcgtgggccagccttggcagttcggcggaggaatcaactccgtgtcgtactgcaatcagggatgcgcaaacagctggctcgccgacaagttctgcgatcaggcgtgtaatgtgctgtcgtgcggtttcgacgccggagactgcggacaggatcactttcatgaactgtataaggtgatactcctgccgaaccagactcactacatcatccctaaaggagaatgcctcccctacttcagcttcgcagaggtggctaagaggggagtggagggcgcgtactccgataacccaatcatcagacatgcgtccattgccaacaagtggaaaactatccaccttatcatgcactcgggcatgaacgcgaccactatccatttcaacctcactttccagaatactaacgatgaggagtttaagatgcagatcactgtcgaagtggacaccagagaaggcccaaagctgaatagcaccgcgcagaagggatacgagaacctcgtgtcgccgattaccctgctcccagaggccgaaatcttgtttgaagatatccctaaggaaaaacggttccccaagttcaagcgccacgatgtgaatagcacccggcgggcacaggaggaggtgaagatcccgttggtgaacatttcgctgctgcccaaagacgctcagctctcgctcaacaccttggatctgcagcttgaacatggggacatcaccttgaagggatacaacctgtctaagtccgccctgctgcgctccttcctgatgaactcgcagcacgccaagatcaaaaaccaggctattatcacggacgagactaatgactccctggtggctccacaggaaaaacaagtccacaaatcaattctgcctaatagccttggcgtcagcgaacgcctgcagcggctgaccttcccggccgtcagcgtcaaggtcaacggacatgaccagggacagaatccaccgcttgacctggaaaccactgctcgcttccgcgtggagacgcacacgcaaaaaactattggcggaaatgtcactaaggagaagcctccgtcactgatcgtgccgctggagtcgcaaatgactaaggaaaagaagatcaccggaaaggagaaagagaactctaggatggaagagaacgccgaaaatcacattggagtgactgaggtgctgctgggaaggaagctgcaacattacaccgactcttacctgggattcctgccgtgggagaaaaagaagtactttcaagacctgttggatgaagaggaaagcctcaagactcagctggcctactttaccgacagcaaaaacactggacgccaactcaaagacactttcgccgactcactgcggtacgtgaacaaaattctgaatagcaagttcggattcacttcgagaaaagtcccggcacacatgcctcacatgatcgatcggatcgtgatgcaggaacttcaggacatgtttccagaggaattcgacaagacgagcttccataaggtgagacacagcgaggatatgcagtttgccttctcgtacttctattacctgatgtcggccgtgcaaccgttgaatatctcccaggtgttcgacgaggtggacaccgaccagtccggagtgctgtcggaccgcgagatccggactctggcgactagaatccatgagctcccgctctctctgcaagatctcactggtttggaacatatgctgatcaactgttcaaagatgctgccggcggatatcacccaactgaacaacatcccgccgacccaggaatcgtactacgatcctaacctgccaccagtcaccaagtcgctggtgacgaactgcaagccagttaccgacaaaatccataaggcctacaaagataagaacaagtacaggttcgagatcatgggagaggaagaaatcgcttttaagatgatccgcaccaacgtgtcacacgtggtgggacaactggacgatatcaggaagaacccgaggaagtttgtgtgcctgaacgacaatattgatcacaaccacaaggacgcgcagaccgtgaaggccgtcctgcgggacttctacgagtcgatgtttccgatcccgtcacaattcgagcttccacgggagtaccggaatcgcttcttgcacatgcacgagttgcaagaatggagagcgtaccgcgataagctgaaattctggacgcactgcgtcctcgcaactctcatcatgttcaccatcttctccttctttgcagaacaactcatcgccctgaaaaggaagattttcccccggaggaggatccacaaggaagcctctccgaacagaatccgcgtc

SEQ ID NO: 214993 - DNA, 3768 bp, Artificial Sequence
  derived and/or modified sequence
atgctgttcaagttgctgcagcgccaaacctatacttgcctgagccacagatacggcttgtacgtctgttttctcggagtcgtggtgaccatcgtgtctgcttttcagtttggagaggtcgtcctggagtggtccagagatcaatatcacgtgctgtttgacagctacagagataacattgcaggaaagtcgtttcaaaacaggttgtgcctgcctatgccgatcgatgtcgtgtacacctgggtgaatggcactgacttggaattgcttaaggaactgcagcaagtccgcgaacaaatggaagaagagcagaaagcaatgcgggaaatcctgggaaagaataccaccgaaccgactaagaaatccgaaaaacagcttgagtgtctcctgacccattgtatcaaggtgccgatgctcgtgctcgatccggccttgccggccaatatcaccttgaaggatctgccgtccctgtacccttcgtttcactcggcgtcagatatcttcaatgtggcgaagccgaagaacccatcgaccaacgtgtctgtcgtcgtgttcgactcaaccaaggatgtcgaagatgcccactctggactgctgaaggggaattcgcgccagacggtctggcgcggttacctcaccaccgataaggaagtgccaggattggtgctgatgcaagacctcgcattcctctcaggcttcccaccgactttcaaggagactaaccagctgaaaacgaaactcccggagaacctgagctcgaaagttaagctcctccagctctactcggaggcatccgtggctctgcttaagctgaacaaccctaaggacttccaagagctgaacaagcagaccaagaagaacatgaccattgacggtaaggaactgaccatctcaccggcgtacctgctgtgggacctcagcgccatctcccagagcaagcaggacgaagatatctcggctagccggttcgaggacaacgaagagctgcggtactccctgcgctccatcgaacgccatgccccgtgggtccgcaacattttcatcgtgaccaatggacaaatcccttcctggctgaacctggacaacccccgggtcaccatcgtgactcaccaggacgtctttagaaatctgtcccatctgcctactttttcctcgccagcgatcgagtcacatatccaccgcatcgagggactgtcgcaaaagttcatctacctcaatgacgacgtcatgttcggcaaagatgtgtggcccgacgatttctattcgcattcgaaaggacagaaggtgtacttgacttggcccgtccccaattgcgcagagggttgtccgggatcgtggatcaaagatggctactgcgacaaggcctgcaacaactccgcgtgcgattgggatggaggagattgttcgggaaactcaggcggctcgcgctatattgccggaggtggaggaaccggctcgattggcgtcggacagccgtggcaattcggaggcggaatcaattccgtgtcgtactgcaaccagggatgtgcaaatagctggttggccgacaagttctgtgatcaggcatgcaacgtgctgagctgcgggttcgatgccggggactgcggccaagatcatttccatgaactgtacaaggtgatcctgctgccaaaccagactcattacatcatcccgaagggagaatgcttgccttacttttcatttgctgaggtggctaagcggggggtggagggagcctactcagataacccaatcatccggcatgcaagcatcgcgaacaagtggaaaaccatccatctgatcatgcactcaggaatgaacgctaccaccatccactttaatctgactttccaaaacaccaacgatgaggaattcaagatgcagatcaccgtggaagtggacacccgggaagggcctaaactcaattcgaccgcccaaaagggatacgaaaatctcgtctcacccatcacgctgctgccagaggccgaaatcctttttgaagatatcccgaaggaaaaacggttcccgaagttcaagcggcatgacgtgaactccacccgacgcgcgcaggaagaggtgaaaatcccactggtcaacatttcccttctgcctaaggatgctcagctgtcactcaacaccctggatctccagctcgaacacggcgatatcaccctcaagggatacaacctgagcaaatcggccctgctccggtcctttcttatgaattcgcagcatgccaaaatcaaaaaccaggccattatcactgatgaaacgaacgacagcctcgtggcgccgcaggagaaacaagtgcacaaatctatccttccaaactcgctcggagtgagcgaacggctccagcgcctgacttttccagcagtctccgtgaaagtaaacggacatgaccagggacaaaaccctccgctggatctggaaaccactgctcgcttccgggtggaaacccatacgcagaaaaccatcggaggcaacgtgacgaaagagaaacctccatcactcattgtccccctcgaatcacaaatgactaaggaaaagaagatcactggaaaggaaaaagaaaattcgcgcatggaggaaaacgccgagaatcatattggcgtgaccgaagtgctgcttggaaggaagctgcaacactacaccgattcgtacctcgggttccttccttgggagaagaagaaatactttcaagacctcctggacgaagaagaaagccttaagactcaactggcttacttcaccgattcaaagaacaccggccggcagctgaaagacaccttcgcagactccttgcggtacgtgaacaaaatcctgaacagcaagttcggcttcacctcccgcaaggtgccggcccacatgccgcacatgatcgaccggatcgtgatgcaagaacttcaagacatgttcccggaagaattcgacaagactagcttccacaaggtccgccacagcgaggatatgcaattcgcattcagctacttctactacctgatgtccgcagtgcagcctctgaacatctcacaagtctttgacgaggtggacactgatcagtctggagtgttgtccgaccgggaaatcagaacgctggcaacccggatccacgaactgccgctgtccctgcaagacctcactgggctggaacacatgctgattaactgttcaaaaatgctccctgctgatatcactcaactgaacaacatcccgccgacgcaagagtcctactacgatcccaatttgccaccggtgacgaagagcctggtgactaattgcaaaccggtgaccgataagatccacaaggcgtacaaagacaagaataagtacaggttcgagatcatgggtgaggaggagattgcctttaagatgatccgcaccaacgtaagccacgtggtcggtcaattggatgacatccggaaaaatccgcgcaagttcgtgtgcctcaacgataacattgaccataaccataaggacgcccagaccgtgaaggccgtgctgcgcgacttctacgagtcgatgtttccaatcccatcgcagtttgagttgccgcgcgaatacaggaatcgcttcctgcacatgcacgaactccaggaatggagggcataccgcgacaaactgaagttttggacccattgcgttctggctaccctcatcatgttcaccattttctcgtttttcgcggaacaactgatcgccctgaagagaaagatcttcccgcggcggcggatccacaaggaggctagccccaacaggatcagagtg

SEQ ID NO: 214994 - DNA, 3768 bp, Artificial Sequence
  derived and/or modified sequence
atgctcttcaaactgcttcagcgtcaaacctatacctgtctctcccatcgctacggactgtacgtgtgttttctgggcgtagtggtgacgatcgtctctgcctttcagttcggcgaagtcgtactcgagtggagccgggatcagtaccatgtccttttcgatagctaccgtgacaacattgctgggaagagctttcagaatcgactatgtctgcctatgccgattgatgtcgtgtatacatgggttaacggaacagatttagagcttctgaaggaattgcagcaggtgcgggaacaaatggaggaggagcagaaggcaatgagagagatcttaggcaaaaatacaacagagcccacaaagaagtccgagaagcagctggaatgtcttctcacacattgcatcaaagttcctatgctggtgctcgatccggctctgcccgcgaatattacacttaaggacctgcctagcctgtacccgagctttcacagcgcctccgacatctttaatgtggcaaagccaaagaatccaagcaccaatgttagcgtggtcgtgttcgactcgaccaaagatgtggaggacgcccacagcggcttactaaaaggaaactctaggcagactgtttggcgcggctacctgaccaccgacaaggaggtgcctggccttgttctgatgcaggacctggcctttctaagcgggttcccgcctacttttaaggaaaccaaccagcttaaaactaagttaccagaaaatttgtcatcaaaggtgaaactcttgcaactctacagcgaggcctctgtggctctgctgaaacttaacaatcccaaggacttccaggaattgaacaaacagactaaaaagaatatgactattgacggaaaagagcttaccatctcgccagcctacctgctctgggacctgtccgcaatcagccaaagtaagcaggacgaagacatttctgcaagtcggttcgaggataacgaggagttgcggtactctctgagatccatcgaaaggcacgccccctgggtgcggaatatcttcatagtgacgaacggacagatccctagctggttgaacttggataacccccgggtgacaatagttactcaccaggatgtgttccgtaacctgtctcatctgccaactttctcatcaccagccatcgaatcacacatacacagaatagaggggctgtcacagaaattcatttacctgaacgacgacgtgatgttcggaaaagatgtttggcctgatgacttctattcccatagcaaaggacagaaggtgtatttgacgtggccggtgcccaactgcgctgaaggctgcccaggtagctggatcaaggatggatattgcgacaaggcctgcaataacagtgcctgcgattgggatggcggggactgtagtggcaacagcggtggatcacggtatatcgcagggggaggtggcaccggctcaataggtgtcgggcagccatggcagttcgggggcggcatcaactccgtatcttattgtaaccagggatgcgctaacagttggctggccgataaattctgcgaccaggcatgtaatgttctgtcttgcgggtttgacgctggggactgcggccaggaccatttccatgaactttataaggttattttgctgcccaaccagacacactacatcataccaaagggtgaatgtttgccgtattttagtttcgccgaagtcgccaagcggggagtcgagggagcctactcagacaaccctattatccgccacgcctcaatcgcaaataaatggaagaccatccatctcatcatgcatagcgggatgaacgccacaaccatccactttaacctgaccttccagaacactaacgacgaggagttcaaaatgcagataaccgtggaggtggatactcgggaaggtcctaaactgaactccacagcgcagaaaggatacgagaatcttgtgagccctatcaccctgctgcctgaggcagagatcctcttcgaagacatacccaaggaaaagcgcttcccaaagtttaagcgccacgacgtaaactcgaccagacgagcgcaggaggaagtaaaaattccattggtgaacatcagtctgcttcctaaggatgctcagctttcactaaacacactagacctgcagctcgaacatggcgacatcactcttaaggggtataacctgtcaaagtcagcccttctgaggtcctttctgatgaattcgcaacatgctaaaatcaagaatcaggccatcatcaccgacgagacgaatgatagcctcgtggccccacaggagaaacaggtacataaatccatcctgccgaatagtctgggtgtgtcggagcgactccaacgccttacgttccctgccgtcagcgtgaaagtgaacggacacgatcaaggtcagaatcctcctctagatctcgaaacgaccgcaaggttccgtgtggagacacatacacagaaaacaatcgggggaaatgttaccaaggagaagccgccttccctgatagtgcctctggagagtcagatgaccaaggagaaaaaaataaccggaaaggagaaggagaattctcggatggaggaaaacgccgagaatcatatcggagtcaccgaagttctgcttggccgcaaactgcagcactacaccgacagttacttggggtttctgccttgggagaaaaagaaatatttccaggatttgttggatgaggaggaaagcctgaaaacccagcttgcttacttcacggacagcaagaatacaggacgacagttaaaggataccttcgcggactcattgagatatgtcaataagatcctgaactccaaatttggattcacatctcgtaaggtacctgcgcacatgccccatatgattgaccggatcgtgatgcaagagctgcaggacatgttccccgaagagtttgataagacgtctttccataaggtaagacacagtgaagacatgcagttcgccttttcctatttttattacctgatgtccgctgtccagccactcaatatcagccaggttttcgacgaggtggataccgaccagtcaggcgtcttgtccgacagagagattcgcactttagctacccgaatacacgaattacccttgtcacttcaggatttgaccggtctcgagcacatgctcattaattgtagtaagatgcttcccgctgacatcactcagctcaataacatcccacctacgcaggagagctactatgatcctaatctcccacccgtgacaaagtctcttgtcactaactgcaagcccgtcaccgacaagatacataaagcatataaggacaaaaacaaataccgatttgagataatgggagaggaggagattgccttcaagatgattaggaccaacgtttcccacgtggtgggccagctggacgacatcaggaagaatcccagaaaattcgtgtgtctcaacgacaatattgatcataaccataaagatgcacagacggtcaaggccgtcctgcgggatttctatgagtctatgtttcctatccccagtcagttcgaattaccacgcgagtatcgaaataggtttcttcatatgcatgagcttcaggagtggcgcgcctatcgggacaaactgaaattctggacgcactgtgtactcgccacactgattatgttcacaatattttcattcttcgccgagcagctgattgccctcaagagaaaaatattccccaggcgtaggattcacaaagaggcatctcctaatcggatccgggtt

SEQ ID NO: 214995 - DNA, 3768 bp, Artificial Sequence
  derived and/or modified sequence
atgctgttcaaactcctccagaggcagacctacacttgcctgtctcaccgctacggactgtacgtgtgtttcctgggtgtggtggtgactattgtcagcgcgtttcaatttggcgaagtggttctcgagtggtcccgagatcagtaccacgtcctcttcgattcctaccgcgataacattgcgggtaaatccttccagaaccgcctgtgtctcccaatgcctatcgatgtagtgtatacttgggtcaacggaactgacctcgagttgctgaaagagctccagcaagtccgtgagcagatggaagaggagcaaaaagccatgcgcgaaatcctgggtaagaatacgaccgaacccaccaaaaagagcgagaagcagctggaatgtctgctgacccattgcatcaaagttccgatgttggtcctggatccagctctgccagccaacatcacgttgaaggatctcccgtcgctctacccttcgtttcactcagccagcgacatcttcaacgtggccaagcccaaaaatccctcgactaacgtgtcggtcgtcgtattcgactccaccaaagatgtcgaggacgcccacagtggactccttaagggcaattctcgccaaacggtgtggcgcggatacctgaccaccgacaaagaagtgccgggactggtgctcatgcaggatctcgccttcctgtctggtttcccgccgacctttaaggaaactaatcagttgaaaaccaaactgccagagaacctcagctcaaaggtgaaactgctgcagctctactcggaagctagcgtggcgctgctgaaactcaacaacccgaaggatttccaagaactgaacaaacaaaccaagaagaatatgaccatcgacggaaaggagctgaccatctcgccagcgtatcttctctgggacctgtccgctatatcgcaatccaagcaggacgaggacatctcagcctcccgcttcgaagataacgaagaactgcgctactcacttcggtcgattgagcggcacgccccgtgggtgcgaaacattttcatcgtgactaatggacagatcccgtcttggctgaacttggataatccgagagtgacgatcgtgacgcatcaagacgtctttcggaatctgagccacctcccgactttctcatccccagctatcgagagccatatacataggatcgagggtctgtcccagaaattcatctaccttaacgacgacgtgatgttcggtaaagacgtgtggccagacgacttctattcccactcgaagggccagaaggtctaccttacttggccggtgcctaactgcgcagaaggttgcccgggatcatggatcaaagatggctactgcgataaggcctgcaataactccgcatgcgattgggatggaggcgattgcagcggaaactccggcggatcccggtacatcgcaggtggaggaggcactggcagcatcggagtgggacagccttggcagtttggcggcggaatcaactccgtgtcatactgcaaccaggggtgcgccaactcatggctggccgacaagttttgtgatcaggcctgcaacgtcctgtcgtgtggattcgatgcgggagactgcggtcaggaccatttccacgagctgtacaaagtgatactgctgcctaatcaaacccactatatcatccccaagggcgagtgcctcccttacttctcgttcgccgaggtggcaaagcgcggggtggaaggcgcctacagcgataatccaatcatccggcatgcttcaatcgcaaacaagtggaaaacgatccatctgatcatgcattcaggcatgaatgctactaccatccacttcaacctcactttccaaaacactaatgacgaagagttcaagatgcagataaccgtcgaggtcgacacccgggaagggcctaaactcaactccaccgcccagaagggatacgaaaatctcgtctccccgatcactttgcttccagaggcggaaatcctgttcgaggatatacctaaggaaaagagatttccaaaattcaagcgccacgacgtcaactcgactagacgcgcccaggaagaggtgaagatccctcttgttaacatctcactgctcccaaaagacgcacagttgtcgttgaacaccctggacctgcaactggagcatggagacatcaccctgaagggctacaacctctcgaagtcggctctgctgcgctcattccttatgaactcgcagcacgctaagattaagaatcaagcgattatcactgatgaaactaacgattccctcgtggctccccaggaaaagcaggtacataagtcaatcctgcccaactccctgggagtgtctgaaagactccagcgcctcaccttcccggccgtgtccgtgaaggtgaatgggcatgaccagggccaaaatccaccgctggacctggaaacgaccgcgagattccgggttgaaacccacacccaaaagacgatcggaggaaacgtcaccaaggaaaaaccgccaagcctgattgtgcctttggagtcccagatgaccaaggagaagaagatcaccggaaaggaaaaagagaactccaggatggaggaaaacgccgaaaaccacattggagtgactgaagtgctgttggggcggaagctgcaacactacactgactcctacctgggattcctcccctgggaaaagaagaagtactttcaagacctcctggacgaagaggagagcctgaaaactcagctggcctactttactgactcgaagaatactggccgccagctgaaggacaccttcgcggacagcttgcgctatgtgaataagattctgaattcgaagttcggattcacctcaagaaaggtcccggcccacatgccgcatatgatcgatcggatcgttatgcaggaactgcaagatatgttcccggaagagttcgataaaacctcctttcacaaagtgaggcattcagaagatatgcagttcgcgttctcgtacttctactacctgatgtccgcggtgcagcccctgaatatctctcaagtgttcgacgaagtggacaccgaccagtcaggcgtgctctccgaccgcgaaattagaactctggcgactcggatccacgaactgccactgtccctccaggacctgactggtttggagcatatgcttatcaattgtagcaagatgttgccggccgacatcacgcaactcaataacatcccgccaactcaggaatcctactatgacccgaatctcccgccggtcactaaatcccttgtgactaattgcaagccggtcaccgacaagattcacaaggcttacaaggataagaacaagtaccggttcgaaatcatgggggaggaagaaatcgcattcaaaatgatccgcaccaatgtgtcgcacgtggtcggacaacttgatgatattagaaaaaacccgcgcaagtttgtgtgcctgaatgataacatcgatcataatcacaaggacgcccagacggtcaaagcggtcctccgagacttctacgagagtatgttcccaataccatcccaattcgagcttccgcgggaatacagaaatagattcctgcatatgcacgaacttcaggagtggcgggcttaccgggacaagttgaagttttggactcactgcgtgctcgcaaccctgatcatgttcaccatctttagctttttcgccgagcaacttatcgccctcaagcggaagatctttcccaggcgccggatccacaaggaagcctcgccgaatcgaatccgcgtg

SEQ ID NO: 214996 - DNA, 3768 bp, Artificial Sequence
  derived and/or modified sequence
atgctattcaaacttctacagcgccagacctatacctgtctgtcacatcgatacgggttatatgtgtgttttctcggggtcgtcgtgaccatcgtgagtgcctttcagtttggcgaggtggtcctggaatggagcagggaccagtaccatgtgctgttcgacagctatcgggacaacatcgcaggaaaatcgttccaaaatcggctctgtttgcccatgcctatagacgttgtgtatacttgggttaacgggacagacctcgagttactcaaggaacttcagcaggtgcgagagcagatggaggaggagcaaaaggccatgagagagattctcggaaagaatacaactgaacctacaaagaagagcgagaaacaattagagtgcttgcttacccactgtattaaagtccctatgctggtcctggatcccgccctccctgccaatatcactttgaaagacctgcctagtctataccccagtttccactctgcctcagatatcttcaacgtggcgaagccaaagaacccaagtactaacgtgtctgtggtggtttttgattccaccaaagacgtagaggatgctcatagcgggctgttgaagggaaactccaggcaaaccgtctggagggggtacttgactacagacaaggaggtgccgggcctggtacttatgcaggatcttgcgtttctctccggattcccacctacctttaaagagactaatcagctcaaaaccaagctgcccgagaatctgtctagcaaggttaagctgctgcaactgtactctgaggccagcgttgctcttttgaagcttaataaccccaaagactttcaggagcttaataagcagacaaagaagaatatgacgattgatgggaaggaattaaccatctccccagcctacctcctgtgggatctctccgctattagccaaagcaaacaggacgaggacatctcagctagtcgcttcgaggataacgaagaacttcggtactccctgcgttctattgagcgacacgctccatgggtgcgtaatattttcatcgtcaccaatggccagatcccctcatggctgaatctggataacccccgggtgacaatcgtgacccatcaagatgtgttcaggaatctatcacaccttccaacattctcaagtccagcaattgagtctcacattcatagaatcgaaggtttgagccagaagttcatatacctgaacgatgacgttatgtttggtaaagatgtgtggccagatgacttttactctcattcaaagggccaaaaggtgtacttgacctggccagtgcccaattgtgcggaaggctgccccgggtcctggatcaaggacggctattgcgacaaggcttgcaataattccgcctgtgattgggatggcggagattgttcaggaaattccgggggatcacgttacatcgctgggggaggcgggacagggtccatcggcgtcgggcaaccttggcagtttggtgggggaatcaattcagtgagctattgcaaccagggatgtgccaattcctggttggctgataagttctgcgatcaggcctgtaacgtgttatcgtgtggatttgatgcaggagactgcggccaggaccacttccatgagctgtacaaggtgatcctgctgcctaatcagacacactacataattcccaagggcgagtgtctaccatatttttcctttgcagaagtggctaagagaggggtggagggcgcttatagtgacaatccgattatcaggcacgcgtccatagcaaataagtggaagaccatccatttgatcatgcattcaggcatgaacgccacaactattcatttcaatctcacattccagaacaccaacgatgaggagtttaagatgcagatcactgttgaagtggatactagagaggggcctaaacttaattccacagcccagaaggggtacgagaatctggtttcgcccattaccctgcttcccgaggccgagatactgttcgaagacatacctaaggagaagcgattcccaaagtttaagcgccatgacgtgaattccacaagacgggcacaggaggaggtgaagattccactggtgaatatcagcctcctccccaaggatgcacagctgagcctcaatacgcttgacttacagttggagcacggtgacatcactctgaaaggatacaacctgtcaaaatccgccctgttgaggagcttcttaatgaatagccagcatgccaagataaagaatcaggccatcataactgacgagacgaacgattcacttgtcgcaccccaggaaaagcaggtgcacaagtctattctgcccaacagtcttggagtatccgagcgcctgcagcggctcacctttccagccgtctctgtaaaagtgaacgggcatgatcaggggcaaaaccctcccctggacttggaaacaaccgcgcggttccgggttgaaacccacacccagaagaccatcggagggaacgtgacgaaggaaaaaccaccctcattgattgttcctctggaatcccagatgacgaaagagaaaaagataactggaaaggagaaggagaacagtagaatggaagaaaacgcagagaaccacattggagtgactgaagtcttgctcgggcgcaagttgcagcattatactgattcatatcttgggttcctcccctgggagaagaagaagtacttccaagacctactggatgaagaagaaagcctcaaaacacagttagcgtattttactgactctaagaatacagggagacaactaaaagacacgttcgccgacagcctgcgctacgtgaataagatactgaactccaagttcggattcacaagcaggaaagtgcctgcacacatgccccatatgatcgatcgcatcgtgatgcaggagttgcaggatatgtttccggaagaatttgacaaaacatccttccacaaagtgcggcacagtgaagacatgcagttcgccttctcttatttttactacctgatgagtgcggtgcagcccctgaatatctctcaggtcttcgacgaggtcgatacagatcaatcaggcgtcctcagtgatcgggagatccggacactggctactcgtatacatgaactgccactctcccttcaggatttaactggactggagcacatgctcattaattgcagcaaaatgttgcctgctgacatcacacagttgaacaatatccctcctactcaagaaagttattacgatcctaacctaccccccgtaactaagtcacttgtgactaactgcaaacccgtgacagataagatccataaagcctacaaagacaaaaataaatacagattcgagatcatgggtgaggaagaaattgcattcaaaatgatccggaccaatgtgtcacatgtggtgggacaactggatgacatccgaaaaaatccccggaagttcgtgtgcctcaacgacaacattgatcacaatcataaggacgcgcagacggtaaaggccgtcctgcgggacttttatgagtccatgtttccaattccctctcagtttgagttgcccagagaatatagaaaccgctttctccacatgcacgaacttcaagagtggcgcgcctatcgtgacaaactgaagttttggacccattgtgttcttgccacactcatcatgttcactatatttagcttttttgccgagcaactcatcgctctgaagcggaagatcttccctcgccgcagaatccacaaggaagctagcccgaaccggatcagggtg

SEQ ID NO: 214997 - DNA, 3768 bp, Artificial Sequence
  derived and/or modified sequence
atgctgtttaagctccttcagaggcagacctacacctgcctctcccatcggtacggactgtacgtgtgcttcctgggtgtcgtggtcaccatcgttagtgcattccaattcggagaggtcgttctggagtggagccgggaccagtaccatgtgctttttgattcctatagggacaatatagccggtaaaagctttcagaaccgcctctgcctgcccatgcccatcgacgtcgtctatacctgggtgaacggcacggatcttgaactattgaaagagcttcagcaggttcgtgaacagatggaagaagagcagaaggcaatgagagaaatcctgggcaagaatactaccgaacccacaaagaaatctgagaagcagctggagtgcttgctgacacactgtattaaggtgcccatgctggtgctggatcccgctttaccagccaatataacgctcaaggatctgccatcattgtatccttcattccactccgcctctgatatttttaacgtggctaaacctaaaaacccttcaacgaacgtgtctgttgtggtcttcgacagcacgaaagatgtcgaggacgcgcactcaggtctgctgaaaggaaactccagacagacagtctggcgtgggtatctgacaaccgacaaggaggtgcctggtctggttctgatgcaagacctggcatttctgagcgggtttccccccacattcaaggaaacaaatcagctgaaaactaagctgccggaaaatctttcctcgaaggtgaagttacttcagctctactccgaagcatccgtggctttactcaaactcaataaccccaaagatttccaggagcttaacaagcagactaagaagaacatgacgatcgacggaaaagagcttacaattagtcccgcctacctcctctgggacctctcagctatctcccagtcaaagcaagacgaggacatttccgcttcaagattcgaggacaacgaagagttaaggtatagtctgaggtcaattgagcgtcacgcaccttgggtgcgcaacatttttattgtcactaacggccaaattccctcatggttaaacttggacaacccacgcgtaaccatcgtcacccaccaggatgtgtttaggaatctcagtcatctgccgacattcagcagtccggcaattgaatcacacatccatcggatcgaagggctctctcagaagttcatctatttgaatgatgacgttatgtttggaaaagatgtgtggcccgacgatttctacagccattccaagggacagaaggtgtacctcacttggccagtgccaaactgtgctgagggctgtccaggctcgtggataaaagatggctattgtgataaggcctgcaacaactcagcgtgtgactgggacggtggggattgcagcggtaatagcggggggtcacggtatatcgcgggtgggggaggaaccggaagcataggcgtgggccaaccttggcagttcggcgggggtatcaactccgtttcgtattgtaatcagggctgcgcaaattcttggctggccgataaattctgtgatcaggcctgcaacgtgttgtcttgtggattcgatgcaggggactgcggacaggatcatttccacgagctgtataaagtcattctccttcccaaccagacacattatatcatcccaaaaggagagtgcctgccctacttttccttcgcagaggtcgccaaacgcggggtcgaaggcgcgtattccgataatcctattataagacacgcgtccatcgctaataagtggaagaccatccatctgataatgcattcgggtatgaacgcaaccactatccactttaatctcacttttcagaataccaacgacgaggaattcaagatgcaaattactgtggaggttgacacgcgcgaggggcccaagttaaattccaccgcccaaaaagggtatgaaaacttagtttctcccatcaccctcctacctgaggccgagatactgttcgaagatatcccgaaagagaagaggtttccgaagttcaagaggcacgatgtaaattcgacccggcgggctcaagaggaggttaaaatccctctggtgaacattagcctactccctaaggacgcacagctgagcttgaacacgctcgatctgcagctggaacatggcgacatcactctaaagggctataatctgtccaaatccgccttacttcggtcctttctgatgaacagccaacatgccaaaatcaagaaccaagccatcattaccgatgagaccaacgatagtctcgtcgccccgcaggaaaagcaggtgcataaaagtattcttccaaactccctcggagtgtcagaacggttgcaaaggctgacattccccgcagtcagcgttaaagtaaatgggcatgaccaaggccagaatccccccctggatctagagacaaccgctcggtttagagttgagacccatacacagaagacaatcggaggtaacgtaactaaggaaaagcctccctcacttattgttcctctggagtcccaaatgacgaaggagaaaaaaatcacagggaaagagaaagagaattcccgcatggaggagaatgctgaaaaccacataggcgtaaccgaggtcctgctcggccgaaagctgcagcactacactgatagttatctaggatttctgccctgggaaaagaagaagtattttcaggatcttctggatgaggaggaatccctgaagactcagcttgcatacttcaccgattcaaagaataccgggcgacagttaaaggacacatttgccgattctcttcggtatgttaataagattttgaactcaaagttcggattcacaagcaggaaggtgcctgctcacatgccacacatgattgatagaatcgtgatgcaggagctccaagacatgtttccagaggagttcgacaagacatcgttccataaggtgaggcatagcgaagatatgcagtttgcattcagttacttttactatctgatgagtgccgttcagccactcaacatatcccaggtattcgatgaggtggacactgaccagtccggggttctgtccgaccgcgaaatccgaacactagctacaaggattcacgaactgccactctccctgcaggatctgaccggactcgagcacatgctgatcaattgttctaaaatgctgccagctgacatcacccagctgaacaatatacccccgacccaggagagttattatgatcccaatctgccgccagtaaccaaatctctagttaccaactgcaagccggtgaccgataagattcacaaggcctacaaggacaaaaacaaatataggtttgaaatcatgggagaggaggagatagcttttaagatgataaggacaaatgtgtcccacgtcgtgggccagctggatgatattaggaaaaaccccagaaaattcgtttgtctcaacgacaacatcgaccacaatcataaagatgcccagaccgtcaaggcagtgcttagagacttctacgagagcatgtttcccatccccagccaatttgaacttcctagagaatatagaaaccgatttctacacatgcacgaactgcaggaatggcgcgcctacagggacaagctcaagttctggacacactgcgtgctcgcaaccctgataatgtttacaatcttttctttctttgccgagcaacttattgccctcaagagaaagatattccctaggaggcggattcacaaggaagcctctcccaaccgaattagggta

SEQ ID NO: 214998 - DNA, 3768 bp, Artificial Sequence
  derived and/or modified sequence
atgctttttaagttgctccaacgtcagacctacacctgtctatcccacagatacggtctgtacgtgtgtttcctgggagtcgttgtgaccattgtgagtgcctttcaatttggcgaagttgttcttgaatggtctcgtgatcagtatcatgtgttatttgattcctatcgcgacaatatagccgggaaatctttccagaatagactatgtctgcctatgcccatcgacgtagtttacacatgggtgaacggcacagatttggagctgctgaaagaactccagcaggttcgagagcagatggaagaagagcagaaagcgatgcgggagattctgggcaaaaacacgacagagccaaccaagaaatctgagaagcagttggaatgtcttctgactcactgtatcaaagtaccgatgcttgtgcttgatccggcactcccagctaatataacactgaaggacctgcccagtttgtatccatctttccactccgcaagtgatatttttaatgtggcaaagccgaagaaccctagtaccaacgttagtgtagtggttttcgactccactaaggacgtggaggacgcgcatagcggactacttaagggcaattcccgtcagacagtctggcgcggctacctaacaacggataaagaggtccctggactagtccttatgcaggatctggccttcttaagcgggttcccgcccacatttaaggagacaaatcagctcaaaaccaaattgccagagaatctgtcttccaaggtgaaactgctgcagctgtactcagaggcctccgtggccctcttaaaactcaacaatccaaaagatttccaggaactgaacaagcagacaaaaaagaatatgaccattgacggtaaagaactgacgatatctcctgcctacctcttgtgggacctgagtgctatcagccagtcaaaacaagacgaagacatctctgcctcacgatttgaggataacgaggagctgcggtattctctgaggtcaatcgaaagacacgctccatgggtgcggaatattttcatcgtaacaaacggccagatccctagctggctcaatctggataatcctagggtcactatcgtcacgcatcaggatgtttttcggaacctatcccacctgcctaccttcagtagccccgccattgagtcccacattcatcgtattgagggactgagtcagaagttcatttatttgaacgatgatgttatgtttggtaaagacgtgtggcccgatgatttctattcacattcaaaaggtcagaaggtttatctaacctggcccgttccaaattgcgcagaggggtgcccgggcagctggatcaaagacgggtactgcgataaagcatgtaacaactccgcttgcgattgggatggcggggactgcagcggaaacagtggcggctctaggtatattgcggggggaggagggacaggcagcattggcgtgggtcagccttggcagtttggcggtggtatcaacagcgtgagctactgtaatcagggttgcgcgaactcatggctggccgacaagttctgtgatcaggcttgtaatgtgcttagttgcgggttcgatgccggcgactgtggacaggatcacttccatgagttgtataaagtgatactgttgcctaaccagacacactacattatccctaagggcgaatgccttccctatttttcctttgccgaggtcgctaagcggggtgtcgagggggcttactcggacaatcccattattcggcacgcatccattgcaaacaaatggaagaccattcatctgataatgcattctggcatgaatgcgactaccatccacttcaacttgacctttcagaataccaacgatgaggaattcaagatgcagattacagttgaggtggacacccgagaagggcccaagcttaacagtacggcccagaaaggctatgaaaacctagtgtctcctatcacccttctgccagaggcggagattcttttcgaagatattccaaaggaaaaaagattccccaaatttaagaggcatgatgtgaactccacaaggagggcacaggaggaagtaaagattccactggtaaacatctccctcctgcccaaggatgctcaactgtcattgaataccctggacctgcaattggaacacggggacattacactgaagggatacaacctgtccaagtctgcgctccttagaagcttcctgatgaactcccagcacgccaaaatcaagaaccaggctatcattactgacgagaccaacgactctctggtggcaccccaagagaagcaagtccacaaatcaatactcccaaactctctgggcgtaagtgagcggctgcagcgcctaacttttccggcagtgtctgtgaaggttaacggccatgatcagggacagaatcctcctctggatctggaaaccaccgcaaggttcagagttgagactcacacccaaaaaacaataggcggaaatgttaccaaggagaagcctcccagcctcattgttcctcttgagtcacagatgacgaaagagaagaagatcactgggaaagagaaagagaactccaggatggaagaaaacgccgagaatcatattggagtcacagaggtgctcctgggcagaaagctgcagcactataccgatagttacctcggattcctcccatgggagaagaagaagtactttcaggacttgctggacgaggaggaatctctgaaaacccagttagcctacttcacagatagcaagaataccggccggcagctcaaggatacgtttgcagactcactcagatacgtgaacaagatactaaactctaagtttgggttcactagccggaaagttccagctcacatgccgcacatgatagataggatcgtgatgcaggaactacaggacatgtttcccgaagagtttgataagaccagttttcacaaggttcgacattccgaagacatgcagtttgccttcagctatttctactacctgatgagcgctgtgcaaccccttaatatcagtcaggtattcgatgaggtggataccgatcagtccggtgttctgtcagaccgcgagatacgaaccctggccacccgcatccacgagctgcccctcagtttgcaggatctaactggactcgagcacatgcttatcaactgtagtaagatgctgcctgccgacattacccagttaaacaatattccaccaacccaggaatcgtattatgatccaaatctgccacccgtgacaaaatctctggttacaaactgtaagccagtgaccgacaagatccacaaggcgtataaagacaagaataagtatagatttgagattatgggcgaagaggaaatcgcatttaagatgattcgtacaaacgtcagccatgtagttgggcaactggatgacatccggaagaacccacgcaaattcgtgtgtctgaatgataatattgatcataaccacaaagatgcccaaaccgttaaggccgtgcttagggatttctacgaatcaatgttccccatcccaagccaattcgaactgccaagggagtacagaaaccggtttcttcacatgcacgaactgcaggagtggcgtgcctaccgagataagctcaaattttggacccactgtgtgctcgctacccttataatgttcacaatcttctctttttttgcagagcagctcatagcactgaaaaggaaaattttccctcgacgccgcattcataaagaggccagtcccaatcgaatacgcgtt

SEQ ID NO: 214999 - DNA, 3768 bp, Artificial Sequence
  derived and/or modified sequence
atgctgtttaagctgcttcagcgccagacctacacttgtttgagtcaccgctatgggctctacgtctgttttctgggcgtcgtagttactatcgtgtcggccttccagttcggcgaggtagtacttgagtggtcgcgagatcagtaccacgtgctttttgactcatatagggataatatagccggcaaaagcttccaaaatagactgtgtctgcccatgcccattgacgtcgtctacacatgggtcaatggaactgacttagaactcctgaaggagttacaacaggtgagggaacagatggaagaagaacagaaagctatgagggagatactcgggaagaacacgacagagcctacgaaaaagagcgagaaacagctggaatgcttgttaactcattgtatcaaggttccaatgctggtgttagaccccgccttgcccgccaatatcaccttgaaagacctgccaagtctgtacccgtcattccattcagcaagtgatatattcaacgttgccaagccgaagaatcccagcaccaacgtcagtgtggtcgtcttcgattcaacaaaagatgttgaagacgcacactccggactgctgaagggcaactcccgccagaccgtgtggagaggatatctcaccacagacaaggaagtgccaggcctagtactaatgcaggacctagctttccttagcggattcccccctacgttcaaagagaccaatcagctcaagactaaactgcctgagaatctgtcatcgaaggttaaactcctgcaactctactctgaggctagcgtggcgcttctgaaactgaacaatcccaaggactttcaagagctgaacaaacaaactaagaagaacatgacgatagacggtaaggagctgacaatctctcctgcctacctcctgtgggatctgtccgccatttcacagagcaaacaggacgaagatattagcgccagcagattcgaggataatgaagagctgcggtattcgctccgaagtatcgaacggcacgccccgtgggtgaggaatatatttatagtgactaacggtcagattccttcgtggttaaatctagacaacccacgggtaaccatcgtgacacatcaggatgtctttcgcaacttgtcacaccttcccacattcagttctccagccatcgagtcacatatccacaggatcgaagggctgagccagaagttcatttacctgaatgacgacgttatgtttggcaaggacgtgtggccagatgacttttactctcacagtaaaggccagaaggtgtatctaacctggcccgtgccaaattgtgccgagggatgccccgggagctggattaaggacgggtactgcgataaggcttgtaacaattccgcctgtgactgggacggcggagactgcagcggcaactcaggagggtcccggtacatcgcaggcggaggcgggaccggctccatcggcgtgggccagccgtggcagttcggtggcggaatcaattccgtgtcatactgcaatcaggggtgcgctaactcttggcttgccgataaattctgcgatcaggcttgcaacgtactctcatgcggcttcgatgctggggactgcggacaagaccatttccacgaattatataaagtgatcctactcccaaaccaaacccactatataattcccaagggagagtgtttaccatatttcagctttgctgaggttgccaagaggggcgttgaaggggcttactcggacaacccaattatcagacatgcatctattgccaataagtggaaaactatccatttaattatgcattctggtatgaacgcgaccacgatccactttaatctgacattccagaatactaacgacgaagagttcaaaatgcagatcaccgtcgaggtagacactagggaggggccgaagctaaactcaaccgcgcaaaagggctacgaaaacctggtctcaccaattacattgctgcccgaagcagagatcttgttcgaagacattccgaaagaaaagaggttcccaaagtttaagagacatgatgtcaacagcactcggagggcccaagaagaagtgaagatcccattagtgaatatcagcctcctgcctaaggatgcacagctgagcctgaatacgttggatttacagcttgagcatggggacatcaccttgaaaggatataatctatctaaatcagccctgctgcgcagcttcctgatgaactcgcaacacgctaagataaagaaccaggccatcatcacagatgagaccaatgacagcctggtggcccctcaggagaagcaggtacataaatcaatactgcccaattctctgggagtttccgagcggctgcaaagactcacgttccctgccgtatcggtgaaggtgaatggtcacgaccaggggcagaatcctccactggatctcgagactaccgcacgctttagagtcgagacacatacccaaaagactattggcggtaacgtgaccaaggagaaacctccaagcctgatcgtgcccttagagtctcagatgaccaaggagaaaaaaatcacgggcaaggagaaagaaaactctagaatggaagaaaatgcagagaaccatataggtgtgaccgaagttctgcttggaaggaagctgcagcactacactgacagttacctaggattcctgccttgggaaaagaagaaatactttcaggacttgctggatgaagaggaatctctcaagacccagctcgcatatttcacagatagcaaaaatactggtagacagcttaaggatacctttgccgattccctgcgctatgtcaacaaaatcttgaacagtaagtttggctttacttcgagaaaagtacccgcccatatgcctcacatgattgaccgtatcgtgatgcaggagctccaggatatgttccctgaggagtttgataagacaagttttcacaaggtaaggcacagcgaggacatgcagttcgccttctcgtacttttattatctgatgagtgctgttcagccactaaatataagtcaggtgtttgacgaagtggacacagatcagtcaggcgtgctgtctgaccgggaaatcaggaccctggcaaccagaatccacgaactgcccttgagcctccaggacttaaccggacttgagcatatgcttatcaactgcagcaagatgttgcccgccgacataacccagcttaataacattcccccgacacaagagtcttactacgatcctaacctgccccccgttactaaatctctggtgacaaattgcaagcccgtcacggataagatccacaaagcctataaggacaagaataagtataggttcgaaatcatgggcgaggaggaaattgccttcaagatgattcggaccaatgtctcccatgtggtggggcaactggacgatatacggaagaatccccggaagttcgtatgcctgaatgataacatcgatcacaatcataaagacgcacagacagtgaaagctgtgctgcgagatttctacgaaagcatgttcccgataccatcccagtttgaactgcccagggagtatcggaacagattcctgcacatgcatgagctgcaagagtggagagcttatcgtgacaagcttaagttttggactcactgtgtgttagcgacgctaatcatgtttacaattttctccttttttgctgagcagcttatcgccttgaaacggaaaatttttccacgcaggcggattcacaaggaggcttccccgaatcgcattagggtc

SEQ ID NO: 215000 - DNA, 3768 bp, Artificial Sequence
  derived and/or modified sequence
atgctgtttaagctactgcagagacagacctatacttgcctctcacatcgctacggactttatgtgtgctttttgggagttgtcgtgaccattgtgagtgcctttcaatttggcgaagtggtgctggagtggtcacgagatcagtaccatgtactattcgactcctatcgtgacaacattgctggaaagagcttccagaatcgactgtgcctacccatgcctatcgacgtagtttacacatgggtgaacggcaccgatttggagttactcaaggagctgcagcaggtccgtgagcaaatggaagaagaacagaaagcaatgcgagaaattttaggtaagaataccaccgaacctactaagaagtctgaaaagcagctcgaatgcctgcttacacactgtataaaggtgcccatgctggtgttggacccggccctccctgccaatattacccttaaggatctgccaagcctgtacccatcctttcacagcgccagcgatatctttaatgtggcaaaacccaagaatccctcaactaatgtgagtgtcgtcgtattcgacagcaccaaggatgtcgaggatgcacacagtggtctgttaaaaggtaactccagacagacagtgtggcgcggatatctcaccactgacaaagaagttcccggactcgtgctcatgcaggatctagcgttcctgtccggattcccacctacattcaaagagacgaatcaattaaagaccaagttgcccgagaacttgagcagtaaagtgaaattgctgcaactgtacagtgaagccagcgtcgccctcctaaagctgaataacccaaaggattttcaggagctgaataagcagaccaaaaagaatatgacaattgatggaaaagagttaacaatctcacccgcttacctgctttgggatctctcagcgatttcccagtccaagcaagacgaggatatcagtgcctccaggtttgaagacaatgaggagctgcgatattctctaagatctatcgagcgacacgccccctgggttaggaatattttcatcgtgacaaatggacaaatcccaagttggctgaatctggataatcctagggtgactatcgtgacccaccaagatgtgtttagaaacctcagtcacttacctacctttagcagtccagccatcgaatcccatatccataggattgaaggcctgtcacagaaattcatttatctaaacgacgatgtgatgttcggcaaggatgtgtggcctgacgacttttattcccacagtaaagggcagaaagtgtatttgacttggcccgtcccaaattgcgctgagggctgtcctgggtcttggattaaagatggatactgtgataaggcttgcaacaatagcgcctgcgactgggacggcggcgattgtagtggcaacagtggcggatcccgatatatcgccgggggagggggaacggggtccataggggttggccagccttggcagttcggcggtggcatcaactccgtgagttactgtaatcaaggctgcgcaaactcctggcttgcagataaattttgcgatcaggcttgcaacgtcctcagctgtggattcgatgccggggactgcgggcaagaccacttccatgaattgtacaaagtgatcttgctgcctaatcagactcactatatcatccctaaaggggaatgcctgccttacttttcattcgccgaagtagccaaacgcggagtggagggtgcctattcagacaaccccatcattcggcacgcgtccatagccaacaagtggaagactattcaccttattatgcactctggcatgaatgctacgaccatccactttaacttgacctttcagaacactaacgacgaggagtttaagatgcagattaccgttgaggtagacacaagggagggacctaagcttaattccaccgcccagaagggttatgagaacctggtctcccccatcaccctcctcccagaggccgagatcctattcgaagatatccccaaggagaaacgctttccaaagttcaagcggcacgacgtgaatagtactcgtagggcacaggaggaggtgaagataccacttgtcaacatatcactgctacctaaagatgcccagctatcattgaacacactggacctccagctagaacacggcgacatcaccttgaaaggctacaacctgagcaagagcgccctgctccgcagcttcttaatgaattcccagcatgccaagatcaagaaccaggccatcatcactgatgagaccaatgactccttagtggcaccacaggaaaagcaggttcacaaatcgatcctgcctaattccctgggtgtgtctgaaagactgcagcgactcacgttccccgctgtatccgtgaaagtaaatggacacgatcaaggccagaatccccccctggacttggaaacaacggcaagatttcgggtggagacccacacacagaaaacgatagggggaaatgtaaccaaagagaagccaccatctctgattgtgcctctggagtcgcaaatgactaaggagaagaagataactggcaaagagaaggaaaatagtcgtatggaagaaaatgccgagaatcatatcggagtgaccgaggtcctcttgggacgcaaactacaacattacacggacagctatctgggattcctcccttgggaaaagaagaagtacttccaagatctgctcgatgaggaagaaagcctcaaaactcagctagcatacttcaccgattcaaaaaacacaggaagacagctgaaagacactttcgccgacagcctgcgctatgtgaacaagattctgaactccaaattcgggtttacttcccggaaagtcccagcccacatgccccacatgatcgaccgcatcgtcatgcaggagctacaggatatgtttcctgaagagtttgataaaacctcattccataaggtgagacattcggaagatatgcagtttgccttcagttacttctattacctgatgagcgccgtgcagccactaaatatttcccaggtgttcgacgaggtggacacggaccaatcaggagtgctaagtgaccgggaaattcggactctggccaccagaatacacgagctccctctgtccctgcaggacctgacaggactggagcacatgttgattaactgttccaaaatgttgccagcagacatcacccagctgaataacatccctcctacccaggagagctactatgatcctaacctcccgccagtgaccaagagtctggtaaccaattgtaagcccgtcaccgataagattcacaaagcctataaggataaaaacaagtaccggttcgaaataatgggtgaggaggagattgctttcaagatgatacggacgaatgtctcccacgtggtcggccagcttgacgacattcgcaaaaaccctcggaaattcgtttgtctgaatgacaatatcgaccacaaccacaaggacgctcagacggtaaaagcagtactacgggacttctatgagtcgatgttccccatcccgagccaatttgagttaccaagagaatataggaacagattcctgcacatgcatgagctgcaggaatggcgggcatacagggacaagctcaagttttggacccattgtgtcctggccacattaattatgttcaccatcttcagcttttttgccgaacaacttatagctctgaaacgaaaaatattccctagacgaaggatccataaagaggcttccccaaataggatccgggtg

SEQ ID NO: 215001 - DNA, 3768 bp, Artificial Sequence
  derived and/or modified sequence
atgctctttaagctgctccaaaggcaaacctacacttgtctttcccacagatacgggctctacgtgtgctttctgggagtggtggtgacgattgtgagcgcgttccagttcggggaggtggtcctggagtggtcgagggatcaataccatgttcttttcgatagctacagggacaacattgcgggaaagtcgtttcagaacagactttgcctccctatgccgatcgacgtggtgtacacctgggtgaatggaactgatcttgagttgctcaaagaactgcagcaagtgagagagcagatggaggaagagcaaaaggccatgcgtgagatcctgggaaaaaacactaccgaacctaccaagaaatcggaaaagcaactggagtgtctgttgactcattgcattaaggtgcctatgctggtgcttgaccctgcattgcccgcaaacataaccctcaaagatcttccttccctgtacccatcgttccactcagctagcgacatctttaatgtcgcaaagccaaagaacccctcgaccaatgtgtccgtggtagtgttcgactcgactaaggatgtggaagatgcgcactccggccttcttaaaggcaactcgcgtcaaactgtctggcggggatatctgaccaccgataaagaagttcctggcctggtgcttatgcaggacctggcatttctttcaggttttccccctacgttcaaggaaactaaccaacttaagactaagctccctgaaaaccttagctcaaaggttaagctgctgcagctttactcggaagcatccgtggcactgcttaaacttaacaaccctaaggattttcaagaactgaataagcagaccaagaaaaacatgactatcgatggaaaggagcttactatttcgcctgcgtacctgctttgggacctctcagcaatttcgcaaagcaagcaagatgaggacatctccgcatcacgctttgaggataacgaagaactgagatactcgcttagatccatcgagagacatgccccctgggtgagaaacatctttatcgtgaccaacggacagatcccctcctggctcaatctcgacaatcctcgcgtcaccatagtgactcatcaagacgtctttcgaaacttgtcgcatctccccactttttcgagccctgcaatcgaatcgcacattcatagaattgagggattgagccaaaagttcatttacctgaacgacgatgtgatgtttgggaaggacgtgtggcctgatgacttttactcccattcgaagggacaaaaagtgtacctcacttggcccgtccctaactgtgcagagggttgtcctggaagctggataaaggatggctactgtgataaagcgtgcaacaactcagcatgtgattgggatggcggagattgttcggggaactcaggaggttccagatacattgccggtggaggtggaaccggatcaattggagtgggccaaccttggcaatttggtgggggtattaactcagtgtcatactgtaaccagggttgcgcaaattcatggctggcagacaagttctgtgaccaagcgtgcaacgtgctgtcatgtggatttgacgcaggtgactgtggtcaagatcattttcatgagctgtacaaagtgattcttcttcctaatcaaacccactacataatacctaagggtgagtgccttccttacttttcgttcgcggaagtcgcaaagaggggagtggagggtgcctactcggataaccctattatcaggcatgcaagcatcgcaaacaagtggaaaaccatccacctgattatgcactccgggatgaatgcaaccactatacactttaaccttacgtttcaaaacactaacgatgaagaattcaagatgcagattactgtggaagtcgatacccgggagggtcctaagctcaattccactgcccagaagggatacgaaaacctcgtgtccccaattaccctgcttccagaagcagagattctgttcgaagatatccctaaagaaaagcgctttcctaaattcaaacggcatgatgtgaattcgaccagacgtgcacaggaagaagttaagatcccactggtcaacataagcctgcttccgaaagacgcccaactgagcctgaacactttggatctgcaacttgagcacggagatattactctcaagggttacaatctgtcgaaatcggcgcttctgagatcctttctgatgaactctcaacacgctaaaatcaagaaccaggcgataatcacggatgagactaacgactcactcgttgctcctcaggaaaagcaagttcataagagcattcttccaaactccctgggtgtgtcggagcggcttcaaaggctgacttttcctgccgtgtcggtcaaagtgaacggccatgatcaaggacagaaccccccactggatcttgaaactacggcacgattccgtgtagaaacccatacgcaaaagactatcggaggaaacgtgactaaggagaagcctccgtcactcatcgtgccactggaatcccaaatgaccaaagaaaagaagataaccggtaaggaaaaggaaaactcacgaatggaggaaaatgctgaaaaccatataggtgtgactgaagttcttctgggacgcaagctgcaacattacacggattcgtacctgggcttcctgccatgggaaaagaaaaagtactttcaagaccttctcgacgaagaagaatcgcttaagactcagcttgcctactttaccgatagcaagaacaccggacggcaactgaaggatacttttgctgactcactgaggtacgtcaacaagattctgaactcgaagttcggatttacctcgaggaaggtccctgcacatatgccccatatgatcgaccggatcgtgatgcaggaactccaagatatgtttcctgaagaatttgataagacctcgtttcataaggtgagacactcggaggacatgcaatttgcatttagttatttctactacctcatgtcggctgtccaaccactcaatatctctcaggtgttcgatgaagtggatactgatcaaagcggagtgctttcagatagagaaatccgaaccctggcaacgcggatccatgagctgccactgagcctgcaagatctgactggacttgagcacatgttgatcaattgctccaagatgctgccggccgatattactcagctcaataacatccctcctacccaggaatcctactacgatcctaatcttccccccgtcaccaaaagcctcgtgaccaactgtaaacctgtgaccgacaaaattcataaggcatacaaagacaagaataagtacaggtttgagatcatgggtgaagaggaaattgcttttaagatgatccgcacgaacgtgagccatgtcgtcggacagttggacgatatccgcaagaacccaaggaagttcgtgtgccttaacgacaacatcgaccataaccataaggacgcacagaccgtgaaggccgtcctgcgcgacttttacgaaagcatgttccccattccgtcgcagtttgaacttccaagggaatacagaaatcggtttcttcatatgcacgaacttcaagaatggcgcgcataccgggacaaactgaagttttggactcactgcgtccttgccaccctgattatgttcactatctttagcttttttgcagaacagctcattgcgctgaagcgcaagattttcccacggcggcgcattcataaagaagcatccccaaaccggatccgggtg

SEQ ID NO: 215002 - DNA, 3768 bp, Artificial Sequence
  derived and/or modified sequence
atgctctttaaattactgcagcgacagacctacacctgtctttcccaccgttatggtctatacgtgtgttttctgggcgtcgttgtgaccatcgtcagtgcctttcagttcggcgaggtagtcttggagtggtcgcgcgaccagtaccacgtcctctttgactcgtaccgcgacaacatcgccggcaagtcatttcagaaccgcttgtgtttgccaatgccgattgacgtcgtctatacctgggtaaacggcacagacctggaactgctcaaggagctgcagcaggtgcgggagcaaatggaggaggagcagaaagcgatgcgggaaatccttggaaagaacactacagagcccactaagaaaagcgagaaacagctcgagtgtttacttactcattgcattaaagtacctatgctcgtattggatccagccctgccagcaaacattactttgaaggatctgcctagcctttacccctccttccattctgcttctgacatttttaacgtcgccaagcccaaaaatccatcaactaatgtgagtgtggtcgtattcgactccaccaaggacgtcgaggacgcccactccggcttgctcaaagggaactcacgccagaccgtttggcgcggctacctgaccacggacaaagaggttcctgggctggtcctgatgcaggatcttgcctttctatcagggttcccccctacctttaaggaaacgaaccaactgaagaccaagctccctgaaaacctgtcgagtaaggtgaaactgctgcagctgtacagtgaagcctccgtcgccctgcttaaattgaacaatccaaaagattttcaagaactcaataaacagacgaagaagaacatgacgattgacggtaaggaactcacgatctcccccgcttatctgctgtgggacctgtccgctatctcacaaagtaagcaggacgaagatatttcggccagccgcttcgaagacaatgaagagttgcggtactcactgagatcaatcgaaaggcatgccccttgggtgcggaatatttttatcgtcactaacggtcagattccctcctggttgaacctcgacaatcctagggtgaccatagtgacccaccaggacgtgttcaggaatctgagccacctgccaacttttagtagtccagcaatcgaatcccacatccaccgcatcgagggcttgtcccagaagtttatttacttgaatgacgatgtgatgttcggtaaagacgtgtggccagatgatttctacagccatagcaagggtcagaaagtctacctaacctggcctgtccccaactgtgcagaggggtgtccagggtcatggattaaagacggctactgcgacaaagcctgcaacaatagtgcgtgcgactgggatggcggcgactgctccggaaactctggtgggagtagatacatcgccggagggggtggcactggcagcatcggcgtgggtcagccctggcagttcgggggagggataaattcagtctcgtactgtaatcagggatgcgccaactcctggttggcagacaaattctgtgaccaggcctgcaacgtgctatcgtgcgggttcgacgctggggactgcggtcaggatcactttcacgaactctacaaagtcatactgctgcccaatcagacccactacattataccgaagggtgagtgtctcccatattttagctttgctgaagtggctaaacggggtgtggagggggcctacagtgataacccgatcataagacatgctagcatagcaaacaagtggaagacgattcatctcataatgcactctggcatgaatgcgactaccattcatttcaatcttacttttcagaatacgaatgatgaagagttcaagatgcagatcacggtggaggtggacaccagggaggggcccaagctgaattcgacagctcagaagggctatgagaaccttgtgagccctatcacgctacttccagaggctgagatcctgtttgaagacattccgaaggagaagaggttccccaagtttaagcgccacgacgtcaacagcacaagacgggcccaggaagaagttaagatcccgcttgtcaatatctccctcctgcccaaggacgcacaattgtctctgaacaccttggatctccagctagaacacggtgatatcacactcaaaggatataatctctcaaagtccgcgttgctgaggtctttcctgatgaatagtcaacatgcaaagatcaaaaaccaggctataataacagacgagacgaacgacagcctggtggcaccgcaggagaagcaggtgcataagtcaattctgccgaattctctcggagtatccgaaagattacagcgccttaccttcccggcagtaagcgtgaaggtgaatggacacgaccagggacagaatccccccctggatctggaaaccactgcacggttcagggtcgagacccacacacagaagactattggcgggaacgtgaccaaggaaaaaccacctagcctcattgttcctctggagtcccagatgacaaaagagaagaaaatcactggcaaggaaaaggaaaattctcgtatggaggaaaatgcagagaaccacatcggtgtgaccgaggtacttttaggcagaaagctgcagcactatacggactcctatctcggatttctgccttgggagaaaaagaagtactttcaggacctcctggatgaagaagagagcctgaagactcagttagcctactttactgactccaagaacacgggacgacaactcaaggacacatttgccgattcactacggtacgtgaataagatactgaacagcaaattcggattcacgagccggaaggttcccgctcacatgccccacatgattgacaggattgtgatgcaagaattgcaggatatgttcccagaagaattcgacaagacctcttttcacaaggtcagacattctgaggacatgcagttcgcattctcgtatttctattatttgatgagtgcagtccagccacttaatatcagccaggttttcgacgaagtggacacagatcaatctggggtgctgtcggaccgggaaatccgaacgttggctacccgcatccacgaactccccctgagcctgcaggatctcaccgggctcgagcatatgcttatcaactgcagcaagatgttacccgccgacatcacacagctcaataatatcccaccaacacaggaatcatactatgaccctaatttaccccctgtcactaagtctctcgttactaattgcaaacctgtcactgacaaaatccacaaggcctataaagacaagaacaagtaccgcttcgaaatcatgggtgaagaggaaatcgcgtttaaaatgatcagaaccaacgttagtcacgtggtgggacagctggacgacatccggaaaaaccctagaaagttcgtctgtttgaacgataacattgaccacaatcacaaagatgctcagaccgttaaggctgttctccgggacttttacgaatcgatgttcccaatccctagtcaattcgaattgccacgggaatacagaaataggttcttgcatatgcacgagctgcaggaatggagggcttatagggacaagttaaagttttggactcactgcgtgttggcgacactgattatgtttaccattttctcattctttgccgagcagctgatcgcccttaagagaaagatctttcctagaaggcgcatccacaaggaagcttcccccaaccgtattagagtg

SEQ ID NO: 215003 - DNA, 3768 bp, Artificial Sequence
  derived and/or modified sequence
atgctatttaaactgcttcagcggcaaacctacacctgcttaagtcatcggtatgggttatatgtttgcttcctgggcgttgtggttactatcgtatccgcctttcaatttggagaggttgttctggagtggagcagggaccaatatcacgtgttattcgattcctacagggataacatcgccggaaagtccttccaaaaccggctctgcctgcccatgcccattgacgtggtatatacgtgggttaatggtactgacctggagctgcttaaagagcttcagcaggtgcgcgaacagatggaggaggagcaaaaagctatgagggagattttaggcaagaacacaacagagccaacgaagaaaagtgagaaacagctcgaatgcttactcactcattgcataaaggtgcctatgctggtgcttgatcctgccctacccgcaaatatcacgctaaaagatctccctagcctgtacccctcttttcatagtgcatcagatatctttaacgtggcgaaacctaagaaccccagcactaatgtgagtgtcgttgtgtttgactccacaaaagacgtggaagacgcccacagtggtttattaaaggggaattcccgccagaccgtctggagaggatacctgaccacggacaaggaggtgcctggtctggttctgatgcaggacctagcgttcttaagcggattcccaccgaccttcaaggagacgaatcagttgaaaacgaagcttccagagaacctgtcatctaaggtaaaactcttgcagctttacagcgaagctagcgtggctttgctcaagctaaacaatcccaaggacttccaggagctgaacaagcagacaaaaaagaatatgaccatagacggaaaagaattgacaatttctcctgcctatctcctgtgggatctgtcagctatttcacagtccaaacaagatgaggatatcagcgcgagcaggtttgaggataatgaagaattgcgctatagtctccgatcaatcgagcgtcatgctccctgggtacgcaacatcttcatcgtgacaaacggccagattccgtcatggctcaacctcgacaaccctagggtgaccattgttacccaccaggacgttttccggaacctgtcccacttacctactttttcatcccctgcaattgaatcccatattcatcggattgagggactgagccagaaattcatatacctgaacgatgatgttatgtttggaaaggatgtatggcccgatgacttctactctcactccaaggggcagaaggtctatctgacctggcctgttccaaactgtgcagaaggatgtccagggtcgtggataaaggacggctactgtgacaaggcgtgcaataactccgcctgcgactgggacgggggagattgtagcggcaattctgggggcagccgttacatagctggaggtggcggaacaggcagcatcggcgtcggtcagccatggcagttcggcggaggcattaatagcgtgtcttattgtaaccagggctgcgcgaattcgtggctggctgataaattttgtgatcaggcatgtaacgtgttaagctgtgggttcgatgccggagactgcggacaagaccactttcatgagttgtataaggtgattctgctgccaaaccaaacccactacattattcccaaaggcgagtgcctgccctacttttccttcgccgaagttgccaagcggggcgtcgagggtgcgtacagcgacaaccccatcattcgacacgcctcgattgcaaacaaatggaagactattcatcttatcatgcacagcggcatgaacgctacaacgatacactttaacttgacctttcagaatacaaatgacgaagagtttaagatgcagatcacagttgaggtggatactagggagggccctaagctcaattcgactgcccagaagggatacgagaacctggtttcccccattacactcctccctgaggccgaaatcttgttcgaggatattccaaaagagaaacgatttccaaaattcaaaagacatgatgttaattcaacacggagggcccaggaggaagtcaaaatacctctggtgaacataagcttgctgcccaaggacgcacaactgtccctgaacacccttgacctgcagctcgagcatggggatatcaccctgaagggctacaatctgagtaaatcagccctacttcggtcattcctgatgaactcccagcatgctaagatcaaaaatcaagcgatcattaccgacgagactaatgactcccttgtggctccccaagagaaacaggtgcacaaatcgatactgcctaactcactcggggtgagtgagcggctacagcggttgacattcccggcggtgagcgttaaagtcaatgggcatgatcagggtcagaacccacccttagacctcgagacgactgctcgattccgagtggagacccatacccagaagacaattggtggaaacgtaacaaaggagaaaccaccttcactgatcgtgcccctagagtcacagatgacgaaggagaagaagattaccgggaaagagaaagaaaattctagaatggaggagaacgccgagaatcatataggggtcacggaggtactgctcgggcgcaagcttcaacactacactgatagctatctcggcttccttccctgggagaagaagaaatacttccaggacctgctcgatgaagaggaatcgctgaagacccagttagcatactttaccgattccaagaataccggtcgccagctaaaggacacatttgcggactctctccgctacgttaacaaaatattgaactccaagtttggttttacatcacgcaaggttccagctcacatgccgcacatgatcgatagaatcgtgatgcaagagctgcaggatatgttccctgaagagtttgataaaacaagttttcacaaagttcggcattctgaagacatgcaatttgccttcagctatttctactatctgatgagcgctgtgcagcctctcaatattagccaggtcttcgacgaagtcgacaccgaccaatcaggcgtgttgagtgaccgggagattcgcaccctcgcaacgcgaatccacgagctacctctctcattgcaggatctcaccggactcgaacacatgttgatcaactgcagtaaaatgctcccggcagacattacccagctaaataacattccccctacacaggagtcctactatgatccaaatttaccccctgtaactaaatcgctcgtcaccaactgtaaacctgtcacagacaaaatacacaaggcttacaaagacaaaaataagtatcgcttcgaaatcatgggggaggaggaaatcgcattcaagatgataagaactaacgtttcacacgtcgtgggacagctcgacgacatccgaaagaatccacgaaagttcgtgtgtctcaacgacaacatcgaccataatcataaggatgctcagacagtgaaggctgtgctccgcgacttctacgagagtatgtttcctatcccatcacaatttgagttaccacgagaatacaggaaccgcttcttgcatatgcatgagctgcaagagtggagggcctatcgtgacaaactgaaattttggacccattgcgttcttgccacactgataatgtttacaatcttttcgttctttgcagaacagctgatcgcacttaagcgaaaaatattcccccggcgtcggatacataaggaggcatcgcccaatcggattcgtgtg

SEQ ID NO: 215004 - DNA, 3768 bp, Artificial Sequence
  derived and/or modified sequence
atgctgttcaaacttttacagcgacagacttatacatgtttgtcccatcggtatggtttgtacgtgtgcttcctcggagtggtggtgactattgtctcagcctttcagtttggggaagttgtgttggagtggtcgcgggaccagtatcatgtcctttttgacagctaccgggataacattgccggtaagtccttccagaacaggctgtgtctgccaatgcccattgatgttgtgtacacatgggttaatggcaccgacctcgagcttctgaaggaactccagcaggtgagggaacagatggaggaagagcaaaaggcgatgcgtgagattctgggaaaaaatactactgaaccaaccaaaaagtcagagaaacagctggaatgtctcttgacgcattgtatcaaggttccaatgctggttctggatccagcactgccagcgaatatcacactgaaggacctcccctccctgtatccctcctttcacagcgcgagtgacatcttcaatgtggctaagcctaaaaaccccagcacaaatgtgtccgtggtcgtgttcgacagcaccaaagacgtggaggatgcgcactcagggctgctgaagggcaattctcggcagactgtgtggcgggggtatctcacaactgataaggaagttccaggtctggtcctgatgcaggatctggccttcttgtcaggcttcccacctacatttaaagagacaaaccagctcaagaccaaactgcccgagaatcttagctctaaggtaaagctcctgcaattatactctgaggccagtgtagccctgcttaagctcaataacccgaaagatttccaggaattaaataagcagacgaagaagaacatgacaatcgatgggaaggaattaaccatttctcccgcctatctcctgtgggatctgagcgctatttcccagtctaagcaggatgaagatatcagcgcaagtaggttcgaagataatgaggaactcagatactctctccgctctattgagcggcacgctccctgggttcggaacatctttatagttacaaatgggcagatcccctcatggttgaacctggacaacccccgagtaactatcgtcacccaccaagacgttttcagaaacctatctcatttaccaacctttagctcacccgccattgaatctcatatccatagaatcgaaggcctcagccagaagtttatctatctcaatgatgatgttatgttcggcaaggatgtttggcctgatgacttttatagccattcaaagggccagaaggtgtatctcacttggcctgtgccgaactgcgctgagggctgccctgggagctggattaaggacggctattgtgacaaggcatgtaacaactccgcttgcgattgggacgggggtgactgctcgggaaacagtggtgggagtcggtacattgctggtggcggtggtacgggcagtatcggagtgggacagccatggcaatttggcgggggcattaacagtgtgagttattgcaaccaggggtgcgccaatagttggctggccgacaaattttgtgatcaggcctgcaatgtcctgagctgtggctttgacgcaggggattgcggacaggatcacttccacgaactgtataaagtgatcctgttaccaaaccaaacgcattatattatcccaaagggggaatgcctgccatacttcagctttgccgaggtagcaaaacggggcgtcgagggagcgtatagtgacaaccccattatcaggcacgcttcaattgccaataagtggaaaactattcacttaattatgcattccggaatgaacgctaccacgattcatttcaacctcacttttcagaacactaatgacgaagagttcaagatgcaaatcaccgtcgaggtggacacccgcgaaggaccgaaactcaactcgacggcgcaaaagggatatgaaaatctggtgtcacctattacgcttctgcctgaagcagaaatcctcttcgaagatatcccaaaggagaaaagattccccaagttcaagcgccacgacgtaaattctaccaggcgcgcccaagaggaggtcaaaataccactcgtcaatatttccctcctccctaaagacgcacagctgtcccttaatactttggatctgcagctggagcacggcgatattacactgaagggatataatctttccaaatctgcactgctccggagcttcctaatgaatagccaacatgccaaaatcaagaatcaggccataatcacggacgagactaatgattccctggtggctccacaggagaaacaggtgcataaaagtatattaccgaattcgttgggggtgtcagagcgactccagaggttaactttccctgctgtgagtgtcaaggttaatgggcacgatcagggacagaatcccccattggatttagagaccactgccagattcagagtggaaactcatacacagaaaaccatcggaggaaacgtcaccaaggagaagccgccttctttgatcgtgcctctagagtctcagatgactaaggaaaagaaaattactggcaaagaaaaggagaactcccggatggaagaaaacgcagaaaaccacattggtgtgacggaggttctacttgggaggaaacttcagcattacacggattcttatctgggcttcctgccttgggagaagaagaaatacttccaggacctgcttgatgaagaagagagtttaaaaacccagttggcttacttcactgattcaaagaatacgggcagacaattaaaggacactttcgccgattccctgcgctacgtgaataagatcctaaacagtaagttcggatttacttctcgaaaagtgcccgctcatatgccacatatgatcgataggatcgttatgcaggagcttcaggatatgttccccgaagaatttgataagactagtttccacaaagtccggcactcagaggatatgcagtttgcctttagctacttctattatctcatgtccgcggtgcagcctctcaatatcagtcaggtttttgatgaggttgacaccgaccagtctggggtcctaagcgatcgcgagattcgaactcttgccacccgcatccatgagctgccactaagtctgcaggacctcacaggattagagcacatgttgatcaactgcagcaagatgttaccggcagacatcacccagctgaataacatcccccccactcaggagagctattacgatccaaatcttcctcccgtgactaaatcattggtgaccaactgcaagcctgtgactgacaagatccacaaggcctacaaggacaaaaacaagtatcggtttgagatcatgggtgaagaagaaatcgccttcaagatgattcgcactaatgtgtctcatgtcgtggggcagctggatgatatccgcaaaaatcccaggaagttcgtatgccttaacgataatatcgatcacaaccacaaagacgctcagaccgtcaaagccgtgctacgggatttctatgagagcatgttccctattccatctcagtttgagctgccaagagaatacagaaaccggttcctgcatatgcacgagctgcaggagtggagggcttatcgggacaagctaaaattttggacccactgcgtgttagccacattaatcatgttcacaattttcagcttctttgcagaacagctaatagccctgaaacgaaagattttccctaggagacgaattcataaagaggctagccctaaccggatccgggta

SEQ ID NO: 215005 - DNA, 3768 bp, Artificial Sequence
  derived and/or modified sequence
atgttgttcaagctgcttcagagacaaacctacacttgcttatcccatcggtatggtctctatgtgtgcttcctcggtgtagttgtgaccatcgtgagcgcgtttcagtttggggaagtcgtcttggagtggagtagggatcagtaccatgtattgtttgacagttatcgagataacatcgcaggtaagtctttccagaacagattgtgcttacctatgcctatcgacgtagtttatacttgggtgaacgggacagacttggagttgctcaaagagcttcagcaagtgagagaacagatggaagaagaacagaaggctatgagggagatcctcggtaagaatacaactgagcctacaaagaagtccgaaaagcaattggagtgccttcttacccattgcatcaaagtaccaatgttagtgctggatcccgctctccccgctaacattacattgaaggatttgccgagtctttacccctctttccattccgcgagcgacatttttaatgtggctaagcctaaaaatccctctactaatgtctcggttgtggtgttcgattctactaaagatgtcgaggatgctcatagcggtcttctcaagggaaattccaggcaaactgtatggaggggttatctaactactgataaggaagttcctggccttgtgctcatgcaggacctggccttcttgtcaggtttcccgcctacttttaaggaaaccaatcagctgaagacaaagctacccgagaatctctctagtaaagtcaagctactccagctttactccgaagcttcggttgctcttttaaagctaaataatcctaaggatttccaagaattaaacaagcaaaccaaaaagaatatgacaattgacggcaaagaactcactatttcccctgcctatttgctctgggatctctccgccatttcacagtccaagcaagatgaagatatctctgcatcacgcttcgaagataatgaggagcttaggtacagcctcagatccatcgaaaggcatgcaccttgggtgagaaatatcttcatcgtgaccaatggtcagataccctcctggttaaatctcgacaatccaagagttacgatcgtgactcatcaagatgtgtttagaaacctgtcacatcttccaaccttcagttcacccgccattgaatctcatattcatagaatcgagggactttcccaaaagttcatttatttgaacgacgatgtaatgtttggtaaagatgtctggcccgatgacttttactcacatagcaaagggcagaaagtttaccttacttggccggtcccaaactgtgccgaaggatgtccgggatcttggatcaaggacggatactgtgataaggcatgtaataactctgcctgtgattgggacggcggagactgttctggcaatagtggaggatcccggtatatagctggcggaggtggtaccggcagtatcggcgtgggtcaaccgtggcaatttggtggtggcatcaatagcgtttcttattgcaaccaggggtgcgcaaattcatggcttgctgataaattttgcgaccaagcttgtaacgtgctctcttgcggtttcgacgcaggagattgcggacaagatcatttccatgaactctacaaggttattcttttgccaaatcagactcattacattatccctaaaggggagtgtctaccttacttcagtttcgcagaagtcgcaaagcggggcgttgaaggggcctactcagataatccaatcattcgtcatgcttctattgccaataaatggaagactattcatttgattatgcattctggtatgaatgcaaccacgattcattttaacttaacgttccagaacacgaatgatgaagagttcaaaatgcagattaccgttgaagtcgatacgagagaggggcctaagcttaattctaccgcccagaaaggatacgaaaacctcgtgtcacctattacgctcttgcctgaagctgagatactatttgaagatatcccgaaagagaaaagattcccaaaattcaagcgtcacgatgttaacagcactcgacgtgcccaggaagaagttaagatcccacttgtgaatatttctctgcttccaaaagatgcccaattgtccttgaacactttggatcttcaattagaacatggtgatattacgctgaagggttacaacctctctaagtcggctctcctcagatcttttcttatgaactcgcaacatgccaagattaagaaccaggcgataattactgatgagacaaatgattctttagtggctccgcaggaaaaacaggttcataagtctattttgccaaattcactgggagttagtgaaaggttacaaagattgacatttccagctgtttccgttaaggtgaatggtcatgatcaagggcagaatcctccgttagatttggagactaccgctagatttagggtcgagactcatacccaaaaaactatcggggggaatgtcacaaaggaaaaaccgccttcattgattgtacccttagagtctcaaatgactaaggaaaagaagattaccggtaaggagaaggagaattcgcgaatggaagagaacgctgaaaaccatatcggagttactgaagttcttctaggtcggaagcttcaacattatactgacagttacttggggttcctcccatgggaaaaaaagaaatacttccaagacctcttagatgaagaggagtctctaaagacccaattggcttactttacagatagtaaaaacactggtagacaattgaaagatacattcgcggactcactgcgttacgttaacaaaatcctgaactccaagttcggctttacttcgcgaaaagtccctgctcatatgcctcatatgatcgatcgcattgtcatgcaggagctgcaggacatgttcccagaagagttcgacaagacttctttccataaagttaggcattctgaagatatgcagttcgcattttcatatttctactatttaatgtctgctgtccagccccttaatatcagtcaggtcttcgatgaagtagatactgatcaatcaggtgtactttccgaccgagagatcagaactctcgctacgaggattcatgaactacctctttctctccaagatttaaccgggctcgaacatatgcttattaattgtagcaaaatgcttccagctgacattactcagttaaataacattccccctacccaggaatcttactatgacccaaatttgccgcccgtgacgaagtcactggttaccaactgtaagcccgttactgataagattcataaagcctataaggataagaataaatatcgttttgagattatgggagaagaagaaattgcatttaagatgattcggacaaacgttagtcatgttgttggtcaactcgatgatatccgaaaaaatcctaggaaatttgtgtgtcttaatgataacatcgatcataatcataaggatgcgcaaacggttaaagcagttctgagggatttctatgagtctatgtttccaataccctcgcaattcgagctacctagggaatataggaatagatttcttcacatgcatgagttacaggaatggcgtgcttatcgggataagttgaaattctggacccattgtgttctggctactctcattatgtttactatcttctctttcttcgcggaacagcttattgctctgaagagaaagatattcccaagaaggcgtatacacaaggaggcctctccaaatcgaattcgagtt

SEQ ID NO: 215006 - DNA, 3768 bp, Artificial Sequence
  derived and/or modified sequence
atgttgtttaagctgctccagaggcagacctatacttgtctttcccatcgttacggattgtacgtctgttttctgggggtggtcgtgaccatcgtttccgcattccagtttggcgaagtggtgcttgagtggtcgcgtgatcaatatcacgtgctgttcgattcgtaccgcgataacatcgccggtaagtcgttccagaaccggttgtgcctgcctatgcctatcgatgtggtctacacctgggtgaatggcaccgatctcgaactgcttaaggaactgcagcaggtgcgcgagcagatggaagaagagcaaaaggccatgcgagaaattctgggaaaaaacaccaccgaaccaaccaagaagtcagaaaagcaactcgaatgccttttgacccattgtattaaggtgccaatgcttgttctggatcctgcactgcctgctaacattaccctcaaggatcttccatctctctacccatcattccactctgcatcggatatctttaatgtcgcgaagcctaagaatccctccactaacgtgtcggtggtggtgtttgactccaccaaagatgtggaagatgctcattcaggtcttttgaagggtaactccagacaaaccgtctggagaggctatttgaccactgacaaggaggtcccaggtctggtgcttatgcaagatctcgccttcctgtcgggatttccccctacctttaaggaaaccaaccaacttaaaactaaacttcctgaaaacttgtcctccaaggtcaaactgcttcagctgtactccgaagcctcggtggcactgcttaaacttaacaaccctaaggacttccaggagttgaataagcaaaccaagaagaacatgacgatcgatggaaaagaactgaccataagcccggcatacctgttgtgggatctctcggctatttcacagtccaagcaggatgaagatatttcggcttctcgctttgaagataacgaggagcttcgttactccttgcgaagcattgaaagacacgccccctgggtgcggaacattttcatcgtcactaacggacagatccctagctggcttaaccttgacaaccctagagtcacgattgtcacgcaccaggatgtgtttcgcaacctgtcacatcttcctaccttttcatctccagcaatcgaatcacatattcatcggatcgagggtctgtcgcaaaagttcatataccttaatgatgatgtaatgtttggtaaggatgtctggcccgacgacttctactcgcattccaaaggtcagaaggtgtacctgacttggccagtccctaactgcgcagaaggatgtccaggttcgtggattaaagacggatactgtgacaaagcatgtaacaactcggcctgcgattgggacggaggtgactgttcgggtaatagtggtggttcgcgttacatcgcagggggaggagggaccgggtcaatcggtgtggggcagccctggcagtttggcggaggcattaacagcgtgagctactgcaaccagggatgtgcgaactcgtggctggcggataagttttgtgatcaagcctgtaatgtgttgtcctgtgggtttgacgcaggagactgtggccaggatcattttcatgaactgtacaaggtgatcctccttccaaaccaaactcattacatcattccaaagggggagtgccttccctacttttcgtttgcagaagtggctaagagaggtgtggagggggcctacagcgacaatccgattatcagacacgcatccatcgccaacaagtggaaaaccattcatcttatcatgcactcaggcatgaatgcaaccactattcatttcaatctgactttccaaaacactaacgacgaagagtttaagatgcagatcaccgtcgaggtggacactagggaagggcctaaactgaacagcactgcgcaaaaaggatacgaaaacttggtgtctccgattacccttctcccggaagcagaaatacttttcgaagatattcctaaggaaaaaaggtttcctaaattcaagaggcatgatgtcaactccactaggcgagcacaggaagaagtgaaaattcctctggtgaacattagccttctgcctaaagatgcccaactgtcgcttaacaccctcgatcttcagctggaacacggcgacattaccttgaagggctacaatctgtccaagagcgcactcctccgtagcttccttatgaactcacaacacgcaaagattaagaatcaagcaatcattaccgatgagactaatgacagcttggtggctccacaagagaaacaagtgcataagtcaattcttcccaactccctgggcgtgtcagaacggctccaaaggctgaccttccctgctgtgagcgtcaaagtgaacggacacgatcaggggcaaaaccctccacttgacctcgaaactaccgcccgcttccgcgtggaaacccatactcaaaagaccattggaggaaacgtgactaaagagaaacctccttcgcttattgtgccgctggaatctcaaatgactaaggaaaagaagattaccggtaaagaaaaggaaaattccaggatggaagaaaacgcggaaaaccatattggtgtgacggaagtcctgcttgggcggaaacttcagcattacaccgattcctacctgggttttttgccatgggagaagaaaaagtactttcaggacctcctggatgaagaagagtcgcttaaaactcaactggcgtacttcacggatagcaagaacaccggtagacagctcaaggatactttcgccgactcgctccgctacgtgaacaagatcttgaatagcaagttcggatttacttcccgtaaggtgcccgcgcacatgcctcatatgatcgatcgcattgtgatgcaagaacttcaggatatgttcccagaagagtttgacaaaacgtcctttcataaggtgcgccattctgaggatatgcagtttgccttctcctacttttactacctgatgagcgcggtgcaacctctgaacatttcgcaggtgttcgatgaggtcgacactgatcaatccggcgtcctctcggatagggaaatccggactctcgcaaccagaatccatgagctcccactttcactgcaagatctcactggattggagcacatgttgataaactgttcaaagatgctgccagcagacatcacccaacttaacaacattcctcccactcaggagtcatactacgatccaaatctgccacccgttaccaagtcactggtcactaactgtaaacctgtgactgataagattcataaggcctacaaggataagaacaagtatcggttcgaaatcatgggagaggaagaaatcgcctttaagatgattagaacgaatgtgagccacgtcgtggggcaactggacgatattcgcaaaaatcctaggaaatttgtgtgtctgaatgacaacattgatcacaaccataaggatgcgcagactgttaaggccgtgcttagagacttttacgaatccatgttccctattccctcacagtttgaactccctagagaataccggaatcgcttcctgcacatgcatgaactccaagaatggcgcgcgtaccgggataagctcaagttctggacccattgcgtacttgccacgcttatcatgttcacgattttctcttttttcgcagagcaactgatcgcgttgaagagaaagatttttccaagacggcgtatacacaaggaagctagccctaacaggataagagtg

SEQ ID NO: 215007 - DNA, 3768 bp, Artificial Sequence
  derived and/or modified sequence
atgctgtttaaactgcttcagaggcagacttacacttgcctttctcatcgctacggcctgtatgtgtgtttcctgggtgtggtcgtcaccattgtgtccgctttccagtttggcgaggtagtgcttgaatggtcaagggatcagtatcatgtactgttcgactcttaccgggataacatagccggaaagagcttccagaatcgactctgcctcccaatgcccatcgacgttgtgtacacatgggtaaacgggaccgatcttgagctgctcaaagagctgcaacaagtgcgggagcaaatggaagaagaacagaaagctatgcgcgaaattctgggcaagaataccactgagccgaccaagaaaagtgaaaaacagctggagtgtctgctcactcattgtatcaaggtgcctatgctggtactagatccagcactgcccgctaatattacgctcaaggaccttccaagcctttacccctcattccatagcgcgagcgacatcttcaacgtggctaaacccaaaaacccctctacaaacgtgagcgtagtggtgttcgactccactaaggacgtcgaggacgcccactctggcttgctgaaggggaactcccgccagaccgtgtggagaggctacctcacgacagacaaggaagtacctggtctcgtcctgatgcaggacctggctttcttaagcgggttccctccaacattcaaagaaacgaaccagctgaagaccaagctcccggagaatctgtcatcaaaggttaagctactacaattgtattccgaagccagcgtggcacttttgaagctcaacaatcctaaggactttcaagaattaaacaagcagacgaagaaaaatatgaccattgatggaaaggagcttacaatctctcccgcataccttctctgggatctgtccgccatcagccaatccaaacaagacgaagacattagcgccagccggttcgaagataacgaggaactgaggtattccctgcggtcaatcgaacggcatgccccctgggtccgaaacatcttcatcgtgacaaacggtcaaattcctagctggctgaaccttgacaaccccagggtgactatcgtcacccaccaggatgtgtttcggaatctgtctcatctgcctactttctcctctccagccatcgagtctcacattcaccgaattgagggcctctcacagaagtttatttacctcaacgacgatgtgatgtttggcaaagacgtgtggcccgacgacttctatagtcactccaaggggcagaaggtatatctgacgtggcctgtccctaactgcgccgaggggtgtccaggaagctggatcaaggatggatattgcgacaaggcctgcaataactcagcctgtgactgggatggtggggattgctccggtaactccggtggttcacggtacatcgccggagggggcggaacgggctcgattggcgtgggacagccctggcagttcggcgggggaattaattctgtatcgtactgtaatcaagggtgcgcgaacagctggctggcagacaagttttgtgaccaggcctgtaatgtgctgtcctgtggctttgacgcgggggactgtggacaggaccacttccatgaactatataaggtgatcttgttaccaaatcagacccattacatcattcccaagggggagtgcctgccttatttcagcttcgccgaagtagccaagagaggggttgagggagcttactctgacaaccctatcattaggcatgcgtcgattgctaataagtggaaaacaatacacctcatcatgcatagtggtatgaacgcaaccacaatccatttcaacctgacattccagaacaccaatgatgaggaattcaagatgcaaattactgttgaagttgacactcgcgagggaccaaaactaaacagcacagcacagaagggatacgaaaatctggtgtcccccataacactcctaccagaggccgaaatattgttcgaagatattcccaaggagaagaggttccctaagttcaaaaggcatgacgtcaatagcactcggagggcccaggaggaagtgaaaatccctcttgtcaacatttccctcctgcctaaggacgctcagttatctctgaatacccttgacctacagctagagcatggcgacatcaccctcaaaggctacaacttaagcaaaagtgctttactacgttccttccttatgaattcacaacacgctaagatcaaaaaccaggcaatcatcactgacgagaccaacgacagcctggtagctcctcaggagaaacaggtgcacaagagcatactcccgaatagcctgggcgtatctgagcggctgcagaggctgacattccccgctgtgtctgtgaaagtgaatggccacgatcagggccagaacccccccctagacctggagacgaccgcgcgcttcagggtcgaaacacacacccagaaaacgatcggagggaacgttaccaaggagaaaccgccaagcctcatcgtgccactagaatctcagatgacaaaagagaagaaaattacaggtaaagagaaagaaaattctcgaatggaagaaaatgcggagaaccacatcggagtcaccgaagttctgctcggcagaaaattgcagcactataccgattcttacctgggctttttgccctgggaaaaaaagaagtacttccaggatctccttgacgaagaagaatcgttgaaaacacaactggcatattttacagacagtaagaacacagggcgtcagctgaaggatacctttgccgacagcttgaggtacgtgaataagattcttaactcaaaattcggattcacaagcaggaaagtgccagcccatatgccccatatgattgataggattgtgatgcaggagttgcaagatatgttccccgaagaattcgacaagacctcctttcacaaggttagacactctgaagatatgcagttcgcctttagctacttctactacctgatgtctgccgtgcaacctctgaacattagccaggtgttcgatgaggtggataccgaccaatccggtgtgcttagcgatcgggaaatccgaacactagcaacaaggattcatgaactgcccctgtctctccaggatctgactgggctcgagcacatgcttatcaattgctctaagatgcttccagcagacatcactcagctgaataatatcccacctacacaggaaagctattatgatcccaatctcccacccgtcacaaagtccttggtcactaactgcaagccggtcaccgataaaatccataaggcctacaaggacaagaacaagtaccggtttgagattatgggtgaggaagagatagcattcaagatgattcggaccaatgtgagtcatgtggttggtcagttggacgacatcaggaagaatccaagaaaattcgtgtgtttgaacgacaacattgatcacaaccataaagatgcccaaaccgtaaaggctgtcctgcgtgacttctacgagtccatgtttcctatacccagccaatttgagttacctagggagtaccggaatcggtttctgcacatgcacgaactccaggagtggagggcctatcgcgataagctgaaattttggactcattgcgtgctagcaacactgattatgttcacgatcttctccttctttgctgagcagctgatagcacttaaaaggaagatcttcccaagacgaagaatccacaaagaagctagtccgaacagaatccgcgtt

SEQ ID NO: 215008 - DNA, 3768 bp, Artificial Sequence
  derived and/or modified sequence
atgttgtttaaactccttcaacgtcaaacttacacttgcctgtcgcaccggtacggactgtatgtctgctttctgggcgttgtggtgaccatagtttcggcatttcaattcggagaagtggtccttgaatggtcgcgggaccaataccatgtgctgtttgacagctaccgggacaacatagcgggtaaatcgtttcaaaaccggctgtgtctgcccatgcctatagacgtggtgtatacctgggtgaatggcaccgacctggagctgctcaaggaactgcagcaagtgagagaacaaatggaggaggaacagaaggcgatgcgagaaattctgggtaagaacaccaccgagccgaccaagaagagtgagaagcaactggaatgtctgctgacgcactgcatcaaagtgccaatgcttgtcctggaccctgcactgcccgcaaacatcaccctgaaggatctccctagcctctacccctcgttccattcggcaagcgatatctttaatgtggccaaacctaagaaccctagcaccaacgtgtcggtggtggtgttcgactcaaccaaggacgtggaggatgcgcatagcggcctgctgaaaggaaactccaggcagactgtgtggaggggttaccttactactgacaaggaagttcccggacttgtcctgatgcaggatcttgcctttttgtcgggatttcctccaaccttcaaggaaactaatcagcttaagactaaactgcccgagaacctctcttcgaaggtgaagctgcttcaattgtacagcgaagcgtcagtggccttgctgaagctcaacaaccctaaggatttccaagaactgaacaaacagaccaaaaagaacatgaccattgatggcaaggaactgactatctccccagcatacctcctgtgggacctctcggccatctcccagtccaagcaggatgaggacatctcggcatcaagatttgaggacaatgaggaacttcgttacagccttcgatcgattgagcgacacgctccttgggtccggaacatctttatagtgacgaatggacagattccttcgtggttgaacctcgataaccctagagtgaccattgtgactcatcaggatgtgttcaggaacctctcgcatcttcctactttctcatcccctgcaattgaatcgcacattcaccgaatcgaagggctctcacaaaagtttatctacctgaatgatgacgttatgttcggaaaggacgtgtggccagatgatttctacagtcactcaaaaggccagaaagtgtacctcacttggccagtccctaattgtgccgagggctgccccggaagctggatcaaagatggatactgtgataaggcttgtaacaattccgcctgtgactgggacggaggcgattgctcaggcaactcgggaggctcccgttacattgcgggaggtgggggaactgggtcaattggagtgggccaaccttggcaattcggtggtggtataaactcggtatcgtactgtaaccaaggttgtgcaaactcgtggctggcagacaagttttgcgatcaagcctgtaacgtcctttcatgcggatttgacgccggggattgcgggcaggaccatttccatgaactctacaaggtgattcttcttcctaaccaaacgcactacataattccaaaaggagaatgccttccctacttcagctttgcagaagtcgccaaaaggggagtggaaggggcctacagcgataatccaattatcagacatgccagcattgcaaacaagtggaaaacgatccatctgatcatgcattcgggaatgaatgcaaccactatccactttaacctcaccttccaaaacaccaatgatgaggaattcaagatgcaaatcaccgtggaggtggataccagggaaggtcccaagctcaacagcactgcacaaaaggggtacgagaatctcgtgtcacctatcaccctcctgcctgaagccgaaatcttgttcgaggatatcccaaaggagaagagatttccaaagttcaagcggcacgatgtgaactcaactagacgtgcacaggaagaggtcaaaattccacttgtgaacatttcactgctgcccaaagacgcacaactttccctgaataccctggatctgcagcttgaacacggtgatattaccctcaaaggctataatcttagtaaatccgcgctgctgcggtctttcctgatgaacagccaacatgccaagattaagaaccaggcgatcataacggatgaaactaacgacagccttgttgccccccaagaaaagcaggtgcataagtcaatacttccaaactcccttggtgtgtctgaaagactccaacgtcttacttttcccgcagtctcggtgaaggtgaacggacatgatcagggacaaaatccaccccttgatctggaaaccactgcgaggtttcgtgtggaaacccatacccagaaaactattggcggaaacgtgaccaaggaaaaaccaccttccctgatagtgcccctggaatcccaaatgaccaaagagaagaaaatcaccggtaaggagaaggaaaactcgcgcatggaggagaatgcagagaatcacataggagtgactgaagtccttctgggacgtaagctgcaacattacactgactcataccttggttttctcccctgggagaaaaagaaatactttcaagatctcctggacgaggaggaaagccttaagacgcaactggcgtactttaccgattcaaaaaacacgggcagacaactcaaggataccttcgcggattcgctccgatacgtgaacaaaattcttaattccaagtttgggtttacctcgaggaaagtgccggcccatatgcctcatatgatcgaccgaattgtcatgcaggagttgcaagacatgtttccagaggaatttgacaagacttccttccataaggtgcgccacagcgaggatatgcagtttgctttttcttacttttactacctcatgtcagcagtgcaacctcttaacatttcccaggtgtttgatgaagtggataccgaccagagcggtgtgctgtcggaccgcgaaattaggaccctggccactcggatccatgaacttcctctttccctgcaagatctgaccggactcgagcacatgctcattaactgttctaaaatgctgcctgcagacattactcaactgaacaacattcctcctacccaagaatcctactacgatcctaatcttcctccagtgactaagtccctcgttacgaactgtaagccagtgaccgataagatccacaaggcgtacaaggacaagaacaagtaccggtttgagatcatgggtgaagaagaaatcgcttttaagatgattagaactaacgtgtcccatgtggtgggtcagctcgatgatattcgcaagaatcctcgaaagtttgtctgtctcaacgataacattgatcacaaccataaagacgcccagacggtgaaggctgtgctgcgcgatttctacgagagcatgtttcctattcccagccagtttgagcttcctagggaatacagaaatagatttctgcatatgcacgaactccaggaatggcgggcctaccgggataagctgaagttctggactcattgtgtcctcgccaccctcattatgtttaccatcttctcattcttcgcagaacaactgatcgccctcaagcgaaagatattcccgcgaagaaggattcacaaggaagcatcgcctaatcgtatcagagtg

SEQ ID NO: 215009 - DNA, 3768 bp, Artificial Sequence
  derived and/or modified sequence
atgctgttcaaactgcttcagagacagacctacacttgccttagccatcgctacggactttacgtgtgctttctcggcgtggtggtgactatcgtgagtgcattccagtttggcgaagttgtgctcgaatggtcccgagatcagtaccatgtgctcttcgatagctaccgtgataacattgcaggcaagagcttccaaaataggctttgcctgcctatgcctatagatgtggtgtatacctgggtgaacggcactgaccttgaactgctgaaagaactccagcaggtgcgcgaacaaatggaagaggaacaaaaagcgatgagagaaatcctcggaaagaacactactgaacctaccaagaagtcggagaagcaactcgagtgtctgctcacgcactgtattaaggtgcccatgctcgtccttgatcctgctctcccggcaaacattaccctgaaagaccttccttcactctacccatcctttcattccgcatcagatatcttcaacgtggcaaagcctaagaacccgtccaccaacgtgtctgtggtggtgttcgattcaactaaggacgtggaagatgcgcacagcggactcctgaaaggaaactcacgtcaaaccgtctggcgtggatacctgactacggataaagaggtccccggtctggtgcttatgcaagaccttgctttccttagcggctttcctccaactttcaaggaaactaatcaactgaaaactaagctgcccgaaaatctgagctcaaaggtgaagctgttgcaattgtacagcgaagcgtcggtcgcactgctgaagttgaataaccccaaggatttccaggagctgaacaaacaaaccaagaaaaacatgacgattgacggaaaggagcttacgatcagccctgcataccttctgtgggatctgtcagcaatttctcagtcaaaacaagatgaggatatctcggcatccagatttgaagataacgaggaattgcgttactcgctccggtcaatcgaaaggcatgcaccatgggtccgcaacatctttatcgtgactaacggtcagattccttcctggttgaatcttgataacccgagagtgacgattgtgactcatcaagatgtgtttaggaacctctcgcacctccctacctttagttcgcctgcgattgaatcgcatatccaccgcatagaaggacttagccaaaagttcatctacttgaacgatgatgtgatgttcgggaaggatgtgtggcctgacgatttctactcgcattccaagggacagaaggtctacctgacctggcctgtgcctaactgtgcagaaggatgtccaggttcgtggattaaggatggctactgtgacaaggcatgtaacaattcagcatgcgattgggatggcggtgattgttcaggaaacagcggcggatcgagatacatcgccggaggaggtggtaccggctcgattggtgttggccaaccgtggcaatttggaggaggtattaactcggtcagctactgcaaccaaggatgtgccaattcttggctggcagataagttttgtgaccaagcgtgtaatgtgctgtcctgtggttttgatgcaggagattgcgggcaggatcatttccatgaactctacaaggtgattctgcttccaaatcaaactcattacattatccccaagggtgagtgccttccttacttctcgttcgcagaggtggccaaaagaggagtggaaggggcatacagcgataacccaatcattagacatgccagcatcgccaataagtggaaaacgattcatctgattatgcatagcggaatgaacgccaccactatacactttaatcttacttttcaaaataccaacgatgaggaattcaagatgcaaattaccgtggaagtggatactcgggaaggacctaaacttaattccaccgcacagaaaggttacgaaaacctggtgtcccccataactctcctgccagaagcagaaatccttttcgaggatatccctaaagaaaagagatttccaaagttcaaaaggcatgatgtgaatagcacccggcgcgcacaggaagaagtgaagatccccctggtgaacatctccctcctgccgaaggacgctcagctgtcactgaacaccctggatcttcagcttgagcatggggatataacgctgaaaggatacaatctttcgaagtccgcacttcttcgctcatttttgatgaattcccaacacgccaagattaagaatcaagccatcataaccgacgaaaccaatgattcgttggtggccccccaagaaaagcaggtgcataagtcaatccttccgaattcattgggagtctcggaaaggctccaacggcttacttttcctgccgtctcggtgaaggtcaatggacacgatcaaggacagaacccacccctggatctggagactaccgcaagattcagagtggaaacccacacgcagaaaactattgggggtaacgtgactaaggaaaagccaccatcgctgattgtacctcttgaatcccaaatgactaaagagaaaaagatcaccggtaaggagaaagagaattcccgcatggaggaaaacgcagaaaatcatattggggtgaccgaagtgctccttggccgaaaacttcaacactacaccgattcgtacctgggattccttccttgggagaagaagaaatactttcaggatctgctggatgaggaggaatcccttaaaacccagctggcatacttcaccgattccaagaacaccggacgtcaattgaaggatactttcgcagattcgttgcgatacgtgaataagatcttgaactcgaaatttggttttacctcgaggaaggtccccgcgcatatgccacatatgatagatcgcattgtgatgcaggaactgcaagatatgtttccggaagagttcgacaagactagctttcacaaggtgcggcacagcgaagatatgcagttcgctttttcgtacttttactacctgatgtctgcagttcaacctcttaacatcagccaggtctttgatgaggtggatactgatcaatctggagtgcttagcgacagagagatacgcactctggcaactcgtatacatgaactccctcttagcttgcaagaccttaccggactcgaacatatgctgattaactgttcgaagatgcttccagcagatataactcaactgaacaatattcctcccacccaggaatcgtactacgaccccaaccttcctccagtcaccaagtcgctggttaccaattgtaagcctgtgactgacaaaatccataaggcatataaggataagaataagtaccggtttgagattatgggagaggaagaaattgcttttaagatgattcgcactaatgtgtcccacgtggttggacaacttgatgatattcgaaaaaacccccgcaaatttgtgtgtctgaacgataacatcgatcataaccataaggacgcacagacggtgaaagcggttctgagagatttctacgagtcaatgtttcccatcccatctcagtttgaacttccaagagagtacaggaaccgcttcctccatatgcatgaactccaagagtggagagcataccgggataaactgaagttttggacgcactgtgtgctggcaactctgattatgtttactattttcagcttctttgcagagcagcttatcgcacttaaacgcaagatattccctcggcgacggattcataaggaagcgtcaccgaaccggattagagtt

SEQ ID NO: 215010 - DNA, 3768 bp, Artificial Sequence
  derived and/or modified sequence
atgctgttcaaactgctccaacgacaaacctacacttgcctctcacacaggtacgggctgtatgtgtgttttctgggggtggtggttactatcgtgtccgctttccaattcggtgaggtcgtcctggaatggtcccgtgaccagtaccacgtcctcttcgattcttaccgcgacaacatcgcgggtaaatcatttcagaatagactgtgcctgccaatgccaatcgacgtggtctacacctgggtgaacggaaccgatctggagctgctgaaggagcttcagcaggtccgcgaacagatggaagaagaacagaaagccatgagagaaattctgggaaagaatactactgagccaactaaaaaatcagaaaagcaactcgaatgcttgctgacccactgtatcaaggtgccgatgctggtcctggacccagccctgccggctaacatcacccttaaagacctgccttccctgtacccgtcgttccactcagcttcggatatcttcaatgtggcgaaaccgaagaaccccagcaccaacgtgtcggtggtcgtttttgattcgactaaggacgtggaggatgcccacagcggccttctgaagggaaactcccgccagaccgtgtggcgcggatacttgactacggacaaggaggtgccgggcttggtcctcatgcaggacctcgcattcctgtccggatttccacctaccttcaaggagacgaaccagctcaagaccaagctccccgaaaatctcagcagcaaggtgaagctgctgcagctctacagcgaagctagcgtggcgctgttgaaactgaataacccgaaggacttccaagaactcaacaaacagactaagaagaatatgacgatcgacggaaaggaactgaccatttcgccagcttacctgttgtgggacctgtccgccatctcacagtcaaagcaggacgaagatatctccgcttcgagatttgaggataatgaagagctccggtattccctgcggtcgatcgaacggcacgccccttgggtgcggaatatcttcatcgtgactaacggccagatcccgtcttggctgaacctggacaacccacgcgtgaccatcgtcactcatcaagatgtgttcagaaatctttcccatctgcccaccttctcgtccccggcgatcgaatcacacatccaccggattgaaggactctcgcaaaagttcatctaccttaacgacgatgtgatgttcggcaaagatgtgtggcctgacgacttctatagccatagcaaggggcagaaggtttacctcacctggcccgtgccgaactgtgccgagggttgccctggatcctggataaaagacggctactgcgataaagcatgcaacaactcggcgtgtgattgggacggaggagactgcagcggaaattcaggaggatcacggtatatcgctgggggaggagggactggctccatcggagtgggtcaaccttggcaattcggcggcggaatcaactccgtgtcctactgcaaccagggatgcgcaaacagctggttggccgataagttttgcgaccaagcctgtaatgtcctgagctgcgggttcgacgcaggagattgcggacaagaccacttccacgaactttacaaggtgatcctgctgccgaaccaaacccactacatcatcccgaagggcgagtgtctgccgtacttctcgttcgcggaagtggccaagagaggagtggaaggagcctacagcgacaaccctatcatcaggcacgccagcatcgccaataaatggaaaacgatccatttgatcatgcactcgggcatgaatgccaccactatacatttcaatctgacgttccaaaataccaacgacgaggagttcaagatgcaaatcactgtcgaggtggacactcgagaagggccgaagctcaacagcactgcccagaaaggttacgaaaatctggtgtcaccaatcacgctgctgccggaggcagaaatcctctttgaggacattccaaaggaaaaacggttccccaagtttaagcggcatgacgtgaattcgactagacgggcgcaggaggaggtcaagattccacttgtgaacatctccctgctcccgaaggatgcacagttgtcgctcaacacccttgatcttcagcttgagcatggagatatcaccctgaaaggctacaacctgagtaagtccgcactgctgaggtctttccttatgaactcccagcacgccaaaatcaagaaccaggcaattatcaccgacgaaaccaacgatagtctcgtggcaccgcaggaaaagcaggtgcataagtccattctcccgaattccctgggcgtgtcagagcggctgcaacgcctcaccttcccggctgtctcagttaaggtgaatggtcatgatcaagggcaaaaccctccgctggacttggaaacgaccgcccgctttcgggtcgaaacccacactcaaaagactatcggcggaaacgtgaccaaagagaagccgccttcgctgatcgtgccactcgaatctcagatgactaaagagaagaaaatcacgggcaaagaaaaggaaaactcgcggatggaagagaacgccgagaatcacattggggtgaccgaagtgctcctcggccgcaaactgcagcattacacggactcatacctgggattcctgccgtgggagaaaaagaaatacttccaggatctgctcgacgaagaggagtcccttaagactcagttggcgtacttcactgactcgaagaatactggtagacagctcaaggacaccttcgccgattcgttgcggtacgtcaataagatcctcaactccaagttcggatttactagccgcaaggtcccagcccatatgccgcatatgatcgatcgcattgttatgcaggaactgcaggacatgttccccgaagaatttgataagacctcgtttcacaaggtccggcacagcgaggacatgcagttcgcgttctcctacttttactacctcatgagcgcggtccaacccctgaacattagccaagtctttgacgaggtcgatactgaccagtcgggagtgctgtcggaccgcgaaatcagaaccctcgctacccggattcatgagctgccgctctcgctccaagatttgaccggtctggagcacatgctgatcaactgctcaaagatgctgccggccgacatcacccagctgaataatattccaccaactcaggaaagctactacgatccgaatttgccacctgtcaccaagtcactggtcaccaactgcaagccggtgactgacaaaatccacaaggcatacaaagataagaataagtaccgcttcgaaatcatgggagaagaggagatcgcgtttaagatgatccgtactaacgtgtcgcacgtagtcggacagttggacgatatcaggaagaacccgaggaagttcgtgtgcctgaacgacaacattgatcacaaccacaaggacgcgcagaccgtgaaggccgtgcttcgcgacttctacgagtcgatgttccctatcccttcccaattcgaactgccccgcgagtatcggaaccgctttcttcatatgcacgagctccaggaatggcgagcttacagggataagctcaaattctggactcattgcgtgctcgcaactctgatcatgttcaccattttcagctttttcgcagagcagctgatcgccctcaagagaaaaatcttccctcgccgcagaatccataaggaagcgtccccaaaccgcatcagagtg

SEQ ID NO: 215011 - DNA, 3768 bp, Artificial Sequence
  derived and/or modified sequence
atgttgtttaaacttctccaaaggcagacctatacatgtctgtctcacagatacggcctctatgtgtgttttctcggagtcgtggtgactatcgtcagcgccttccagttcggcgaggtcgtattggaatggtcaagagatcagtaccacgttcttttcgacagctacagggataacatcgctggaaaaagcttccagaacaggctatgcctccccatgcccatcgacgtggtgtatacatgggtaaacggcactgacttggaactgttgaaggagcttcagcaagttcgggaacagatggaagaggagcagaaggccatgagagagatcctgggcaagaacacgacagagccaactaagaaaagtgaaaaacaactcgaatgtctgctgactcattgcatcaaggtcccgatgctcgtgctggatcctgccctgccggcaaatataacccttaaggatctgccaagcctttacccctcgtttcatagcgcttccgacatatttaacgtagctaagcctaaaaacccatctacgaatgtttccgtggtggtgtttgacagtaccaaagacgtggaagatgcgcatagcggcctgctgaagggcaatagccgacagacggtgtggcgcgggtacctcacaactgacaaagaagtgcccggcctggtactgatgcaggacctcgcttttttgtccggattcccgccaacgttcaaagaaactaatcaactcaagacgaaactcccggaaaacttatcctctaaggttaagcttctgcagctgtactcagaggcaagtgtggcactgctgaagctgaacaatcctaaagattttcaggagttaaataaacagactaaaaagaatatgacaatcgacggcaaggagctgaccatctcccctgcttacttgctgtgggatttatccgccatctcacaatcaaagcaggatgaggacattagcgcctcaaggtttgaggacaacgaagagctcaggtatagcctgagatcgattgaacggcatgccccctgggtgcgcaatatctttatcgttaccaacgggcagattccctcctggctgaatttggacaatcctcgcgtcacaatcgtgacccaccaggacgttttcaggaatctaagtcacctcccaacgttcagcagtcccgcgatcgaaagtcacatccacaggatcgaggggctgtcccagaagtttatttaccttaacgatgacgtgatgtttgggaaagacgtatggccagatgatttttacagccactcaaaggggcaaaaggtctacctcacatggccagtgccaaattgtgccgagggatgtcccggtagctggatcaaggatggatactgtgataaggcctgcaataattcagcttgtgactgggatgggggggactgttccggcaattccggaggaagcaggtatattgccgggggtgggggtactggctctatcggggtcggtcaaccctggcagttcgggggaggcatcaatagcgttagctattgcaaccagggttgtgccaactcctggcttgcggacaagttctgtgaccaggcctgtaatgtcctttcgtgcggcttcgacgccggcgattgtgggcaggaccattttcacgaactttataaagtgatacttctgccaaatcagacacattatatcattcccaaaggggagtgcttaccatacttctcctttgccgaggtggccaaaaggggcgtggaaggcgcttacagcgataatccaattattcgccatgcgtcgatcgctaacaagtggaagacaattcatcttattatgcattcgggaatgaatgctaccactatccatttcaacctgactttccaaaatactaacgatgaggagttcaaaatgcaaatcaccgttgaggtggacaccagagaaggccccaagctgaacagcactgctcagaaaggctacgaaaacctggtgagccctatcacgctacttccagaggctgaaatcctcttcgaagacatcccaaaagagaaacggtttcccaagttcaagaggcacgacgtcaacagcacaaggcgagcacaggaggaagttaagattcctctggttaatatttctctcttgcccaaagacgcccagttatctctcaatacactggacctgcagcttgagcacggcgacataacactcaagggttataatttgtccaagagcgctctgctaaggagctttctaatgaactcccagcacgccaaaataaagaaccaggccataatcactgacgagacgaatgactcacttgtggcaccacaagaaaaacaggtgcataagtcaatcctgcccaacagcctcggcgtttctgagagactgcagcgactgacgtttccagccgtgtctgtgaaggtgaacggacatgaccagggacagaatccaccactcgatctcgagaccaccgccagattccgtgttgagacgcatacacaaaagaccattggagggaacgtgacgaaggagaagcccccatccctgattgtaccccttgagagccagatgaccaaagaaaaaaaaataacaggaaaagagaaagagaatagtcgcatggaagagaatgcagagaaccacatcggggtcaccgaggtgctgctcggaagaaagctccaacactatactgactcatatctggggtttttaccttgggagaaaaagaaatacttccaagacctcttagacgaagaggagtcactgaaaacacagcttgcttactttactgatagtaaaaacacaggacgacaacttaaagataccttcgcggactccttgcggtacgtaaacaaaatcctgaatagtaagtttggattcaccagtcggaaagtcccagctcacatgcctcacatgatcgataggatcgttatgcaggagttgcaggacatgtttcctgaagaattcgataagacctcctttcataaagtcaggcacagcgaagatatgcagttcgccttttcttatttttattatctgatgtccgccgtccagcctcttaacatcagtcaggtttttgacgaagtcgacacagatcagtctggggtcctctccgacagggagataagaacactagccacccgaattcatgaactgcccttatccttacaggatctcacggggcttgaacacatgctgattaattgctcaaagatgctgcccgctgatatcacacaactcaataatatacctcctacccaggaatcttactatgacccaaacctgcctcccgttactaagagcctggtcaccaattgtaagcccgtcaccgataagatacacaaggcctataaagacaaaaacaaatatcgatttgagatcatgggcgaggaggagatcgcgtttaagatgattcgcacgaacgtaagccacgtggtgggtcagcttgacgatattcgtaagaacccccggaagttcgtatgtctgaacgataacatcgatcataaccacaaggacgctcaaactgttaaggccgtcttgagagatttctatgaaagtatgttccccattccatcacaatttgagctgcctcgtgaatatcggaatcggttcttgcacatgcacgagctacaggaatggcgtgcatatagagataagctgaagttttggacccactgcgttctggccacactgataatgttcactatctttagttttttcgcggaacagctgatagctttgaagaggaagatcttcccaagacgcaggattcataaggaagcctctccgaaccgtatccgcgtg

SEQ ID NO: 215012 - DNA, 3768 bp, Artificial Sequence
  derived and/or modified sequence
atgttgttcaagctgctgcagcgacagacatatacttgcctgagccaccgctacggactgtatgtttgcttcctcggcgtcgtcgtcacaattgtctccgctttccaatttggagaggtggtacttgagtggtcacgagaccagtaccacgtcctgtttgatagttatagggataatatcgcagggaagtccttccagaatcggctctgtctccctatgccgatcgacgtcgtatatacttgggtgaacggaaccgatctcgagctcctgaaggagctccagcaagttagggagcagatggaggaggagcagaaggccatgagggagatactgggcaagaacaccactgaacccactaaaaagtcggagaaacagctggagtgcttactgacccactgtatcaaagtgccgatgctcgtgcttgacccggcccttccggccaatataactctgaaggatctgccatctctctacccttcgtttcactctgcctctgatattttcaacgtggccaaacccaaaaatccatccacgaatgtgtctgtggtagtgttcgattcaactaaggatgtggaagatgcgcatagcggccttctgaaaggaaactctaggcagacagtgtggcggggttacttgaccactgataaggaggtaccaggtcttgtgttgatgcaagacctggctttcctctcaggattcccccctacctttaaagaaacaaatcagctgaaaaccaagctgcccgaaaacctgagcagcaaggtaaaactgctgcaactctactctgaggccagtgtggctctcctcaagctgaacaaccctaaagacttccaggaacttaacaagcagactaagaagaacatgacgattgacggtaaagagctgacaattagccccgcttatctgctgtgggacttgtccgctatttctcagtcaaaacaagacgaggacatctcggccagccggtttgaggacaatgaagaacttaggtacagcctgaggagcatcgagcgtcatgcaccttgggtgaggaacatttttattgttaccaatggtcagatccctagttggctgaatttggataacccacgagttactatcgtcacacaccaggatgtcttccgtaatctgagtcacctgcccaccttcagtagtcccgctatcgaaagccacatccaccgaatagaaggactctcccagaagttcatatatctgaatgacgacgtcatgtttggcaaggacgtttggcccgatgacttctatagtcatagtaagggccagaaggtatacctgacttggcctgtcccgaattgtgcagaagggtgtcccggaagttggataaaggacggatactgtgacaaagcatgtaacaattctgcctgcgactgggacggcggagattgctccggaaactcaggcggtagtagatacattgcaggtggggggggcaccggatctatcggagttgggcagccttggcagttcggtggcggaatcaatagcgtgagttattgcaatcaaggctgcgccaattcgtggctagcagacaaattctgtgatcaagcctgcaacgtcttaagctgtggatttgacgctggggattgcggacaggaccattttcacgagctgtataaggtcatcctgttgcctaaccagacccattacataattccaaaaggggaatgtctaccctacttctcctttgccgaggtggccaaaagaggtgtcgagggggcgtactctgacaacccgattattaggcatgctagcattgccaataagtggaagacaatccacctgattatgcactccggcatgaatgccactacaatccactttaacctgacgtttcagaacaccaacgacgaggagtttaagatgcagattacagtggaggtggacactcgcgagggacctaagttgaattctactgcccagaaaggctacgaaaaccttgtgagcccgatcaccctgctgccagaagccgaaattctgttcgaggacatccccaaggagaagaggttcccgaagttcaaaagacacgacgtgaatagtactagacgggcacaggaggaagttaaaatcccattggtgaatatctctctgctccccaaggacgcccagctttctctaaacaccctggacttacagctggagcacggcgacattacattgaagggatataacttgtcaaagagcgcactgcttaggagtttcctgatgaactcacagcatgcaaaaataaaaaaccaggccataatcacagacgagacaaacgactctttggttgctccccaggagaaacaagtgcacaagtctattctgccaaactcactgggcgtctcagagcgcctccagcgcctaactttccctgccgtctcggtgaaggttaacgggcacgatcagggccagaatcctcctctggatctggagactaccgcccggttccgggtggaaacccatacccagaagaccataggaggaaacgtgactaaggagaagccgccatcactcattgtccctctggagtcccagatgacaaaggagaagaagattacaggaaaggagaaagagaattcacggatggaggaaaatgcagaaaaccacatcggtgtgacagaggttctgctgggaagaaagctgcagcattatactgatagttatctgggcttcctgccatgggagaagaaaaagtatttccaggacctactagacgaggaggagagcctgaaaacacaattggcatattttaccgacagtaagaacaccggcagacagctgaaggacacattcgccgacagcctgaggtacgtcaacaagattttaaacagtaagttcggctttacctctcgcaaggtgccagcacatatgcctcatatgatcgatcggattgtgatgcaggagctgcaggatatgtttcctgaagagttcgacaaaacctcattccacaaagtccgccactcagaggatatgcagttcgccttttcctacttttattatctcatgtccgctgtgcagcccctcaatataagtcaggtgttcgacgaagtggataccgaccaatctggagtgttgtcagatagagaaataaggactcttgcgaccaggatccacgagcttccattatctctgcaagacctgacaggactggaacacatgctgataaattgctcgaagatgctgcccgcagacataacacaattgaacaatattccccccacccaagaaagttattatgaccccaatctccctccggtgaccaagtcactggttacgaactgtaagccagtgacagataaaattcacaaggcttataaggataaaaataagtaccggtttgagataatgggtgaggaggaaatcgccttcaaaatgatccgcactaatgttagtcacgttgtcgggcagctggatgacatccggaagaacccccgcaaatttgtctgcctgaacgacaatatcgatcacaatcacaaggacgcccagacagtcaaggcagtgttgcgagatttctatgagagcatgttcccaattccttcccaattcgagctccctagggaatacagaaaccggttcctccacatgcacgaactgcaggaatggagggcctatagggataaattgaaattttggacgcattgcgtactcgcaaccctgatcatgttcacgatctttagtttcttcgctgagcaattgatcgccttgaaaaggaagattttccccagacgccgtatccataaagaagcaagccccaatagaatcagagtg

SEQ ID NO: 215013 - DNA, 3768 bp, Artificial Sequence
  derived and/or modified sequence
atgctcttcaaacttcttcaacggcagacgtacacctgtctctcgcacagatacggactgtatgtgtgctttctcggggtggtggttactatcgtgtccgcgttccaattcggagaggtggtgctggagtggtcgcgggatcaataccatgtgctctttgacagctatcgtgacaatatcgccgggaagagtttccagaatcggctctgtctcccaatgcctatcgatgtggtctacacctgggtcaacggaactgacctggagctcctgaaagaacttcaacaggtgagagagcagatggaagaggagcagaaggcaatgagggagatcttggggaagaacaccactgagcctaccaagaagtcggagaagcagttggagtgcctgctgactcattgcatcaaagtgccgatgctggtgctggacccggcactgcccgcgaacattactttgaaggatcttccgtccctctacccatcctttcactccgcctcagacatcttcaacgtcgcaaagcctaagaatccttccacgaacgtgtcggtggtggtgttcgattcgactaaggacgttgaggacgcgcactcaggattgctgaaaggaaactcgagacagaccgtttggcgcggatacctgactactgataaagaggtgcccgggctggtgctgatgcaggacctggccttcctgtcaggattcccaccgactttcaaagaaaccaaccaactcaagaccaagttgcctgaaaatctgtccagcaaagtgaagctgctgcaactgtactctgaagcctccgtcgcgttgctcaagctgaacaatcccaaggacttccaggaactgaacaagcagaccaaaaagaatatgaccatcgacggcaaggaactgaccatcagcccagcctacctcctgtgggatctgtcagcaatttcacaatcaaagcaagatgaggacatctccgcgtcgcgcttcgaagataacgaggagctgagatacagcttgcgctccattgaacgccatgccccctgggtccggaacattttcattgttactaacggacagatcccgtcatggctgaatttggacaatccacgcgtgaccatcgtgactcaccaagacgtgttccggaacctctcgcacttgccgaccttctcgagcccggcaatcgagagccatatccatcggattgagggtctgtcacaaaagttcatctacctgaacgatgacgtgatgtttggcaaagatgtgtggccggacgacttctacagccactcgaaaggacagaaggtttacctcacctggccggtgccgaactgtgccgaaggatgcccgggctcttggattaaggacggatattgtgacaaggcttgcaacaactctgcctgcgactgggacggaggtgactgctcggggaactcaggcggaagccgctacattgctggaggtggaggtaccggatcaatcggagtgggccagccatggcagttcggcgggggcatcaactccgtctcctactgtaaccagggatgcgctaactcctggctcgctgacaagttttgcgaccaagcctgcaatgtcttgtcctgcggatttgatgcgggagactgtggccaagatcacttccatgaactgtacaaggtgatcctgctgccgaaccaaacccactatatcatccctaaaggggaatgcctcccgtacttctcctttgctgaagttgccaagcggggtgtggagggtgcatattccgataatcctatcatccggcacgctagtatagcgaacaaatggaaaaccatccatctgattatgcacagcggaatgaatgctaccaccatccacttcaacttgacttttcaaaatactaacgacgaggaattcaagatgcagatcactgtggaggtcgacactcgcgagggccctaaactcaattctaccgctcaaaagggatacgagaatctggtgtcgcctatcaccttgctcccggaggcggaaatcctgttcgaggacatacccaaagagaagagatttccaaagttcaaaagacacgacgtgaactcgacccgcagggctcaagaggaagttaagatccctcttgtcaacatttcgctgctcccaaaggacgcgcagttgagcctgaacaccctcgaccttcagctggagcacggagacattaccctgaagggctacaacctctcgaagtccgcgttgttgcggtccttcctcatgaactcccagcatgcaaagatcaagaatcaggccatcatcaccgatgaaaccaacgattccctcgtcgctccacaggaaaagcaagttcataagagcattctgcccaattcgttgggagtaagcgagcgactgcagagattgactttcccggcagtcagcgtgaaggtgaatggtcacgaccagggacaaaatccgccgcttgaccttgagacgacggcgcgctttcgggtggaaactcacactcagaaaactatcggaggcaatgtcactaaggaaaagccaccgtccctgatcgtgccgctggagtcccaaatgacgaaagagaaaaagattaccggaaaagaaaaggaaaactcgcgcatggaagaaaacgccgaaaatcacatcggagtgaccgaggtgctcctggggcggaagctgcaacactacactgacagctacctgggatttctcccctgggagaagaagaagtactttcaggacctcctcgatgaagaggagtcacttaaaacgcagctggcctactttacggattcgaaaaacacgggccgccagttgaaggacactttcgctgactctctgaggtacgtgaataagatcctgaactcaaaattcggattcacttcgcgcaaggtgccagcacatatgccgcacatgatcgatcgcatcgtgatgcaggaactgcaggatatgtttcccgaagaatttgataagactagcttccacaaagtgcgccactcagaagatatgcagttcgcattctcctacttttactaccttatgtccgccgtccagccgcttaacatctcccaggtgttcgatgaagtggacaccgaccagtccggagtgctcagcgatagagaaattcggactctggcaaccaggatacatgagctgccgctttccctgcaagatttgaccgggttggagcacatgctgataaactgctccaagatgctgccagccgacatcacgcaactgaacaatatcccgccaacccaggagtcgtattacgatcctaacctgccgccagtgaccaagagcctcgtgaccaattgcaagcccgtcaccgataagattcacaaggcatacaaggacaagaacaagtaccggttcgagatcatgggcgaggaagagatcgcgttcaagatgatccggactaatgtgtcccacgtcgtgggccagctggatgatatccgcaaaaatccccgcaaattcgtgtgcctgaacgacaacattgatcataatcataaggatgcccaaactgttaaggcggtgctccgggacttctacgagagcatgttccccatcccttcgcaattcgaacttccaagggaataccggaacaggttcctgcacatgcatgaattgcaggaatggagagcatacagagacaaactgaagttttggactcattgcgtcttggccaccctcatcatgttcaccatcttctctttcttcgccgagcaactgatcgccctcaagcgcaagatattcccgagacgccgcatacataaggaagcgtcgccaaacagaatccgcgtg

SEQ ID NO: 215014 - DNA, 3768 bp, Artificial Sequence
  derived and/or modified sequence
atgctgtttaaactgctgcagagacaaacgtatacgtgcttaagccatcgttatggcctgtacgtatgctttcttggtgtggtcgtaaccattgtctcagcttttcaatttggcgaagtagtacttgaatggtctagagatcagtatcatgtgctgttcgattcttaccgcgacaacatcgctggcaaatcatttcaaaatcgactttgtctgccgatgcctattgatgttgtatatacatgggtgaatggaacagaccttgaactactgaaagaactccaacaggttcgcgagcaaatggaagaagaacagaaagcaatgagagaaatcttgggcaaaaatacgacggaaccgacaaaaaaatcagaaaaacagcttgaatgtcttcttacgcattgcattaaagtgccaatgctagtgcttgatcctgcgttaccggctaatatcacactaaaggacttgccatcattatatccgtcctttcactcagctagcgatattttcaatgtcgccaaaccgaaaaatccttctacaaatgtttcagttgtagtgtttgattcaacaaaagatgtcgaagacgcccattctggtctgctgaaaggtaatagcagacagaccgtttggagagggtatctgactacagataaagaagttcctggccttgtactgatgcaggatttagcttttctatcagggtttccgccaacgttcaaagaaacgaatcaattgaaaacaaagttgcctgaaaacctgtcttcgaaagttaaattgctccaattatatagcgaagcgtctgtagcactgttgaagttgaataaccccaaagatttccaagagcttaacaaacaaacaaagaaaaatatgacgattgacggcaaggagttgactatatcgcctgcgtacttgttatgggatttatcagccatttcacagtctaagcaggatgaggatatcagcgcgtcgcgcttcgaagataatgaagaactgcgatattctttacgttccatcgagcgccatgcgccatgggtgaggaacatattcattgtcacaaacggtcaaatcccctcatggctgaacctggacaacccgcgggtgacaattgtgacccaccaagacgtttttcgtaacttgagccacttaccgacgttttctagcccggctatagaatctcatatccataggatcgaagggctgtcacagaaatttatttatttaaacgacgacgttatgtttggaaaggatgtatggccagatgacttttattcccattctaaaggccaaaaggtgtatcttacatggcctgtgccgaattgcgctgaaggatgtccgggttcctggattaaagacggatactgcgataaagcttgtaacaatagtgcatgcgactgggatggtggggattgttcgggcaactcaggcggaagccgttacattgctgggggcggcggcacgggatcaattggggtcggacaaccgtggcaatttggtggtggcattaatagcgtatcttattgtaatcagggctgtgcgaattcatggttagctgataaattttgtgatcaagcttgtaatgtgttatcttgcggattcgatgctggagactgcggccaggatcattttcatgaattatataaagtaattctgcttccgaatcagacacattacatcatccccaaaggtgaatgccttccgtatttttcatttgccgaagttgcaaaaaggggggtggagggagcatattcagacaatccgatcatccggcatgcgagtattgctaataaatggaagacgatccatttaattatgcatagcggtatgaacgcaactacaatccactttaacctgacatttcaaaacacgaatgatgaagaatttaagatgcaaatcacagtcgaggtcgacacgcgtgaggggcctaaactgaactccacagcccagaagggatatgagaatttggtgtctcctatcactcttctgccagaagcggaaattctgtttgaagatattccgaaagaaaaacgttttccaaagtttaaacgacatgatgtcaatagtacaagaagagcccaggaggaagtcaagataccgctggttaatatatcattgcttccgaaagacgctcagctctctcttaacactttagaccttcagcttgagcatggcgacattacgctgaagggctacaacctctcaaaatcggcattgctgcgtagttttctgatgaatagtcaacatgcaaaaataaaaaatcaggccatcatcactgacgaaaccaacgattcattggtggcgcctcaggaaaaacaagtgcacaaaagcatcctgcctaatagtctcggcgtttcagaacgcttgcagaggttaacctttccggcggtcagtgttaaagtaaatggtcatgaccaaggccagaatccaccgctggatcttgaaacgacggcaagatttcgagttgaaacgcacactcaaaagacgataggcggtaatgtaacaaaagaaaaaccgccgtcacttatcgtgcctctcgaatcacagatgacaaaagaaaaaaaaattacgggaaaagaaaaagagaatagccgtatggaagaaaatgcggaaaatcacataggagttacagaggtcttactgggacgaaaattacaacactatacagatagttatttaggatttctgccgtgggaaaaaaaaaaatactttcaggatcttctcgatgaagaagaatcattaaaaactcagctggcctactttactgactccaaaaatacgggaaggcaactcaaagatacttttgcagattctttacgttatgtaaacaagattctgaactctaagtttggctttacaagtcgtaaggtcccagcacatatgccgcatatgatcgaccgtattgtgatgcaagaattgcaagatatgtttccggaggaatttgacaaaacaagcttccataaagtgcgccatagtgaagacatgcagtttgcgtttagctatttttattaccttatgtcagccgtccagccattaaacatttcccaagtctttgacgaggtggacacggaccaatccggcgtgctttccgatcgcgaaatcagaacgctggcaacccgaatccacgaactaccactgtcattgcaggatttaactggattagaacatatgcttattaactgcagcaagatgctgcctgcagatattactcaacttaacaatatacctccgacacaagaaagctactatgatccgaatcttccaccagtgaccaaatctctggtaacgaattgcaaaccggttacagataaaattcataaagcttacaaggataaaaataagtatagatttgaaataatgggcgaagaagaaattgcttttaaaatgatccgtaccaacgtttcacatgtagtcggacagcttgacgacatccggaagaatccgcgaaaattcgtctgtttaaatgacaatatagatcacaatcacaaggatgcacaaaccgtgaaagctgtgcttcgagatttctatgaatcaatgttcccaatcccgagtcaatttgaattacctagggaatatagaaaccgatttctccatatgcatgaactgcaagaatggagggcttatcgcgacaaacttaagttttggacgcattgcgtgttggccactttaataatgtttacaatcttttccttcttcgcggaacagcttatcgcattaaaaagaaaaatctttccgagacggcgcattcataaggaagcatcaccgaaccgaatacgtgtg

SEQ ID NO: 215015 - DNA, 3768 bp, Artificial Sequence
  derived and/or modified sequence
atgttatttaaactattacaacgtcaaacgtatacgtgtctatcgcatcgttatggtctatatgtatgttttttaggtgtagttgtaacgatagtatcggcgtttcaatttggtgaagtagttttagaatggtcgcgtgatcaatatcatgttttatttgattcgtatcgtgataatatagcgggtaaatcgtttcaaaatcgactatgtctaccgatgccgatagatgtagtttatacgtgggtaaatggtacggatttagaattattaaaagaattacaacaagttcgagaacaaatggaagaagaacaaaaagcgatgcgtgaaatactaggtaaaaatacgacggaaccgacgaaaaaatcggaaaaacaattagaatgtctactaacgcattgtataaaagttccgatgttagtattagatccggcgctaccggcgaatataacgctaaaagatttaccgtcgttatatccgtcgtttcattcggcgtcggatatatttaatgttgcgaaaccgaaaaatccgtcgacgaatgtatcggttgtagtatttgattcgacgaaagatgtagaagatgcgcattcgggtctactaaaaggtaattcgcgacaaacggtttggcgtggttatctaacgacggataaagaagttccgggtctagtactaatgcaagatttagcgtttctatcgggttttccgccgacgtttaaagaaacgaatcaattaaaaacgaaactaccggaaaatctatcgtcgaaagtaaaattattacaattatattcggaagcgtcggtagcgctattaaaactaaataatccgaaagattttcaagaattaaataaacaaacgaaaaaaaatatgacgatagatggtaaagaactaacgatatcgccggcgtatctattatgggatttatcggcgatatcgcaatcgaaacaagatgaagatatatcggcgtcgcgatttgaagataatgaagaactacgatattcgttacgttcgatagaacgacatgcgccgtgggttcgtaatatatttatagtaacgaatggtcaaataccgtcgtggttaaatctagataatccgcgtgtaacgatagtaacgcatcaagatgtatttcgtaatttatcgcatctaccgacgttttcgtcgccggcgatagaatcgcatatacatcgaatagaaggtctatcgcaaaaatttatatatttaaatgatgatgttatgtttggtaaagatgtatggccggatgatttttattcgcattcgaaaggtcaaaaagtatatctaacgtggccggtaccgaattgtgcggaaggttgtccgggttcgtggataaaagatggttattgtgataaagcgtgtaataattcggcgtgtgattgggatggtggtgattgttcgggtaattcgggtggttcgcgttatatagcgggtggtggtggtacgggttcgataggtgtaggtcaaccgtggcaatttggtggtggtataaattcggtttcgtattgtaatcaaggttgtgcgaattcgtggctagcggataaattttgtgatcaagcgtgtaatgtattatcgtgtggttttgatgcgggtgattgtggtcaagatcattttcatgaactatataaagttatattattaccgaatcaaacgcattatataataccgaaaggtgaatgtctaccgtatttttcgtttgcggaagtagcgaaacgaggtgtagaaggtgcgtattcggataatccgataatacgtcatgcgtcgatagcgaataaatggaaaacgatacatctaataatgcattcgggtatgaatgcgacgacgatacattttaatctaacgtttcaaaatacgaatgatgaagaatttaaaatgcaaataacggtagaagttgatacgcgtgaaggtccgaaattaaattcgacggcgcaaaaaggttatgaaaatttagtatcgccgataacgttattaccggaagcggaaatattatttgaagatataccgaaagaaaaacgttttccgaaatttaaacgtcatgatgtaaattcgacgcgtcgagcgcaagaagaagttaaaataccgctagttaatatatcgctactaccgaaagatgcgcaattatcgctaaatacgctagatttacaactagaacatggtgatataacgttaaaaggttataatctatcgaaatcggcgctactacgatcgtttctaatgaattcgcaacatgcgaaaataaaaaatcaagcgataataacggatgaaacgaatgattcgctagtagcgccgcaagaaaaacaagtacataaatcgatattaccgaattcgttaggtgtatcggaacgactacaacgattaacgtttccggcggtttcggtaaaagtaaatggtcatgatcaaggtcaaaatccgccgttagatttagaaacgacggcgcgatttcgagtagaaacgcatacgcaaaaaacgataggtggtaatgtaacgaaagaaaaaccgccgtcgctaatagtaccgttagaatcgcaaatgacgaaagaaaaaaaaataacgggtaaagaaaaagaaaattcgcgtatggaagaaaatgcggaaaatcatataggtgtaacggaagtattattaggtcgtaaactacaacattatacggattcgtatctaggttttctaccgtgggaaaaaaaaaaatattttcaagatttattagatgaagaagaatcgctaaaaacgcaactagcgtattttacggattcgaaaaatacgggtcgtcaactaaaagatacgtttgcggattcgttacgttatgtaaataaaatattaaattcgaaatttggttttacgtcgcgaaaagtaccggcgcatatgccgcatatgatagatcgaatagttatgcaagaattacaagatatgtttccggaagaatttgataaaacgtcgtttcataaagtacgtcattcggaagatatgcaatttgcgttttcgtatttttattatctaatgtcggcggttcaaccgctaaatatatcgcaagtttttgatgaagtagatacggatcaatcgggtgtattatcggatcgtgaaatacgtacgctagcgacgcgtatacatgaattaccgctatcgttacaagatttaacgggtctagaacatatgttaataaattgttcgaaaatgctaccggcggatataacgcaattaaataatataccgccgacgcaagaatcgtattatgatccgaatttaccgccggtaacgaaatcgttagtaacgaattgtaaaccggttacggataaaatacataaagcgtataaagataaaaataaatatcgttttgaaataatgggtgaagaagaaatagcgtttaaaatgatacgaacgaatgtatcgcatgtagtaggtcaactagatgatatacgtaaaaatccgcgtaaatttgtatgtctaaatgataatatagatcataatcataaagatgcgcaaacggttaaagcggtactacgtgatttttatgaatcgatgtttccgataccgtcgcaatttgaactaccgcgagaatatcgaaatcgatttctacatatgcatgaactacaagaatggcgagcgtatcgagataaactaaaattttggacgcattgtgtactagcgacgctaataatgtttacgatattttcgttttttgcggaacaactaatagcgttaaaacgaaaaatatttccgcgacgtcgtatacataaagaagcgtcgccgaatcgtatacgagta

SEQ ID NO: 215016 - DNA, 3768 bp, Artificial Sequence
  derived and/or modified sequence
atgctgttcaaactcctgcaaaggcaaacctacacctgtctatctcatagatatggcctttacgtgtgctttttgggagtggtcgttaccatcgtttctgccttccagttcggcgaagtcgtacttgagtggagcagggaccagtatcatgtgctgttcgattcttaccgcgacaatattgccggtaagtccttccaaaaccgcctgtgtctcccaatgccgatagacgtggtttacacatgggtgaatggcaccgacttggagctgctgaaggaactgcagcaggtcagggaacagatggaggaagagcagaaggccatgagggagatcctgggcaagaatacaaccgagcccaccaagaaaagtgaaaagcagctggagtgtcttctgacccactgtattaaggtgccaatgttggtgctggacccagccttgcccgccaacattaccctcaaggatttgccttcgttataccccagcttccattccgcaagcgacatttttaacgttgcgaaacctaaaaaccctagtactaacgtctccgtcgtggtcttcgattctacaaaagatgtcgaggacgcccatagtggcctgctgaagggaaactcccgccagaccgtgtggagaggctacctgacgaccgataaggaagtccccgggctggttcttatgcaggacttagcttttttgtctggctttccgccgactttcaaagagaccaaccagctgaaaactaaactgccggaaaatctcagttctaaagtgaaactgctgcagctgtattcggaagcgtccgtggccttattgaaattgaataacccgaaggacttccaagagctcaacaagcagacaaaaaagaacatgacaattgatgggaaagagctgacaatctccccagcatatctgctatgggatctgtcggccatatcccagtctaaacaggacgaagatataagtgcatcaaggtttgaggacaacgaagaactgagatattccctgagatctattgaacgccacgcaccttgggtcagaaatatctttattgttacaaacggtcagatcccgagctggctaaatttagacaatccgcgggtcacaattgtcactcaccaggacgtgtttcggaacctgtcccacttgccaactttcagctctccggccattgagtcccacattcaccggatcgaaggcctgtctcagaagttcatttatctaaacgacgacgtcatgtttgggaaagatgtgtggcccgatgacttctattcccattccaagggacagaaagtctatctgacctggccagtgcctaactgcgcagagggctgtccaggctcttggatcaaagacggatactgcgacaaggcttgcaacaattctgcctgtgattgggatggcggcgactgctccggtaattccggggggtcacgatatatcgccgggggaggaggcaccggcagtattggcgtgggccagccttggcagttcggggggggtatcaacagcgtcagttattgcaaccaagggtgcgctaacagctggctagcagacaaattctgcgaccaggcctgcaacgtgctttcatgtggcttcgatgcaggtgattgcggtcaggaccattttcacgagctgtacaaggtgattctgctcccgaatcagacccactatataatcccaaaaggggaatgcctgccatacttctcatttgccgaggtggctaagcgtggggtagagggcgcctacagcgataaccccattatcaggcacgcaagtatcgccaacaaatggaagaccatccatcttataatgcacagtgggatgaacgcaacaactattcactttaacctgacgtttcagaacacaaacgacgaggagtttaagatgcagatcaccgtggaagtcgacacgcgggaaggtcctaagctgaattctactgcccaaaaaggctatgaaaacctggtatcccctatcacactgctgcccgaagcagaaatccttttcgaagatattccaaaggagaagaggtttccaaagtttaagcgccatgacgtgaacagtaccagacgggcccaggaggaggtgaagatccccctggttaacatttccctcttaccaaaagacgctcaactctccctcaacaccctggatttacagttggagcacggcgacatcactctgaagggatataacctgtcaaaatcggccctgctgcgctccttcctcatgaatagtcagcacgcgaagattaagaatcaggctattattacagacgagacaaatgacagtctggtcgcacctcaggaaaagcaggtccacaagtctattcttccaaacagcctgggagtctcagaacggctgcagagactcacctttcccgctgtgtcggttaaggttaacggacacgaccagggccagaatcctcctctggacctcgagactaccgcgcgctttcgcgttgagacgcacacacagaagactatcggaggaaatgtaaccaaagagaagcccccctccttgatcgtcccactagaatctcagatgacgaaagagaagaagataaccgggaaggaaaaagagaactctcgtatggaggagaacgccgagaatcatattggagtcacggaagttctgctgggaagaaagctacagcactacactgacagctacttgggattcctaccctgggagaagaaaaaatactttcaagacctgctggatgaagaggagtcattgaaaacacagctcgcttacttcaccgatagtaaaaataccggacggcagctaaaggacacattcgccgacagtcttagatacgtgaataaaattctcaattctaagtttgggttcacatcccggaaggttcccgctcacatgcctcacatgatcgatcgaatcgttatgcaggagctccaggatatgttccccgaggagtttgacaaaacatccttccacaaggtgcggcactcagaggacatgcagtttgcattttcttatttttactatctcatgtccgccgtgcagcctctcaatatctcacaggtcttcgacgaggtggacaccgaccagtctggtgtgttgtctgaccgtgagattaggactctcgccaccagaatacatgagcttcctttaagcctgcaggacctgaccggattggaacacatgctgattaactgcagcaaaatgctccctgcagatattactcagctcaataacatccccccaacgcaggagtcctactatgaccctaatctcccgccagttactaaatcacttgtgacgaattgcaaaccagttacggacaaaatccataaggcctataaggataagaacaaatacaggtttgaaattatgggcgaggaggagatcgcctttaaaatgatcaggactaatgtgtcacacgtagttggacagttggatgatattcgcaagaaccctcgcaagttcgtctgcttgaatgacaatattgaccataaccataaggacgcccagacagtgaaagctgtcctgagagacttttacgagtctatgttcccaattccaagtcaatttgaattaccgcgggagtatagaaaccggtttctgcatatgcacgaactacaggagtggagggcctaccgggacaagttaaagttttggacacattgtgttctggccacccttattatgttcacaatattttcttttttcgccgagcagctgatagcattgaagcgcaagatttttcctcgcagacgcatccataaggaagcatcccccaatcggatacgagtg

SEQ ID NO: 215017 - DNA, 3768 bp, Artificial Sequence
  derived and/or modified sequence
atgctatttaaactcttgcagcggcaaacatatacatgcttgtctcaccgctatgggctctatgtttgtttcctgggagtagtcgtgactatagtcagtgctttccaatttggggaagtggtgctcgaatggtcccgcgatcagtaccatgtgctctttgattcttatcgggataacatagcaggaaaatcctttcagaaccgactctgcctacctatgcccatcgatgtggtgtatacatgggttaatgggacagatctcgaactgttaaaagagctacagcaggtccgcgaacagatggaagaagaacagaaagcaatgagggaaatcctaggaaaaaacactacagaacctacaaagaaatcagaaaaacagctggagtgcctattgacacactgtattaaagtacccatgctcgtgctagatccagccctgccagctaacatcacattaaaagatctcccctccctatatccatccttccattcggcctcggatatctttaacgtggctaaacctaagaacccctcaactaacgtttctgtggtggtgttcgattcaactaaggatgttgaagatgcccattctggattactaaaagggaattctcgacagacagtatggcgaggatatctcactacggataaggaggtaccaggactagtgctgatgcaggatctcgcctttctctccgggtttccacctacattcaaagaaactaaccagcttaagactaaactgccagaaaacctttcaagtaaagtgaaactgttacagctttactccgaggcctctgttgcccttttgaagctaaacaacccaaaggattttcaggaactcaacaaacagacgaagaagaatatgacaatcgatgggaaggaattgactatctcccccgcctatctcctttgggatctctccgccatatctcagtctaaacaggatgaagacatatccgcatctaggttcgaggataacgaagagttgaggtactctctcagatcgatcgaaaggcatgccccttgggtgcggaacatcttcatagtgacaaatgggcagattccaagttggctcaacctggataatcctcgggtcactatcgtgactcaccaggatgtattccggaacctctcccaccttcctacattctcttctccggccatagaaagtcacatccacagaatagaggggctctctcagaaattcatatatctgaacgatgatgtgatgttcggaaaagatgtgtggccagatgatttctacagtcattccaaagggcaaaaggtgtatttgacatggcctgtgcccaactgtgccgagggatgtcccggatcttggatcaaagatggatattgcgataaagcgtgcaacaacagtgcttgcgattgggatgggggagactgttcagggaactctggagggagtaggtacatcgccgggggaggaggaacagggtctatcggggtagggcagccctggcagttcgggggagggataaattctgtctcatattgcaaccaggggtgtgcaaactcatggctggccgataagttctgcgatcaggcatgtaacgtcttaagttgtgggtttgatgcaggagattgtgggcaggatcatttccacgagctgtataaggtgatccttctcccaaatcagactcactatataatacccaaaggggaatgtcttccatatttttccttcgcagaagttgccaagcggggagtcgagggagcatattctgataatcctataatcaggcatgcctctatagctaataaatggaagactatacatcttatcatgcactccggaatgaacgcaactacaatccacttcaatttgacatttcagaatacaaatgatgaagagttcaaaatgcagatcacagtagaagtagatacaagagaagggccaaaacttaatagtactgcccagaaagggtatgaaaacctcgtatcccctataacgctacttccagaggccgagatcctatttgaagatatacctaaggaaaagaggtttccaaaatttaaaaggcatgatgttaattcaactcggagggcccaggaagaagtaaaaataccgctcgtgaatatctctttgctccccaaagatgcacagctgtccctgaatacactagacttacagcttgaacatggagatatcacattgaaagggtacaacctttcaaaatctgctttgctcagatcatttcttatgaactcacagcacgctaagatcaaaaaccaggccataatcacagatgaaacaaacgactcactggtggctccccaggagaaacaggtgcataaatccatcctacctaactctctcggagtgtctgaaaggctacagaggctcacatttcctgctgtgtctgtgaaagtaaacgggcacgaccaggggcagaatcctcccctcgacttggaaacaactgctcgcttccgggtagaaactcatactcagaagacaattggggggaatgtgactaaagaaaaacccccatcactcatagtcccccttgagagtcagatgactaaagaaaaaaaaatcacaggaaaagaaaaagaaaacagtcggatggaagaaaacgctgaaaatcacatcggagttacggaagtcttactcggaaggaagctgcaacattatacagatagttacctgggatttcttccctgggaaaaaaaaaaatattttcaggacctacttgatgaagaggaatcccttaagactcagctggcttacttcacagatagtaaaaatacaggacggcagcttaaagatactttcgctgacagtctaaggtatgtcaataagatactcaactccaagttcggatttactagtaggaaggtgcctgctcatatgcctcacatgatcgataggatcgtgatgcaagaactccaggatatgtttccagaagaattcgataaaacatccttccacaaggtgcgacattctgaggatatgcagtttgctttctcctatttttattacctcatgtctgccgtccagccccttaatataagtcaggtatttgatgaagtcgatactgatcagagtggggtactaagtgaccgcgaaatcagaacactggcaacacggatccatgaactccccttatcattgcaggatctcacaggactggaacacatgctcattaattgttcaaagatgctaccagctgatataacacagttaaacaatatcccacctacacaggaaagttactatgatcccaacctgccccccgtgactaaatccctggtgacgaattgcaaacctgtgacagataaaatacacaaagcatataaggacaaaaacaaatatcggtttgaaataatgggggaagaagaaatagcctttaaaatgattaggactaacgtatctcacgtcgtggggcagcttgacgatatcaggaaaaatccaagaaagttcgtctgcttgaacgataatatagaccacaaccataaagatgcgcagactgtaaaagccgttctccgcgacttctatgaatcgatgtttcccatcccttcacaatttgaacttcctcgcgaatatcggaataggtttctccacatgcatgaacttcaggaatggcgagcatatcgcgataaattaaaattctggacacattgtgtgctggccactctgatcatgttcactatattctcctttttcgccgagcagcttattgcattgaaaaggaaaatattccctagacggcgaatacacaaagaagccagtccgaacaggatcagagtg

SEQ ID NO: 215018 - DNA, 3768 bp, Artificial Sequence
  derived and/or modified sequence
atgctcttcaagttgctccagagacaaacctacacgtgcctctctcacagatacggactgtacgtctgctttctgggagtcgtcgtcactatcgtgtcagcgtttcagttcggggaggtggtcctggaatggagccgcgaccagtaccatgtcctcttcgattcctaccgcgataacatcgctggaaagtcatttcaaaaccggttgtgtctgccaatgccgattgacgtcgtgtacacttgggtgaatggtaccgacctcgaattgctgaaagaactgcagcaagtccgggagcagatggaagaggagcaaaaggccatgcgcgaaatcctcgggaagaatactactgaaccgaccaagaagagcgagaagcagttggaatgcttgctgacccattgcatcaaagtgccgatgctggtgctcgatcctgcgctgcctgctaatatcacgctgaaagacttgccaagcctttatccgagtttccatagcgcatccgacatcttcaacgtggcaaagcccaagaatccgagcaccaacgtgtcggtcgtcgttttcgactctacgaaggatgtggaggacgcccattccggactgctgaagggaaattcacgccagactgtgtggagaggttaccttaccactgacaaagaagtgccgggccttgtcctgatgcaggacttggcgttcctgtccggcttccctccgacctttaaggagactaatcagcttaagaccaaactgccggaaaacctgtcgtcgaaggtgaaactcctgcagctgtattcagaggcttcggtggccctgctgaaactgaataaccccaaggacttccaggaactcaataagcaaaccaagaaaaacatgactatcgacggtaaggagctgaccatctccccggcctacctgttgtgggacctttccgcaatctcacagtcgaaacaggacgaggacatcagcgctagccgtttcgaagataacgaagagctgcggtactcgctgcgcagcatcgagcgccatgccccatgggtgcgcaacatcttcatcgtgaccaatggccaaattccctcatggctgaatctcgacaacccgcgggtgactattgtgactcatcaagacgtgtttagaaacctctcacatctgccaacgttttcttcaccggctatcgagtcacacatccaccgcatcgaaggattgtcacagaaattcatctacctgaacgatgatgtgatgttcggcaaggacgtgtggccggatgacttctactcccatagcaaaggacaaaaggtgtaccttacctggccggtgccaaattgtgccgagggatgcccggggtcctggatcaaagacggctactgcgacaaggcgtgcaacaactcagcttgtgattgggacggcggagattgctccggtaactcaggaggatcgcgctatatcgccggtggaggcgggactggatccatcggtgtggggcagccgtggcagtttggcggtggcatcaattccgtctcctactgcaatcagggctgtgcgaattcctggctcgctgacaagttttgcgaccaggcctgcaacgtgctgtcttgcggattcgacgccggagactgcggacaggatcactttcacgaactctacaaggtcatcctgctgcctaatcaaacccattacattattcccaagggagagtgtctcccttacttctcgttcgcagaagtggcaaagaggggcgtggagggcgcatatagcgataacccgatcataaggcatgcctcaatcgccaacaagtggaaaactattcatctgattatgcactccggaatgaacgccaccactatccacttcaatctcactttccaaaatactaacgatgaagagttcaagatgcaaatcactgtggaggtcgatactcgcgaggggccaaaacttaattccacggctcagaagggatacgaaaacctcgtcagccctatcacgcttctgcctgaagccgaaatcttgttcgaggatataccaaaggagaaacggttcccaaagttcaaaagacacgacgtgaactcgactcggcgggcccaagaagaagtgaagatcccgctggtcaacatatcgctgctcccgaaggatgcgcaactttctctgaacaccctggatttgcaactggaacatggagatattacgctcaagggctataacctgagcaagagcgcgcttctgcgctcgttcctgatgaattcgcaacacgcaaagatcaagaatcaagccatcatcactgacgaaactaacgactcgctggtcgcaccgcaggaaaagcaggtccacaagtcaatcttgccaaattcgttgggcgtgtcggagcgcctgcaacggctgaccttcccggccgtgtcggtgaaagtgaatggacatgaccagggacaaaaccccccgctggatctggagactactgctcgtttcagggtggagacgcacacccagaaaacgatcgggggcaacgtcacgaaggaaaagccgccgtccctcatcgtgcctctcgaatcacagatgaccaaagagaagaaaatcaccggtaaggaaaaagaaaactcgcggatggaagagaacgctgaaaatcatatcggcgtgaccgaggtgctcctgggccggaagctgcagcactacactgattcctacctcggtttcctgccgtgggagaaaaagaaatacttccaggatcttttggacgaagaagaatcgttgaaaacccagctggcctactttaccgactctaaaaacacgggccggcagctcaaagacactttcgctgattccctccggtacgtcaacaagatcctgaattccaagttcgggtttacgtccagaaaggtgccggcccacatgccgcacatgatcgaccggatcgtgatgcaggagctgcaggacatgttccccgaggagttcgacaagacctccttccacaaggtccggcactcggaagatatgcagtttgcgttctcatacttctactacctgatgtcagcggtgcagcctctcaacattagccaggtctttgatgaggtggacaccgaccaatctggcgtgctgtcagatagagagatccggaccctggccactagaatccatgaactgccgctgtcgctccaggacctgaccggactcgagcatatgctgatcaattgttccaaaatgcttcccgcagacatcacccagctgaacaacattcctccgacccaagagagctactacgatcctaaccttccgcccgtgacgaaatccttggtcaccaactgcaaaccagtcactgataagatccataaggcctacaaagacaaaaacaagtaccgcttcgagatcatgggagaagaagaaatcgccttcaagatgatcagaactaacgtttcccacgttgttggacagttggatgatatcagaaaaaacccgcggaagtttgtctgcctgaacgacaatatagaccacaaccataaggacgcacagacggtgaaggctgtcttgcgcgatttctacgaaagcatgttcccaatcccgtcgcagttcgagttgccccgggaataccgcaaccgcttccttcacatgcacgaactgcaagagtggcgggcatacagagacaagctgaaattctggacccattgtgtcctggctaccctgatcatgttcactattttcagcttctttgcagagcagcttatcgccctcaagagaaagatcttcccacgccgccgcatccacaaagaggctagcccaaaccgcatccgcgtc

SEQ ID NO: 215019 - DNA, 3768 bp, Artificial Sequence
  derived and/or modified sequence
atgctgtttaagttgcttcaacggcaaacctacacttgcctttcgcatagatacggactgtacgtgtgctttctgggggtggtcgtcactatagtttcagcatttcaattcggcgaagtggtgctcgagtggtcgagagatcagtaccacgtcctttttgattcgtacagagacaacattgccggaaagagctttcagaatcggttgtgcctgcctatgccaattgatgttgtgtacacctgggtgaatggaaccgacctggaactgctcaaagagctgcaacaagtgagagaacaaatggaagaagaacaaaaagccatgagagagatactgggcaagaacaccacggagccgacgaagaaaagcgaaaagcaacttgaatgtctgcttactcattgcatcaaggtgcccatgttggtccttgatcccgccttgccagcgaatatcacgttgaaggatctgccttcactttacccttcgttccattcagcatctgacattttcaacgtggcaaagccaaagaatccttctaccaatgtgagcgtggtggtgtttgactccactaaggatgtggaagatgcacactcaggactgctgaagggtaattcgcgacagaccgtgtggcgaggatacctgaccactgataaagaggtgccgggacttgtgctgatgcaggacctcgcgttcctgtcagggtttcctcctaccttcaaagaaaccaatcaactgaaaaccaagctcccggagaacctgagcagcaaggtgaaactcttgcaactgtatagcgaagcatcagtggctttgttgaagctgaacaacccaaaggattttcaagagctgaacaagcaaactaaaaagaacatgaccatcgacggaaaggagttgactattagcccagcatacttgctctgggatctcagcgccatctcgcaatctaagcaagacgaggacatatcagctagccggtttgaagataatgaggaactccgttacagccttcgatcaatcgagcgccatgccccgtgggtgcggaatatctttatagtcactaacggtcaaattccctcgtggcttaatcttgacaacccaagagtgacgatcgtgacccatcaggatgtgtttcgtaacctttcacatctgcctaccttcagctcgcctgccatcgagtcccacatccaccgtattgaaggactgagccagaagttcatctacctgaatgacgacgtgatgtttggtaaggatgtgtggcctgatgacttctactcccattcaaagggtcaaaaggtgtacctgacttggccagtgcccaattgtgcggaaggttgtcctggatcatggatcaaggacggttactgtgataaggcctgcaacaactcggcttgcgattgggatggtggcgattgtagcggcaattcaggtgggagccgctacatcgcgggtggaggtggaactggctcgattggggtcggacagccttggcaattcggcggtggtattaactcggtgtcttactgcaatcaaggctgtgcaaattcatggctggccgataagttctgcgaccaggcctgtaacgtgctttcatgtggatttgatgccggagattgcggtcaggatcacttccacgagctttacaaagtcatccttttgcctaaccagactcattacattatacccaagggagaatgtctgccctatttctcctttgcagaagtcgcaaagcgaggtgtggaaggtgcatactcggataaccccataatacgacatgcatccatcgcaaacaagtggaaaacgatccacctgatcatgcatagcggtatgaatgcaactaccattcacttcaacctgacttttcagaatactaacgacgaagagtttaagatgcagataaccgtggaagtcgatactcgcgaaggaccaaagctgaattcaactgcgcaaaagggatacgaaaatcttgtgtccccaattactctccttcctgaagcagagatccttttcgaggatattccgaaagaaaagagatttcctaaattcaagagacatgacgtcaactctactcggagagctcaggaagaggtgaaaattccgcttgttaacattagcttgctgccaaaagacgcacaattgtctttgaacactctggatctccagttggaacacggagatattactctgaaaggatacaacctctcgaaaagcgcactcctccgctcgtttcttatgaatagccaacatgccaagattaagaatcaggcaatcatcaccgacgaaaccaacgattctctggtcgcaccccaagagaaacaagtgcacaagagcattctgcctaactcccttggtgtctccgaaaggctgcaacggctgacgtttccggcagtgtccgtcaaagtgaatggtcatgatcagggacagaacccaccactggacctcgaaaccaccgcacgctttagggtggaaactcacactcaaaagactattggaggaaacgttaccaaggaaaaaccccccagccttatcgtgcctcttgagtcacagatgaccaaggagaaaaagatcactggaaaagaaaaggaaaactccaggatggaagagaatgcggagaaccatattggcgtcactgaagtgctgcttggaagaaaattgcagcattacaccgactcgtacctggggtttctgccgtgggaaaagaagaagtacttccaagatctgctcgatgaggaagaatcccttaaaactcagcttgcgtatttcaccgatagcaagaacacggggaggcaacttaaggataccttcgccgactcgttgaggtatgtcaataagatcctcaattcgaagtttgggtttacctcgcgcaaagtcccagcgcacatgccacacatgatagatcgcattgtcatgcaagagctccaggacatgtttccggaagaatttgataagacctcctttcataaagtccgccattccgaagatatgcaatttgcattcagctacttttactatctcatgtccgcagttcaacctcttaacatttcacaagtgtttgatgaagtggacaccgatcagtcgggcgtgctttccgatcgggagattagaacccttgcgacccgcatccacgagctgcccctctcccttcaagatcttactggactggaacatatgttgattaactgttccaagatgctgccagcagatattactcagctgaacaacattccaccaacccaggaaagctactatgacccaaatctgcctccagtgaccaagtcccttgttacgaactgtaaacccgtcaccgataagattcataaggcctacaaagacaagaacaagtacagatttgagatcatgggcgaagaagaaattgcattcaaaatgattcggacgaacgtcagccacgtcgtgggtcagcttgacgatattcggaagaatccaaggaagttcgtgtgtctgaatgataacatagaccataaccataaggatgcacagactgtcaaggccgtgctgagggacttttacgagtccatgtttcctattcccagccaatttgagcttcctagggagtatagaaatcgattcctccatatgcatgaactgcaagaatggcgtgcatacagggacaagctgaagttctggactcactgtgtgctggcaaccctcattatgttcaccattttctcatttttcgcggaacagctcatagccctgaagcggaagatttttcctaggcgtcggatccataaggaagcatccccgaacagaattagggtg

SEQ ID NO: 215020 - DNA, 3768 bp, Artificial Sequence
  derived and/or modified sequence
atgctcttcaaactgctgcagcggcagacctacacctgcctctcacaccggtatggtctttatgtgtgcttcctgggcgtggtggtgaccatcgtctccgctttccagttcggagaagtggtgctggaatggagccgcgatcagtaccatgtcctcttcgacagctaccgggacaacatcgcaggaaaatcctttcagaatcgactgtgtctgccgatgccaatcgatgtcgtgtacacgtgggtgaatggaactgatctggagctccttaaggaactgcagcaagtccgcgagcaaatggaggaggagcagaaggccatgcgcgaaatcctcggtaagaacactactgaacccacgaagaagtccgagaagcaactggagtgcctgctgacccactgcataaaagtgcccatgctggttctggacccggcgcttccagccaatatcactctgaaggacctgccatctctctaccctagctttcattccgcgtcagacatcttcaatgtcgcgaaacccaagaacccatcaactaacgtcagcgtggtggtcttcgactccaccaaggacgtcgaagacgcccactccggactgctgaagggaaactcccgccagactgtgtggcgcggctacctcacgaccgataaggaggtgcctggactggttctgatgcaagatctggcgttcctgtcaggatttccaccaacctttaaggaaaccaaccagctcaagaccaagctgccggagaacctcagctcaaaagtcaagttgttgcagctctactcggaggcatcggtcgcgcttctcaagctcaataaccccaaggattttcaggaactgaataaacagactaaaaagaacatgactatcgacggtaaagagctcactatttccccggcgtacctcctttgggatctgtccgccatctcgcaatccaagcaggatgaagacatcagcgcgtcgcgcttcgaagacaacgaggaactgagatacagcctgcgctctatcgagcggcatgcgccgtgggtgcgcaatatctttatcgtgaccaatggccagatcccctcatggcttaatctcgacaacccaagggtcactatcgtgacccaccaggacgtcttccggaacctgtcccacctgcctactttcagctctccggcaatcgaatcgcacattcaccgcatcgaaggcctgagccaaaagtttatctacctcaacgatgacgtgatgttcgggaaagatgtctggccggatgacttctacagccacagcaagggccagaaggtgtacctcacttggccggtgccaaactgcgcagagggatgtccaggcagttggatcaaggatggatactgcgataaagcctgcaacaacagcgcttgcgactgggatggtggcgattgctcgggaaatagcggtggatcgagatacatcgctggtggaggaggaaccggttctatcggggtgggacaaccgtggcagttcggagggggcatcaattcggtcagttactgcaaccaaggctgcgctaactcctggttggccgacaagttctgcgaccaggcgtgcaacgtgctgtcgtgtggcttcgacgcgggcgactgcggacaagaccacttccatgaactgtacaaagtaattttgttgcctaatcagactcactacatcatcccgaagggtgagtgtctcccgtacttctcgtttgcagaggtggcgaagagaggagtggagggcgcctactccgacaacccgatcatcaggcatgcatccatcgcgaacaaatggaaaaccattcacctgatcatgcattcgggaatgaacgccaccactatccacttcaatctgactttccagaacactaatgacgaggagttcaaaatgcagatcaccgtggaggtggacacccgggaaggcccaaaactcaactcaactgctcagaaggggtacgagaatctggtttcgccaatcactctgctgccggaagcggaaatcctgttcgaggacatcccgaaagaaaagcgtttcccgaaattcaagcgccacgacgtgaattcgacgaggcgcgcccaggaggaagtgaagatccctctggtcaacatctcccttctcccaaaggatgcgcagctctctctcaacacgcttgacctgcagcttgagcatggcgatattactctgaagggatacaacctctcgaagtcagcccttctccggtcatttttgatgaattcacaacacgccaagatcaaaaaccaagccatcatcactgacgaaactaatgactcactggtagccccgcaggagaagcaagtgcacaaaagcattttgccgaacagccttggtgtgtccgaacggctccaacgcctcacgttccccgccgtgtcagtcaaggtcaacggacacgaccaggggcagaacccacctctggacctggaaacgaccgcacggttccgggttgaaacccatactcaaaagactattggaggcaacgtgactaaggaaaagccaccatcactcatcgtgccgcttgaatcgcaaatgaccaaggagaagaagatcaccggcaaggaaaaagagaactcacgcatggaagagaacgccgaaaaccacatcggggtgacggaggtgctgctgggaagaaaactgcagcactacactgattcttatctcggattcctgccgtgggagaagaagaagtacttccaagatctgcttgatgaggaagagtccctgaagacccagctggcgtacttcaccgactcgaaaaacaccggcaggcaactgaaggatacttttgcagatagcctgcgctacgtgaataagatcctgaacagcaaatttggctttacctcacgaaaggtgcctgcccatatgcctcacatgatcgaccgcatcgtgatgcaagaactgcaggacatgttcccggaggaattcgacaagactagcttccataaggtgcggcattctgaagacatgcaattcgccttttcctacttctactatctcatgtccgcggtgcaaccgctgaacatcagccaggtcttcgacgaagtggataccgaccagtcaggtgtcctctcagacagggagatccgaaccctggccacccggattcacgaactgccactctcactgcaagacctgaccggactcgaacacatgctcataaattgctcaaaaatgctcccagcggacatcactcagctcaacaatatccctccgacccaggagtcatactacgaccctaacctcccaccggtcaccaagtcgctggtgactaactgcaagccagtgacggataagatccacaaggcgtacaaagacaaaaacaagtaccggttcgaaatcatgggagaagaggaaatcgcattcaaaatgataaggaccaatgtgtcccatgtcgtgggacagctggacgatatcagaaaaaatccacggaagttcgtctgcctcaatgacaatatcgaccacaatcacaaggacgcccagaccgtcaaggcggtcctccgcgatttctacgagtcgatgtttccaatcccctctcaattcgagctgccgcgcgaataccgcaacagattccttcacatgcatgagctgcaggaatggagggcctatcgcgataagctgaagttctggacccactgcgtcctggccactctgattatgttcaccatattcagcttcttcgcggaacagctcattgcactgaagagaaagatcttcccgcggcgcagaatccacaaggaagcctcgcctaaccgcatccgcgtg

SEQ ID NO: 215021 - DNA, 3768 bp, Artificial Sequence
  derived and/or modified sequence
atgctcttcaaactgcttcagagacagacatacacctgcctgagccataggtacggactgtacgtatgctttctcggagtggttgtcaccattgtgtcagcattccagtttggagaagtggttctggaatggagccgcgaccagtaccacgtcctgtttgactcttacagggataacatcgccggaaagtccttccagaacaggctttgcttgcctatgccaatcgacgttgtgtacacctgggtcaatggaaccgacttagaattgctgaaggaattacagcaggtgcgcgaacaaatggaagaagaacagaaagctatgcgcgagatcctgggcaaaaatacaacagagccgaccaagaagtcagaaaagcagctggaatgcctacttacccactgtattaaagtacctatgcttgttctcgatcctgcactgcccgccaatataactttaaaggatctaccgtctctttaccccagttttcatagcgcatcagatatcttcaatgttgctaagcccaagaatccttccactaacgtaagcgtagtggtattcgacagcactaaagatgtagaagacgcccacagcggactgcttaaaggaaattcgcgtcagacagtctggaggggctacctgaccaccgataaagaagtccccggcctcgtgctgatgcaggatttggcattcttgagcggatttccaccaaccttcaaggaaacaaaccaacttaagactaagctgccagagaatctttcaagcaaagttaaattgcttcagctctatagcgaagccagcgtcgccctgctgaagctgaacaatcctaaagactttcaagagttgaacaaacaaaccaaaaagaacatgaccatcgacggcaaggaactaactatcagccccgcttatcttttgtgggatttgtctgctataagccagagtaaacaagatgaggatattagcgccagccgattcgaagacaatgaagaacttaggtatagtttacgttctattgaacggcacgcaccctgggtgaggaacatatttatagtcaccaacggccaaatcccctcatggctcaacctggataaccctagggttacgatcgtcacacatcaggatgtatttcgcaatctgagccatctgcctactttctcatcaccggcgatagaatctcacatccatagaatcgagggcctctcccagaaattcatctatttgaacgatgatgtcatgttcggcaaagacgtttggccagatgacttttatagccactctaagggacagaaagtctatctgacatggcccgtccctaattgtgcagagggatgtcccggatcttggatcaaggacggttactgcgacaaggcctgcaacaacagtgcctgcgactgggacggcggagattgctctggaaattcaggcggatcaagatacattgctggcgggggcggtacaggatcaattggagtggggcagccttggcagtttggggggggaatcaactccgtgagttactgtaaccaagggtgtgcaaactcctggctggctgataagttttgcgatcaagcatgtaacgtcctgtcatgcggctttgatgccggcgattgtggacaagatcattttcacgagttgtacaaggtcatactgttgccaaatcaaacccactatattatcccaaagggtgagtgcctcccgtacttctcattcgccgaggttgcaaaaaggggagtcgaaggtgcctactcagacaacccaataatccgccacgctagcatcgcgaacaaatggaaaacaattcacctgattatgcactcgggaatgaacgcaactaccattcactttaacctgacatttcaaaacaccaacgacgaagaatttaaaatgcagataaccgtggaagtggatactcgagaaggtcctaaactgaattcaaccgctcaaaagggctacgaaaatctggtgtcacctatcaccctccttcctgaagctgagatcttgttcgaggacatcccaaaggagaaaagatttccaaagtttaaaagacacgacgttaatagcacccgtcgtgctcaggaggaagtgaagattccactggtcaatatcagtttgctgccgaaggatgcgcagctgtccctgaataccctcgaccttcaactcgaacatggcgatattaccctcaaaggctataacctttcgaagagtgccctcctgcggagcttcttgatgaacagccagcatgctaaaatcaagaaccaagccattatcacagatgagacaaacgatagcctggtggctcctcaagagaagcaggtacacaaaagcattctgcctaacagcctaggggtgtctgaacggctgcagaggctcacatttcccgctgtgagtgtaaaggtgaatggccacgatcagggtcagaaccctccactggacctcgaaacaaccgctagattccgggtcgagactcatacccagaagacaatcggtggcaacgttactaaggaaaaacctccttccctgattgtccccttggagtcacaaatgaccaaagagaagaaaataaccggcaaggagaaagaaaacagccgtatggaagagaatgctgaaaaccacatcggcgtcacagaggttttgctgggccggaagctgcaacattataccgatagctacttaggctttctgccttgggagaaaaagaagtactttcaggacctgctcgatgaagaagaatctctgaagacacaacttgcctacttcacagactctaaaaacacaggaaggcaattaaaggacacttttgccgacagcctgcgatatgtgaacaaaatcctcaactcaaaattcgggtttacttccaggaaggtgccagcccatatgccccacatgatcgatcgcatcgtgatgcaagaactccaagatatgtttcccgaggagtttgataaaacatcttttcataaggtaaggcatagcgaggacatgcaattcgctttttcctacttctattatctcatgagtgctgttcagccacttaatataagccaggtgttcgacgaggttgacaccgatcagagcggagtccttagcgaccgagaaatccgcacccttgctaccagaatacacgaactccccctcagtctgcaggacctgaccggtctggagcatatgctgatcaactgctctaagatgctgccggccgacataacacagcttaataacatcccacccacacaggagagttactacgaccctaacctgccccccgtaacaaaaagtctggttactaattgcaaaccagtcactgacaaaattcacaaagcatacaaagacaaaaacaaatacaggtttgagattatgggagaggaggaaatcgctttcaaaatgataagaaccaacgtaagccacgtggttggccagctggatgatatacggaagaaccctagaaaatttgtatgccttaatgataatattgatcacaaccataaggatgcccaaactgttaaggctgtgttgcgggacttctatgaatcaatgtttcctatcccaagccaattcgagcttcctcgcgagtatagaaacagattcctacatatgcatgagctccaggaatggcgagcgtatcgcgacaagctaaagttctggactcactgtgtgctggctacactgatcatgtttactatcttcagctttttcgccgaacagctgatagcacttaagcggaaaattttcccaaggcgtaggatccacaaagaggcaagtcctaacaggatccgggtt

SEQ ID NO: 215022 - DNA, 3768 bp, Artificial Sequence
  derived and/or modified sequence
atgttgttcaagctgcttcaaagacagacctatacctgcctttcgcaccggtacgggctgtacgtctgttttctgggagtcgtggtgaccatcgttagcgcgtttcagtttggagaggtcgtgctggagtggtcacgcgatcagtaccatgtgcttttcgattcataccgcgataacattgcaggcaagagctttcaaaacagattgtgtctgccgatgcccatcgacgtcgtctatacctgggtgaacggaaccgatcttgaactgctcaaggaacttcagcaagtgagagagcagatggaagaggaacaaaaagccatgcgagagattttgggtaagaacactactgaacctaccaagaagtcggaaaaacaactggaatgtctgctcacccattgcatcaaagtccctatgctcgtccttgacccagcacttcccgcaaacattacccttaaagatctcccctccctttacccgtcatttcactccgcctcagacatctttaacgtggctaaaccaaagaatccatccactaacgtctcggtcgtcgtattcgatagcactaaggatgtggaggacgcacattcaggactccttaaaggaaactctcgtcaaactgtgtggcgcggatacctcactacggacaaggaggtgcctgggctggtgttgatgcaggacctggcatttctctccgggtttcctcctactttcaaggaaacgaaccaacttaagaccaaactccccgaaaacctcagctccaaggtgaagctcctgcaactgtactccgaggctagcgtggccctgcttaaacttaacaaccccaaggattttcaagagctcaacaagcaaaccaagaagaacatgactattgacggaaaggaacttactatcagcccagcatacctcctctgggacctgtccgcaatttcgcaatcaaagcaagatgaagatattagcgcatccagattcgaggataacgaggagctgcgttattcccttagatccattgagcggcatgcgccgtgggtccggaacattttcattgtcaccaatggccaaataccgtcgtggctcaatctggataaccctcgggtgaccattgtgactcaccaggacgtctttaggaacctctcccatctgccgacgttttcctctccagcaattgaatcacatatccacaggatagaaggtctttcgcaaaagttcatctatctcaatgatgatgtgatgtttggaaaggatgtctggccagatgatttctacagccatagcaagggacagaaagtatacctgacttggcctgtgcccaactgtgcggaaggctgtccaggttcatggattaaggatggatactgtgacaaggcatgcaacaactctgcatgtgattgggatggtggtgattgttccggcaatagcggaggttccaggtatatagctggaggcggtggaaccggttcgatcggcgtggggcagccttggcagttcggcgggggaataaactccgtgtcctactgtaaccaaggatgtgcgaactcgtggttggccgacaagttttgcgatcaggcatgcaacgtgctgtcatgtgggtttgatgctggcgactgcggtcaggatcactttcacgagctctacaaggttattctgcttccgaaccagactcactacattattcccaaaggagagtgtttgccttactttagcttcgcagaggtggcaaagaggggcgtggagggtgcatactctgataaccctatcattagacatgcatccatcgccaacaaatggaaaactatacaccttatcatgcatagcggtatgaacgccaccactatacatttcaatcttacctttcaaaatactaatgacgaggaattcaagatgcaaatcactgtggaagtggatacccgggaaggaccaaaacttaactcgactgcgcagaaaggatacgagaatctggtgtcccctatcactttgctgcctgaagcagaaattctttttgaagatattcccaaagaaaagcgattccctaagttcaagcgccatgatgtgaactcgacccgaagagcacaagaagaagtgaagatacccttggtcaacatttcgcttctgcctaaggatgcccagctgtccttgaacaccctggatttgcagcttgagcatggtgatataactcttaaggggtacaacctgtcaaagtctgcactccttaggagctttctcatgaactcacaacacgcaaagatcaaaaatcaagccataatcaccgatgaaaccaatgattcccttgtggctccccaagaaaagcaagtgcataagtcgatcctcccaaactcacttggggtcagtgaacggctgcaaagactcacttttcctgcagtgtcagtgaaggtgaacggacacgaccagggacagaatcctcctctcgatcttgagacgaccgcaagatttagagtcgagactcatacgcaaaagacgattggaggtaatgtgaccaaggagaaacccccttccctgatcgtgcctctggagtcccaaatgacgaaagaaaagaagataactggaaaagaaaaggaaaattccagaatggaggaaaacgccgaaaatcatattggagtcaccgaggtgctccttgggcgcaaacttcagcattacacggactcatacctggggtttctgccttgggaaaagaagaaatacttccaggatcttttggacgaagaagagtcactcaaaactcagttggcatacttcaccgacagcaagaacactggacgtcagctgaaggataccttcgcggactcacttcgctacgtgaacaaaatacttaattccaaattcggattcacctcacgcaaggtcccagcgcacatgccacacatgatcgaccggattgtcatgcaggaacttcaggatatgttccccgaggagtttgataaaacttcatttcacaaggtcagacattccgaggatatgcaattcgcgttctcatatttctactaccttatgtcggccgtgcagcctcttaacatttcccaagtgtttgatgaggtggatactgatcagtcgggtgtgctctccgacagagaaattcgcacgttggcaactagaatacatgaactgccgctgtcactgcaagatctgaccggcttggaacatatgctcattaactgcagcaagatgcttcctgcagatatcacccagctcaacaatattccacctactcaggaatcatactacgatccaaatcttccgccagtgacgaagtcgctggtgaccaactgtaaacctgtgacggacaagatccataaggcctataaggacaagaataagtaccgtttcgagataatgggtgaagaagaaattgcattcaaaatgattagaaccaacgtctcgcacgtggtgggacaacttgacgatataagaaaaaacccaagaaagtttgtgtgcctgaatgataacatagatcacaaccacaaggatgcacagaccgtcaaagcagtcctccgcgacttctacgaatccatgtttccaatcccctcgcaattcgaactgccacgagaatacagaaatagatttttgcatatgcatgaactgcaggaatggcgcgcatacagggacaaattgaagttttggactcactgcgtgcttgccaccctcattatgtttaccatcttttccttttttgcagagcaacttatcgccctgaagcgcaagatttttccgcggcggcgcattcataaggaggcatccccgaaccgcatcagggtg

SEQ ID NO: 215023 - DNA, 3768 bp, Artificial Sequence
  derived and/or modified sequence
atgctgttcaagttgctccagagacaaacctacacttgtctgtcgcaccggtacgggctgtacgtttgctttctcggagtggtggtcactatcgtgagcgccttccagtttggcgaggtcgtgttggagtggtcaagggaccagtaccacgtgttgttcgactcttaccgcgacaatatcgcggggaagtcctttcagaatcggctgtgcttgccaatgccgatcgatgtggtgtacacctgggtgaacgggactgaccttgagctgcttaaagagctgcagcaagtccgtgaacaaatggaagaagaacagaaggccatgcgggaaatcttgggaaagaacaccactgagccgaccaagaaaagtgaaaaacagttggaatgcttgctgacgcactgcatcaaagtgcctatgctggtgcttgacccggctcttccggcgaatatcactctcaaagaccttccatcgctctacccctcattccacagcgcctcggacattttcaacgtggccaagccgaagaacccctccaccaacgtctccgtggtcgtgtttgactcaacgaaggacgtcgaagatgcccacagcggcctgctgaagggtaattcgcggcaaacggtgtggcgaggttacctgaccaccgacaaggaggtgccggggctcgtgttgatgcaggatctggcattcctcagcgggtttcctccgaccttcaaagaaaccaaccaattgaaaaccaagctccctgagaacctgtcctcaaaggtgaagctgctgcagctgtactccgaagcaagtgtggctctgctgaagctcaacaacccgaaagatttccaggaactcaataagcagaccaagaagaatatgactatcgatggtaaagagctcacgatcagcccagcgtacctcctgtgggatctgtcggctatatcgcagtctaagcaggatgaggacatctcagcatctcggttcgaagataacgaagaactccgctactccctgcggtccatcgaacggcatgctccgtgggtccgaaacattttcatagtgacgaatggccagatcccaagctggctgaacctggataaccctcgcgtgacgattgtgacccaccaggatgtgtttcgcaacctctcacatctgcccacgttctcgtcaccagcgatcgaatcccatatccaccgcatcgaaggactgtcacaaaagttcatctacttgaacgacgacgtgatgttcggcaaggacgtgtggccagatgacttttactcccactccaaagggcagaaggtttacctgacctggccggtccctaactgcgcggaaggatgtccgggctcatggatcaaggacggctattgtgataaggcctgcaacaattccgcgtgcgattgggacggaggcgactgctcaggaaattcgggaggatcccggtacattgctggcggaggcggcaccggatcgattggtgtgggacaaccgtggcaatttggaggtggaattaactcggtttcctactgcaatcagggatgcgcgaatagctggctggccgacaagttttgcgaccaagcctgtaacgtgctgtcctgcggattcgatgcaggagactgcggacaggaccatttccacgagttgtacaaggtgatcctgctcccgaaccaaactcattacattatcccgaagggagaatgccttccctacttctcgttcgccgaagtggccaaacggggagtcgagggagcatactccgacaaccccatcatcagacacgcgtcaatcgccaacaaatggaaaactattcacctcataatgcatagcggcatgaacgcgactaccatccatttcaacctgaccttccagaacactaacgacgaagaattcaagatgcaaattaccgttgaagtggatactcgcgaggggcctaagctgaattcgaccgcgcaaaaggggtatgagaacctcgtctcgcctattaccctgctcccggaagccgaaatactgttcgaagatatcccaaaagagaagagattcccgaagtttaagagacacgacgtgaactctaccaggcgggcccaggaagaggtgaagatccctctggtgaatatctccctgctccccaaggatgcccaactgtccctgaacactcttgacctccagctcgaacacggcgacatcaccctgaaaggatataacctgagcaagtcagcgctgttgcgctcgttcttgatgaattcccaacatgccaagatcaagaaccaagcaatcatcaccgacgaaactaacgactcgctggtcgcgccgcaggagaagcaggtgcacaaaagcattcttccaaattcgttgggcgtgtcggagcggctgcagcggcttactttcccggcagtgtccgtgaaagtgaacggtcacgaccaaggtcaaaacccgccactggacctcgagactaccgcccgcttccgcgtggagactcatactcaaaagacgattggagggaatgtgacgaaggagaagcctccgtcgctgattgtgccgctcgaatcacagatgactaaggaaaagaaaatcactggaaaggaaaaggaaaatagtagaatggaagaaaatgcggagaatcacatcggagtgacggaggtcctcctcgggagaaagctgcaacattacactgattcgtacctggggttcctcccgtgggagaaaaagaaatacttccaggaccttctcgacgaggaggaatctctcaagacgcagttggcatatttcaccgattcgaagaatacgggcagacagctgaaagataccttcgctgattcgctgagatacgtgaataagatcctgaactcaaaattcggatttacttcccgcaaggttccagcgcacatgccgcatatgatcgatcggatcgtgatgcaagaacttcaagatatgtttcctgaagaattcgacaaaacttccttccacaaggtgcggcacagcgaggatatgcagtttgccttctcctacttttactaccttatgtccgcggtgcaaccattgaatatctcacaagtgtttgacgaggtggacacggaccagtccggagtcctgtcggacagagagatccgtaccctcgccaccagaatccatgagctgccactctctttgcaagatctgaccggactggagcatatgctgatcaactgttccaagatgctgccagcggatatcacccagttgaataacatcccgccgactcaggagagctactacgaccctaacctgcctccagtgactaagtccctggtgactaactgcaaacctgtgaccgacaaaatccacaaggcgtacaaggacaagaacaaataccgcttcgagatcatgggagaagaggagatcgcgtttaagatgatcaggaccaatgtgtcacatgtggttggccagctcgatgacattagaaaaaacccacggaagtttgtgtgcctgaatgataacattgatcacaatcacaaggatgcacagaccgtaaaagccgttttgcgggacttctacgagtcgatgttcccaatcccgtcccagttcgagcttcctagagaatacaggaacagattcctccacatgcatgaattgcaggagtggcgagcctaccgcgacaaactcaagttctggacccactgcgtgctggccactttgatcatgtttaccattttcagctttttcgctgaacagctcatcgcgttgaagcgcaagatctttccgcgccgcagaatccataaggaagcctcgcctaaccgcatcagggtg

SEQ ID NO: 215024 - DNA, 3768 bp, Artificial Sequence
  derived and/or modified sequence
atgctgtttaagcttcttcaacggcagacttacacgtgcctaagccacagatacgggctctatgtgtgttttctgggagtggtagtgactatcgtgagcgctttccagtttggagaggtggtgctggagtggtccagggaccaatatcatgttttgttcgattcctaccgtgataatatagctggaaaaagctttcagaatcggctctgccttcccatgccaatagacgttgtgtatacatgggttaatggaacagatctggagcttctcaaagaactgcagcaggtgagggaacagatggaagaggaacagaaggctatgcgcgagatcctgggcaagaacacgactgagcctaccaagaagtccgaaaagcagctagagtgtctcctgactcattgtattaaggtcccgatgcttgtgctggatccggccttacctgctaacatcactctgaaagacctcccttcattgtacccatcttttcactccgctagcgatatctttaatgtcgccaaaccaaagaatccttctacaaacgtgtcagtcgtcgtcttcgactcaacgaaggatgtcgaggacgcccactcaggcctgttaaaagggaacagccgtcagacagtgtggcgaggatacttgactaccgacaaagaggtgcccgggcttgtcctaatgcaggacctcgcctttctgtcggggttccctccaacattcaaagagacaaaccagcttaaaaccaagctgcctgagaacctgtcatccaaggtaaagctgctccagttatacagcgaagcatctgtggctctgctcaagctgaacaatcctaaggattttcaagagctgaacaagcagaccaagaaaaacatgacaatcgacgggaaggaacttacaatcagtcccgcctacctcctgtgggatttgagtgcaatcagtcaaagcaagcaggatgaggacatctccgcttctagattcgaagataatgaggagttgagatactccctgagaagcatagaaaggcatgcaccttgggtgagaaatatcttcattgttaccaacggccagatcccctcatggctgaacttagacaacccccgagttactatcgtcacccaccaggacgtgtttcgtaacctgtcacaccttccaacattttccagccccgccattgaaagtcatattcaccgcattgaagggctgtcccaaaagttcatatatttgaacgatgatgtgatgtttgggaaagacgtttggccagacgatttttactcccactcaaaggggcagaaagtctacctgacgtggcccgtacccaactgcgcagagggttgccctggctcttggataaaggatggttactgcgataaggcctgtaacaatagcgcctgtgattgggacggcggcgattgctccggcaatagcggtggttccagatacatcgctggcgggggaggtactgggtcgataggggtcggtcagccttggcagtttggtggtgggatcaattctgtctcgtattgcaatcagggctgtgccaatagttggcttgcggataaattctgcgaccaggcatgtaatgtgctctcttgcggctttgacgcaggcgattgcggtcaggaccacttccatgagctctacaaagtgatactgctgccaaatcagacacattatataattccaaagggcgaatgtctaccctatttttctttcgccgaggtggccaaaagaggagtggaaggggcatactcagataacccaattatcaggcatgcctccatagctaataagtggaaaactatccacctcatcatgcatagtggcatgaatgcaaccaccatccacttcaatttaacgttccagaacacaaatgacgaagagttcaaaatgcagattacagtggaagtagacacgcgggagggtcctaaactaaattctacggctcagaagggatatgagaacctggtttctcccattacgttactgcctgaggccgagatcttattcgaagacatacctaaagaaaaacggttccctaagttcaagaggcatgatgtaaattcaaccaggcgggcacaggaagaggtgaagataccgctggttaacataagccttctacctaaagatgcacagttgtccttgaacaccctggacttgcagctggaacacggtgatattaccctcaagggttataacctgtctaaatccgccttattgaggagcttcctgatgaactcccagcatgctaagataaaaaatcaggccattatcacagacgagacaaacgactcattggtagctccccaggagaagcaggtgcacaagtcaatcttgcctaattcattgggagtctccgagaggctgcagcggctgacctttcccgctgtctcagtgaaagtgaatggacatgaccagggtcagaacccccctctcgacctagaaacaaccgcccgttttagagtggaaacacacacccaaaagactatcggaggaaatgtgaccaaggagaaaccccctagccttattgtgcccttagagagtcagatgaccaaggagaagaaaatcacaggcaaggaaaaagagaattcacgtatggaagagaatgctgagaatcatattggcgttaccgaggtgctgctcggtagaaaactccagcactacactgactcctacctggggttcctgccttgggagaagaaaaagtattttcaggatctcctagatgaggaggagtccttgaagacccagttggcctacttcaccgatagtaagaatacagggcggcagctgaaggacacgttcgctgactccctcagatacgttaacaagattctcaacagtaaatttggtttcacaagccggaaggtccccgctcacatgccgcacatgattgatcggatcgtaatgcaggagcttcaggatatgtttccagaggagtttgataagacatctttccataaagtcagacatagcgaggacatgcaattcgcttttagctatttctattatctgatgtctgcggttcagcctctcaatatctcacaagtgttcgatgaggtcgacaccgaccaatcgggcgttctgtcagatcgtgagatcaggaccctcgccactagaatacacgagctgcctctcagtctgcaagacctcactggcctcgagcatatgttaattaattgttctaaaatgttaccggccgatataacacagctgaacaacataccgccaacccaagagtcctactacgacccaaaccttccgcctgtgactaagagtctggttactaactgcaaaccagtaactgacaagatccataaagcgtacaaagataagaacaaatatcgtttcgagattatgggcgaagaagagattgcttttaagatgattagaacaaatgtgtctcatgtggtgggccagctcgacgacattaggaaaaacccccggaagttcgtttgccttaatgataacatcgaccacaatcacaaagacgcccagaccgtgaaagccgtcctgcgagacttctatgagtctatgttccctataccttcacagttcgagttgccacgcgaatatcggaaccgctttttgcatatgcacgaacttcaggagtggcgagcatatcgtgataagctaaagttctggactcattgcgtacttgcaacacttataatgttcacaattttttcctttttcgcagagcaactaatcgctttgaaaaggaaaattttcccacgaagacgcatccataaagaggcttctcctaatcggattagggtc

SEQ ID NO: 215025 - DNA, 3768 bp, Artificial Sequence
  derived and/or modified sequence
atgttgttcaaattgctgcaaaggcagacctacacatgtctttcgcacagatacggcctttacgtctgtttcttgggcgtggtggtaacgattgtttcggctttccaattcggtgaggtcgttctcgaatggtctcgggatcagtatcacgtcttgtttgacagctacagagataacatcgctggcaagtcgttccaaaaccggctgtgtcttcctatgccgattgatgtcgtgtacacctgggtcaatggtacggatctcgagctccttaaggagctgcaacaagtccgcgaacagatggaagaagaacagaaagcaatgcgtgagatactcggtaaaaataccacagaacctactaagaaatcggagaagcaacttgaatgcctgttgactcactgtattaaagtacctatgctcgttcttgaccccgctcttccagcgaacataacccttaaggatctgcctagtctctacccttcctttcattcagctagtgacatctttaacgtagcgaaacctaagaaccccagtacaaatgtttccgtcgtggtctttgactcaacaaaggatgttgaagacgctcattctggattgcttaaaggaaattccaggcagactgtctggcgaggttatcttacaaccgacaaagaagttcccgggttggtgctcatgcaggatctggccttcttgtctggtttcccacccaccttcaaggagacaaatcagctgaaaaccaagctcccagagaatttgagctctaaggttaagttgctacaactgtacagcgaggcgtcagtggcgttattgaaactcaacaaccctaaagacttccaagaactgaataagcaaactaagaagaacatgactatcgatggtaaggagctcacgatctcaccagcttacctgctatgggatctatcggcaatctctcagtccaagcaggacgaagatatctctgcctcccgattcgaggataatgaggagctcaggtattcactacgctcaattgagagacatgccccatgggtgcgcaatatattcattgtaaccaatggccaaattccttcctggttgaatctggacaatccccgcgttacgatcgtaacccatcaagacgtttttcgaaacctgtcccatctacccacattctctagcccggcgatagaatctcatattcatcgtattgagggattgtctcaaaagtttatatatttgaatgacgatgtaatgtttggaaaagatgtgtggcccgatgatttttacagccactctaagggtcagaaggtctacctgacatggcctgtaccaaattgtgccgaaggttgcccaggatcctggatcaaggacggctattgtgataaagcttgtaacaattcggcttgtgattgggatggaggtgattgctcaggaaactctggcgggtcgaggtacattgctgggggaggcggtacagggtcaataggcgtcggccaaccgtggcagtttgggggtggtatcaactctgtgagttactgcaaccaaggctgtgccaactcctggttggcggataagttctgtgaccaagcctgtaacgtgttgtcctgtggatttgacgccggcgattgcggtcaagatcacttccatgaactgtacaaggtcattcttttacccaaccaaacacactacatcattcccaagggtgaatgcttgccttacttctcgttcgctgaagtggctaaacgtggagtcgagggcgcatattctgacaacccgattatacggcacgccagcatagctaataagtggaagacgatccacctaatcatgcacagcggtatgaacgctaccacgattcactttaacctgacgtttcagaacaccaacgacgaagagttcaagatgcagatcaccgtcgaagtggacacgcgtgaagggcctaaactcaactctacggcccagaaaggttacgagaacctggtttctcccattaccctcctgccggaggccgagattctgtttgaggatattccaaaggagaaaagatttccaaagttcaaacggcatgacgtgaattctactcggcgcgctcaggaggaggtcaaaataccgctcgtcaacatctccctattgcccaaggatgcacagttgtctctgaataccctggacttacagctggaacatggcgacatcacccttaaaggatacaatctttctaagtcagctctcctccgctctttcctaatgaattctcagcatgccaagatcaaaaaccaagcgatcatcactgatgagactaatgactccctggtggcgccccaggaaaagcaggtgcacaagtcgattctgcctaatagcttgggcgtctctgagaggctgcagcgcctcacctttcctgcggtttcggtaaaagtaaatggtcatgatcaaggccagaaccctcctttagatttggagactaccgcacgtttccgtgtggaaacacacacgcagaaaactatagggggcaatgtgacaaaagagaagcccccttcccttattgtaccgcttgaaagtcagatgacgaaagaaaaaaagattacaggaaaagaaaaagagaactcccgaatggaagaaaatgccgaaaaccatattggagtgacagaggtcctgttgggccgcaagcttcagcactatacagatagctaccttggttttctaccttgggagaagaagaagtactttcaggatctacttgatgaagaagaatcactgaagacgcaattggcttatttcaccgacagtaagaatactggccgccagctcaaagatacattcgcggactcacttagatacgtgaataagatcctgaatagcaagtttggcttcacgtcccggaaagtacccgctcacatgccgcatatgatcgaccggattgtgatgcaggaactgcaggatatgttccctgaggagtttgataagaccagcttccataaagtgaggcactctgaggacatgcagtttgctttttcttatttctattatctcatgtccgctgtccagccgttgaacatcagccaggtcttcgatgaggtcgatactgaccagagtggagtgctctccgatcgcgaaattcggacgctcgctactagaattcacgaactgccactgtccctccaggacctaaccggactcgagcacatgttgataaactgttccaaaatgcttccggccgatataacccagctcaataacatcccaccaacccaggagtcgtactatgaccctaacttgccccctgtaacaaaatctttagttaccaattgtaagccggtgactgataaaatacataaagcctataaggacaagaacaagtacaggtttgagatcatgggcgaggaggagatagcatttaaaatgattcgcaccaacgtttcgcacgttgtgggtcaacttgacgacatccggaagaatccgcgtaaattcgtttgtttgaatgacaacatagaccacaatcacaaggacgcccagaccgtcaaggccgttctgcgtgatttttacgaatccatgtttcccataccatcgcagtttgagcttcctcgtgaatatagaaatcggtttcttcatatgcatgaactgcaagaatggcgtgcgtatcgggacaagctaaagttctggacccattgtgttttggccactttgattatgttcacaatattttcatttttcgccgagcagttaatcgccttaaaacggaaaatcttccctcgccgccggatccataaagaagcttctcctaatcgcattagggtt

SEQ ID NO: 215026 - DNA, 3768 bp, Artificial Sequence
  derived and/or modified sequence
atgctcttcaagctgctgcagagacaaacttacacctgcctctcccaccgctatggcctgtacgtctgcttcctgggagtcgtggttaccatcgtgtcggctttccagttcggtgaggttgtgttggagtggtcgagggaccaataccatgttctgttcgattcgtaccgcgacaatatcgccggcaagtcgttccagaatcggctgtgcctgccaatgccaatcgatgtcgtctacacctgggtgaatggaactgacctggagctgcttaaggaactgcagcaggtgcgggagcaaatggaggaagagcagaaggccatgagagaaattctgggtaagaataccaccgaaccaaccaagaagtctgaaaagcagttggaatgcctgctgactcattgcatcaaggtgccaatgctcgtcttggacccggccttgccggcgaacatcaccctgaaggacctgcctagcctctacccatccttccacagcgcctcagatatcttcaacgtcgctaagcctaagaatccgtccactaacgtcagcgtggtcgtgttcgactcgactaaggatgtggaagatgcccattctggacttctcaagggtaactcgagacaaaccgtgtggcggggataccttactaccgacaaggaagttcctggcctggttctcatgcaggatctcgcctttctgagcggatttccaccgactttcaaggaaactaaccaactcaagaccaagttgccggaaaatctgtcgagcaaggtcaaacttctccagctgtactcagaagctagcgtcgccctgctgaaactgaacaaccctaaggacttccaggagctgaacaaacagaccaagaaaaacatgactatcgatggtaaggaactgactatctcgccggcctacttgctctgggacctgagcgctattagccagtcaaagcaggacgaagatatctcagcgtccagattcgaagataacgaagaactgcgatactcgctccgatccatcgagcggcatgccccatgggtgcgaaacatctttattgtgaccaatggccaaatcccctcgtggctcaacctcgacaacccacgcgtcaccatcgtcacccaccaggacgtgtttcgcaacctgtcgcatctgccaaccttctcatcccctgctatcgaatcgcacattcaccggattgaaggactctcccagaagttcatctacctgaacgatgatgtgatgttcggaaaggacgtctggccagatgacttttactcccattccaagggacagaaggtctacctcacctggccggtgccaaattgcgccgagggttgccccgggtcctggattaaggacgggtactgcgataaggcgtgcaacaatagcgcgtgcgactgggacggaggagattgctccggaaactccggtgggtcacggtacatcgccggaggtggaggcactggtagcattggtgtcggacagccgtggcagttcggcggaggtattaacagcgtgtcttactgtaaccagggttgcgcaaactcatggctggcagacaaattctgtgatcaggcgtgtaacgtgttgagctgcgggttcgacgcgggagactgtggacaggatcacttccacgagctttacaaggtgatcctcctcccaaaccaaactcactacatcatcccaaagggcgaatgcctcccgtacttctcgttcgctgaagtcgccaaaagaggcgtggaaggagcgtactcggacaacccgatcattcggcatgcatccatcgccaacaaatggaaaactattcacctgattatgcactccggaatgaacgcgactactatccacttcaaccttactttccagaacactaacgacgaagaattcaaaatgcagattaccgtcgaagtggatacccgggaggggccgaaactcaactccactgcgcaaaagggatacgagaacctcgtgtcgccaatcaccctgctccctgaagccgaaatcctgttcgaagatatcccgaaagaaaagagattccccaagttcaagagacacgacgtgaactccactcgccgggcgcaagaagaggtgaagattccattggtgaacataagccttctgccgaaagacgcccaactgtcgctgaacaccctggacttgcagctggaacatggagacatcacccttaaggggtataacctctccaaatcggcgctgctgcggagctttcttatgaattcgcaacatgccaagatcaagaatcaagctatcattaccgatgaaacgaacgactcgctggtcgcccctcaggaaaagcaagtgcacaagtcgattttgccgaactcgctgggggtttcagagcggctgcagcggctgaccttccccgcggtcagcgtcaaagtgaacggccacgaccagggacagaacccgccactggatcttgaaactactgcacgatttcgggtcgaaactcatacgcaaaagactatcgggggaaacgtcactaaggaaaaaccgccatcgctcatcgtgcctctcgagtcacagatgactaaggagaagaagatcaccggaaaagaaaaggagaatagccgcatggaagaaaatgccgaaaatcacatcggagtgacggaagtgctgctcggccgcaagctgcagcactatactgactcgtacctgggcttcctgccttgggaaaagaagaaatacttccaggacctcttggatgaggaggaatccttgaaaacgcaactcgcatatttcaccgactccaagaatactggaaggcaactgaaggacaccttcgcggactccctccgctacgtcaacaagattctgaactccaagttcggctttacctcccgcaaagtgccggcacatatgccgcatatgatcgatcggattgtgatgcaagaactgcaggatatgtttcctgaagaattcgacaaaacgagcttccataaggtgcggcactcggaggacatgcagttcgccttctcatacttttactacctcatgagtgcggttcagcccctgaatatctcacaagtgttcgacgaagttgacaccgatcaatccggagtcctgtcggacagagagatcagaaccctcgccacccggatccacgaactgccgctctcactgcaggacctgacggggttggaacatatgctgataaactgctcaaagatgctccctgccgacatcactcaactgaacaacattccgccgacccaggagtcttactacgatccgaacctgccgccagtgacgaagtcgttggtgacgaactgcaagccagtgaccgacaagatacacaaggcctacaaagacaaaaacaaatacagatttgagatcatgggcgaggaggaaattgcgttcaaaatgatcaggacgaacgtttcgcacgtcgtgggccagctggacgacataagaaagaatccgaggaaattcgtctgccttaacgacaatatcgaccataatcacaaggatgctcagactgtcaaggccgttcttcgggacttctacgaatcaatgtttcccatcccttcccaattcgagctgccgcgcgagtaccggaaccgttttctccacatgcatgaactgcaggaatggcgcgcctaccgggataagctgaagttctggacccactgtgtgctcgctaccctcatcatgtttacgatcttcagcttcttcgcggagcaactgatcgcgttgaagaggaagatttttccgagacgccggatccacaaagaagcatcgccgaatagaatccgggtg

SEQ ID NO: 215027 - DNA, 3768 bp, Artificial Sequence
  derived and/or modified sequence
atgctgtttaaattgttacagcgccaaacttacacttgcctgtcccatcggtatggactgtacgtgtgcttcctgggggttgtggtaaccattgtgagtgcctttcagtttggagaagtggtactggaatggtccagggatcagtaccatgttcttttcgacagctatcgggataatattgccggcaagtccttccagaatcgcctatgcctcccgatgccaatcgacgtggtctatacatgggtaaacggaacagacctcgaactgctgaaagaactccagcaagtgcgtgagcaaatggaggaagaacagaaagcaatgcgggagatattgggcaaaaataccactgagcctaccaagaagagtgaaaagcaactagaatgccttctcacacattgcataaaagtcccaatgctcgtgctggacccagcacttccagcaaatatcactctgaaggaccttccttccttatacccctctttccattctgcctctgacatctttaacgtggccaagcctaaaaacccttctactaacgtgagtgtagtcgttttcgacagcactaaggacgtggaagacgctcactccggcctactcaagggcaattctcggcagaccgtgtggcgcggttacctgacaaccgataaagaagtgcctgggctggtcctgatgcaagatttggcttttctatctggctttccacctacctttaaagaaaccaaccagctgaagacgaaattacccgagaatctgtctagcaaagtcaagctactgcagctgtattccgaagcctctgtggcactcttgaaactaaataaccccaaggacttccaagagttgaataagcagactaagaagaacatgaccatcgacggaaaggagctcaccatctcacccgcttacctcctctgggatctgtcggccatatctcagtccaagcaggatgaggacatcagcgcaagccggttcgaggataatgaggagctgcgatacagtttgcggagcatcgagaggcacgccccttgggttcgcaacatcttcattgtgacgaatggccaaatccctagttggctgaatctcgacaacccacgcgtgactatcgttacccaccaggacgttttccgcaacctatcgcatctccccacattctcgagccctgcgatcgaatcccacatccacaggatagaaggactgagccagaaattcatctacctcaatgacgatgtgatgtttggcaaggacgtttggcccgatgacttctacagccatagtaaaggtcagaaggtgtatttgacatggcctgtccctaattgtgcggagggatgtccagggagctggataaaggacggctattgtgacaaagcctgtaataatagcgcctgcgactgggacggcggggactgttctggaaacagcgggggatcccggtacatcgccggcggcggaggcacaggctctattggagttgggcagccttggcaattcggtggcggcattaactctgtatcctattgcaaccagggttgcgccaatagctggctggccgacaaattttgtgaccaggcatgtaatgtgctgtcttgtggatttgacgcaggcgactgcggtcaagaccacttccatgaactttacaaagtgattctcttacccaaccaaacacactacattattcccaagggcgagtgccttccctacttctcattcgccgaggtagctaagagaggtgtggaaggtgcttatagtgataatccaattatccgtcacgcaagtattgcaaacaaatggaagaccatccatttgattatgcactcaggaatgaatgctactactatccacttcaacctgacattccagaacaccaacgacgaagagttcaagatgcagattaccgtggaggtcgatactagagaggggcctaagctaaactcaacggcccagaagggatatgaaaacctggtcagtcctattacactcttacccgaagccgagatcctgttcgaagacatccctaaggagaaacggttccctaagttcaagaggcatgacgtgaacagtacccgtagagcccaggaagaggtgaagatcccattggtcaacatctccctcttaccgaaagacgcacagctcagcctcaacaccctcgatcttcagctcgagcacggagacatcacactcaagggctacaacctctcgaagagcgccctcctgcggtcttttctcatgaactcgcagcacgcgaagattaaaaaccaggctatcattacagacgaaaccaacgacagtctcgtcgcaccccaagagaagcaagtccataaatcaatcctccctaactctctgggagtgtcggagagactacagcggttaaccttcccagctgtttccgtgaaagtgaacggccatgaccagggtcagaatcctcccctggacttggaaaccaccgcaagatttcgcgtggaaacccacacacagaaaactatcggcgggaatgttactaaggagaagcctccaagcctaatcgttcctctggaaagccagatgaccaaagagaagaaaatcacaggcaaagagaaggagaattctaggatggaagaaaacgccgaaaatcatatcggggtgactgaggtgctcctcggaagaaagctccaacattatacggacagctacttggggttccttccttgggaaaaaaaaaaatactttcaagacttgctcgacgaggaagaatccctcaagacccagctcgcgtatttcacggattctaagaacacggggaggcagctgaaagatacttttgccgatagcctccgttacgtcaacaagatcctgaactcaaaattcggatttacaagccggaaggtccctgcacacatgcctcacatgatcgaccgaatcgttatgcaggagctgcaagacatgttcccagaggagttcgataagacttccttccacaaagtacgccatagtgaggatatgcagttcgcctttagctatttctactacctcatgagcgcagtccagcctttgaacatcagtcaggtttttgatgaggtggatacagatcagtccggcgtgctgtccgatagagagataaggactctggccacccgcattcacgagctgccgctctctctgcaagatctcaccggcctggagcacatgctgatcaactgcagtaaaatgctgcctgctgacattacccagctaaataatattccacccactcaggaatcctactacgacccaaacctgcccccagtgactaagtccttggtcactaactgcaagcccgtcactgacaaaattcacaaggcctacaaggacaagaacaagtaccgattcgaaatcatgggagaagaagaaattgcttttaagatgatcagaacgaacgtctctcacgtggtcggtcagctcgatgatatcagaaagaaccctagaaagtttgtgtgcctaaatgataacatcgatcacaatcacaaggacgcccagacggtgaaggctgtgctgcgcgacttttacgaaagcatgtttccgattcctagccagtttgagctacctcgcgagtataggaaccgatttcttcatatgcacgagctgcaggaatggagggcttatagagataagctgaaattctggacacattgcgtgctggccacacttattatgttcacgatcttctccttctttgccgagcagttaatcgcgctgaaaagaaaaattttccctcgccgtcggatccataaagaggcttcgccaaaccgaattcgagtg

SEQ ID NO: 215028 - DNA, 3768 bp, Artificial Sequence
  derived and/or modified sequence
atgctgtttaagctcctgcagaggcaaacttacacctgcttgtcccacaggtatggactttacgtgtgcttcctgggcgtagtggtgactattgtctcagcttttcaatttggtgaagttgtcttggaatggagcagggaccagtatcacgtgctttttgattcttaccgcgataatatcgcaggaaagagttttcaaaaccgcctgtgcctcccaatgcccattgacgtcgtgtatacatgggttaacggaacagatctcgaactgctcaaggaactgcagcaggtgcgcgagcagatggaagaggagcagaaggctatgcgtgagattctgggcaagaataccacagagcccacaaagaagagcgaaaagcagttggagtgcctgcttacacattgcatcaaggtccccatgttggtgcttgatcctgcactcccagctaacataacattgaaggacttgccctccttgtatccaagttttcactccgcatcagacatcttcaacgtcgctaagcctaagaatccctctaccaacgtatccgtggttgtgttcgactcaactaaggacgtggaagatgctcattcaggtcttctgaagggcaactcccgtcagaccgtttggcgcggatacttgactaccgacaaggaagttcctggtttggtgttgatgcaagacttggcctttctctccggctttccccctacttttaaggaaactaatcaactgaagaccaaacttcctgagaacctttctagtaaggtgaaactgcttcaactgtattccgaggcttcagtcgccttgttgaaacttaacaatcccaaagattttcaggagctcaataaacaaactaaaaaaaatatgaccatcgacggaaaggagttgaccatttcaccagcatatcttctttgggacctcagcgctatctcccagagcaagcaagacgaggatatctctgcttcccgcttcgaggacaacgaggagctgcgttactccctccgcagcatcgagcgccatgctccttgggttcgcaacatatttatcgttactaacggtcaaattccctcctggctgaacttggataacccacgcgtgacaatcgtaacccatcaagatgtcttcagaaatctttcccatctccccactttctcctcccctgccatagagtctcatattcatcgtatagaaggcctctcccaaaagtttatctatctgaatgatgacgtaatgtttggcaaggacgtttggcctgacgacttctactctcacagcaagggacaaaaggtttacttgacctggccagttcccaattgcgccgagggttgccctggatcttggattaaagatggctactgcgacaaagcctgtaacaactctgcttgtgattgggacggcggtgactgctctggtaattctggaggcagccgctacatcgcaggcggtggaggtactggaagcataggagtaggacagccctggcagttcggaggcggcatcaactctgtgagttattgcaaccaaggatgcgccaactcctggcttgctgataagttctgtgaccaagcctgtaacgtcctgagctgcggttttgatgccggcgactgcggacaggatcacttccacgagctttacaaggtaatcctcctccccaaccagactcattatatcattcctaagggtgagtgtctgccttactttagctttgctgaggtggctaagagaggtgtcgaaggcgcttacagtgacaatccaataatcaggcatgcttctatcgccaacaaatggaagaccatccacctcatcatgcattccggcatgaacgcaacaacaatacacttcaacctcacattccagaacaccaatgatgaggaatttaaaatgcaaatcaccgtggaggtggatacccgtgaaggacccaaattgaacagcactgcccagaagggttatgaaaacctcgtttccccaatcactctcctcccagaggccgagattctgttcgaggacatccccaaggagaagcgtttcccaaagtttaagcgccacgatgtgaatagtacacgtcgcgcccaagaagaagtgaagatccctctggtcaacattagtctgctgcccaaggacgcccagttgtcattgaatactcttgatttgcagttggaacacggcgacataacactcaagggctataatctgagcaaatccgctctgcttcgcagtttcctgatgaactcacaacacgccaagatcaaaaatcaggccatcattactgacgaaacaaacgatagtctcgtagcccctcaggaaaagcaggtccataaatctatcctgcccaatagcctgggcgtctctgaaaggttgcagcgtctgacatttcccgccgtgagtgttaaggtcaatggacatgaccaaggtcaaaaccctccactggacttggaaacaaccgctaggtttagggtggaaacacacacccagaaaaccataggtggcaacgtgactaaggagaagcctccttctctcattgtccccctggagagccagatgacaaaagagaagaagataaccggcaaggaaaaggaaaattcacgtatggaggaaaacgctgagaatcacataggagtgacagaggtcctgcttggcaggaagctgcagcactatactgatagttatctgggtttcctcccttgggagaagaagaagtacttccaggacctgctggatgaggaggagagtctgaagacccaattggcatacttcaccgactctaagaacactggccgccaactgaaggacaccttcgccgatagcctgcgttatgtaaacaagatactgaatagcaaattcggctttacttctcgcaaggtaccagctcacatgccacacatgatagaccgtatagtcatgcaggagttgcaggacatgttccctgaggaatttgataagacctccttccacaaagttcgccattccgaggacatgcagttcgccttctcctacttctattacttgatgagcgcagtgcagcccctgaatatttcccaggtgttcgacgaggttgataccgaccagtcaggcgtgctctccgatcgcgagatccgcactctggccacaaggattcacgagctgcctctctccctccaagatcttaccggactggaacacatgctgataaattgctcaaaaatgttgccagccgatattacacagctgaacaacattccccccactcaggaatcatactacgaccctaacctccctcctgttacaaaatctctcgtgactaactgcaagcccgttaccgacaagatccacaaggcctacaaggacaaaaataagtacaggtttgaaatcatgggagaagaagagatcgctttcaagatgatccgcactaatgtgtctcatgtagtgggacagttggacgacatcagaaagaaccccagaaaattcgtctgcctcaacgacaacatcgatcataatcacaaggatgcccagaccgttaaagccgtcctgagagacttctatgagtctatgttcccaatccccagccagtttgaactgccccgcgagtacaggaaccgcttcctgcacatgcacgaactgcaggagtggcgtgcttaccgcgataaactcaagttctggacacactgcgtcctggcaactctgatcatgtttacaatcttcagctttttcgctgaacagctcatcgcactgaagagaaaaatcttccctagacgccgcatacacaaggaggcatccccaaacaggattcgcgtc

SEQ ID NO: 215029 - DNA, 3768 bp, Artificial Sequence
  derived and/or modified sequence
atgctgttcaagctccttcagcgccaaacgtacacctgcctgtcccatagatacggactctatgtttgttttctgggagtcgtggtcaccatcgtgagcgcttttcagttcggtgaggtggtgctcgaatggagcagggaccaataccatgttctcttcgacagctacagggacaatatcgccggaaagagcttccaaaatagactttgtctgcctatgcccatcgatgtggtctatacctgggtgaacggcaccgatcttgagctcctcaaggaacttcaacaagtgagagagcagatggaggaagaacagaaagccatgagagaaatccttggaaagaacactaccgagcctacgaagaaatcggaaaagcaactcgaatgcttgctcacccactgcattaaagtcccaatgcttgtgctcgatcctgcacttccggccaacattactctcaaagatctgccctcactttacccttcctttcacagcgcaagcgacattttcaatgtggctaaaccgaagaacccctcgaccaacgtcagcgtggtcgttttcgattccactaaagacgtcgaagatgcacattccggtctgctcaagggcaactcacgacaaactgtgtggcgcggctacctcaccaccgataaggaagtccctggacttgtgcttatgcaggatctggcgtttctttccggtttccccccaactttcaaggagactaaccagctgaaaaccaaactccccgagaatctgtcctcgaaggtgaaactgctccaactgtactcggaagcctcagtggccctccttaaactcaacaaccccaaggacttccaggagctcaataagcaaactaagaaaaacatgaccattgacggtaaggaacttactatctcacccgcttaccttttgtgggacctgtcggcgattagccagtctaaacaagatgaagatatttccgcaagcagatttgaggataacgaggaactgagatactcactgcgctctattgagaggcatgcgccatgggtgcgtaacatattcatcgtcactaatggacaaataccatcctggctgaatcttgataatccgcgggtgaccattgtgacccatcaggatgtgtttcggaaccttagccatcttccaacctttagctccccggccatcgaatcgcatatccatcgcatcgagggattgtcgcaaaagttcatttaccttaatgatgatgtgatgttcgggaaggatgtgtggcctgatgacttttacagccattccaaaggacagaaggtctacctgacctggccagtgccaaattgtgccgagggatgtccaggatcatggattaaggatggctactgcgataaggcttgtaacaactccgcctgtgattgggatggaggtgattgttccggaaattcgggagggtcacggtacattgcgggaggcgggggaacggggtcgattggagtgggtcaaccatggcaatttggaggtgggattaacagcgtctcatactgcaaccagggatgcgcaaactcgtggcttgcggacaagttctgcgatcaggcatgtaacgtcctgtcctgtggatttgatgcaggagattgcggacaagatcatttccatgaactgtacaaggtcattcttcttcctaaccagactcattacatcattccaaagggcgaatgcctgccttatttctcgtttgcagaggtcgccaagcgtggggtggaaggagcatactccgacaacccgatcatcaggcatgccagcattgcaaacaaatggaaaaccatacacctgatcatgcattcaggaatgaatgccaccactatccactttaatcttactttccaaaatactaatgatgaggagtttaagatgcaaattacggtcgaagtggatacgagagaggggccaaaacttaattccacggcacaaaagggatacgagaatctggtgagccccattactcttcttccagaagcggagattcttttcgaggatattccgaaagaaaaaaggtttccaaagttcaagagacatgatgttaacagtaccaggcgggcacaggaagaagtcaagatccctctggtgaacattagtctgctgccaaaagatgcacagctttcccttaacacccttgatctgcaacttgaacacggcgatattactttgaagggttacaacctttcgaagagcgcgctgcttcgatcgtttctgatgaattctcaacacgccaagataaagaaccaggcaattatcactgatgaaaccaatgattcacttgtcgccccacaagagaagcaagttcacaagtcgattcttccaaattcgcttggtgtgtccgaaagacttcaacgacttacttttccagcagtctcagttaaagtgaatggacatgaccaaggtcaaaatcctcctctggaccttgaaactactgcacgcttcagggtggaaacccacactcaaaagaccattggaggcaatgtgaccaaggagaaacccccctcgcttatcgtcccactggagtcgcaaatgaccaaagagaaaaagataaccggcaaggagaaggaaaactcgcgaatggaggaaaacgccgagaaccacattggagtgaccgaggtgctgctggggcgtaagctgcaacattacacggatagctacctgggtttcctgccgtgggagaagaagaagtattttcaggacctgcttgatgaagaagaatccctgaaaacccagctggcatactttaccgattcgaaaaacaccgggagacagctgaaggacacctttgccgattcacttcgatatgtcaataagattctcaactcgaaatttggatttacttcacgcaaagtgcctgcccacatgccacacatgattgaccggatcgttatgcaagagctccaagatatgttccctgaagaatttgacaaaaccagcttccacaaggttagacactcggaagatatgcaatttgctttctcgtatttctactacctgatgtctgcagtgcaacccctcaacattagccaggtgtttgatgaagtcgacaccgatcagtcaggcgtgctgagcgaccgcgaaatcagaaccctggcgactcggattcatgaactgcctctgagcctccaggatttgaccgggctggaacatatgctgatcaactgttcgaagatgcttcctgctgacattacccaactcaacaacatcccaccaactcaagaatcctactacgatccaaatctgccacccgtcactaagagcctggtgactaactgcaaaccggtgactgacaaaatacataaggcatacaaagataagaacaaatacagatttgagataatgggagaggaggagattgcatttaagatgatacgaaccaacgtgagccacgtggtcggacaactggatgatattcgtaagaatcctcgcaaatttgtgtgtcttaatgataacatcgatcataaccataaggacgctcagactgtgaaggccgtgctgcgagacttttacgagagcatgtttcccataccatcgcaatttgagctgccaagagaatataggaacaggttcctccacatgcatgaactgcaagaatggcgggcgtacagggacaagctgaagttttggacccactgtgtcttggcgactctgattatgtttaccatcttctcgttcttcgcagaacagctgatcgcccttaagagaaaaatcttcccaagacggcggatccataaggaggcctcccccaaccgcattcgggtg

SEQ ID NO: 215030 - DNA, 3768 bp, Artificial Sequence
  derived and/or modified sequence
atgctgtttaagctgctccagcggcaaacctatacctgtctgtcgcacaggtacggcctgtacgtgtgcttcctgggagtggtggtgactatcgtgagcgcgtttcaatttggagaggtggtgctggagtggtcccgagatcaataccatgtgctgttcgacagctatcgtgacaatatcgctggtaaatcgttccagaatcgcttgtgtctgccaatgccgatcgacgtcgtgtacacctgggtgaatggtaccgatcttgagctgttgaaagagctccaacaggtgagggagcagatggaagaagagcagaaggctatgcgggaaattctgggaaagaatactaccgaacccaccaagaaatcggagaaacagttggagtgccttctcacccactgtataaaggtgccaatgctcgtgctggatcctgcgctcccggcgaacatcactctcaaagacctgccctccctgtacccatccttccactccgcttcggacatctttaatgtggcaaagccgaagaacccatccactaatgtaagcgtggtcgtgttcgacagcaccaaggacgttgaagatgcccattcaggcctgttgaagggaaactcaaggcagactgtgtggcgcggctacctgactaccgacaaggaggttccgggactcgtgctcatgcaggacttggcgttcctgtcgggattcccgcctactttcaaggaaactaaccaactcaaaaccaagctcccggaaaacctcagcagcaaggttaagctcctgcagctgtactcggaggcgtccgtggcactgctgaagctgaataacccgaaggatttccaggaactgaacaaacagactaagaagaatatgaccatcgatgggaaggaactcactatttcaccagcgtaccttctgtgggatctgagcgcaatctcccaatcaaagcaggacgaggacatctccgcttcccggttcgaggataacgaagagctgagatactctcttcgcagcattgagagacatgccccttgggttcgcaacatctttatcgtgacgaacgggcagattccgtcttggctgaatctggataatccacgcgtgaccattgtcacccaccaggatgtgtttcggaatttgtcacatttgcctactttttcgtcaccggcaatcgaatcacatatccatagaattgaaggactctcgcaaaagttcatctacctcaacgacgacgttatgttcggcaaggacgtatggccggacgacttctactcgcattcgaaggggcaaaaagtctacctgacttggccggtgccgaactgcgcggagggctgcccagggtcgtggatcaaggatggctactgcgacaaggcctgcaacaactcggcctgcgactgggacggaggagattgcagcggcaactccggtgggagccgctacattgctggaggtggaggaactggatccatcggggtcgggcaaccgtggcagttcgggggcggaatcaacagcgtctcctactgcaatcaaggttgcgccaatagctggcttgccgacaaattctgcgatcaggcgtgcaacgtcctctcctgtggattcgacgccggagattgtggacaagaccatttccatgaactctacaaggtcattttgctgccgaaccaaacgcactatatcatcccgaagggggaatgtttgccgtacttctcatttgcggaggtggccaagcggggagtcgagggggcatacagcgataatcctatcattcggcatgccagcatcgccaacaagtggaaaacgatccacctgattatgcattccggtatgaacgccactaccatccatttcaacttgactttccaaaacaccaacgacgaggagttcaaaatgcaaatcaccgtggaggtggacacccgcgagggcccgaaactgaattcaactgcgcaaaaggggtatgagaatctcgtgtcgccgatcactctgctgcctgaagccgaaatcctgtttgaagatatcccgaaagaaaagagattcccaaagttcaagcggcacgatgtcaacagcaccagaagagcccaggaagaagtgaagatccctctcgtgaatatctccctgctgcccaaggacgcccaactttcgttgaacactctcgacctgcagctcgagcatggggatatcacccttaaaggatacaacctcagcaagtcggccttgttgcgcagcttccttatgaattcacaacatgctaaaatcaaaaatcaggcaatcatcacggatgagactaatgactccctcgtggcaccacaagagaagcaggtccacaaatcgatcctcccaaactccctgggcgtgtccgaacggctgcagagactgaccttcccagcagtgagtgtgaaagtgaacggacacgaccagggacagaacccgccgctggacctggaaaccactgctcggtttcgggtagaaactcatactcagaaaacgatcggaggcaatgtgacgaaggaaaaaccgccaagcctcatcgtgcctctggaatcccagatgactaaggagaagaagatcactggaaaggaaaaggaaaattcacgcatggaggagaatgcagaaaaccatatcggtgtgaccgaggtcctccttggtcgcaagctgcagcactacaccgactcctacctgggatttctgccatgggaaaagaagaaatacttccaggacctgctcgatgaagaggaaagcctcaagactcagctggcatacttcaccgattcgaagaatacgggccgccaactgaaggataccttcgcggactcgctgagatacgtgaataagatccttaactcaaagtttgggttcacctcaaggaaggtgccggcccacatgcctcacatgattgaccgcatcgtgatgcaggagctgcaggacatgtttccagaagaattcgacaagacctcattccacaaagtccgccatagcgaagatatgcaatttgcgtttagctacttctactacctgatgtcggcagtccaacctctgaacatctcgcaggtattcgatgaggtggatactgaccagagcggagtgctttcagaccgggagattagaactctggcaacccggattcatgaactcccgttgtcgctccaagatctgactgggctggagcatatgctgattaactgcagcaaaatgctgccagctgacattacccagctgaacaacatcccgccgacccaggagtcctactacgacccaaacctgccaccggtcactaagtcgctggtgaccaattgcaagccggtgaccgacaagatccataaggcctacaaggacaaaaacaagtatcggtttgagatcatgggtgaagaggagatcgcgttcaagatgatccggaccaatgtcagccacgtcgtcggtcaactggacgacatccggaaaaatccacgcaagttcgtgtgcctcaatgacaacatcgaccataaccacaaggatgctcagacggtgaaggcagtactgagagatttctatgagtccatgttccctatcccatctcaattcgaacttccgagagagtacaggaaccgtttcctgcacatgcacgagctgcaagaatggagagcttaccgggataaactcaaattctggacccactgcgtcctggcaacccttatcatgttcaccatcttctcgttctttgctgaacagctgatagcgctgaagcgcaaaatctttccgcgccgcaggatccacaaggaggcgtcccctaaccgcatcagggtg

SEQ ID NO: 215031 - DNA, 3768 bp, Artificial Sequence
  derived and/or modified sequence
atgctgttcaagctgctgcaacgccagacttacacctgcctgtcacatagatacggtctgtacgtctgtttcctcggggtggtggtgaccatcgtctccgcttttcagttcggagaggtggtcctggagtggtcacgagatcaataccatgttctcttcgattcgtaccgcgacaacattgcaggtaagagcttccaaaaccggctctgtctgcccatgccaattgatgtcgtgtatacttgggtgaatggaaccgatctggagctcttgaaggaactgcagcaagtgcgggagcagatggaggaagagcaaaaggctatgcgcgagatccttggaaagaatactactgagccgaccaaaaagtccgagaagcaattggagtgcctgctcactcactgtatcaaggtcccgatgcttgttcttgacccggccctgccggccaacatcacgctgaaggaccttccgtcactctacccttccttccattccgcctcggacatcttcaatgtggcgaaaccgaaaaatccgtcgaccaacgtgtccgtggtggtgttcgactcgactaaagacgtcgaggatgcacactcgggacttctgaaggggaactccagacagacggtctggcggggctacctgaccaccgacaaggaggtgccgggtcttgtcctgatgcaggatctggcctttctctcgggctttcctccaactttcaaagaaaccaatcagctgaaaactaagttgccggagaacctttcgagcaaggttaagctgctgcagctgtactcggaagcgtccgtggctcttctcaagctgaacaatccgaaagattttcaagaactcaacaagcagaccaagaagaatatgaccatcgacggaaaggaactgactatctcaccggcctacctcctctgggacctctccgcaatctcccagtcaaagcaagatgaggacatctccgcgagccgtttcgaagataatgaggaactgcgctacagcctgaggtccatcgagcgccatgccccgtgggtccggaacatcttcatcgtcactaatggccaaatcccgtcatggctgaatctggataatccaagagtgaccatcgtgactcaccaagacgtgttccgaaacctgtcacatttgccgactttctcatctccagccatcgagtcgcatatccatcgcattgaaggactgtcgcagaagttcatctacctcaacgacgacgtcatgtttggaaaggatgtgtggccggacgacttctacagccactcgaaggggcagaaggtgtatcttacctggccagtgcctaattgtgcagagggctgcccgggatcctggatcaaagacgggtactgcgacaaggcgtgtaacaattcggcctgcgactgggatggaggtgattgctcaggaaactccggaggatcccgctacatcgcgggtggaggaggaactggctccatcggcgtcgggcagccatggcagtttggaggaggaataaacagcgtctcttactgcaaccaaggttgcgccaacagctggctggcggacaagttttgtgaccaagcatgcaacgtgctctcgtgcggcttcgatgcaggcgactgtggccaggaccacttccacgagctctacaaagtgatcctcctcccgaaccaaactcactacataattccgaagggagaatgtctgccttacttctccttcgcagaagtggcgaagcggggtgtggaaggtgcgtactccgacaatcctatcatccggcatgcgtccatcgccaacaagtggaaaaccatccacctgatcatgcattcgggcatgaacgcgaccacgatccacttcaacctcaccttccagaataccaacgacgaagaattcaaaatgcaaatcaccgtggaggtggacacccgcgaaggaccaaagctgaacagcaccgcacaaaaaggttacgaaaatctggtgagcccgatcacgctgctgcccgaggctgaaatactgtttgaagatatcccgaaggagaaacggtttccaaagttcaagcggcacgacgtgaattcgactaggcgagctcaggaagaagtgaagatccctttggtcaacattagtctgttgccaaaggacgcccagctgtccctcaatacccttgatctgcagctggaacacggggacatcaccctcaagggttacaatctgtctaagtccgcgctcctgaggtcgtttctcatgaactcgcagcacgccaagatcaagaaccaagccatcatcactgatgaaaccaatgacagcctggtcgcgccgcaggaaaaacaggtccataagtcaatactgcccaactcccttggagtctccgaacgcttgcagaggctgaccttcccggcggtgtccgtgaaagtgaatggccatgaccagggtcaaaaccctcctctggatctcgagacgaccgcgaggtttagggtcgaaacccatacgcaaaaaaccatcggaggcaatgtgaccaaagaaaagccaccctccttgatcgttccgctcgagtcgcagatgactaaagagaagaagattactgggaaggaaaaggaaaactctcggatggaggagaacgcggagaaccatatcggggtgactgaagtgctcctgggacgcaaactgcagcactacaccgatagctacctcggtttcttgccgtgggaaaagaagaaatacttccaagacctgctggacgaggaggaatctctcaagactcagttggcctatttcactgatagcaaaaacactggccggcagcttaaggacactttcgcggattcgctccggtacgtcaacaaaattctcaattccaagtttggattcacttcgaggaaggtgccggcccacatgccgcacatgatcgacagaattgttatgcaggaactgcaagatatgttccccgaggaattcgacaaaaccagctttcataaggtgagacattccgaggatatgcaattcgccttctcatacttctactaccttatgtctgctgtacaaccactgaatatcagccaggtctttgacgaagtggacaccgatcaatctggcgtgctgtcggacagagaaatccggaccctggccactcggattcatgaactgcccctgtcccttcaagacctcactggactggaacatatgctgatcaactgcagcaaaatgttgccagcggacatcacgcagctgaacaacatcccacctactcaggaatcgtactacgatccgaacctgcccccggtgaccaaatcgctggtgactaactgcaagccggttaccgacaagattcataaggcctataaggacaagaacaagtacaggttcgaaatcatgggggaggaggaaattgccttcaaaatgatcagaacgaacgtttcccacgtggtgggtcagcttgatgatatccgcaaaaacccacggaagttcgtctgcctcaacgacaacatcgaccataatcacaaggatgctcaaaccgttaaggcagtgttgagagacttttacgaatccatgttcccaattccatcacaattcgaactccctcgggagtaccggaatcggttcttgcacatgcacgagctccaggagtggcgggcctaccgggataagctgaagttctggacccattgcgtgctggccactctgattatgttcaccatcttttctttcttcgcggaacagcttatcgcgctgaagcgtaaaatctttcctcgtcggaggattcacaaggaggcgtcacctaacagaatccgggtg

SEQ ID NO: 215032 - DNA, 3768 bp, Artificial Sequence
  derived and/or modified sequence
atgctgtttaagttgcttcaacgtcaaacttacacttgccttagccaccgatacgggctctatgtctgttttcttggagtggtcgtaaccatcgtttcggcctttcaatttggagaagtggtgctcgaatggtccagggatcaataccacgtccttttcgactcgtaccgcgataacatcgcgggcaagtcgtttcaaaatcgcctgtgtctcccgatgcctattgatgtggtctatacgtgggtgaacggtactgatctcgaactcctcaaggaacttcagcaggtcagagagcaaatggaagaggaacagaaggctatgagagaaatccttgggaagaacactactgaacctaccaaaaagtcagaaaagcagctggaatgccttctcacgcattgtattaaggtgccaatgcttgtgctggatcctgcattgcccgctaatatcactcttaaggaccttccgtcgctttacccctcctttcattccgcctctgacattttcaatgtggcaaagccaaagaatccatctaccaacgtctccgtggtggtatttgattcgactaaggatgtggaggacgcccatagcggattgctcaaagggaattcgcgacagactgtatggcgaggctacttgactaccgacaaagaggtgcccggcctggtccttatgcaggatctggcgtttctgtcgggttttccaccgactttcaaagaaaccaatcaactgaaaaccaaactgccggagaatctttcaagcaaggtgaaactcctccaattgtactcagaggcttcggtggcgttgcttaaactcaataatcccaaggacttccaagaactgaataagcagactaagaagaatatgactatcgacggtaaagaactcaccattagcccagcatacctgctgtgggatctttcggcaatctcccaatccaagcaggatgaggatatctcggcatcgcgttttgaggacaacgaggaactgcgctactcacttaggtccattgagagacacgccccatgggtccggaacatattcattgtcaccaatggccaaatccccagctggcttaacctggataaccccagagtcacgatcgttacgcatcaggacgtgtttcgcaacctctcccaccttccaactttttcctcgcccgcaatcgagtcccatattcatcgcatcgagggactctcccaaaagttcatttacctgaatgatgatgtcatgttcggtaaagatgtgtggcctgatgacttttacagccatagcaaaggccaaaaggtgtaccttacttggccggtgccgaattgtgcggagggctgcccggggtcctggatcaaagacggttactgtgataaggcctgcaacaactcggcctgcgattgggatggaggagattgttcgggtaattccgggggttcaagatacattgctggtggaggaggcaccggttcaattggcgtgggacagccctggcagttcggtggcggtataaacagcgtgagctactgtaaccaaggatgtgcgaacagctggcttgcagacaaattctgcgatcaggcatgtaacgtactttcgtgtggttttgatgcaggtgattgtggacaggatcatttccatgaactctacaaagttattctgttgccaaatcagacgcactatatcatcccaaagggggaatgtctgccatatttctcgtttgcagaagtcgcaaagcggggggtcgaaggagcatacagtgataaccccataattcgacatgcaagtatcgcaaacaaatggaaaactattcaccttatcatgcactcgggaatgaatgcaaccaccattcatttcaacctgacctttcagaacaccaacgatgaggagttcaaaatgcagattaccgtggaagtggatactagggaaggaccaaagctgaactcgaccgcccagaaggggtacgaaaacctcgtgtcacctatcacccttttgcctgaggcagaaattcttttcgaggacattccaaaggaaaaacgttttcctaagtttaagcggcacgatgtgaactccactaggagagcccaagaagaagtgaaaattcctcttgtgaatatctccctgctgcctaaagatgcacaactttcactcaataccctggaccttcaattggaacacggagacattacgcttaaggggtacaatctctccaagtcggcactgttgagatcctttttgatgaattctcaacacgcaaagattaagaaccaggctatcattaccgatgagactaacgactccctcgtcgcaccgcaggaaaagcaagtccataagagtatcctgccaaactcactgggcgtttctgagcgcctccaacgtctgacgtttcccgctgtgtcggtgaaagtcaacggacatgatcagggacaaaacccccctcttgatcttgagactacggcaaggttcagggtggaaactcatactcaaaagaccatagggggtaacgtgactaaagaaaagcccccttcgctgatagtgccactcgaaagccagatgacgaaggagaaaaagattaccggaaaggaaaaggaaaatagtagaatggaagaaaacgccgaaaaccatatcggtgtgaccgaagtgctcctgggacgcaagttgcagcattacaccgatagctaccttggctttcttccatgggaaaagaaaaagtactttcaggacttgcttgatgaagaggagagcctgaaaacccagctcgcgtacttcaccgactcaaagaacacgggtagacaacttaaggatacttttgcagactcccttcggtatgtcaataagattttgaacagcaagtttggatttacctcccgcaaagtgcctgcacatatgccgcatatgattgacagaatcgttatgcaagagctccaagatatgtttccagaagaatttgataaaacctcgttccataaggtgcggcactcggaggacatgcagtttgccttctcatacttctactacctgatgtcagcagtccagcctctgaacatctcccaagtgtttgatgaagtagacaccgaccaatcgggggtgctttccgaccgggagatacgtactctggcaactcggattcatgagctgcctctgagccttcaggaccttaccggtctggaacatatgctcatcaactgctcgaagatgctgcctgcggatattacccaactgaacaacatcccacctacccaagaaagctactacgaccctaacctgcctcctgtcactaagtccctggtcaccaattgtaaacctgtcactgataagattcacaaagcctacaaggataagaacaagtacaggttcgagataatgggagaagaagaaatcgcatttaagatgatccggacgaacgtgtcccatgtggtgggccaactcgacgatattagaaagaatccacgcaagttcgtctgcctcaacgacaatattgatcataaccacaaagatgcccaaaccgtgaaggcagtgcttcgggacttttacgaaagcatgttccccattccttctcaatttgaactgccacgtgaatacagaaatagattcctgcatatgcacgaattgcaggaatggcgcgcgtacagagacaaattgaagttttggactcactgtgtgctcgcaaccctgattatgtttaccatattcagcttctttgcggagcagctgattgccctgaaacgcaagatattccctcggcggagaattcataaggaggcctcacctaaccgaattcgtgtc

SEQ ID NO: 215033 - DNA, 3768 bp, Artificial Sequence
  derived and/or modified sequence
atgctgtttaagctgttgcaacgtcagacatatacatgcctttcacaccggtacggtctgtatgtatgtttcttgggtgtggtagtgacgattgtctcagcgtttcagttcggcgaggtggtgctagagtggagccgggatcagtatcacgtcctgttcgacagttaccgcgataacatcgctggcaagagctttcagaaccgtctttgcctgcccatgccgattgatgtagtgtacacttgggtaaacgggactgacctggagctgctgaaggagttgcagcaagttcgcgaacagatggaggaggagcagaaggccatgcgcgagatcttgggaaagaatacgacggaacccactaagaagagtgagaaacaactggagtgcctgctgacacactgcatcaaggtgccaatgctcgttctggacccggcgctgccagccaatattacgcttaaggatctgccctccttgtatccaagcttccattctgccagcgatatattcaacgtcgccaaaccaaaaaatcccagtacgaacgtatccgtggtggtgttcgattccacgaaggatgtggaggatgcgcacagcgggctgttgaaaggaaatagccgccaaacagtgtggcgcggatatctgaccaccgataaggaagtccctggtctcgtgctcatgcaagacctggcgttcctttctggtttccccccgacatttaaggagaccaaccagctcaaaaccaaactgccagaaaaccttagctccaaagtcaagctgctgcagttgtactcggaagcctcagtcgccctcttgaagcttaataatccgaaggacttccaggagcttaataagcagaccaaaaagaatatgaccatcgatggcaaagagctgacgatcagtcccgcctatttattgtgggacctgagtgcgatatcccagagcaagcaggacgaggacatttccgcctcaaggttcgaagataacgaggaactccgatacagtctgagaagtatcgagcgacatgctccctgggtgagaaacatttttatcgtcaccaatggacagattccgagctggctgaacttggataacccgcgcgtgacaatagtcacgcatcaagatgtcttcagaaatctatctcacctgccaaccttcagcagccccgccatcgaatcacacattcaccgaatagagggcctcagccagaaattcatttatctgaatgacgacgtcatgtttggaaaggatgtttggcccgatgatttttactcccatagtaaaggccaaaaggtctacctaacctggccagttccgaattgcgcagagggctgcccaggctcgtggatcaaggatggctattgtgacaaggcttgcaataattccgcttgcgattgggatgggggagattgctccggcaacagtggcggctcccgctacatcgcaggcggtggaggcacggggtcgatcggcgttggtcaaccgtggcagtttggcggcggaattaactcagttagttattgcaaccagggttgtgctaatagttggctcgccgacaagttctgcgaccaggcttgcaacgtcttgtcctgcggctttgatgcgggtgattgtggacaagatcacttccacgagctgtacaaggtcattctactaccgaaccagacccattacatcattcctaagggtgagtgcctgccttatttctccttcgctgaggtagcaaagcgcggcgtcgagggcgcctacagcgacaatccgatcatcagacacgcctccattgcaaacaagtggaagactatccatctgatcatgcattcgggcatgaatgccacgacgattcacttcaaccttacctttcaaaacaccaacgacgaggaatttaagatgcagatcacagtggaagttgatacgagggagggccccaaactgaactcgaccgcacaaaaaggctacgagaaccttgtatcgcccatcaccttgctgcctgaagctgaaatactgttcgaagacattccaaaggaaaagcgcttcccgaagttcaagcgccacgatgtgaattccacccgccgggctcaagaggaggtcaagatccccctcgtcaatatctccctgctccccaaggatgcccagctgtctctgaataccctcgacctgcagctcgaacacggcgacatcaccttgaagggctacaatttgtccaagagtgccctcctgaggtcctttctaatgaactcccagcatgctaagataaagaatcaagctattattacagacgaaacaaacgatagcctcgtggccccgcaggaaaaacaggtacacaaatccattttgcccaactcgttgggcgtgagcgagcgcctgcagaggctaacgttcccagcagtgagtgtaaaggtaaatggacacgaccaaggacagaaccctcctctggacctcgagaccacggccagatttcgcgttgaaacccacactcaaaagaccataggtggcaatgttacgaaggagaagccaccaagcctgatagtgccccttgagtcgcagatgacaaaggagaagaagattaccgggaaggagaaggaaaacagcagaatggaagagaacgctgagaatcatataggggtaaccgaagttttgctgggccgaaagctccagcattataccgactcgtatctgggcttcctcccctgggaaaagaagaagtactttcaagacctattggatgaggaggagtccctcaagacccagctggcatattttaccgactccaagaacacgggcagacagctaaaggatacttttgccgatagtctaaggtatgttaacaagattttaaactcgaaattcggcttcacaagtagaaaggtgccggcacacatgccacacatgatcgaccgtattgtgatgcaggagctgcaggatatgtttcccgaagagtttgataaaacgtcctttcacaaggttcgccatagtgaggatatgcagtttgcctttagctatttttactacctcatgtccgctgtccagccgttaaacatttcccaggtcttcgacgaagtggacaccgatcaatcgggagtgctttccgatcgcgagatacgcaccctcgcaacgcgtattcatgagttacctttgagcctgcaggatctgaccggtttggagcacatgctgattaattgctccaaaatgcttccagcggacattactcaactgaataacatcccacccacgcaggagtcctattatgatccaaatctacctcccgtgaccaagagcctggtcacgaactgcaagcccgtcaccgacaagatccacaaagcctataaagataagaacaagtatcgcttcgagatcatgggcgaagaggagatcgcatttaagatgatccgtacgaatgtgtctcatgttgtaggacagctggatgacattcggaagaacccgcgaaagttcgtgtgtcttaatgacaacatagatcacaatcacaaggacgcccagacggttaaggcagttcttcgtgatttttacgagagcatgtttccaatcccttctcagttcgaattgccacgcgagtaccgtaatcgcttcctgcatatgcacgaactgcaggaatggcgcgcttaccgcgataagctgaagttttggacccactgtgtactagcaactctcatcatgttcaccattttcagtttcttcgcggagcagcttatcgcgttaaaacgcaagatatttccacgccgtagaatacataaggaggcctccccgaacagaattcgcgtg

SEQ ID NO: 215034 - DNA, 3768 bp, Artificial Sequence
  derived and/or modified sequence
atgcttttcaagctcctgcaacggcaaacctacacttgcctgtcccatcgatacggactgtacgtgtgttttcttggtgtggtggtcaccatagtcagcgccttccaattcggggaagtggtgctggaatggtcgcgggaccagtaccacgtcctgtttgattcatacagggataacattgcagggaagtcctttcagaatcggctgtgcctgccgatgccaattgatgtggtgtacacttgggttaatggaaccgatctcgaattgcttaaggaacttcaacaagtgagagaacaaatggaagaagaacagaaagctatgcgcgagattctggggaaaaacaccaccgaaccgactaaaaagtcggagaagcagctcgaatgtcttttgacccattgtattaaggtgccaatgttggttcttgatcctgcgctccctgccaacataaccttgaaggatcttccttctctttacccatcatttcattcggcatcagacatctttaatgtcgcgaaacctaaaaacccttcaactaacgtctctgtggttgtgtttgactccaccaaggatgttgaggacgcacactctgggttgctgaaggggaattcgaggcaaactgtgtggagaggatacctcactaccgacaaagaagtgcctgggttggtcctcatgcaggatttggcatttctgtccggttttccccctacctttaaagaaactaaccaacttaagacgaagctcccagaaaatctttcgagcaaggtgaagctccttcaactttactccgaagcgtcggtggcgttgctcaagttgaacaatcctaaagactttcaagaactcaataagcaaacgaagaaaaacatgactatcgatggaaaggaactcaccatttcgcccgcttaccttctgtgggatctgtccgccatttcccaatcgaagcaagatgaagatatctccgcatcacgcttcgaagataacgaagaacttcgatactcccttcgatcaattgaacgccatgcaccttgggtgcggaacatctttattgtgaccaatggacagatccctagttggcttaatcttgataatcccagagtaaccattgtgacccatcaagatgtgtttcgtaacctttcccatctgccaaccttcagctcaccagcaattgagtcgcatatccatcgcattgaaggactttcccagaagttcatctatctgaacgatgatgtgatgtttggaaaggatgtatggcctgacgacttctactcccactcgaagggacagaaggtctaccttacttggcctgtgcctaattgtgccgaaggatgtcccggatcgtggattaaagatggatactgcgataaggcatgcaacaactcagcttgtgactgggacggaggtgattgctcgggtaactccggtggttcacgctatatcgcggggggcggagggactggttcaatcggcgtcggacaaccgtggcaatttggaggtggtatcaattcggttagctactgcaaccaaggttgtgcaaacagctggttggctgataagttttgtgatcaagcctgcaacgtgttgtcgtgcgggtttgatgcaggtgattgtggccaggaccatttccatgaactttacaaagttattcttctgccaaatcagacgcattacattatcccaaagggggaatgtctcccatacttttccttcgcagaagtggcaaagagaggggtggaaggcgcatacagcgataaccccatcattaggcatgcgtcgattgctaacaaatggaaaactatccatctcattatgcatagcggcatgaatgccaccacgattcacttcaacctgacctttcaaaacaccaacgacgaagagttcaaaatgcagattacggtcgaggtcgatacccgagaggggcctaagctgaattccaccgcacagaagggctacgaaaatctggtttcgccgataactcttctccctgaagcagaaattcttttcgaagatatccctaaggaaaagcggtttccaaagttcaaacgccatgatgttaactcgactagaagagcacaggaagaggtgaagattcccctggtgaacatttcgctccttccaaaggacgcccaactctcgttgaacactcttgatctccagttggaacacggagacattactcttaaggggtacaacctttccaagagcgcactcctcaggagctttcttatgaattcacagcatgcgaagatcaagaatcaagccattatcactgacgagactaatgattccctggtggctcctcaggaaaagcaagtccacaagagcattctgcctaactcactgggtgtgtccgaaagacttcagaggcttacctttcccgcagtgagcgtaaaggtgaacggacatgatcagggtcaaaacccccctctggacctggaaactactgcgagatttcgggtggagacgcacactcaaaagacgattggaggaaatgtgaccaaagagaagcccccaagcctcatagtgcccctcgaaagccagatgacgaaagagaagaagattaccgggaaggagaaggaaaattctcggatggaagaaaatgccgaaaaccacataggtgtcaccgaggttctcctcggcagaaagctgcagcactacaccgattcgtatctgggatttcttccatgggaaaagaagaagtactttcaagatttgctcgacgaggaggagtcactgaaaacccaacttgcatacttcactgactcgaagaacaccggacgccaactgaaggatactttcgcagattcgctgcggtatgtcaacaagatattgaactccaaatttggttttacctcacgaaaagtgccagctcatatgcctcacatgatagatcgcattgtgatgcaagaattgcaggatatgttcccggaggaatttgacaagacttcttttcacaaagtgaggcactccgaggatatgcaatttgcattctcctacttttactaccttatgtcggcagtccaacccctcaacattagccaggtgttcgacgaggtggataccgaccaatccggcgtcctgagcgacagggaaattcggactctcgccactcgaatccacgagctcccgctgagtctgcaggacctgaccggccttgagcatatgctgatcaactgttcgaaaatgcttcctgccgatattacgcagctcaacaacatacccccaacccaagaatcgtattacgatcccaacctgcccccagtgactaagtctctcgtgaccaactgtaagccagttaccgataagatccataaagcctacaaagacaagaataagtaccgttttgagataatgggcgaggaagagattgcattcaaaatgatcagaactaacgtgagccacgtcgtgggtcagcttgacgatatcagaaaaaacccacgaaaattcgtctgtctgaatgacaatatagaccataatcataaagatgcgcaaactgtgaaggcagtcctgcgagacttctacgagagcatgtttccgatcccatcccagtttgagctccctagagagtacaggaatagatttctgcatatgcacgaactgcaagaatggagagcataccgagacaaactcaagttctggacccattgtgtacttgcaactcttatcatgtttactatctttagctttttcgcagagcagctgatcgccttgaaacgtaagattttccctaggcggagaattcataaggaggcttcaccaaaccgaatccgtgtg

SEQ ID NO: 215035 - DNA, 3768 bp, Artificial Sequence
  derived and/or modified sequence
atgctgtttaagctcctgcagcgccaaacttacacttgtctgtcccatcggtacggcctgtatgtctgtttcttgggcgtggtcgtaactattgtttccgcgttccaattcggtgaagtcgttcttgagtggtcccgcgaccagtaccatgtgctgttcgattcataccgtgacaacatcgcaggcaagtcctttcagaatcgcctatgcttgcctatgcccattgatgtggtgtacacgtgggtgaatggtactgacctggaactgctgaaggagttacagcaggtccgagagcagatggaagaggaacagaaagcaatgcgcgagatccttgggaagaacaccaccgagccaacaaagaagtccgagaagcaactggaatgtctactcacccactgcatcaaggtccccatgttggttctcgatccggctctgcccgccaacatcacgttgaaagacctgcccagcctttacccatccttccattccgcgtcggacatcttcaacgtggccaagccgaagaacccgtctaccaacgtctcggtcgtcgttttcgacagtaccaaggatgtggaggacgctcactccggtctgctcaagggaaattcccgccaaaccgtctggcgcggctacctgaccactgacaaagaagttcctggtctagtcctcatgcaggacctggcgttcctctccggttttccccctacgtttaaggagactaaccaactcaagacgaagctcccggagaacctgtcctcgaaggttaagcttctccagctgtactctgaagctagcgtcgcactcctgaagcttaacaaccccaaagactttcaagagctgaacaagcagaccaagaaaaacatgacgatcgacggaaaggagctaaccattagccctgcatatttactttgggacctgtctgctatctcacaaagcaagcaggacgaggatataagtgcttctaggttcgaggacaatgaggaactccgctatagcttgagaagtatcgaacggcacgcgccatgggtcaggaacatcttcattgtcaccaatggtcagatcccttcgtggctgaatctggacaaccctcgtgttaccatcgtgacccatcaggatgtatttcgcaatctgtcacacctgcctactttctcgtcccctgcgattgaatcccacatccaccgtatcgagggtctctcccagaagtttatctacctgaacgatgacgttatgttcggtaaggacgtctggcccgacgacttctactcccattcgaagggccagaaggtttacttgacctggcccgtgcccaactgcgctgaaggttgcccgggcagctggattaaggacggatactgcgacaaggcctgtaacaattccgcctgcgattgggatggtggagattgcagtggtaactccggtgggtcgcgctatatcgcaggtggaggaggcactggttctatcggagtcggacaaccttggcagttcggtggcggcatcaactccgtctcgtactgcaaccagggttgtgcgaactcatggctggcagataaattctgcgatcaggcttgcaacgtcctgagctgcggcttcgatgctggggactgtggtcaggatcacttccatgaattatacaaggttatcctcctccccaaccagacacactatattatccctaagggagagtgtctgccctactttagcttcgctgaggttgctaaacgtggagtcgaaggcgcttactccgacaatcccatcattcggcacgccagcatcgcaaacaagtggaagaccattcatctgatcatgcattcgggcatgaatgctactactatccatttcaaccttacttttcaaaatacaaacgacgaggagttcaagatgcaaattaccgtcgaggtcgacactagggagggcccaaagcttaattccacagcgcagaagggatacgagaacctagtctcccctattacgcttttgcccgaggcggagattttgttcgaggacatccccaaggagaagcgtttccccaagttcaaacgtcatgatgtcaatagcacccgccgtgcccaggaggaggtgaagatcccccttgtgaacatatcccttctccctaaggatgctcaactttcgctcaacacgcttgatctgcagctcgagcacggtgacatcaccttgaagggatacaacctgtcgaagtccgctctgctgcggtccttcctgatgaactcgcagcacgcaaagatcaaaaatcaagctatcatcacggacgaaactaacgactccctggtcgcccctcaggagaagcaggtgcacaagtccatcctgcccaactccctcggcgtgtctgagcgccttcaacgtttgacctttcccgccgtttccgtaaaggtcaatggccatgaccaggggcagaacccccccctcgacttggagacgacagctcgcttccgtgtcgagactcatacccaaaagaccattgggggcaatgtcaccaaggaaaagcctccgagcctgatcgttccccttgagagtcaaatgaccaaagagaagaagatcaccggcaaagagaaggaaaatagcaggatggaggagaatgcagagaaccatattggcgtcactgaggtgctattgggccgaaagctccagcactataccgattcttacctgggcttcctaccgtgggagaagaagaagtatttccaggacttactggatgaggaggagtccctcaaaacccagctggcctacttcactgattctaagaacacgggaagacaactcaaggatacgttcgccgatagtcttaggtatgttaacaagatcctcaacagcaaattcggcttcacttcccgtaaggtgcctgcccacatgccccacatgattgaccgcatcgtcatgcaggagcttcaggatatgttccccgaggagttcgacaaaacatcgttccataaggtccgtcactctgaggatatgcagttcgccttctcgtacttttactatctgatgtccgccgtccaaccactcaacatctcccaagtgtttgacgaagtcgatactgaccagagcggcgtactgagcgaccgcgagatccggacgttggcgactcgtatccacgagcttcccctaagcctgcaggatctgactgggctcgaacacatgctgatcaactgtagcaagatgttgccagctgatatcacacagcttaacaacatcccacccacacaggagagctactacgatccgaaccttccccccgtgactaagtcccttgtcactaactgcaagcctgtcaccgacaagatccacaaagcctacaaggataagaacaagtaccgatttgagattatgggtgaggaggaaattgcattcaaaatgatccgaactaacgtgtctcatgtggttggccaactggacgatattcgcaagaacccgcgcaagttcgtttgcctcaatgacaacattgatcataaccataaggatgcgcagacggtcaaggccgtgttgcgggatttctacgagtcgatgttccctatcccctcacaatttgagctcccacgagaataccgcaaccgtttcctgcatatgcatgagcttcaggagtggcgcgcttaccgcgacaaacttaagttctggactcattgcgtgctcgctacgttgattatgttcacaatcttctccttttttgccgagcagcttatcgccctgaaaagaaagatcttccctcgtcgccgcatccataaggaggctagcccaaatcggatccgggtc

SEQ ID NO: 215036 - DNA, 3768 bp, Artificial Sequence
  derived and/or modified sequence
atgctgttcaagctcctgcaacgccagacctacacctgcctgtcacacagatatggactttacgtctgcttcttgggagtggtggtgactattgtgtcagcgttccagtttggcgaggtggtgctcgaatggtcgagggaccagtaccatgtcctgttcgattcgtaccgggataacattgccgggaagtccttccagaaccgcctgtgcctgccgatgcctatcgatgtggtctacacctgggtcaacggaactgacctcgagttgctgaaagagctgcagcaagtgcgcgagcagatggaggaggaacagaaggccatgcgcgaaatcttgggaaagaatactactgaaccaactaaaaagtccgaaaaacaactcgaatgcctcctgactcactgcatcaaagtgccgatgctcgtcctcgatccagccctgccagctaatatcaccctcaaggacctgccttccctgtaccctagctttcactcggcgtccgacatcttcaacgtcgcaaaaccgaagaacccatccacgaacgtgagcgtcgtggtgttcgattcgaccaaagatgtggaagatgcccattccggactccttaagggaaactcccgccagactgtgtggaggggatacctgactactgacaaagaggttccaggcttggttctgatgcaggacctggcattcctctcgggattcccgccgaccttcaaggaaaccaaccagctgaaaactaaattgccggaaaacttgtcctcaaaggtgaagctgctgcaactctattccgaggccagcgttgccctgctgaagctcaacaatccgaaggactttcaagaactgaacaaacagaccaagaagaacatgactatcgacgggaaggagctcaccatcagccctgcctacttgctgtgggacctgtcggcaatctctcaatcgaagcaggacgaagatatctcggcttcgcgtttcgaagataacgaggaactgcgctactcgctccgatcaatcgaacggcacgccccgtgggtcagaaacatcttcatcgtgaccaatggccagatccctagctggctgaacctcgacaatcctagggtcaccatcgtcacgcatcaagatgtgttccgcaatctctcccatctgccaacgttctcgtcacccgcgatcgagtcccacatccaccgcatcgaagggctctcccagaaattcatctacctgaatgatgacgtgatgttcggcaaggacgtgtggccggacgatttctattcgcattcgaaggggcagaaggtctacctgacctggccggtgccaaactgtgccgagggatgcccaggttcgtggattaaggacgggtactgcgataaggcttgtaacaattcggcatgtgactgggacggaggggactgctccggcaactcgggtggttcacgctacattgccgggggtggaggaacgggatcgattggcgtgggacagccgtggcagtttgggggagggatcaactccgtctcatactgcaatcagggatgcgctaactcatggctggccgacaaattctgcgaccaagcgtgcaatgtcctgtcgtgcgggttcgacgctggagactgcggtcaggaccacttccacgagctctacaaggtgatcttgctccccaaccaaactcattacatcatccccaaaggagagtgcctgccctacttctccttcgctgaagtggccaagcgcggagtggagggcgcctacagcgataaccctatcattcgccacgcatccattgccaacaagtggaaaactattcacctcatcatgcactccggcatgaacgccactaccatccatttcaacctgacctttcagaacactaatgatgaggagttcaagatgcaaatcacggtcgaagtggacaccagagaggggccaaaactgaactccaccgctcagaagggatacgaaaacctcgtcagcccgatcaccctgctgcccgaagcggagattctgtttgaggatatcccgaaagagaaacggtttccaaagtttaaacgccacgatgtgaattccacccggcgagcacaggaggaagtcaagattccgctcgtgaatatctcacttctgcctaaggacgcccaactgagcctgaatactctcgacctccagcttgagcatggggatatcacccttaaagggtacaacctgtcaaagtcagcactcctgcgctcattcctgatgaattctcaacatgctaagatcaaaaatcaggcgataatcactgatgaaaccaatgactcgctcgtcgcgccgcaggagaagcaggtgcataagagcatcctgcctaactcgctgggcgtttcggaacggcttcagagactgaccttcccggcggtgtcagtcaaggtgaatggccacgatcagggacagaaccctccgctggatctggagactaccgcgcggttccgggtggaaacccacactcaaaagacgatcggtggaaatgtgaccaaggaaaaaccgccgtcattgattgtcccgctcgaatcccagatgactaaggaaaagaagataactggaaaggaaaaagaaaactcgcggatggaagagaacgcggaaaatcacattggtgtgaccgaggtgctcctggggcgcaaactgcaacactacaccgatagctatctgggcttcttgccttgggaaaagaagaagtactttcaagatctccttgatgaagaggaatcgctgaaaacccagctggcgtacttcactgacagcaagaacaccggacgccagctcaaagatacgttcgcagatagcctgcggtatgttaacaagatcctgaattccaagtttgggttcacctcccggaaggtgcccgcccatatgcctcacatgatcgaccggatcgttatgcaagaactccaggacatgttcccggaagaattcgacaagacgagctttcacaaggttcgccattccgaggacatgcaattcgctttttcgtacttctactacctgatgagcgccgtgcaaccgctgaacattagccaggtctttgatgaggtcgacaccgatcaatcaggggtgctgtcggatcgcgagatccgcactttggcaaccagaattcatgagctgcctctttcgctgcaggaccttaccggactggaacacatgttgataaactgttccaagatgctgcctgccgacattacgcaacttaacaacatcccgcccacgcaggagtcgtactacgacccgaacctgccgcctgtcactaagtcgctggtgactaattgcaagcctgtgaccgacaaaatccataaggcttacaaggacaagaataagtacagatttgagatcatgggagaagaggaaatcgcattcaagatgatccgcacgaatgtgagccacgtggtgggacagctggatgacatccgcaagaacccacgcaagttcgtctgtttgaatgacaatatcgaccacaaccacaaggatgcccagaccgtgaaggctgtcttgcgcgacttctacgagagcatgttccctatcccaagccaatttgaactcccgcgagagtaccgaaacagatttctgcacatgcatgaactgcaagaatggagagcttacagagacaagctgaagttctggactcactgtgtgcttgccaccctcatcatgttcaccatcttctcattcttcgcagagcaattgattgcgctgaaacgcaagatctttcctagacgccggatccataaggaggcgagcccgaataggattagagtc

SEQ ID NO: 215037 - DNA, 3768 bp, Artificial Sequence
  derived and/or modified sequence
atgctcttcaagctgctccagagacagacctacacatgtctctcccatcggtatgggctgtacgtgtgtttcttgggggttgttgtgacaatagttagcgcgtttcagttcggggaggtggtgctggagtggagcagggatcaataccacgtgttgttcgacagttacagggataatattgccggcaagtcgttccagaacaggctctgtctccccatgcccatagatgtagtttatacttgggtgaacgggaccgatctggaactgctcaaagagctacagcaggttagggagcaaatggaagaagagcagaaagctatgcgcgagattcttggaaaaaataccaccgagcccacaaagaagtccgaaaaacaattggagtgcctgcttacccattgtatcaaggtgcccatgctagtgctggaccccgccctgcccgcgaacattacactgaaagacctcccatccttgtatccttcttttcacagcgcttctgacatctttaacgtggccaaaccaaagaaccctagcactaacgtgtcagttgtcgtgttcgatagtaccaaggacgtcgaagacgcccattctgggctgcttaagggtaatagtagacaaaccgtatggcgtggttacttgacaacggataaagaggtccccggactcgtcctgatgcaagatctggcttttctgagtgggttcccaccgacctttaaagagaccaaccagctaaaaaccaagctgcccgaaaatttgagcagtaaagttaagttgcttcagctctattcggaggcatctgttgcgcttttaaagctaaacaaccccaaagacttccaggaactgaacaagcagaccaaaaagaacatgacaatagacgggaaagagctcacgatttccccggcgtatctgctgtgggacttgtctgccatttcacagtccaaacaggacgaggatattagcgcctcacgcttcgaggacaatgaagagctgcggtattcactgcgttctatagagcgacacgctccatgggtgaggaatatttttatcgtgacgaacggccagatcccctcttggctgaatctcgacaatccccgcgtcaccatagtaacgcaccaagatgtttttcggaatctatctcaccttccgaccttttcatctcctgcaatcgaatcccacatccaccgaattgaaggtctgtcccagaagtttatctatctcaatgacgatgtgatgtttggaaaggacgtgtggcccgacgacttttacagccacagtaaggggcagaaagtctacctgacttggcctgtccccaactgcgccgaaggttgccccgggagttggattaaagatggatactgcgataaggcatgcaataactcggcatgtgactgggatggcggtgactgtagtggtaattccggagggtctaggtacatcgccggaggcggcggaacaggctccataggcgtagggcaaccctggcagttcggcggtggcatcaactccgtgtcatactgtaaccagggatgtgccaacagctggcttgcagacaagttctgcgatcaggcgtgcaacgtgctgtcttgcgggtttgacgcaggagactgcgggcaggaccacttccacgagctgtataaggttatattgcttccaaaccagactcattacattattcctaagggtgagtgtctaccctacttcagcttcgccgaagtcgccaagcgcggggtagagggggcgtattccgacaacccaatcatcagacacgcttccattgccaacaagtggaagaccatccacctgatcatgcacagtggaatgaatgccaccacaattcatttcaacctaactttccaaaatacaaatgacgaggagtttaaaatgcagattacagtggaagttgacacccgagaggggcccaaattaaattcaaccgcccagaaaggttacgagaacctggtctcaccgattacattgttgccagaagcagagatcctctttgaagatatccctaaagaaaagcggtttcctaaattcaagcggcatgatgtcaattctacgcggagagcacaggaggaggtgaagatcccattggtgaatatctcactccttccaaaggatgcccagctttcacttaatacactggacctacaactggagcacggagacattaccctgaaggggtataacctttcaaaaagtgctttgctacgttcttttcttatgaatagtcaacacgcaaagattaagaatcaggccattatcacagacgagacgaacgatagcctggtggctccacaggaaaagcaggtgcacaaaagtattcttccaaactctctgggtgtcagcgaaaggctgcagcgactgacatttccggcagtgtctgtgaaagtcaacggccatgaccagggacagaaccctcccctggatctagagactaccgccaggtttcgcgtggagactcacacacagaagactataggcgggaatgtgacgaaagagaagcccccctcactgattgtgccactggaatcccagatgacaaaggagaagaagataactggaaaggagaaggagaacagccggatggaggaaaacgccgagaaccatataggagtcaccgaagtccttctgggtcgcaagttgcagcactatactgactcgtacctgggctttctcccatgggagaaaaaaaagtatttccaggacttgttagacgaagaagagtccctgaagactcagctcgcctatttcaccgacagcaagaacaccggaagacagcttaaagatacattcgccgatagtctccgctacgtcaacaaaatcctgaattctaaatttggttttaccagtagaaaagtgccagcccacatgccgcacatgatcgatagaatagtgatgcaggaactgcaggatatgtttcctgaagagttcgacaagacatccttccataaggtgagacacagtgaggacatgcagttcgcctttagctatttctattatttaatgagcgccgtgcagccactgaatataagccaggtttttgacgaggtcgacaccgaccaaagtggggttctgtctgatagagagatccgaaccctggccacgcgaattcacgagctcccattgtccctccaagaccttacgggacttgaacatatgctgattaactgttcgaagatgctgcctgcagacatcacccaactgaacaacattccaccaacgcaggaatcctattacgaccctaacctcccccccgtcactaagagtctggtgaccaactgcaaacctgtgaccgataagatccacaaagcatacaaagacaagaataagtacagatttgagatcatgggcgaggaggaaattgcttttaagatgatccgaaccaatgtcagccacgtggttggccagctggacgatattcggaagaacccccgcaagtttgtgtgcctgaacgacaatattgaccacaaccacaaggacgcgcagaccgtaaaagccgtgctgcgcgatttttacgagtcgatgtttccaatcccatcccaatttgagctgccccgtgagtaccgcaataggttcctgcatatgcatgaattacaggaatggcgtgcttaccgcgacaaattgaagttttggacccactgtgtcctggccacactcatcatgtttaccatcttttctttcttcgcagaacagctcatcgcacttaagagaaaaatcttcccccgcaggagaatccacaaggaagcttcgcctaacaggatcagggtt

SEQ ID NO: 215038 - DNA, 3768 bp, Artificial Sequence
  derived and/or modified sequence
atgctgttcaagctgctgcaacggcaaacgtacacgtgtttgagccataggtacggtctgtacgtctgttttctcggtgtggtggtgaccatcgtctccgcatttcaattcggcgaagtggtgctggagtggtcgcgcgatcaataccacgtcctgtttgatagctaccgtgataacatcgccggcaagagctttcagaaccggctgtgcctcccaatgccgatcgatgtcgtgtacacctgggtcaatggcactgatctggagcttcttaaagaacttcagcaggtccgcgaacagatggaagaagaacagaaggcaatgcgtgagatacttggtaagaacaccactgaaccgaccaagaagtcggaaaaacagctcgaatgcttgctgactcactgtattaaggtgccaatgctggtgctggatccggcgcttcccgcaaacatcactttgaaggatctgccaagcctgtacccttcgtttcactccgcttccgacattttcaacgtcgccaagccaaaaaacccttctaccaacgtttcggtggtcgtgtttgattccaccaaggacgtggaggacgcgcactcgggactccttaaagggaattcccggcaaaccgtctggcggggataccttacgacggataaagaagtgcctggactggttcttatgcaggatcttgcatttctttcgggatttcccccgacctttaaggaaactaatcaactgaaaaccaaacttccggaaaatctgtccagcaaggtgaagctgctccagctttacagcgaagcctccgtcgcgcttctcaaactgaacaaccccaaggactttcaagagttgaataagcaaacgaagaaaaacatgactatcgacggtaaggaactcactatttcgcctgcataccttttgtgggatctttcggcaatctcgcagagcaaacaggatgaagatatctcggctagccgctttgaagataacgaagagttgagatactcgttgagatcgatagaacggcatgcaccgtgggtgagaaacatctttatcgtgactaacggtcagattccatcatggctcaatcttgacaaccctcgcgttaccattgtcacccaccaggacgtgttcaggaacctttcacatctccccacgttctcctcccccgcaattgaaagccatattcatcgcatcgaaggcctttcgcaaaagtttatctaccttaatgatgacgtgatgtttggaaaagatgtgtggcctgatgatttctattctcatagcaagggacagaaggtgtaccttacttggccagtgcctaactgcgcagaaggttgtccaggttcatggatcaaggacggttactgtgacaaggcctgtaacaacagcgcatgtgattgggatggaggagattgctcggggaactcgggaggctcacgctacatagccggaggaggcggaactggctccataggtgtcggtcaaccctggcagttcggaggaggaattaactccgtgtcgtactgcaatcagggatgtgccaactcatggctggcagacaagttttgcgaccaagcatgcaatgtgctgagctgcgggttcgacgcaggtgattgcggacaagatcacttccacgaactgtataaggtgatactgctgcctaatcaaacccattacataattccgaagggggaatgtctcccgtacttttcctttgcagaagtggccaagcgcggagtggagggggcatacagcgataatccaattatccgccatgcctcgattgccaacaagtggaaaaccattcatctgatcatgcactcaggtatgaatgcaaccactattcacttcaacctgacgtttcaaaacaccaatgatgaggagtttaagatgcaaataactgtcgaagtcgacacccgcgaaggaccgaaactcaattcaactgcacagaagggttacgagaatctggtgtcgccgattaccctcctgccagaggcagagattctcttcgaggatattccaaaggagaaacgctttcctaaattcaaacgccatgatgtgaactcgacccgccgtgcacaagaagaggtgaagattccgcttgtgaacatctctctcctccccaaggacgcgcaactttccttgaatactttggacctgcagctggaacatggagatattaccttgaaggggtacaacctttcgaaatcagcgctccttcggagctttctcatgaactcgcaacatgcaaagattaagaatcaggctattatcaccgacgaaaccaacgatagcctggtcgcgcctcaggagaaacaagtccataaaagcatcctgcccaacagcctcggggtgtcggagcgactgcagcgactgacctttcccgcagtgtccgtgaaggtcaacgggcatgaccaaggacaaaatcctcccttggatctggaaactactgccagattccgcgtggaaacccacacccaaaaaactataggcggcaatgttactaaggaaaaacctccatccttgatcgtgcctcttgagagccaaatgactaaagaaaagaagataacgggaaaggaaaaggaaaactcccgtatggaagaaaacgcagagaatcacatcggagtgactgaggttctgctgggacgtaagctccagcactacactgattcctacctcggattcctcccttgggagaagaagaagtattttcaagatttgcttgatgaagaagagtcacttaaaacccagcttgcgtactttaccgattcgaagaacacggggcgtcaactgaaggatacttttgcagattccctccggtatgtcaacaagattctgaacagcaagtttggattcacttccagaaaggtgccagcgcacatgccacacatgatcgatagaattgtgatgcaggaactccaggacatgtttccagaggagtttgataaaacttcctttcacaaggtgaggcattccgaggatatgcaattcgctttttcgtacttctactaccttatgtcagctgtccaaccattgaacataagccaggtgtttgacgaggtcgacaccgaccaatcaggtgtgctttcggaccgggaaatacgaacccttgccactagaatacacgagctccctctgtcactccaagaccttacgggtctggaacatatgctgataaactgttcaaaaatgttgccagcggacattactcagctgaataacatccctcctactcaagaatcctactacgaccctaacctgcctcctgtgaccaagtcgctggtcactaattgtaagcctgtcaccgataagattcataaagcatacaaggacaagaacaagtacaggtttgagattatgggtgaagaagagatcgctttcaaaatgatcagaactaatgtgtcacacgtcgtgggccagctggacgatattagaaagaatcctcgaaagtttgtgtgtctcaatgataacattgaccataaccataaagacgcacagaccgtgaaagcagttctgagagacttctacgaaagcatgttccctatcccgtcccaatttgaactgccaagagaatacagaaatagatttctgcatatgcatgaacttcaggagtggagggcatatcgggataagttgaagttttggacgcactgcgttctggcaacgctgataatgttcaccatcttctcgttctttgccgaacaactcattgcactcaaacgtaaaatcttccccagaagaaggatccataaagaggcatcgccaaatcgcatccgtgtg

SEQ ID NO: 215039 - DNA, 3768 bp, Artificial Sequence
  derived and/or modified sequence
atgctgttcaaactcctgcaaagacagacctacacttgtttgtcgcaccggtacggactgtacgtgtgctttcttggggtcgtggtgaccatcgtgtcagccttccaatttggtgaagtggttctcgagtggtcccgtgaccaataccacgtgctcttcgactcgtaccgagacaatatcgccggaaagtccttccaaaacaggctgtgtctgcctatgccaattgacgttgtgtacacttgggtgaatggaaccgatctggaactgctgaaggaactgcaacaagtgagagagcagatggaagaagagcagaaagcgatgcgagaaatcctcggaaagaacactactgaaccgactaagaaatccgaaaagcaactcgaatgcctcctcacgcactgcatcaaggtgcctatgctcgtcctggatccagctcttcctgcaaacatcactctgaaggacctgccatcactctacccgtccttccacagcgcatcagatatcttcaatgtggcaaagccgaagaacccatcgacgaatgtgtcagtggttgtgttcgattcgacgaaagatgtggaggatgcccattccggcctcttgaaaggaaattcccgccaaactgtctggcgcggataccttaccaccgacaaagaggtgccggggctggtcttgatgcaagacttggccttcctgtcgggtttcccaccaaccttcaaagaaactaaccaactgaaaaccaagctgccggaaaatctgtcctctaaggttaaactgttgcaactctactccgaggcttcggtggctctcctgaaactgaacaatcctaaagacttccaagagctgaacaagcagacgaaaaagaatatgaccatcgacggaaaggaattgaccatctcgcctgcgtacctcctctgggacctttccgcgatctcccagtcaaagcaggatgaggacatctccgcatcgcggttcgaagataatgaagaactgagatactccctgcgctccatcgagcggcatgctccatgggtgcgcaacatctttatcgtgaccaacggccagatcccatcgtggttgaacttggacaacccacgggtcactatcgtgactcaccaggacgtctttcgcaatctgagccatctcccaactttctcctcgccggccattgaaagccacatccatagaatcgaagggctctcgcagaagtttatctacctcaatgacgacgtgatgttcggaaaggatgtgtggccggatgacttttacagccattcgaagggacagaaggtgtacctcacttggccggtgccgaactgcgctgaggggtgccccggctcgtggatcaaagatgggtactgtgataaggcgtgcaacaattcagcgtgcgactgggacggaggagattgctccgggaacagcggaggctcgcgttacatagctggaggcggagggactggctcaatcggagtgggccagccgtggcagttcggtggagggattaactctgtgtcgtactgcaaccaaggatgcgccaattcatggctcgccgacaaattctgtgaccaggcttgcaacgtgttgtcgtgcggtttcgatgcaggcgactgtggacaagaccacttccatgaattgtacaaggtgattctgctgccgaaccaaactcactacattatcccaaaaggagaatgcctgccttacttcagcttcgccgaagtcgccaaacgcggagtggagggtgcatactccgataatcccatcatccgccacgcgtccatcgccaacaagtggaaaacgatccacttgatcatgcacagcggtatgaatgcaactaccatccacttcaatctgacgttccagaacaccaacgacgaggagtttaagatgcagatcactgtcgaggtcgacactcgcgaaggcccgaaattgaattccactgcacaaaaggggtacgagaatctcgtctcgcctattaccctgctgcccgaagcagaaatcctgttcgaggacattcccaaggagaagagattccctaagtttaagaggcacgacgtgaattcgacccggcgcgcgcaggaggaagttaagatcccgctggtcaacatctctctgctgccaaaagacgcacaactgagcctcaacaccttggatctccaacttgagcatggtgacatcaccctgaagggatacaacctgtccaagtcggcactcctgcgcagctttctcatgaatagccagcacgccaagatcaagaaccaggctatcatcaccgacgagactaatgactcgctcgtggctccgcaggaaaagcaagtgcacaaatctatcctgccgaacagcctgggagtgtcggagagactgcaacgcctgaccttccctgcagtgtcggtcaaggtcaacggacacgatcaaggacaaaacccgcctctcgacctggaaactaccgcgcgcttccgggttgaaacgcatacccagaaaactatcgggggcaacgttaccaaggagaagccgccgtcgctcatcgtgccactggaaagccaaatgacgaaggagaagaagatcaccggaaaagagaaggaaaattccagaatggaagagaacgccgagaaccacataggtgtgactgaggtgctgctgggcagaaaactccagcattacaccgacagttacctgggatttctgccttgggagaagaagaaatacttccaggacctgctggacgaagaagaatccttgaaaactcagttggcgtatttcactgactcgaaaaacaccggtcggcaactcaaggacaccttcgctgactcgctgaggtacgtgaacaaaatcctcaattcaaagtttggattcacttcaaggaaggttccggcccacatgccacatatgattgatcggatcgtgatgcaggaactccaggacatgtttcctgaggaatttgataaaacctccttccacaaggtgagacatagcgaggatatgcaattcgctttctcgtatttctactacctcatgtcggctgtgcaaccgctgaacatttcccaggtattcgacgaggtcgatactgaccagagcggagtgctgtcggatagagagatcagaaccctggctacccgcatccatgagctgccactttcgctgcaggacctcaccggactcgagcatatgctgatcaattgctccaagatgctgccagcagatatcacccaactcaacaatatcccgccgacccaagagtcgtactatgacccgaatctgccgcctgtgactaagtcgctggtcacgaattgcaaaccagtgaccgacaagatccacaaggcgtacaaagataagaacaagtatagattcgaaatcatgggagaagaggaaattgccttcaaaatgatccgcactaacgtgtcgcatgtggtgggacagcttgatgacattagaaagaacccacggaaatttgtatgcctgaacgataacatcgatcacaaccataaggacgcgcagactgtgaaggccgtgctgcgcgatttctatgagtccatgttccccatccctagtcagtttgaactcccccgcgaatataggaatcgcttcctgcacatgcacgaactccaggagtggcgcgcatacagggataagctgaagttctggacccattgcgtgctggccaccttgatcatgttcacgatcttctccttcttcgccgaacagctgatcgcactcaagaggaagatattccctcggcggcggatccacaaggaagcctctccaaataggatccgggtt

SEQ ID NO: 215040 - DNA, 3768 bp, Artificial Sequence
  derived and/or modified sequence
atgctcttcaaactgctgcagcggcaaacctacacctgcctgtcccaccggtacggactgtacgtgtgcttcctgggagtcgtggttaccatagtcagtgccttccagttcggcgaagtggtgttggagtggtccagagatcagtatcatgtattgtttgactcctaccgggataacatcgccgggaagagtttccagaatcggctgtgcctgcctatgcctattgacgtggtttacacttgggtgaacggaaccgatctcgaactcctcaaagaactgcagcaggtcagagaacagatggaggaggaacagaaagcaatgcgagagatactggggaagaatacaacggagccgaccaagaaatccgagaaacagctggagtgtctgctgacacactgcatcaaggtcccaatgctggtgttggacccagcactgccagccaatataacacttaaggacctgccatcactgtaccccagcttccactctgcgagcgatatctttaatgtggccaaacccaagaatccatccaccaacgtgtccgttgttgtcttcgacagtaccaaagatgtcgaggatgctcacagtggactgttgaagggtaattcacggcaaacagtgtggcgcggatacttgaccacggacaaagaggttcctggcctggtactcatgcaggacttggcttttctctctgggttccctcctacctttaaggaaacgaatcagcttaagaccaaacttccggaaaacctctcatccaaagtaaagcttctccagctgtacagcgaggctagcgtagcgctcctgaaacttaataatcccaaagatttccaggagctgaataagcaaaccaaaaaaaatatgaccatcgatggcaaggaactgaccatctcccctgcgtatcttctgtgggacctgagcgctattagtcaatctaaacaggacgaggatatcagcgcatcacggttcgaggacaatgaggagctgcggtattccctcaggagtatagagagacacgcgccttgggttcgaaatattttcattgtcacgaacggacagatcccttcctggcttaatctggataaccccagggtgaccattgtgacccatcaggatgtgttcaggaacctttctcatctcccaacttttagctcacccgccatagaatcccacatacaccggattgagggtctctcacagaaatttatataccttaacgatgatgttatgtttggcaaagacgtgtggcccgacgacttttactctcacagcaaaggtcagaaggtgtatctgacctggcccgtgcccaattgcgctgaagggtgccctggaagttggatcaaggatggctattgcgataaagcctgtaacaattcagcttgcgactgggatggtggagattgtagtggcaatagtggtggctctcggtacatagccggcggcgggggcactggctctattggtgttggccagccttggcagttcggggggggaattaattcagtgtcatactgcaatcagggatgtgctaactcatggctcgcagataagttttgtgatcaagcgtgcaacgtgctgagttgcggatttgacgcgggtgattgtggccaggaccattttcacgagctttacaaggttatcctgcttccgaaccagacccattatatcatccctaagggcgagtgccttccctactttagttttgctgaagtggctaaacgcggagtggagggcgcctactctgacaatccaataattcgccatgcctccattgcgaacaaatggaagacaatccatcttatcatgcactcaggaatgaacgctacaaccattcactttaacctgacatttcagaataccaatgacgaggagtttaagatgcaaatcaccgtcgaagtggacacaagagagggcccaaagttgaactctactgcccagaaaggatacgagaacttggtctcccccataaccctgctgccagaggctgagatcctgtttgaggacatacccaaggaaaagaggttccctaagtttaaaagacacgacgtgaattcaactcgaagagctcaggaagaagtcaagattcccctggtcaacatctctctgctccccaaagatgcccagctgagtctgaataccctcgacctccagcttgagcatggagatatcacactgaaaggatacaacttgagcaaatccgctctgctgcggtctttcctgatgaactcccaacacgccaagatcaaaaatcaggctattatcacagacgaaaccaatgattctctggtggcccctcaggagaaacaggtccataaaagcattctgcccaattcactgggagtcagcgaaagactgcaacggctcactttcccagcagtctcagtcaaggtgaacggccatgatcaaggtcagaacccccccttggatctggagacgacagcgcgctttcgagtggagactcacactcagaaaacgatcggggggaacgttacaaaggagaagcccccaagcctgatcgtccctcttgagtcacagatgactaaagaaaagaaaatcaccggaaaggaaaaagaaaactccagaatggaggaaaacgccgagaatcatattggcgtaacagaggttcttctgggccgcaagctgcagcattacacagactcctacctcggttttctgccatgggagaaaaagaaatactttcaggacttgctcgacgaggaggagagcctcaagactcagttggcgtactttaccgatagtaagaacacaggtcgccagctgaaggatactttcgccgacagcttgcgctatgtcaacaaaatcctcaatagcaaattcggctttactagcaggaaagtgccggcacatatgccgcacatgatcgaccggatagtgatgcaggagcttcaggatatgtttcctgaagagttcgataaaaccagctttcacaaagtcaggcattccgaagatatgcagtttgcgttctcatacttttattacctgatgagtgccgttcagcccctcaacatttcccaagtctttgacgaggtcgacacagatcagtcaggggtgctgagcgatcgcgagattaggactcttgccacacggattcacgagctccctctgagcctgcaagacctgacagggctcgaacacatgctgattaactgttccaagatgctgccagcggacatcactcagctcaataatattccccctacccaagaaagctattatgaccctaatttgccgcccgttaccaagagcctggtgactaattgtaaaccggtgaccgataaaattcacaaagcctataaggacaagaataagtaccgctttgaaatcatgggcgaagaggagattgcattcaagatgattagaaccaacgtgtcccacgttgtgggacagctggacgatatacgaaaaaaccctcgcaagttcgtatgtttgaatgacaacatcgaccacaatcacaaagacgcccagacagtaaaagcggttctccgagacttctacgaaagcatgttccccattccttcacagttcgagctccctcgagaataccggaatcgatttctgcatatgcacgagctccaggagtggagagcctaccgggacaaactcaagttctggacacattgtgttctggccacactgataatgtttacaattttctctttttttgccgagcagttgatagcccttaagcgcaaaatctttcccaggaggcggatccacaaagaggcctctccgaaccggattagagtt

SEQ ID NO: 215041 - DNA, 3768 bp, Artificial Sequence
  derived and/or modified sequence
atgctttttaagttgcttcagcgtcagacgtacacttgccttagccatcggtacggtctttacgtgtgctttcttggcgtggtagttaccatagtgtcagcatttcagttcggagaggtcgtgctggagtggtcaagagatcagtatcatgtgctttttgatagctatcgggacaatatagcagggaagagttttcaaaaccggctgtgtctgcctatgccaattgacgtcgtgtatacttgggtaaatggaacggatttagaactcctgaaggagttgcagcaggtgagggagcagatggaggaggagcaaaaggcgatgagggaaatcctggggaagaatactacagagcccactaaaaaatcggagaagcaactggaatgcctgctcacgcattgtatcaaggttcccatgctggtgttagatccagcgctgcctgctaacatcacacttaaggacctacctagtttgtacccaagcttccattctgccagcgatattttcaacgtggccaaacccaaaaatccttcgactaacgtctctgtggtggtgttcgactccactaaggacgttgaggacgcccacagtgggctgttgaagggcaacagccgtcagacagtatggcgcggatacctaacgaccgacaaggaagtgcctggtcttgtgctgatgcaagatttggcctttctcagcggattccctcctacatttaaagaaactaaccaacttaagaccaaactccctgaaaatctgagtagtaaggtgaagctccttcagctctattcggaggcttccgtggcgttgctgaagttaaataacccaaaggacttccaggagcttaataagcaaacaaagaaaaacatgactattgatggaaaggaactaaccatatcaccagcctacctcctttgggatcttagcgcaattagccagagcaagcaggacgaagacattagtgcctcaagattcgaggacaacgaggaactgcggtacagtctgagatccatcgagcggcatgcgccttgggttcgaaacatttttattgtgactaatgggcagataccgagttggctgaatctggacaatccacgggtgaccatcgttacacatcaggatgtgtttcgaaacctttcacatctcccaacgttcagctctcccgccattgagagtcatattcataggatcgaggggctcagccagaaatttatatatcttaatgatgatgtgatgttcggcaaagacgtgtggcccgacgacttttattcacacagtaaaggccaaaaagtgtaccttacatggccggtgcccaattgcgcagaaggctgtcccggctcgtggattaaggacggatattgcgacaaggcctgtaacaattcagcgtgcgactgggacggaggcgactgctcaggaaactctggcggatcccgttacatcgcgggtggtggtggcacagggtctatcggcgtggggcagccctggcagtttggcggtggcattaactcagtctcgtattgtaatcagggttgcgcaaactcctggctggccgataaattctgcgatcaggcctgcaatgtgttatcttgcggcttcgacgccggggattgtggccaggaccattttcacgaactctataaggtgattttgctgcccaaccagacacattacatcatccccaagggagaatgcctgccctacttcagttttgccgaggtcgccaagagaggagtagagggcgcatactcagataaccccatcatacgtcacgcaagcatcgccaacaaatggaagaccattcatttgattatgcacagtggtatgaatgcgacaacaatccattttaatctaacttttcagaacactaatgacgaagaatttaaaatgcagatcactgtcgaggttgataccagagaagggcccaaactcaatagtactgctcaaaaggggtacgaaaatcttgtgtctccaattacgctactgcccgaggctgaaatcctcttcgaggacatccccaaagagaagcgatttccaaagttcaagagacacgatgtgaactcaacaagacgggctcaggaagaggttaaaatcccactggttaatatctccctgcttcccaaggacgcacagctgtccctgaataccctggatttgcagctggagcacggggatatcactttgaagggctataatctcagcaagtcagccttgctgagatcgttcctgatgaatagccagcacgccaagataaaaaatcaagctattatcaccgatgagacgaacgacagtctggtcgccccacaggagaagcaggtgcacaaatccatcctgcccaattctttgggggtctcagaacggctgcaacgactgacgtttccggcagttagtgtcaaggtgaatggccacgaccaaggacagaacccaccactggatttggagactacagctcggtttcgggtcgagacccacactcaaaaaacgatcggcggcaatgttactaaagagaaaccgccatccctcatcgttccacttgagtctcagatgaccaaggagaagaaaatcactggaaaagaaaaagagaacagccgcatggaagaaaacgccgagaatcatatcggggtcaccgaagtcctgttaggaagaaagctgcagcattacaccgattcctatttaggctttctgccctgggagaagaaaaagtattttcaggaccttttagacgaagaggaatctcttaagacccaactcgcgtattttacggactcaaagaacactgggcgccagctgaaggatacatttgccgattctttacgttacgtgaataaaattctgaattcaaaatttggtttcacaagcaggaaagtccctgcacacatgcctcatatgatcgatcgaattgtcatgcaggaactgcaggacatgtttccagaagagtttgataaaaccagctttcacaaggtgaggcatagcgaggacatgcaattcgccttctcatatttctattatctgatgtccgccgtccaacccttgaatatcagccaggtgttcgacgaagtggacaccgatcaatctggggtgctatccgaccgcgagattcgcaccctggccaccagaattcacgaattacctctatccctacaagatctgacaggcctagaacatatgctaatcaactgtagtaaaatgctgccggcggacattacacagctaaataacattccgccaactcaagaaagctactatgatcccaacctcccacccgttacgaagtcgctagtgacaaactgtaaaccagttaccgataaaatccataaagcctataaggataagaacaagtatcggttcgagattatgggcgaagaagagatcgctttcaagatgattcgcactaacgttagccacgtggtggggcagctcgacgatattagaaaaaaccctcgcaagttcgtctgtcttaatgataatatcgaccataaccataaggacgctcagactgtgaaagccgtgctgcgggatttctacgagtccatgtttcccataccttcccagttcgaactgcctcgagagtacagaaacaggttcttgcatatgcacgagcttcaagagtggagagcttatagggataagctcaagttctggacacactgcgtgctggctacccttattatgttcaccattttttctttctttgccgagcagctgatagctttgaaacgaaaaatcttccccagaaggagaatccataaggaggcatctcccaaccgtatcagagtg

SEQ ID NO: 215042 - DNA, 3768 bp, Artificial Sequence
  derived and/or modified sequence
atgttgttcaaacttttacaacgacaaacctatacttgcttgagtcaccgatacggtctatacgtttgcttcttgggagtagttgtgactattgtttctgcattccagttcggagaagtggtgctagaatggtcacgtgaccaatatcatgttttgtttgattcctatcgggataatatcgctggaaagtcgttccaaaatagattatgtttacctatgccgattgatgtggtctatacatgggtaaatggaaccgatcttgaattactcaaagaattacaacaggtacgtgagcaaatggaagaagaacagaaggctatgcgtgagatcctgggaaaaaatactacagaaccgactaagaaaagcgaaaaacaacttgaatgcttgttaacgcattgtataaaagtgccaatgttggtccttgatcctgcactcccggctaatataactcttaaagatcttccatcactatatccatcattccattcggcctcagacattttcaatgtggcaaaaccaaagaacccttctaccaatgtgtccgttgtggtgtttgattcaacgaaggatgtggaagacgcacattcagggcttcttaagggaaatagccgtcaaacggtttggagaggttatcttaccacggataaagaagtgcctggactggtgcttatgcaagacttggcttttttatcgggatttccgccaacatttaaagagactaaccaattaaaaacgaagttgccagaaaatctgtcatctaaagtaaaattgcttcaattatactccgaggcttcagtggctttgctgaaattgaacaatccaaaagactttcaagagttgaataaacaaacaaaaaagaatatgacgatcgacggtaaggaacttacaataagtccagcttatcttttgtgggatctatctgcaatctctcagtctaaacaagatgaagatatatctgcgagcagattcgaagataatgaggaactccgctattccctcagatctatcgaacgccacgctccctgggttaggaacatttttattgtaactaacggtcagatcccctcatggttaaatctagataatccacgagtcacaattgtaactcaccaagatgttttcaggaatctgtcacatctccctacgttttcgtcaccggcaatagagtctcatattcatcgtattgaaggactgtctcagaagttcatttatttgaacgatgatgttatgttcggtaaggatgtatggccagatgacttctatagtcactcaaagggccaaaaagtttacttgacttggccagtccctaattgtgcagaggggtgcccggggagctggattaaggatggatattgtgataaggcatgcaataatagtgcctgtgactgggatggcggagattgctcgggaaattccggaggaagccgatacatcgctggaggcggaggaacgggttctatcggagtgggtcagccatggcaatttggaggtggaattaatagcgtgtcttattgtaatcaaggttgtgctaattcttggctcgctgacaaattctgcgaccaagcatgtaatgtgctatcgtgtggtttcgatgccggtgattgtggacaagatcattttcatgagttgtacaaggttattctactcccaaatcagactcattacatcattccaaagggagaatgcttaccctatttctcgtttgctgaagttgcaaagcggggagtagagggagcctatagcgataatccaattatacgccatgcttctattgccaacaaatggaagacaatacacctcataatgcattcaggaatgaacgcgacaactatccattttaatttgacgttccaaaatactaacgacgaggaattcaaaatgcagatcactgttgaagttgacacacgtgagggaccgaagttgaattcaacggctcaaaaaggatacgagaacttggtgtctcctattacattgttgccagaggctgagatcctattcgaagacattcctaaagagaaaagattcccaaaatttaaacgacacgatgtcaattccactaggcgcgcccaggaagaagtcaaaattccactcgtcaatatttccctcctcccaaaagatgctcaactcagcctgaatacactcgatttgcaacttgagcacggcgatattacactgaagggttataatctttcaaagtcggcattgcttaggtcattcttgatgaattctcaacatgctaagatcaagaatcaagcaattataaccgatgaaacaaacgactcacttgtcgctccacaggagaagcaagtacataagtccattcttccaaattcattaggagtcagcgaacgtctacaacgtttgaccttcccagctgtgtcagtaaaagtaaacggacatgatcaaggacaaaatccaccactcgatcttgaaacaaccgcaagatttcgtgttgagactcatactcagaagacaatcggtggaaacgtcacaaaagagaaaccgccaagccttatagtaccacttgagtcgcagatgactaaagaaaaaaaaattacgggaaaagaaaaggaaaactcgcgtatggaggagaacgccgagaatcatatcggtgtaactgaagttcttttgggtagaaagctacaacactatacagatagttacttaggatttttgccatgggaaaaaaagaaatactttcaagatttgttagacgaggaagagtcattgaaaacacaacttgcatattttactgactcaaaaaatacaggacgtcaactgaaggatactttcgccgattcactaagatatgttaataagatcttaaactcaaagttcggatttaccagcagaaaagttccagctcacatgccccacatgattgatagaatcgttatgcaggaattgcaagatatgtttccggaagaatttgataaaacttcattccataaggttaggcattcggaagatatgcaatttgcattctcatacttttactaccttatgtcggcagtgcaaccgctaaacatcagtcaggttttcgatgaggttgataccgatcagagcggtgtgctctctgacagggagatcaggactttggcgactcggatccacgaactcccattgagtttgcaagatttgactggattggaacatatgttaattaattgcagtaagatgttgccagcggacattacacaactcaacaatatcccacccacacaagagagctactatgacccgaatctgccacctgtaactaaatcattagttacaaattgtaagccagtgaccgataaaattcataaggcatataaagacaagaataaatatagatttgaaattatgggagaagaagagatcgcattcaaaatgattcgcactaatgtttcgcatgtcgttggacagctcgatgacattaggaaaaatcctcgcaagttcgtttgtctaaatgacaatattgatcataatcacaaggacgctcagacagtaaaagcagttctgcgagacttctatgaatctatgtttccgatcccaagtcaattcgaactcccacgagaatataggaatcgctttcttcatatgcatgagcttcaggagtggcgtgcttatcgagacaagttaaaattttggacgcattgtgtcctggccaccttgattatgtttactattttctcgttcttcgctgaacaattgatcgcactgaaacgaaagatttttccacgaaggagaatccacaaggaagcgtctccgaaccgtattcgagtt

SEQ ID NO: 215043 - DNA, 3768 bp, Artificial Sequence
  derived and/or modified sequence
atgctgttcaagctgctgcaaagacagacctacacgtgtctgtcccatcgatacggcctgtacgtgtgctttttgggagtggtcgtcactatcgtgtccgcctttcaattcggagaagtcgtgttggaatggtcccgtgatcagtaccacgtgctgtttgactcgtaccgcgacaacatcgctggaaagtcattccaaaaccgcctgtgcttgccgatgccaattgatgttgtgtatacttgggtgaacggaaccgacctcgaactgctcaaagaacttcaacaggtgagagagcagatggaggaagaacagaaggcgatgcgggagatcctggggaagaataccactgagccgaccaagaagtctgagaagcaacttgaatgcttgctgacccattgtatcaaggtgccgatgctcgtgctggaccctgcgctcccagcgaatatcactctgaaggatctgccaagcctctacccgtctttccactccgcctcagacattttcaacgtcgctaaacctaagaatccgagtacgaacgtcagcgtggtggtgttcgactcaaccaaggatgtggaggacgctcacagcggccttctgaagggaaatagcaggcagaccgtgtggcggggatatctgaccactgacaaagaagtgcctggcctcgttctgatgcaagacttggcattcctgtccggctttcctccaacttttaaggagactaatcagctgaaaaccaagctgccagaaaacctctccagcaaggtgaaactgctccagctgtacagcgaagcctcggtggcgttgctcaaactgaacaatccgaaagactttcaggagctgaacaagcagactaaaaagaacatgactatcgacggcaaggaattgaccatctcgccggcctacctgttgtgggacctctccgcgatctcgcagtccaagcaggacgaggacatctcagcgtcccgcttcgaggacaatgaggaactccgctacagccttagaagcattgaaaggcacgcaccgtgggtccgaaacatcttcatcgtaaccaacggccagatcccgtcctggctcaatttggacaacccgagagtcaccatcgtcactcaccaggatgtctttcgaaacctctcgcatctcccgaccttctcctcacctgccatcgaatcacacatccatagaatcgagggactctcccaaaagttcatctacctcaatgatgacgtcatgttcggaaaagacgtgtggcctgacgatttctattcccactcgaagggacagaaagtgtacctgacttggccggtcccgaactgcgcggaaggatgccccggttcgtggattaaggatggatactgcgacaaagcctgcaacaattcggcctgcgactgggacggtggagactgctcaggcaattcaggaggatcccgctacatcgctggcggcggaggaacgggttcaattggtgtggggcagccttggcagttcgggggagggatcaactccgtttcttactgcaaccaaggctgcgcgaattcgtggcttgccgacaagttctgcgaccaagcctgtaacgtgctgtcatgcggattcgacgcgggcgattgcgggcaggatcacttccatgaactctacaaggtcattctgctgcctaaccagactcattacatcatcccgaagggagagtgtttgccgtacttttcctttgctgaagtggcaaagcgcggcgtagaaggagcctacagcgataaccccatcatccggcatgcttcgatcgctaacaagtggaaaaccatccacctgatcatgcattccggcatgaacgccaccaccatccatttcaatctgaccttccaaaataccaacgacgaagaattcaagatgcaaatcaccgtcgaagtggatacccgcgagggacctaagctgaatagcactgcacagaagggatacgaaaacctggtgtcaccgatcaccctgctgccggaagcggaaatcctgttcgaagatattccaaaggaaaagaggttcccgaagtttaagcgccatgacgtgaactcgactagacgggcgcaggaggaagtgaaaatcccgctggtcaacatctcgcttcttccaaaggacgcccaactcagtctgaataccctcgatctgcagctggagcacggagacatcacgctgaagggttacaacctgtccaagtcagcgctccttagatccttcctgatgaactcgcaacatgccaagatcaagaatcaggcgatcattactgatgaaacgaacgactcgctcgtcgctccacaagaaaagcaagtgcacaaatcgatcttgccaaatagcttgggtgtctccgagaggctgcaacggctgacttttcccgccgtctccgtgaaggtcaatggacatgatcagggacaaaatccgccgttggacctggaaaccaccgcgcgcttcagagtcgaaacccacactcaaaagaccatcggcggaaacgtgaccaaggaaaagccacccagcctgatcgtgcctctggaatcacaaatgactaaggagaaaaagatcacgggcaaggaaaaagaaaattctaggatggaggaaaacgcggaaaatcatatcggagtgactgaggtgctcctgggacgcaagctccaacattacactgactcgtacctgggattcctgccgtgggagaagaaaaagtacttccaagacctccttgacgaagaagagtctctcaaaacccagctcgcctactttactgacagcaagaacacgggacgccagttgaaggacacctttgcagattcacttaggtacgtgaacaagatcctcaattccaagttcggatttacttcccggaaggtcccagcccacatgccgcacatgatcgaccgcatcgtcatgcaggaactgcaagacatgttccctgaggagtttgacaagactagcttccacaaagtccggcatagcgaggacatgcagtttgccttctcgtacttctattacctcatgtccgcagtgcagcctctgaacatctcacaagtgttcgatgaggtggacactgaccaatctggagtcctctccgaccgagaaatccggactctggcaacccggatccatgagctgcccctgtccctgcaggacctgaccggattggagcacatgctgatcaattgctcgaagatgctccccgcagatatcacccaactgaacaacatcccaccgactcaggagtcctactacgacccaaatctcccgccggtgactaagtcgctggtgactaattgtaagccggtaaccgacaagatccataaggcgtacaaagacaagaacaagtaccgcttcgagattatgggtgaagaggaaatcgcctttaagatgattcgcacgaacgtgtcacacgtggtgggacagctggacgatatccgcaagaatcccaggaaattcgtgtgtctcaacgacaatattgatcacaaccataaggacgcccagactgtgaaagctgtgctgcgcgatttctacgagtccatgttcccaatcccttcccagtttgaactgccgcgcgaataccgcaaccgcttcctccacatgcacgagctgcaggaatggcgcgcctaccgggataagttgaagttctggacccattgtgtcctggcgacgctgatcatgttcaccatcttctcatttttcgcggaacaactcatcgccctcaaaagaaagatcttcccgaggaggaggattcataaggaggcctcgcctaaccgcatcagagtg

SEQ ID NO: 215044 - DNA, 3768 bp, Artificial Sequence
  derived and/or modified sequence
atgttgttcaagctgttgcagagacagacttacacgtgcttgtctcataggtacggcctctatgtgtgcttcctcggagtggtggtcaccatcgtctcagcctttcagtttggagaggtcgtgttggagtggagcagagaccagtaccacgtgctgtttgacagctatcgagacaacatcgctggaaagagcttccagaatcggctctgtcttccgatgcccatcgacgtcgtttacacctgggtcaacggaaccgaccttgagttgcttaaagagctacaacaggtcagagaacagatggaagaggaacagaaggcgatgcgggagatcctgggcaaaaacactacagagccgaccaagaagtcagagaagcagcttgaatgtctgcttacccattgcattaaagttccaatgttagtgcttgatccagcgctgccagcaaacattaccctgaaagacctgccctccctgtacccatctttccatagcgcctctgacatctttaacgtggctaagcccaagaacccaagcacgaacgtctctgtggtggtgttcgacagcaccaaagacgttgaagacgcccacagcggactgctgaaaggcaattcaagacagaccgtttggcgcggctatctcaccacagacaaggaggtgcccgggctggttctgatgcaagacttggcttttctttcagggttcccgcctacctttaaagaaacaaaccagttgaaaaccaaattgcctgaaaatctcagtagcaaagtcaagcttctccagctgtattcggaggccagcgtggctttactgaaactgaacaaccccaaagactttcaggaactgaataagcaaaccaaaaaaaacatgactattgacggaaaggagctgaccattagcccagcgtatctgctgtgggaccttagcgctataagccaaagtaaacaagacgaggatatctccgccagtcgttttgaggataacgaagagttgcgctatagcctgcgcagtatagaaaggcacgcaccttgggtcaggaatatctttatagtgacgaacggacaaatcccttcctggctgaaccttgataacccacgggtgaccattgtgacccaccaagatgtgttccgaaacttgtcacatttaccaaccttctctagccccgcaatcgagagtcacattcatcgcatcgaaggcctgtcacaaaaatttatctacctcaacgacgatgtgatgttcggcaaagatgtttggcctgatgacttttacagtcattcaaagggccaaaaagtttatctgacctggccagtgcccaattgcgcggaaggctgcccaggaagctggatcaaagacggatattgtgacaaagcttgtaacaattctgcatgtgactgggatggcggcgactgctcaggaaactctgggggctcaaggtacatcgccggggggggaggaaccggatccatcggagtaggccagccctggcaatttggagggggaattaacagcgttagctactgtaaccagggatgcgctaatagctggctggcggacaagttctgcgaccaggcttgcaacgtgctctcatgtgggttcgacgccggcgattgcgggcaggatcattttcatgagttgtacaaagtgatactcctgcccaaccagactcactacatcatcccgaagggagaatgtcttccctatttcagcttcgctgaggttgctaaaaggggtgttgagggtgcatattctgataacccgataatcaggcatgctagcatagcaaataaatggaagacaatacacctgatcatgcacagcgggatgaatgccaccaccatccatttcaacttgacattccagaacacaaacgatgaagagtttaagatgcaaataaccgtagaggtcgacactagagagggacccaaactgaatagtactgcgcagaagggctacgaaaatttggtgagccctattactctcttaccggaagccgaaatcctgtttgaggacatccccaaagaaaaaagattcccaaaatttaaacgccatgatgtgaactctactcgccgcgcccaggaagaggtgaaaatcccgctggtgaatatctctttgctccccaaggacgcgcagctgtcgttgaatacactcgatttgcagctggaacacggcgatatcacactcaaggggtataatctgtccaaaagcgcacttctgcgctctttcctgatgaacagtcagcacgctaaaatcaagaaccaggccattataaccgatgagactaatgatagtctagttgccccccaggaaaaacaagtccataaaagcattctgcccaacagcttgggtgttagcgaaagactccagcggctcacatttcccgcagtttctgtcaaagtgaatgggcatgatcagggacagaaccctcctctggatcttgagacgaccgcacgtttccgagtagagacacatacacagaaaactatcgggggcaacgtcaccaaggaaaaacccccttccctgatcgtccctttggaaagccaaatgactaaagaaaaaaagataacaggtaaggagaaggagaatagcagaatggaggagaacgctgagaaccacattggtgtcacagaggtgctccttggcaggaaacttcaacactacaccgactcttaccttggctttttgccctgggaaaagaagaaatattttcaagatctgctggacgaagaagagtctttgaagacacaattggcttacttcactgactcgaaaaacacgggtaggcagcttaaggatacattcgcagactctctgaggtatgtcaacaaaattttgaactccaaatttggctttacatcacgcaaggtgcccgctcacatgccccatatgatcgataggatcgtgatgcaagaattgcaagacatgtttcctgaagaatttgacaagacgtcattccataaggtccggcattccgaagacatgcagttcgccttcagctacttctattacctgatgagcgccgtgcagcctctgaatatcagtcaagtcttcgatgaggtggacaccgatcaatcaggcgtactgtctgacagggagatccgaactctggcaactaggattcatgaactcccccttagcctgcaagacctgacaggcctcgagcacatgctgattaactgtagtaagatgttgccggcggacattacgcagctcaataatattccgccgacccaggagtcttactatgacccaaacctcccaccagtgactaaatccctggtgacaaactgcaaaccagtaaccgataaaattcacaaagcatataaagacaaaaataagtataggttcgagattatgggcgaggaggagattgcgtttaagatgatccgcactaacgtgagccatgtcgtaggccaactcgacgatatccgcaaaaatccgcgaaagttcgtgtgcctgaacgataacatcgaccacaatcacaaagatgcacaaaccgtcaaggctgtgttgcgagacttctacgagtccatgttccccatcccatcccaatttgaattgcccagggaatacaggaacagattcttacacatgcacgaattgcaggagtggagggcttatagggacaaactgaaattttggacccattgtgtcctggccacgcttatcatgtttacaatctttagcttctttgccgagcagctgatcgcattgaagagaaagatattcccgaggaggcgcattcacaaagaagcttctcccaaccggatcagagta

SEQ ID NO: 215045 - DNA, 3768 bp, Artificial Sequence
  derived and/or modified sequence
atgctatttaaactgctgcagaggcagacctatacatgccttagccataggtatggcctgtatgtatgttttttaggcgtggtggtcactatcgtgtccgcttttcaattcggcgaagtggttctggagtggtctagagaccaataccatgttctcttcgattcctaccgggacaacatagccggaaagagcttccagaaccggctgtgtctgccaatgcccattgacgttgtctacacctgggtcaacggcacagatctcgaactgctcaaagagcttcagcaggtgagagagcagatggaggaggaacaaaaagcaatgcgggagatccttggtaagaatacgactgagccaaccaagaagagtgagaagcagctggagtgcctactcacacactgcattaaggtgcccatgcttgtcttggacccggccctccccgcaaatatcacccttaaggatctcccttctttatacccatcgttccattctgcaagcgacatctttaacgtcgcaaaacccaagaacccctccacaaatgtgtccgtggttgtctttgactcaacaaaggacgtggaggacgctcacagtggtctcctgaagggcaatagcaggcaaactgtgtggaggggttatctgactaccgacaaagaggtgcccggtcttgtccttatgcaggacttagcatttctctctgggtttccacccactttcaaggagacgaatcagcttaagaccaagctccccgaaaatctttcttccaaggtcaaacttctgcaactatattctgaagcttccgtggcgctcctcaaactgaataatcccaaagattttcaggaacttaacaaacagactaaaaaaaatatgactatagatggcaaggagttgaccatttctccagcctatctgctctgggacctgtccgcgatctcccagagcaaacaggacgaagatattagtgcttctcggttcgaggataatgaggaactgcgctactccttgaggagcatcgagcgacacgccccctgggtccggaatatcttcatagtgaccaacggacagatcccctcctggcttaatctggacaaccctcgagttacgatcgtgactcatcaggacgtctttcggaacctgtcacaccttcccactttctccagccccgcgatcgaaagccacatccataggatcgaggggctctcacagaaattcatctatctgaacgacgatgtcatgttcggtaaagacgtctggccagacgatttttactctcactcaaaaggccagaaagtctacctgacctggcctgtcccaaattgcgcagagggatgtcctggctcttggatcaaggatggatattgtgacaaggcctgcaataatagcgcctgtgactgggacggtggggactgtagcggaaactctggggggtcacgatacattgcaggaggcggcggaacaggctccataggggtaggccaaccttggcagtttggcggcgggatcaacagtgtgtcatattgtaatcaagggtgtgctaactcctggttagccgacaaattttgtgatcaggcctgcaacgtgctctcctgcggtttcgatgcaggcgactgtggtcaggatcacttccatgaactatacaaggtgattctcctcccaaaccagacccactacataatccctaaaggtgagtgcctgccgtatttttcctttgcggaggtggcaaagaggggcgtggagggcgcgtattctgacaaccccatcattagacatgcttcgatagccaacaaatggaaaaccatccacctgatcatgcactccggcatgaacgccaccacaattcattttaatcttacctttcagaataccaacgacgaggagtttaaaatgcaaataacggtggaggttgatactcgagaggggcccaagctgaattcgactgcacagaagggctatgagaatctggtttcgccaattaccctgttgcccgaagcagagattctctttgaggacatacccaaagaaaagaggttcccgaaattcaaacgccatgacgtaaactctacccggcgcgctcaggaagaggtgaagatcccccttgtgaatattagtctgctgcccaaagacgctcagctctctctcaatacattggacctccagttggagcacggcgatatcacactgaaggggtacaatctctcaaaatctgcccttctcagatccttcctgatgaattctcagcacgctaaaattaaaaaccaagccatcatcaccgacgaaaccaacgacagtctggtggccccccaggagaaacaagtgcataagtctatactcccaaactcccttggcgtctccgaacggctccaacgattgactttcccggccgtaagtgtaaaggttaatggccatgatcagggccagaacccccccctcgatctggaaactactgcccgttttcgcgtggagacacacacacagaagacaattggtggaaatgtgaccaaggaaaaaccgccatccctcatagtccccctcgagtcccagatgaccaaggaaaagaaaatcaccggcaaggagaaagaaaacagcaggatggaggagaacgctgagaaccacatcggggttaccgaggtcctcttaggcaggaagttacaacactataccgacagttatctggggttccttccctgggagaaaaaaaagtacttccaggacctgttggatgaagaggaatcccttaaaactcagctcgcctactttacagacagcaagaacactggtaggcagctaaaagatacatttgcagacagtttgcggtatgtgaacaagattttgaatagtaaattcgggttcacatctaggaaggtccccgcacacatgccacacatgatcgatagaattgtaatgcaggaacttcaggatatgtttcccgaggagtttgacaaaaccagttttcataaggtcagacattcggaagacatgcaatttgccttctcatacttctactatctgatgtccgcagtgcaacctctgaatatctcccaggtgttcgatgaagtggatactgaccagtccggggtcctctctgatcgcgagatccggacgttggccacccgaatccacgagttgcccttgagcctccaggatctaacaggcttggaacatatgcttatcaactgctcaaaaatgctgcccgccgatatcactcagttaaataacatcccacccacacaagaatcatactatgacccgaatctaccaccggttaccaagtcgctggttacgaactgcaaaccggtgactgataagatacacaaagcctacaaagacaagaataaatatcggtttgaaatcatgggggaagaagaaattgcttttaaaatgatcaggacgaacgtctcgcacgttgtgggccagctcgacgatatacgcaagaaccctcgcaagtttgtctgtcttaacgacaacatagaccacaatcacaaggatgcccaaaccgtgaaggctgtcttgcgggatttctacgagtccatgtttccaatcccttctcaatttgagttgcctagagaataccggaaccgctttcttcatatgcatgagttgcaggaatggcgagcttaccgcgacaaactgaagttttggacccattgcgtgctggcgaccctgataatgtttaccatcttttctttcttcgccgagcaattgatcgcactgaagcggaagattttcccacgccggagaatacacaaagaggcatcccccaacagaatccgggtg

SEQ ID NO: 215046 - DNA, 3768 bp, Artificial Sequence
  derived and/or modified sequence
atgctctttaagctcctgcagcggcaaacatacacatgcctgtcacacagatacggcttgtatgtttgcttcttgggtgtggtagtaactattgtgtcggctttccagtttggagaagttgtgctggaatggagtcgtgaccagtatcacgtcttgtttgattcctatagagataatatcgcgggaaaatcttttcagaatcgcttgtgtttgcccatgcccatcgacgtggtgtacacatgggtgaacggtacagatctcgagcttttgaaggagctccagcaggtccgcgaacagatggaggaagagcaaaaggcaatgcgggagattctgggcaagaacacaacagaacctacgaagaagagcgagaagcagctcgaatgcttattgacgcactgcatcaaggtccccatgttagtgctcgaccccgccttgccagccaacatcaccctgaaggacctgccgagtttgtaccccagtttccatagcgcaagtgatatttttaacgtggcaaagcctaaaaacccttccacgaatgtgagcgttgtcgtatttgattccacaaaagacgtggaagatgcccactccggtctgttgaaaggaaactccagacagaccgtatggagaggatatctgaccactgacaaggaagtacccggcctggtgttgatgcaggacctcgcgttcttatccggttttccgccaactttcaaagaaaccaatcagctcaagacaaaactgccagagaacttaagttcaaaagtaaaacttttgcagctttatagcgaggcctcggtcgcactgttaaaacttaacaatcccaaagactttcaggagctgaataagcagactaagaagaacatgacaattgatggcaaggaattgaccatcagtccggcatacctgttgtgggacctcagcgccatatcccagagcaaacaagacgaggacattagcgcttctcgcttcgaagacaacgaagagttgcgctactccctccgaagcatcgaacggcacgctccctgggtgagaaacatttttatcgtcacaaatgggcaaatcccgtcgtggcttaacctagataatccgagggtcacaatcgtgacgcaccaggatgtgttccgcaatctatctcatctgcctacgttctccagtcccgcgattgaatcacacattcaccgcatcgaaggcctatctcagaagtttatttatctgaatgatgacgtgatgttcgggaaggacgtgtggccggatgacttctatagccattccaaaggccagaaggtctacctgacttggcctgtcccgaactgtgccgaggggtgtcctggctcctggatcaaggatggttattgcgataaagcttgtaataacagtgcctgtgattgggacggcggggactgcagcgggaatagcggcggatcacgctacatcgcgggtggcggtggaacggggtccatcggagtgggacagccctggcagtttggagggggcataaacagcgtgagctactgtaatcagggctgcgctaattcatggctcgcagacaaattctgcgaccaggcttgcaacgttttgagttgtgggtttgacgctggggattgcgggcaggaccactttcatgagctatataaagtaattttgctccccaaccagacacactatatcattccaaagggggaatgcctgccttatttcagtttcgctgaggtggcaaagcgaggcgtagaaggcgcctactcggacaacccaattatcagacacgcgagcatcgcaaacaagtggaagactattcatttgataatgcatagcggtatgaatgctaccaccattcattttaacttaaccttccagaacacaaatgacgaggaattcaaaatgcaaataacggtggaagtggacactcgcgagggacctaagttgaactctacagcccaaaaaggctatgaaaatctggtctcacctattactcttctacccgaagctgaaatcttgtttgaagatatcccaaaggagaagcgcttcccgaaatttaaaaggcatgatgtcaactcgacaaggagggctcaggaggaggtcaagatacctctcgtcaatataagccttttgccaaaagatgcccagttgagcctaaacactctggacctccagctcgagcacggcgacattactctcaaaggctataatttaagtaagtccgcgctactgcgatcctttctcatgaacagtcagcacgcgaagatcaaaaaccaggctattatcactgatgaaaccaacgacagcctggttgcaccccaggagaaacaggtccacaagagcatcctgcccaacagtctcggcgtgagtgagaggctccaaagactgacttttcccgccgtgtccgtgaaagtgaacggccacgatcagggccagaacccaccgttggatttagagaccactgcacgattcagggtggagactcatacacagaaaactatcggaggcaatgttacaaaagagaaacccccatctttgatcgtgcccctcgaatcccaaatgacaaaagagaaaaagataacgggaaaagagaaggagaattcccggatggaagagaacgctgagaatcacattggcgtcacagaagtcctgctcggcagaaaactgcaacactacacagatagctacttgggtttcctcccctgggagaagaagaaatattttcaggatctactagatgaggaggaatcactgaagacccagcttgcctacttcacggattcgaagaacacaggcagacaactgaaggacactttcgctgacagcctgcgatatgtgaataaaattctaaactcaaagtttggcttcacaagtaggaaggttccagcccacatgccccacatgatcgataggatcgtcatgcaggaactgcaggacatgttccctgaggagttcgacaagacctcctttcacaaagtgaggcactctgaagatatgcagtttgctttcagttacttttattatttgatgagcgcagtgcagcctttgaacatctcccaagtcttcgatgaagtggacactgatcaatctggggtgttgagtgaccgtgaaatccggactctggccactcgcattcacgaactgccactttctctgcaagatctcaccggcttggagcatatgcttataaattgttccaagatgctgcctgccgatattacacaactgaacaacattcctccaacacaggaatcctactatgaccccaaccttcctccagtcaccaagtctctggttacgaattgcaaaccagttactgacaaaattcataaggcgtacaaggataaaaataagtatcgctttgagatcatgggcgaggaggaaatagccttcaaaatgatcagaaccaatgtgagccacgtcgtgggccaactggatgatatccgtaaaaacccccgcaaatttgtttgcctcaatgacaatatagatcacaaccacaaagacgcccagaccgtgaaggctgtgctcagagacttttatgaaagtatgttccctatccctagccagttcgaactgcctcgagaatacagaaacaggttcctgcatatgcatgaactccaagagtggcgggcctacagagataagctcaaattttggacacactgtgtgctggctacactgattatgttcacaatcttctccttcttcgccgaacagctcatcgcactgaaacgaaagatattccctagaaggcggatccacaaggaggctagccccaacagaattcgcgtc

SEQ ID NO: 215047 - DNA, 3768 bp, Artificial Sequence
  derived and/or modified sequence
atgctgtttaagctgctgcagagacagacatacacctgcctgtcccaccgctatggactgtacgtatgtttcctcggggtagtggtcactattgtgagcgcattccagttcggtgaagtggtcttggagtggtccagggaccagtaccatgtgctcttcgattcttatagagacaatatcgcaggaaaatcattccagaaccgtctatgcctgcccatgcccatagatgtggtgtacacctgggttaatggcacagacctggagctgctaaaagagctgcagcaagtgcgcgagcaaatggaggaggaacagaaagctatgagagaaatcctgggcaagaacaccaccgagccaacaaaaaagtctgagaagcagctggaatgcctgctgacacactgcatcaaggtgcccatgctcgttctggacccagcgctccccgccaatataactttgaaagacctcccctccctgtacccttccttccactccgcctcggacatcttcaatgtggccaagcctaaaaacccatctacgaacgtcagcgtagtggtcttcgactcaacaaaggacgtagaagacgcacatagcggactgctcaagggaaattcaagacagaccgtttggcggggttacttgactaccgataaggaagtccccgggctggttcttatgcaagacctggcctttctgtccgggtttccccctacatttaaggagaccaaccaactcaagaccaagttgccggaaaatctgtcttcaaaggtcaagttgctgcagctatattccgaggcttcagtggccctgcttaaacttaataacccaaaggatttccaggaactgaataaacagacaaagaagaatatgaccatagacggcaaggaacttacgatctctccagcatatctgctctgggatctttccgccattagccaatctaagcaggacgaggatattagcgcctctagattcgaggataacgaggagctgcgctattccctgcggtccatcgaaaggcatgcaccgtgggtgagaaacatattcattgttaccaacggccaaattccatcttggctgaacctcgacaaccctagagtgacaattgtgacgcatcaagacgtattccggaacctgagccacctacccaccttcagctcccctgctatagagtcgcatatccaccgtatagaggggctgtctcagaagttcatatacctcaatgatgacgtcatgtttggcaaggacgtgtggccagacgacttttattcacactctaaggggcagaaggtatatttgacatggcccgtgcctaactgcgctgaaggctgtccaggttcttggataaaggacggatactgtgacaaggcttgcaacaacagcgcatgcgactgggacgggggagactgcagtggcaattccggggggtctcgctatatcgccggtgggggggggacaggaagcataggcgtgggacagccttggcaattcggcggcgggattaattccgtgtcttattgcaaccagggctgcgctaattcttggctagccgataaattctgcgaccaggcctgcaacgttctttcctgtggcttcgacgctggggactgtgggcaggaccatttccacgagttatataaagttatcctgctgccaaaccagacacactacattattcctaagggtgagtgcctaccgtacttttccttcgccgaagtggcgaaacgcggcgtggaaggtgcgtattctgataaccctatcatccggcatgcctctatcgcaaataagtggaagaccatccacctcattatgcattcaggcatgaacgccacaaccattcacttcaacctcaccttccagaatacaaacgacgaggaatttaagatgcaaataaccgtcgaagtcgacacacgggaaggtccgaaacttaacagtacggctcaaaagggttacgaaaacctcgtgagtccaatcaccctactgcctgaagctgaaatcctgttcgaagatatccccaaggagaagcggtttcccaaattcaagagacacgatgtgaatagcacacggagagctcaggaggaggtgaagattcctttagttaacatttctctcctccccaaggatgcgcagctgagtctgaataccctggacctccagctggagcatggagacattaccctcaaaggctataacttgtccaagagtgcccttttgcgctctttcctaatgaattcacagcacgctaaaatcaaaaatcaagccattataaccgacgagaccaacgactctcttgtggctcctcaggaaaagcaggtgcacaaatccatcctccctaattccctgggggtgagcgagcggttgcagcgccttaccttccccgcagtctccgttaaggtgaacggacatgatcaggggcagaatccccctctggatctcgagaccacagcacgatttagagtcgagactcacacacagaagaccataggcggtaatgtgactaaggagaaacctccatccctgatcgtccccctggagagccaaatgactaaggaaaagaaaattacaggtaaggaaaaggagaatagcagaatggaggaaaacgccgaaaaccatattggtgtgaccgaagtgcttctgggaaggaagttacaacattatactgactcttatttgggttttctaccttgggagaaaaaaaaatatttccaggatctgctggatgaagaggagtcacttaagacacagctggcttactttactgacagtaagaatacggggcgacagttgaaggacaccttcgccgacagtctgagatacgttaacaaaatcctgaatagtaaattcggattcacttcaagaaaggtgcccgcacatatgccacacatgatcgatcgcatagtcatgcaggagttgcaggatatgtttccggaagagttcgacaagactagttttcataaagtgcgccactcggaggacatgcagttcgctttctcttatttttactacctgatgtccgccgtgcagcccttgaatatcagtcaggtatttgatgaggttgatacggatcaatccggggtattgtctgacagagaaattagaacgctggccactagaatacacgaactgcccctctcactgcaggacttaaccgggttggagcacatgttgatcaactgtagtaaaatgttgccggcagacattacccaattgaataacatccctccaacccaggagagctactacgatcccaacctgccccctgtaacaaaatctctcgtaaccaattgtaaacctgtcaccgataagatccataaagcttacaaggataaaaataaatataggtttgagatcatgggagaggaagagatcgccttcaagatgattaggaccaacgtgagccacgtggttggccagctggacgacataagaaagaatccgaggaagtttgtgtgcctgaatgacaatattgaccacaaccacaaagacgcacaaaccgtcaaggctgttcttcgggatttttacgagtcaatgtttcccattcctagccagttcgagctgccgagagaatatagaaaccgatttctgcatatgcatgagctccaggaatggcgagcatacagggataaactgaagttttggactcactgcgtactagctacattgataatgtttactatcttttctttttttgccgagcagctgatagcgctgaaacggaagatctttcccagacgacggatccacaaggaggcatctccaaatcgaatccgagtc

SEQ ID NO: 215048 - DNA, 3768 bp, Artificial Sequence
  derived and/or modified sequence
atgttattcaagctcctgcagcgacaaacgtacacctgcctcagccaccgttacggattgtacgtgtgctttctgggtgtcgtcgtgacgattgtctccgcttttcaattcggagaggtggttttggagtggtcccgcgatcagtaccatgtgctcttcgactcctaccgggataacatcgcaggcaagagcttccagaaccgtctgtgtctccctatgccgattgatgtggtgtacacctgggtgaatggtaccgatctagagcttttgaaggagctccagcaggtccgtgaacagatggaggaagagcaaaaggcgatgcgggagatcctggggaagaacactacagagccgacgaagaagtccgagaagcagcttgaatgcctactcacacactgcattaaggtacccatgttggtgctcgatccggcactgcctgctaacatcaccctcaaggatctgcccagtctgtacccctccttccactcagccagcgacattttcaacgtggctaagccaaagaatccctctaccaacgtgagcgtcgttgttttcgatagtacaaaggacgtcgaagacgcccactccggtcttttaaagggcaattcgcgtcagaccgtgtggcgtggttacctgacgaccgataaggaagttcccggccttgtgcttatgcaggacctggcattcctctctggctttccaccgaccttcaaggaaaccaaccagctcaaaacgaaactcccggaaaacctctcttctaaggtgaagctgcttcagctatatagcgaggcctctgtcgcactcctgaagttgaacaacccgaaggacttccaggagctgaataagcaaaccaaaaagaacatgacaatcgatgggaaggaactgaccatcagccccgcctacttactctgggacctctccgccatctcccagagcaagcaggacgaagatatcagcgcctctcgctttgaagacaacgaggaattacggtactctctgcgcagtattgaacgccacgcgccatgggtccgtaatatcttcattgtcactaacggtcagatcccatcttggttaaatctggataacccgcgggtcaccattgtgacccaccaggacgtcttccgtaacctctcccacctccccaccttctcgtcccccgcgattgagtcccacatacaccgtatcgagggcctcagccagaaattcatctacctcaacgatgacgtcatgtttggaaaggatgtctggcccgacgacttttattcgcactctaaagggcagaaggtttacctcacctggccggttccaaactgcgccgagggatgccccggttcgtggatcaaggatggatattgcgacaaggcatgcaacaactctgcttgcgattgggacggtggggattgttccggaaacagcgggggttcacgatacattgcgggtggtggcggcactggctcgattggcgttggtcaaccttggcagttcggcggaggtatcaactctgtctcttactgcaaccagggatgtgcaaactcctggctggctgataaattttgtgatcaggcttgcaatgtcctgtcgtgtgggtttgacgctggggactgtggacaggaccatttccatgagttgtacaaggttatcctcctccctaaccagacacactacatcatccctaagggcgagtgcttgccttacttctccttcgccgaggtggcgaaacgcggtgtagagggcgcatatagcgacaaccccatcattagacacgcctcgatcgccaacaagtggaagaccatccacctcatcatgcacagtggtatgaacgccaccactatccacttcaacttgaccttccagaacaccaacgatgaagagttcaagatgcagatcaccgtcgaggtagacacccgtgagggtccgaagcttaattccacagcccaaaagggctacgaaaacctggtctctcccatcacacttttaccggaagcagagatactctttgaggacatccccaaggagaagcgcttcccgaagttcaaacggcacgatgtaaattccacgcgccgggctcaggaggaagtcaagatcccgctggtgaacatctccctccttcctaaggatgctcagctttctttgaacaccctggacctgcagctggagcatggcgatatcacgctgaaggggtacaacttgtcgaagtctgcgctgttgagatccttcctgatgaatagccaacacgctaagatcaaaaatcaggctatcattactgacgagaccaatgattcgttagtggccccccaggagaagcaggtccataagagcatcctgccgaatagcttgggcgtctcggaacgcttgcagcgacttacctttcccgccgtctcggtcaaagttaacggtcatgaccaagggcagaacccaccgcttgacctggagaccaccgccaggttccgcgtcgagactcacacccaaaagaccatcggaggcaacgtcaccaaagaaaagcctccatccctcattgtgccgctcgagtctcagatgaccaaggagaagaagatcaccggcaaggagaaggaaaactcccgtatggaagaaaacgccgagaatcatatcggtgtaaccgaggtcctgctaggcaggaagcttcagcattatacagactcctaccttggcttcctgccttgggagaagaaaaaatatttccaggacctcctggacgaggaggaatctttgaaaacccagctggcctactttacggattcaaagaacactggtagacagctgaaggataccttcgccgattcgcttcggtacgttaacaagatactcaactcgaagttcggttttacgtcccgcaaggtgccggcccacatgccgcacatgattgacagaattgtcatgcaagagcttcaggacatgttcccagaggagttcgataagacttcctttcacaaggtgcggcactcggaggacatgcagttcgcattctcgtatttttactacctgatgagcgctgttcagccgctgaatattagccaggtgttcgatgaggtcgacactgaccagagcggcgtgttgtcggaccgtgaaatccgcacccttgcgacccgtatccacgagctgcccctctccctgcaggatttgacaggcctcgagcacatgcttattaactgctcgaagatgctccctgcagatatcactcagctcaacaacattccccccacccaagagtcttactacgatccaaacctcccccccgtcaccaagtctcttgtgaccaactgcaagcccgtgactgacaagattcacaaggcatataaggataagaacaagtaccgtttcgagatcatgggtgaggaggaaatcgctttcaagatgatccgcactaacgtctctcacgtcgtcggccagctggatgatatcagaaagaaccctcggaagttcgtctgcctgaacgataacatcgatcataaccataaagatgcccagactgtgaaggccgttttgagggatttttacgaatcaatgtttcccatcccctcgcagtttgagcttccacgggaataccgaaatcgcttcctgcacatgcatgagctccaggaatggcgcgcttacagagacaaactgaagttctggacgcattgtgtgttggcaacattgatcatgttcaccatctttagtttcttcgctgagcagctcatcgctctgaagcgcaagattttcccgcgtcggcgcattcataaggaggcctccccaaaccgcattcgggtg

SEQ ID NO: 215049 - DNA, 3768 bp, Artificial Sequence
  derived and/or modified sequence
atgctgttcaagcttttgcagcgacagacgtacacctgtctcagtcaccgatacggcctgtacgtgtgttttctcggggttgtggtaacaattgtctccgcattccaattcggtgaggtcgtgctcgagtggtctcgagaccagtaccacgtgctctttgattcctatcgagataatatcgccggcaaatcatttcaaaatcgactgtgcctgccgatgcctatcgatgtggtttatacgtgggtaaatggcacagatctggaactcctgaaggaacttcagcaggttagagagcagatggaagaagaacaaaaggcgatgcgtgaaattctcggtaaaaataccactgagcctactaaaaaatcagaaaagcagctggagtgtttactcacacattgcattaaggtcccaatgcttgttctcgatcctgccttacccgccaatatcactctcaaggacctgccaagtctgtacccaagcttccacagtgcttcagacatcttcaacgtagcaaaaccaaaaaatccatcaactaatgtgtccgtggtagtcttcgactccacaaaagacgtggaagatgcccactctggactgctgaaaggcaacagtcgacagactgtctggagagggtatttgactacagacaaagaagtgcccggactggtgctgatgcaggacctcgcttttctgagtggcttcccaccaacgtttaaggaaaccaaccaacttaagactaagctgccagagaatctgtcttccaaagttaagctgctgcagctctattccgaagcttctgtggcactgctaaaactgaacaatcccaaggactttcaggaacttaacaaacagacaaaaaagaatatgactatcgacggcaaagaactaactatctctcctgcttacctgctctgggatttatccgcgatttctcagtctaaacaagacgaagatatctccgcgtctagattcgaagataatgaagagcttcgctacagcctgcgaagcatcgaaaggcatgcaccatgggtgagaaatatcttcattgtaacgaacgggcagattccctcctggctgaatctggacaatccaagagtgacgatcgtgactcaccaggacgtgttcagaaacctgagccatttacctacattcagctcccccgcgatcgagagccatatccataggattgagggtctaagtcagaagttcatataccttaacgacgacgtgatgttcggcaaggacgtctggcccgacgacttctactctcattccaaaggtcaaaaagtgtacctcacttggcctgtgcccaactgcgctgaagggtgccccggatcctggatcaaggacggatactgtgataaagcctgtaataacagcgcgtgcgattgggacggaggagattgtagcggcaactcggggggcagcaggtacattgctgggggcggcggtactggaagtatcggcgtggggcagccgtggcaattcgggggggggattaactccgtgagttactgcaaccaggggtgtgctaatagttggcttgccgataagttttgtgaccaagcatgcaatgtcttgtcctgcggatttgacgctggagattgtggtcaggaccactttcacgaattatataaggtgatacttttgcctaaccaaacacattacataatccctaagggagagtgcctgccttacttcagcttcgctgaagtggccaaacgcggcgtcgagggtgcatactccgacaatcctataattaggcacgcaagtatcgcaaataagtggaagacaatccacctcatcatgcactccgggatgaatgccacaaccattcattttaatttaacttttcagaacacgaacgacgaggaattcaaaatgcaaataactgtcgaggttgatactagagagggccccaaacttaacagtaccgcacagaagggttacgaaaatctggtctctcccattacactactcccagaggccgaaatcctgtttgaagatattccgaaggaaaaacgtttccctaagttcaaacggcatgacgtgaactccacaaggcgagctcaggaagaagtgaagataccgctggtgaacatctcactgcttcccaaagatgctcaactctctctgaacacccttgacctgcagctggagcacggggacatcaccctgaagggttataatctgtcaaaaagcgctctgttaagatccttccttatgaattcacaacacgctaaaattaaaaatcaggctatcattaccgatgaaacaaatgactcactcgtggccccccaagaaaaacaagtgcacaagagcatcctccccaacagcctgggggtatccgaaagactgcaaaggctgacttttccggccgtgtctgtgaaggtaaatgggcatgatcagggacagaatcctcctttggacctggaaacgaccgcccgcttcagggtggagacgcatactcagaagactattgggggaaacgtgactaaggaaaagccgcctagcctcatcgtgccgctcgaaagccagatgaccaaagaaaaaaagattaccggtaaggaaaaggagaactcgaggatggaagagaacgcagagaaccacatcggggtgactgaagtgttgctcggcaggaagctacagcactataccgactcctatttaggcttcctaccatgggagaagaagaagtattttcaggatctcctcgatgaggaagagtctttgaagacgcagctagcttacttcaccgactccaagaacacagggcggcagctcaaagacaccttcgccgatagtctccgatatgttaacaagatcttgaactcaaagttcggcttcacgagtcgaaaagtcccagcccatatgccgcacatgatagaccggatagttatgcaggaactacaggacatgttccccgaggaattcgacaaaacgtctttccataaagtgcgccattccgaggacatgcagtttgcattctcctacttttattacctcatgtccgctgtgcaaccgctgaacatcagtcaagttttcgacgaggtcgatactgaccagagtggcgtgttgtcggacagggagataaggactttggccactcgcatccatgaactccctctgagtttgcaggacctcactggtcttgagcacatgctaataaattgcagtaagatgttgcctgcagatatcacccagctgaacaacatccctcccacgcaggaaagttactatgatcctaacttacctccagtgacaaagtcactggttaccaattgcaagcctgttaccgataagattcacaaggcttacaaagacaaaaataagtatagattcgagattatgggggaagaagaaatcgcatttaaaatgatccgtacaaacgtgtcccatgtggttggacagctagacgatattcgcaaaaatcctcgtaaatttgtgtgcttgaatgataacatcgatcacaatcacaaagacgcccaaacagtgaaagccgttctgagggatttctacgagagcatgttcccaattccttctcaatttgaacttcctagggaatatcggaacagattcctgcacatgcacgagctacaggaatggcgagcctacagggataagctcaaattttggacgcactgtgtcctcgctaccctaatcatgttcactatcttctctttctttgcggaacagctgatagcactcaagagaaagatatttccgaggagaagaatccataaagaagcaagccccaatagaatacgtgtt

SEQ ID NO: 215050 - DNA, 3768 bp, Artificial Sequence
  derived and/or modified sequence
atgctgtttaagcttctccagcgccagacctatacctgtctttcacacagatatgggctgtatgtctgcttcctgggagtggtcgttactatagtgtcagctttccagtttggggaagtggttctagagtggtcaagggaccagtaccacgtgctgtttgattcataccgggacaatattgctggtaaatccttccagaatcgcttatgtctgccaatgcccattgatgtggtatacacgtgggtgaacggcacagatttggagctcctgaaagagctccagcaggtgagggagcaaatggaagaggagcagaaggccatgcgggagatcttgggtaaaaatactactgaaccaacaaagaagagtgagaagcagttggaatgtctgttgactcactgtatcaaggtcccaatgctggtgttggacccggctctgcccgcaaacattacgctcaaggacctgcccagtttgtacccttcttttcactctgcatccgacattttcaatgtggccaagccgaaaaacccatcaacaaatgtttcagtcgtagtctttgatagcacgaaagatgtggaagacgcacattctggtctactgaaaggaaacagccggcaaaccgtttggcgaggctatttgaccacggataaggaagtgcccggcctggtcctgatgcaggatctggcgtttctatcaggcttcccacctacttttaaagagacaaatcaactgaagacaaagctccccgagaacctttcctctaaggtaaagcttctccagctttattctgaggccagtgtggctctgctgaagctcaacaatcctaaagacttccaagagctcaacaaacaaactaagaagaacatgaccatagatggaaaggagctgaccatctctccagcatatctgctgtgggacctatcagcaatcagccaatccaagcaagatgaggacatcagcgcctctcgttttgaggacaatgaggagcttcgctattctctgcggtcaattgaaaggcatgcaccttgggtgagaaacatattcatcgtcaccaacggccaaattccaagctggctcaacctggacaaccctcgcgtaacgattgtcacccaccaggatgttttccgcaacctctcccacttacctacgttttctagcccagccatcgagagccacatccatagaattgaaggcttaagtcagaaattcatttacctcaatgatgacgtgatgttcggcaaggacgtgtggcccgatgacttttatagccactccaaggggcagaaggtgtacctcacatggcccgtacccaattgtgcggaaggctgtcccggttcttggattaaagatgggtactgtgacaaggcctgcaacaattctgcttgcgattgggatggaggggactgctcaggcaatagcggcggtagcagatacatcgcaggtggaggaggaacgggcagcatcggggtggggcagccttggcaatttgggggcgggatcaactcggtgagctactgcaatcagggatgcgcaaattcctggctggcagacaagttctgcgaccaggcatgtaatgtgctctcctgtggattcgatgccggcgattgtggtcaggatcacttccacgaactctacaaggtgattctcttacctaaccaaacacactatatcattcccaagggggagtgtcttccgtatttctccttcgctgaggtcgccaagaggggtgtggagggcgcctactcggataatcccatcattcgccatgctagcattgcgaacaagtggaagactattcatcttataatgcatagcggaatgaacgctactacaatccactttaacttgacctttcagaacactaatgatgaggaatttaaaatgcagataaccgtcgaagttgacacccgggaaggcccgaagctcaattccaccgcccagaagggatacgagaatcttgtcagtcctatcaccctcttgcccgaagcggagatactctttgaggatatccccaaagagaaaaggttccctaagttcaagcggcacgatgtgaattccactcgcagagcccaggaggaggttaagataccactggtaaatatttctttgctgccaaaggatgctcagctgagcctcaatacactcgatctgcagctggagcatggagatatcaccctgaagggctacaatttgtccaaatctgccctcctgcgcagttttctaatgaactcccagcacgcgaagatcaagaaccaggctatcattactgacgagaccaatgacagtctggttgcccctcaggaaaagcaggtacataaaagtatactccccaattccttgggcgtgtccgagaggctgcagcggctgactttcccagccgtctccgtgaaggttaacggtcacgaccaagggcaaaacccaccactcgatctggaaactaccgcccgatttagagtggaaacacacacgcagaagaccataggcggaaacgtgactaaggaaaaaccaccgagtctgatcgtacccttggagtcgcaaatgaccaaggaaaagaagattaccgggaaggagaaggagaacagcaggatggaagagaatgctgagaatcacatcggcgtgactgaagtcttattgggccggaaattgcagcattacactgattcctatttgggttttctcccatgggaaaagaaaaaatattttcaggatctgctggatgaagaggagagcctgaagacccaactcgcctacttcacagattccaaaaatactggaaggcagctgaaggatacttttgctgattcgcttcgttatgtcaacaagatactgaactctaaatttggcttcacttcccgcaaagtaccggctcatatgccccacatgattgacagaattgtgatgcaggaacttcaggacatgtttcccgaagaattcgacaaaacaagttttcataaggttaggcacagtgaggacatgcaattcgcattctcctatttctattacttgatgtctgctgtgcagcctctgaacatcagccaagtgtttgacgaggtggataccgaccagagcggcgttctgtcggacagggaaattcggacgctcgccacccgaatacatgagctgcctttgtctttacaggatctcaccggcctggagcacatgctgattaattgcagtaaaatgctcccagcagacatcacgcagctgaataatatcccaccaacccaggaatcatattatgatcccaatttgccccctgtgacaaagagcttggtaacaaactgcaaacctgtgacagacaaaattcacaaggcctataaagacaaaaacaagtataggttcgagatcatgggcgaggaagagatcgcctttaaaatgatacggactaatgtttcacacgtggtgggtcagttggatgacataagaaaaaatccacgcaagttcgtttgcctaaacgataacatagatcacaatcacaaagacgctcagactgtcaaggcggtactgcgggacttttacgaatctatgtttccaattccatctcaattcgagctaccccgggaataccgtaataggttccttcacatgcatgagctccaggaatggcgggcctacagagacaagctaaagttctggactcactgtgtcctagccaccctgatcatgttcaccatcttttcctttttcgccgagcagctaatcgctttgaagagaaagatcttcccgcgtcggcgtatccataaggaggctagccccaacagaatacgagtg

SEQ ID NO: 215051 - DNA, 3768 bp, Artificial Sequence
  derived and/or modified sequence
atgcttttcaagctgctgcaaaggcaaacctacacatgtctttcacatagatacggtctttacgtgtgcttcctgggtgtggtggtgacgattgtgagtgcctttcagttcggggaggtggtgttggaatggtctcgggatcagtatcacgtcctgttcgattcttatcgggacaatattgccggcaaatccttccaaaaccggctgtgcttgcccatgcccatcgatgtggtttacacatgggtcaacggaacagacctggaactgctgaaggaacttcaacaggtccgggagcaaatggaggaggagcagaaggctatgcgcgaaatactcggtaagaacactaccgagccgaccaagaagtcagagaagcagcttgagtgcctccttacgcattgtattaaagtcccaatgttggtgcttgaccccgcactgccagcgaatatcaccttgaaggacctgccaagcctttatccttccttccactccgcgtccgatattttcaatgtggccaagcccaaaaatccctccaccaacgtgtccgtggtggtgtttgatagtactaaagatgtcgaggacgctcacagtggccttcttaagggcaacagccgacagactgtttggagggggtatttgacaactgacaaagaagtgcccggactcgttctcatgcaggatctggccttcctgtccgggttccctccaaccttcaaggagacaaatcagctgaagacaaaacttccggaaaacctttcatcaaaggtcaaactgctccaactgtatagcgaggcctcagttgccctcctgaaactgaacaaccctaaggattttcaggagctcaacaaacaaaccaagaagaacatgaccattgacggcaaggaactgaccatttccccagcatacttgctttgggatttgtccgccattagccaaagcaagcaggatgaagatatcagcgccagtcgattcgaggataatgaggagctgcgctacagcctgagatccattgaacggcatgccccatgggtccggaacatcttcatcgtgacaaatggccaaattccgtcttggctcaacctcgacaaccccagagtcaccatcgttacacatcaagatgtatttcggaacttgagccacttgcctacgttctcatccccggctatagagtcccatatacataggatcgaggggctgtcccagaagtttatttacctgaatgatgatgtcatgtttggcaaggacgtctggccagacgacttctatagccattccaagggacagaaggtgtatctcacctggcctgtgcctaactgcgctgaggggtgtccaggttcttggattaaggacggctattgtgataaagcctgtaacaacagtgcatgcgattgggacggcggagactgcagtggaaactcagggggcagtcgatacatcgccggcggaggtggtaccggatccatcggtgtggggcagccttggcaattcgggggcggtatcaatagcgtgagctactgtaaccaggggtgtgccaattcttggctcgccgacaagttctgtgatcaggcgtgcaacgtgctctcctgcggattcgacgccggagactgcggccaggaccacttccacgagctgtataaggtcatcctcctgccgaaccaaacgcactatattatacccaaaggagagtgcctgccctactttagttttgccgaagtggcgaaacgcggcgtcgagggggcttatagtgacaatcccataattcgccacgcctctatcgcaaataagtggaaaactattcatctgattatgcattccgggatgaacgcaaccacaattcacttcaatctcacttttcagaataccaatgacgaggagtttaagatgcagattactgtcgaggtagatacacgggaaggtccgaagctgaactccaccgcccagaaaggatacgagaacctcgtgtccccaatcactctgctccccgaggcagagattctcttcgaggatatccccaaagagaagagattccccaagtttaagcgccacgacgtcaactccacacgacgggcccaggaggaagtaaaaataccattggttaacatttcactcctgcctaaagatgcacaactcagcctcaacacacttgatctgcagctggagcatggagacatcaccctgaaaggatacaatctgtccaagtctgcactcctgaggtcatttctgatgaatagccagcatgcaaagatcaaaaatcaagccataatcaccgacgagacgaacgatagtctggtggcgccccaagagaaacaagtacataagagcatccttcccaacagcttgggggtgagcgagaggctgcagcgcctgacttttcctgcagtatccgtaaaagtcaacggtcacgatcaggggcagaatcctcctttggacctggaaaccacagccaggttccgggtggaaactcatacgcagaaaacaatcggtggcaatgtaaccaaggagaagccccctagtcttatcgtacccctggagagccagatgactaaggaaaaaaaaataactggtaaagaaaaagagaattccagaatggaggaaaacgccgagaatcacattggcgtgaccgaggtactgctgggcaggaagcttcagcactacaccgacagctatctcggctttcttccgtgggaaaagaaaaagtattttcaggatctgctcgatgaggaagagagcttgaaaactcagttggcatatttcacagacagtaaaaatacaggccggcagctgaaggacacctttgctgactctctgcgctatgtgaacaagatcttgaattcaaagtttggctttacttcacgcaaagtacctgctcacatgccccacatgatagacaggattgttatgcaggaactgcaggatatgttccccgaggagtttgacaagacgagtttccacaaggtcaggcacagtgaggacatgcagttcgccttctcctatttctattacctgatgtctgctgttcaacctctgaatatatcacaggtttttgatgaggtggacactgatcagtcaggggtcctgtcagaccgggagattcgcaccctcgccacgagaattcacgagctcccattgagcctccaggaccttacggggcttgagcacatgctgataaattgttccaagatgctgccagctgacatcactcaactgaacaacatacctcctactcaggagagctactatgaccccaatctgccacctgtgactaaatccctggtcactaactgtaagccagttaccgataagattcacaaggcatataaggataaaaacaaatatcgctttgaaatcatgggcgaggaggagattgctttcaagatgattcgaaccaatgtgtcccacgtcgtgggacagctggacgatatcaggaaaaaccccagaaagttcgtatgtctcaatgacaacattgaccataatcataaagatgctcaaactgtgaaagcagttctgagggacttttacgagtccatgttccccatcccaagtcagttcgaactgccgagagaatatcggaaccggtttctccatatgcatgagctgcaggagtggagggcttaccgagacaaactgaaattttggacacattgcgtccttgccacactgatcatgtttaccatctttagcttttttgctgaacagctgatcgccctcaagaggaagatttttccccggagaagaattcacaaagaggccagtccaaatcgaatccgggtg

SEQ ID NO: 215052 - DNA, 3768 bp, Artificial Sequence
  derived and/or modified sequence
atgctttttaagctgcttcagaggcaaacctacacatgcctttcccaccgttacgggctgtacgtctgttttctcggcgttgtcgtgacgatcgtcagtgccttccagttcggggaggtcgtgttagaatggagccgtgaccaatatcacgttttattcgattcataccgagataacattgccgggaaatctttccagaaccggctatgccttcccatgccaatcgatgttgtgtatacatgggtaaacggcaccgatctggaactgctaaaagagctgcagcaagtcagggagcagatggaagaggagcagaaggccatgcgagagattcttggaaagaacacaactgaacctactaaaaaaagtgaaaagcagctggaatgcctgctgacccattgcatcaaggtgccgatgttagtgcttgatcctgctctccccgctaatataaccttaaaggatctcccatccttatacccaagcttccactccgcatctgacatcttcaatgtggccaaacctaagaatccttctacgaacgtgtccgtcgttgtgttcgattcaacaaaggatgttgaggatgcccacagcggactactcaaggggaacagtagacagacagtttggcggggatacctcacaacagataaggaggtaccgggactcgtgctgatgcaggatctcgcctttctgtccgggttcccgcccactttcaaggagacaaatcagctgaagactaaactccccgagaacttgtccagcaaggtgaaactgctgcagctgtactctgaggcctcagtggctctacttaaactgaataatcctaaggacttccaggagttgaacaagcagacaaagaaaaacatgactattgacgggaaagagttgaccatatccccggcatatttactgtgggacctaagtgccatcagccagtccaaacaggacgaagatatttccgctagtaggttcgaggacaatgaggagctccgctactcgttacgtagcatcgaacggcacgccccatgggtgcgcaacatttttattgtcaccaatggtcagatcccaagctggctcaacctggacaaccccagagtcaccattgtcacccaccaagacgtgtttcgcaacctgagtcatctgcccaccttttcttctcctgccatcgaaagccacattcatcgaatcgagggtctcagtcagaagtttatatatctgaacgatgatgttatgttcggtaaggatgtatggccagacgacttctacagccattctaaagggcagaaagtctacctcacctggcccgtacctaattgtgcagagggatgtccaggtagctggattaaagatggttattgtgataaggcttgtaataatagtgcgtgtgattgggacgggggggattgctccgggaactccggcggctcccggtacatcgcaggcggggggggcactggctccataggcgttggccagccatggcaatttggcggaggaatcaatagcgtgtcttactgtaaccagggttgtgctaacagctggctggcagacaagttttgcgaccaagcgtgtaatgtactgagttgcggttttgatgccggcgattgtgggcaagatcattttcatgagttgtacaaggtgatccttttgcctaatcagactcactatatcatcccgaaaggggagtgcctgccatacttttccttcgcagaggtcgccaagcggggagtggagggagcctacagcgacaatccaattatcaggcacgctagcattgcaaacaaatggaaaactatccacttgatcatgcattccggtatgaacgctaccaccattcatttcaaccttacatttcaaaatacaaatgatgaagagttcaagatgcaaattacagtggaggttgacaccagagaagggcctaagctgaatagcacagcacagaaaggatacgaaaacttagtcagcccgattacactactgcctgaggctgagatacttttcgaagatatacctaaggagaaaagattccccaagttcaagaggcatgatgtcaattcgaccagaagagcccaggaagaggtaaaaattcctctggtaaatatctccctgctgccgaaggatgcccagctgtccttaaatactttagacctccagttggagcatggggatattaccctcaaaggctacaacctcagcaagtctgctctgctgcgaagctttctcatgaactctcagcatgccaagataaaaaaccaggcgataataaccgatgagaccaacgattccttggtcgcaccccaagaaaaacaggtgcacaagtcaatcctgccaaatagtctgggggtgagtgagcggctgcagaggctcacttttccagcggtatcagttaaggtcaacggccatgaccaggggcagaaccctcccctcgacctggaaactaccgccagattcagagttgagacgcacacacaaaagacaatcggagggaacgttacaaaagaaaaaccgccatctctcatcgtaccactggagtcacagatgaccaaggagaagaaaataacagggaaagaaaaagagaattctcgtatggaagagaatgcggagaaccatattggagtaactgaggttttgctgggaagaaagctacagcactacaccgatagctacctggggttcctcccatgggaaaagaagaagtattttcaagatctgctggacgaagaagagtccttgaagacccagctggcatattttaccgacagcaaaaacaccgggagacagctgaaagatactttcgctgattctttgcggtatgtcaacaaaatcctcaacagcaagtttggatttacctctcggaaagttcccgcccacatgccacacatgatagaccggatagtcatgcaggagctgcaggacatgtttccggaagagttcgacaagacaagctttcataaagtccgacactctgaggatatgcagttcgccttctcctacttctattacttgatgagtgctgtccagcccctgaacatctcacaggtgttcgacgaagtggacaccgatcaaagcggagtgttgtctgaccgtgagatccgaaccttggctactaggatccacgagctgcccttgagtttgcaggatcttaccgggctggaacacatgcttatcaactgcagtaaaatgttgcctgcggacatcacccaactgaacaacatcccacccacccaggaatcttattatgatcctaatctgccacctgtcacgaagagcctggtgacgaattgtaagcctgtgacagacaagattcacaaagcctacaaggataagaataaatatagattcgaaatcatgggagaagaagaaatcgcctttaaaatgatacgtacaaatgtgtcccacgtggtaggtcagctggacgatatccggaagaaccctaggaagttcgtgtgccttaacgacaacatagaccacaaccataaagatgcgcagacagtcaaagctgtgctgcgcgacttctacgagtccatgttccctattccttcccaatttgaactgccaagggagtatcgtaatagatttctccacatgcacgaactccaggaatggagagcatatcgggataaattgaagttttggacccattgtgtactggctaccctgatcatgtttactatctttagcttttttgccgaacagctgatagccttgaagaggaagatatttcctcgacgacgcatccacaaggaagccagtccgaatagaatccgcgtt

SEQ ID NO: 215053 - DNA, 3768 bp, Artificial Sequence
  derived and/or modified sequence
atgctcttcaagctcttgcagcgccagacctacacctgtctctcccaccgctacggtctttacgtgtgcttcctgggcgttgttgtcacgatcgttagcgctttccagttcggcgaagttgtactggagtggtctagggaccagtatcacgtcttgttcgactcttacagggataatatcgccggcaagtcttttcagaaccgcctgtgcctgcctatgccgatcgacgtcgtctacacctgggtgaatggcactgacctggagctgctcaaggagcttcagcaagttcgcgagcaaatggaggaagaacaaaaagccatgagagagattctgggcaagaatactacagagccaactaagaagtcagaaaagcagctggagtgcctgctgactcactgcataaaggttcctatgttggtcctggatccagccttgcccgctaacataactctcaaagacctgccaagcctttaccctagctttcatagtgcgtccgacatttttaatgttgccaagcctaagaacccttccaccaatgtatcagttgtggtgtttgatagtactaaggatgtggaagacgcacacagcggacttcttaaaggcaattctagacaaaccgtgtggcgcggctacctgaccacggacaaggaggtccctggactggtgctgatgcaggacttggcctttctgtctggtttccccccgactttcaaagagactaaccagctgaagactaagcttcctgagaatctgagcagtaaggtgaagctgcttcaactgtacagcgaggcctccgttgctctgctcaagctgaacaaccccaaggacttccaagagcttaataaacaaacgaagaagaacatgactatcgatggaaaggagttgacaattagccccgcttacctgctgtgggacttgtctgccatcagtcaaagtaagcaagatgaggacatcagtgcctccagatttgaggataatgaagagcttcgctattccttgaggagcatagaaaggcacgcaccctgggtgcgcaacatcttcattgttaccaacggacagatcccatcctggctgaacctggacaaccccagagttactatcgtgacccaccaggatgtgttccgcaaccttagtcatctgcctaccttctcatctcctgcgattgagtctcatattcatcgcatagagggcctgtctcagaagttcatctatctgaacgatgacgtaatgttcggaaaggacgtgtggccggacgacttctattcccacagcaagggtcaaaaggtgtatctgacctggcctgtgcccaactgcgccgaaggttgtcctggatcatggatcaaagatggttactgtgataaggcttgtaacaacagtgcttgcgactgggacggaggcgattgcagcggcaactcaggcggtagtcgctacatcgcgggaggaggaggaaccggttccattggagtgggccagccctggcaatttggcggcggtataaactcagtgagctactgcaaccagggctgtgcaaacagttggctggcagacaaattctgtgaccaagcatgcaacgttctttcttgtggttttgatgcaggtgattgtggacaggaccatttccacgaactgtacaaggtaattctcctcccaaatcaaacccactacatcatccccaagggagagtgcctgccgtacttttcatttgccgaggtggcaaagaggggcgtcgaaggcgcgtactccgacaatccaattattcgccatgctagcattgctaacaaatggaagaccattcatctgattatgcactccggaatgaacgccaccaccatccacttcaacctcacattccaaaacaccaacgacgaggaattcaagatgcagatcacggtggaggtggacaccagggaaggaccaaaactcaactccactgcccagaagggatatgagaatctggtgagccccatcaccctgctgcccgaggccgaaatcttgttcgaagatatcccaaaggagaagaggttccccaagttcaagcgccacgatgtcaacagcacacgccgcgcacaggaggaggttaagatcccccttgtgaacataagcctgttgccaaaggacgcccagttgtctctcaacacgttggatctgcagctggaacatggtgatatcactctgaagggatacaaccttagcaaaagtgcgctgctccgcagttttctgatgaattcccagcacgccaagattaagaatcaggcaatcatcactgacgaaactaacgactcacttgtggcaccccaagagaaacaggtccacaagtcaatactgcccaacagtctcggtgtcagtgaaaggctgcagcgcctgacatttccagcagtttccgtgaaggtgaacggacatgaccaaggtcaaaatcctcccctcgacctcgagaccaccgcgaggttcagggtggagacccatacccaaaagactatcggaggaaatgttactaaagagaaacccccgagcctgattgttcccctggaatctcagatgaccaaggagaagaagatcacgggtaaggaaaaagaaaactcacgcatggaggagaacgctgagaatcatattggtgtgacagaagttctgctgggtagaaagcttcagcactatactgactcttatttgggtttccttccatgggaaaagaaaaaatacttccaagatttgctggacgaagaggaatctttgaagactcagctggcatatttcacagacagcaagaatactggtcgccaactcaaggacacctttgcggacagtctgcgctacgttaacaaaatacttaacagtaaatttggctttacatccagaaaggtgcccgctcatatgccccatatgatcgacaggatcgtgatgcaggaactgcaggatatgttccccgaggaatttgataaaacctcattccacaaagtcagacatagtgaagacatgcagttcgccttctcttacttctactacctcatgtctgccgtccaaccattgaacatctcacaggtcttcgacgaggtcgatactgatcagtctggtgtgctgtctgaccgcgagattagaacgctggcgaccagaatccacgaactgcctctctcccttcaggacctcaccggtctggaacacatgctcattaactgttcaaagatgctgccggcagatatcacgcagctcaacaatattccacccacacaggagtcctactatgatcccaacctgcccccagtcactaaatcacttgtcacgaactgtaagccggtgaccgacaagatccataaagcttacaaggacaagaacaagtatagatttgagatcatgggagaggaggaaattgcatttaagatgattagaacgaacgtcagccacgttgtaggtcagctggacgatatcagaaaaaaccccagaaagttcgtgtgcctgaacgacaatatagatcataaccacaaagacgcccaaacagtgaaagctgttctgagagatttctacgagtctatgttcccaatcccatcccaatttgagctcccccgcgagtatagaaatagatttttgcacatgcacgaactccaagagtggagagcctaccgcgacaagctcaaattctggacacactgcgtactcgccaccctgatcatgtttacaatttttagcttcttcgcggaacagttgatcgccctgaagcgcaagatctttcctagaaggagaatccacaaagaggcatcaccgaatcgcatccgcgtt

SEQ ID NO: 215054 - DNA, 3768 bp, Artificial Sequence
  derived and/or modified sequence
atgctgttcaagctcctccagcgccagacttatacatgcctgagccacagatatggcctttacgtatgttttctgggggtggtcgtgacaattgtgagcgctttccagttcggggaagtagtgctcgagtggtcccgggatcagtaccatgtgctgttcgacagctatagagacaatatcgcaggaaaatccttccagaaccgcctatgtctgcccatgcctatcgacgttgtgtatacttgggttaacgggaccgaccttgagctgctgaaagaactacagcaggtgcgagagcagatggaagaggaacagaaggccatgcgtgaaatcctgggaaaaaacaccactgaacctaccaaaaaatccgagaaacagctcgagtgcttgctaacacactgcataaaagtccccatgctcgtgcttgaccctgcactccccgcgaatatcacattaaaagacttaccgtccttgtatccctcatttcattcagcgagtgatatatttaatgtggctaagcccaaaaatccaagcacaaatgtgagtgtcgtggtgtttgattccaccaaggatgtcgaggacgcccactccgggctcctcaagggcaattctagacagactgtgtggagagggtatcttacgactgataaggaggtacccgggcttgttctgatgcaggatctcgctttcctgagcggatttccccccacatttaaggagacaaatcagctgaagacgaagctcccggagaatttgagctcaaaggtgaaactcctgcagctctactccgaagcgtccgttgcccttctgaagttgaataacccaaaggacttccaagagttgaacaagcagaccaagaaaaacatgaccattgacggcaaagaactgacgatatcaccggcttatttgctttgggatctctctgctataagtcagtccaagcaggatgaagacatctcagcaagccgattcgaagacaacgaagagcttagatattccttgcgatctattgagcgccacgcgccgtgggtgagaaatatttttatagtaacaaacggacaaatcccttcttggctgaacctggataacccacgcgtgaccattgtgactcaccaggatgtattccgcaacttgtctcacctgcccactttcagctcaccggctatcgaatcccacatccacaggatagaagggctcagtcagaagttcatatacctcaacgacgatgttatgtttgggaaggatgtctggccggacgacttttatagtcacagcaaaggacagaaagtatacctgacgtggccggtgccaaattgtgccgaaggatgtcctggttcatggattaaagacggctactgcgataaagcctgcaataacagcgcatgtgactgggatgggggcgactgctctggcaacagcggtgggtctcggtacattgccggggggggcggtacagggagcatcggggtgggccagccttggcaattcggcggagggataaacagcgtctcatactgcaatcagggctgcgctaactcttggctcgcggacaagttctgtgaccaagcttgtaatgtactgtcatgtggcttcgacgcaggggactgcgggcaggaccactttcatgagctttacaaagttatcttgctcccgaaccagacccattacattataccaaagggcgagtgcttgccgtactttagcttcgctgaggtagctaagcgcggggtcgagggcgcctatagcgataatcccattataaggcacgcttctattgctaacaagtggaagaccatccacctcattatgcactcagggatgaacgcaaccacaatacacttcaacctgactttccagaacaccaatgatgaagagttcaagatgcagatcacagtagaggtggacacccgtgaaggaccgaaactcaattctacagcacagaagggctatgaaaacttagtgtcccccataactttactacctgaagctgagattctgttcgaggacatcccaaaggagaagcgctttcccaagttcaagcgacacgacgtgaatagtacccggcgcgcccaggaggaagtcaagattcccctcgttaacatttcactgttaccaaaagatgcccagctctccctgaatactctggatctgcagctggaacatggagatatcaccctgaaaggctataatctgtctaagtccgctttgctcagatctttcctaatgaactcccaacatgcaaagatcaaaaaccaggctatcatcaccgatgagactaatgattccttagtggccccacaggaaaaacaagtgcacaagtcaatccttcccaacagcctgggcgtgtcagaacggttgcagcgcttgaccttcccagcggtctctgttaaagtgaacggtcacgaccaaggacagaatcccccgctggacctggagactactgcgcgattccgagtcgagacacacactcagaaaacaattgggggaaacgtgactaaggagaagcccccatccttgatcgttcctctcgagtctcagatgactaaggaaaaaaagattaccggcaaagaaaaggagaattctaggatggaggagaacgcagaaaatcacataggggttacagaagttcttttgggcagaaaactccagcactatacggacagctatctaggctttcttccctgggaaaaaaaaaaatattttcaggatctcttggacgaggaggaatccctgaaaactcagctggcttattttacagactccaaaaacaccggaagacaattgaaagataccttcgcagacagcctacggtacgtgaacaaaattctgaatagcaagtttggctttacttctcggaaagtgccggcccacatgccccacatgatagatcgtatcgtgatgcaagaattgcaggatatgttccctgaggagttcgataagacctccttccacaaggtgcgacactctgaagacatgcagttcgcgttctcttatttctactacctgatgtctgcagtgcaacccctcaatatttcacaggttttcgatgaggtagataccgatcaaagcggtgttctgagcgatagggagatcaggacactggccacacgaattcacgaactgcctctttccttacaggacctcactggcctggaacacatgctcatcaattgttccaaaatgcttcctgctgatattacacagctgaataacatccctcccacgcaggaatcatattacgatcctaatctgccgccggttactaagagtcttgtcactaattgcaagcccgtaaccgataaaatccataaagcttacaaggacaagaataaatacagatttgaaattatgggtgaagaggagattgccttcaagatgatcaggaccaacgtgtcccacgtggtcggacagcttgatgatatcaggaagaatcctcggaaatttgtgtgcctgaacgataatattgatcacaatcacaaggacgcacagacagtgaaagctgtgttgagagacttttatgaatctatgtttccgatcccctctcagtttgagctgccccgtgagtatcgaaatcggtttctgcacatgcacgaactacaagaatggcgcgcctatcgtgacaagctgaaattttggacccattgtgtgcttgctacactgataatgttcaccattttttctttttttgcagagcaactaattgccctgaaacgcaaaatattccctagacgaagaatacacaaggaggcatcccctaaccgtatcagggtg

SEQ ID NO: 215055 - DNA, 3768 bp, Artificial Sequence
  derived and/or modified sequence
atgctcttcaaactcctccagcgacaaacatatacctgtttgagccaccgttatggcttatatgtctgtttcctgggtgtcgtcgtcaccattgtgtccgcgttccagttcggtgaagtcgtcctcgagtggagtagagatcagtatcatgtgcttttcgatagttatcgcgataacatagcgggaaaaagcttccagaacaggctatgtctacccatgccgattgatgtggtctatacatgggtaaatggcacagatctggagttgttaaaggaacttcagcaggtgagggaacagatggaggaggagcaaaaagctatgcgcgaaattctcggaaagaacaccactgaaccaacgaagaagtcggaaaagcaactcgaatgcttgttgacccactgcattaaggttcccatgctggtgttagaccccgcactgcccgcgaacatcaccttgaaagacctgccatcattgtacccatccttccactcagcaagtgacatcttcaatgttgcgaagcccaagaacccatccacaaacgtgagcgtcgttgttttcgatagtaccaaggatgtagaagatgcccatagcggcctgctcaaggggaatagccggcaaacggtgtggcgaggatacctcacgaccgataaggaggtgcctgggctcgtcctcatgcaagacctggccttcttatcgggcttcccacccacatttaaggaaaccaatcagcttaagaccaagctgcctgaaaatctatcgtcgaaagtgaagcttctccaactgtattcggaagcatcggtggcgcttctgaagttgaataatccaaaagacttccaggagctcaacaaacagaccaaaaaaaacatgactatcgacggcaaagagttgaccatctcgccagcatatctgctgtgggatctctctgccatctctcaatctaagcaggatgaagatatctcggcgagtaggttcgaagataacgaggaacttagatatagcctgaggtccattgaacgccacgccccctgggttagaaacattttcattgtgacgaatggacagatccccagctggctcaacctggataatccacgtgtgacaatcgtcacgcatcaagacgtctttcgcaacttgtctcacctgcccactttttcgtctccggctatcgagtcgcacattcaccgtattgaaggtctcagccaaaaatttatctatcttaatgacgatgttatgttcggaaaggatgtatggcctgatgacttttattcgcacagcaaggggcaaaaggtttacttgacctggcccgtccccaattgcgcggaaggatgccccggttcctggataaaggatgggtattgcgacaaagcgtgtaacaactcggcgtgtgactgggacggtggagattgctcaggaaactctggaggttcacggtatattgcaggagggggtggtacgggttccatcggcgtaggtcaaccttggcagttcgggggaggaattaacagtgttagttactgcaatcaggggtgcgcgaactcctggttggcggataagttctgtgatcaggcgtgcaatgtgctatcatgcggcttcgacgccggggattgcggacaagaccatttccacgagctttacaaggttattctattgcctaaccaaacgcactatattatacctaaaggcgagtgtctcccgtatttcagcttcgccgaggttgcaaagcgaggggtcgaaggcgcatattccgataaccctatcattcgccacgcttccattgcaaacaagtggaaaacaatccatctaattatgcattcagggatgaacgcaaccactattcatttcaatctgactttccaaaacacaaacgacgaagagtttaagatgcagatcacagtggaagtcgatacgcgtgagggtcctaaactcaattccaccgcccagaaaggatacgaaaacctggtctctccaataacgctcttgcctgaagctgaaatcctatttgaagacattcctaaagaaaaaagatttcctaagtttaagcggcatgacgtcaattccaccaggcgtgcccaagaggaggtgaaaattccattggttaatatctccctgctgccgaaagacgctcaactttctttgaacacccttgatcttcagctagagcatggagatataactctcaagggatacaacctttcgaaatctgcactcctacggagcttcttaatgaattctcagcatgcgaagatcaaaaatcaagccataattacggatgaaactaacgactccttggtggccccgcaagagaaacaggttcacaaatcgattctaccaaacagtttgggcgttagcgaacgccttcagagactgacctttcctgccgtttcagtcaaagtgaatggacatgaccagggacagaaccccccactggaccttgagactacagcgcgcttccgtgtagaaacgcatacgcagaagacgattggtggaaatgtcaccaaagagaagcctcccagcctgatcgtgccactcgagagtcaaatgaccaaagaaaagaaaatcacaggaaaggagaaggaaaactcacgcatggaggaaaacgcagaaaaccacatcggcgtcacagaagtattactgggaagaaagcttcagcactacaccgattcatacctcggcttcttgccctgggagaaaaagaagtatttccaagatctgttggatgaagaagagagtttaaaaacccaactggcttactttaccgattccaaaaacacaggacgtcagctgaaggacactttcgcagacagccttcgttacgtcaacaagattctgaattccaagttcggatttacttcccgaaaggttccggcccacatgcctcacatgatcgatcgcattgttatgcaagaattgcaagacatgtttccggaggagttcgataagacgtcttttcataaggtacgtcactctgaagatatgcagtttgccttctcctatttttactacctaatgtctgctgtccagcctttgaacatcagccaggtcttcgacgaggtcgatactgatcagagtggagtcctttctgatcgcgaaattcgtacgcttgcgacacgaatccacgaacttcccctatcgcttcaagacttaacagggctcgagcacatgctaatcaattgctcaaagatgctccccgcggacataactcaactcaacaatatcccaccaacgcaagagtcctattatgacccgaatctaccgccggtgactaagagcctcgttactaactgcaagcctgtaaccgacaagatccataaggcctataaggacaagaacaagtaccgcttcgaaatcatgggagaggaggaaatcgcctttaagatgattagaacgaatgtgtcgcacgttgtagggcaattagacgacatccgcaaaaatccgcgaaagttcgtctgtcttaatgataatattgaccacaaccataaggacgctcagacggtaaaggccgtgcttcgggacttctatgaatcgatgttccctataccgagccaattcgagttgccacgcgagtaccgtaaccgattcctacatatgcacgaactccaggagtggcgcgcctatcgtgataagttgaaattctggacacactgcgtgcttgcaactttaataatgtttacgatcttttcattctttgcagagcaacttattgcgcttaagcgcaaaattttcccgagacgtcgaatccataaagaggcgtctcccaaccgtatccgcgta

SEQ ID NO: 215056 - DNA, 3768 bp, Artificial Sequence
  derived and/or modified sequence
atgctcttcaagctgttgcagcggcagacctacacttgcctgtcccatagatacggactatatgtctgcttcctcggggtcgtggtcactattgtgtctgcgtttcagtttggcgaggtggtattggagtggtcccgggaccagtatcatgttctctttgattcatatcgcgacaatattgcaggtaaaagcttccagaatagactttgcttaccaatgcccatcgatgtggtctacacatgggttaacgggactgacctcgagctcctcaaagagttgcagcaggtccgtgaacagatggaggaagaacagaaggcgatgcgggaaattctcggcaaaaacaccacagagcctaccaagaagtccgaaaagcagcttgagtgcctgctcacacattgcatcaaggtacccatgctggtgttggaccccgccttgcctgccaacattaccttgaaagatctgccctccttatatccttctttccatagtgcatccgacatcttcaatgtcgccaagcctaaaaatccgtcaacgaacgtgtcagtggtggtttttgacagcaccaaagatgtcgaggatgcccacagtggtctactgaagggcaatagccgacaaaccgtttggagaggttatctcaccacggataaagaagtacctgggctggtacttatgcaagaccttgcgttcctttcaggatttccccctacatttaaggaaacaaaccaactgaaaacaaaattgccggagaatctgtcctctaaggtcaagttgcttcagctgtacagtgaggcctctgtggcgctgctgaaactgaacaaccccaaggatttccaggagctgaacaagcagactaagaaaaacatgaccatcgatggcaaggagctgaccatctccccagcctatctgttgtgggacctaagtgccatcagtcaatcaaagcaagatgaagacatcagcgcttctaggtttgaagataacgaagagctgaggtattccctgcgctctatcgaacggcacgctccgtgggtcagaaatatattcatcgtgactaatgggcagatcccttcctggttaaaccttgacaaccctcgtgttactatagtgactcaccaggacgtcttcagaaacctttctcaccttcccaccttcagctctccagcaatagagagtcatatccaccggattgagggtctgtctcaaaaatttatctacctgaacgatgacgtgatgtttggcaaggacgtgtggcccgatgacttttacagccattctaaaggtcagaaggtttatttgacctggcctgtcccaaattgcgctgaaggctgtcccgggtcctggattaaggacggttattgtgataaggcttgcaacaatagtgcatgtgactgggacggcggggactgttctgggaacagtggcggctcgaggtatatcgcaggaggaggcggcactggatccatcggcgtcggccagccttggcaatttggaggtggtattaattctgtgtcgtattgtaatcagggctgcgcaaactcctggctcgcggataaattctgtgaccaagcttgtaacgtactgagttgtggctttgacgccggggactgcggacaggatcacttccacgagttgtataaagtgatcctgctacccaaccagactcattacattattccaaaaggtgagtgtctgccctactttagctttgctgaagtggccaaacgtggggtcgaaggagcatacagcgacaatcccattatcagacacgcaagcatagcgaataagtggaagacaatccacctaattatgcacagcggtatgaacgcaactacaatccatttcaatctgacattccagaataccaacgacgaggagttcaagatgcagattaccgtggaggttgatacccgagagggcccaaagctgaattcaactgcgcagaaagggtacgaaaatcttgtctctccaattacccttttgcctgaggcggagatcctcttcgaggatattccaaaagaaaaaagattcccgaagttcaaacgccacgacgtgaactctactcgccgagcccaagaagaagttaagattccactcgtaaacatatccttgctgcctaaggatgcgcagctgtccctgaatacactggacctgcagctcgaacacggcgacatcaccttgaaaggatataacctgagtaagagcgcactgcttaggtctttcctcatgaactcacagcacgcaaaaatcaaaaatcaggccatcatcacagacgagacaaacgactcactggtggctccccaggagaagcaggtgcataagtccattctgccgaactcactgggtgtgtccgaacgtctgcagcgcctcacctttcctgcagtcagcgtgaaggtgaacggacacgaccaaggccagaacccccctttagatctggagacaaccgcaaggttccgcgtcgaaacacacacacagaagacaatcgggggaaacgtcactaaggaaaagccaccttctctgattgtcccactggaaagccaaatgacgaaagaaaaaaagatcacagggaaggaaaaggagaacagtagaatggaggagaacgcggagaatcacattggggttacagaggttttgctgggcagaaaattgcaacattacaccgatagctaccttggcttcctcccttgggagaagaaaaagtatttccaagacctgttggatgaagaagagtcgcttaagacccaacttgcttactttacagacagtaaaaatactggccgacagctgaaggataccttcgcagactccctgcgttacgtgaataagatccttaactccaaattcgggtttacttcccggaaggttcctgcgcacatgcctcatatgatagatagaatcgtgatgcaagaactccaggacatgtttccggaggagttcgacaaaacttcattccacaaagtgaggcactctgaggacatgcagttcgcattctcttatttttactacttgatgagcgctgtacaacccttgaatatctcccaggtgtttgacgaggtagacaccgatcagtcgggtgtcctttctgacagagagatcagaacgttagcgaccaggatccacgagctccccctcagcctgcaggacttgaccggactggagcacatgttaatcaattgctcaaaaatgctgccagcagacatcacacaactgaataacatcccgcctactcaggaaagttactatgatccgaacctcccccctgtgaccaaatcactcgttaccaattgtaagccagtcaccgacaagatccacaaagcctataaggataaaaacaaataccgtttcgagattatgggggaagaggagatcgcctttaaaatgatacggactaacgtgagccacgtcgtcggtcaattagatgacatccgaaaaaatccaaggaaattcgtctgtctcaacgacaacattgatcacaaccacaaggatgcccagaccgtgaaagccgtcctgagagacttttacgagtcaatgttccccatacctagccaattcgagctccctcgggagtaccgcaaccggtttctacacatgcacgaactgcaggaatggcgggcttatagggacaagctgaagttctggacccactgtgtgctggccacactgatcatgtttacaatctttagctttttcgctgagcagctcatcgccctgaagcgcaagatctttcctcgccgcaggattcacaaggaggccagccccaacaggattcgcgta

SEQ ID NO: 215057 - DNA, 3768 bp, Artificial Sequence
  derived and/or modified sequence
atgctgttcaagcttcttcagagacaaacatacacatgtctcagccaccggtacggcctctacgtctgtttcctgggagtggtcgtgacaattgtcagtgcctttcaatttggagaggtggtgctggagtggagcagagaccagtaccacgtactgttcgactcatatagggataatattgcaggaaagagttttcagaatcggctgtgtctgccgatgcctattgacgttgtctacacttgggtcaacggcaccgatctggaacttcttaaagagctccaacaggttagggaacaaatggaggaagagcaaaaggctatgcgtgagatcctcggtaagaacaccacagaacctacaaaaaaaagtgagaaacagctcgaatgtcttcttacccactgcattaaggtgccgatgctggttctcgatcctgccctgcccgctaacatcacactgaaagacctgccatccctgtacccatccttccacagtgcatccgacattttcaacgtcgctaaaccaaaaaaccccagcactaacgtgtcagtggtcgtgtttgacagtactaaggacgtggaggatgctcactctggcctattgaaggggaattccagacaaaccgtttggaggggctacctgaccaccgataaagaggtcccaggtttggtgctgatgcaagatttggcttttctatctggatttcccccaacatttaaagaaacaaatcaactgaagactaagctccccgagaatcttagctctaaagtcaaactccttcagctgtactccgaggcaagcgtagccttgcttaaactgaacaaccccaaggacttccaggaactcaacaaacagactaagaaaaatatgactatagacggaaaggaattgaccattagccctgcttatctgctctgggatctgtccgccatctcacagagcaagcaggatgaggacatttcggcctctagattcgaagataatgaagaacttaggtattctcttagatcaatagagaggcacgccccttgggtgcggaacatattcatcgtgactaacgggcagatcccctcatggttgaacctcgataacccaagggttactatcgtgacccaccaggatgttttcagaaatctcagccatctccctacttttagctcccccgcaatagaaagtcacattcaccgcattgagggtctctctcaaaagttcatctatctgaatgacgacgtgatgtttggtaaggacgtgtggccagatgacttctacagccactcgaaagggcagaaagtttaccttacttggcccgtgcccaactgtgccgaggggtgtcctggttcgtggatcaaagacggctattgcgataaagcttgcaacaacagcgcctgcgattgggacggaggcgattgctctggaaattctggtggatcgcgttatatagctggtggtggaggcacgggctccatcggagtagggcagccctggcagtttggcgggggcatcaatagcgtgagctattgtaaccaaggctgtgccaacagctggctagctgacaagttctgtgatcaagcttgcaacgtgctgtcttgcggattcgatgcaggcgattgcggccaagatcactttcacgagttgtacaaagtgatcctgctcccaaaccagacacattacataattcccaagggcgaatgtctcccgtatttctcctttgctgaagtggccaaacgtggtgtcgagggtgcctacagtgataacccaatcattagacatgcctccattgctaacaaatggaagactatccacctcatcatgcatagtgggatgaatgctaccactatacacttcaacctcaccttccaaaacacaaacgacgaggaatttaaaatgcaaataaccgttgaggtggacactagagagggccccaagctcaatagcacagcacagaaaggatacgagaacctggttagccccatcacacttcttcccgaagcagaaatcctcttcgaagatattcctaaggagaagaggtttccaaaattcaaacgacacgacgtcaacagcactcggcgcgcacaggaagaagttaagatcccccttgttaacatctctttacttcctaaggatgctcagttgtcgctgaacacacttgatctgcaactcgagcacggtgatatcactctcaaaggttacaatctctcaaagtctgctcttctgagaagcttccttatgaactcacagcacgcgaagattaaaaatcaggctatcatcacagacgagaccaacgatagcctcgtggcacctcaggaaaagcaagtgcacaagtccatactgcccaactctctgggggttagcgaacggctgcaaagacttacattccccgctgtgagtgtcaaagtcaacggccacgaccaaggccagaacccacccctggatttagagactacagctagatttagggttgaaactcacacacagaagaccattggcggaaacgtaacaaaggagaagcctccatccctgattgtacccttggaatctcaaatgaccaaagaaaaaaagatcaccggcaaggagaaggagaacagtcgtatggaggaaaacgctgagaatcacatcggggtgaccgaggtgctcctgggaagaaaacttcaacactataccgacagctacctcgggtttttgccctgggaaaagaagaagtatttccaagacctgcttgatgaggaggagtctttgaagacacaacttgcttactttactgactcaaagaacacgggaaggcagctgaaggatactttcgctgacagcctcaggtacgtcaacaaaatccttaacagcaaatttggctttacttccagaaaagtgcccgcacacatgccacacatgatcgacagaatagtgatgcaggaactgcaagatatgttcccagaggaatttgataaaacaagcttccacaaggtccgccacagcgaggacatgcaatttgcatttagctatttctattacttgatgagcgccgtccagcctcttaacatatctcaggtattcgacgaagttgatacagaccagagtggggtgctgagcgaccgagaaataagaacccttgcaactcggatccacgagcttccactctcgctccaggacttgactggacttgagcatatgcttattaactgcagtaaaatgctgcctgccgatatcacccagctgaacaacatccccccaacccaggaatcgtactacgacccaaaccttcctcctgtcaccaagagcctcgtgacaaattgcaagccagtgaccgataaaatccataaggcatacaaggacaaaaacaaatacagatttgaaatcatgggcgaggaggagatagcttttaaaatgattcgcactaatgtgagccatgtggtgggacagctggacgatattagaaagaatcccaggaagtttgtctgcctgaacgacaacatagatcacaaccacaaggatgctcagaccgtgaaagctgtgctgcgggatttttacgagagtatgttccctatccccagccagttcgagcttcctcgtgagtacagaaaccgctttctccatatgcacgaattgcaagagtggagggcttatagagacaaactgaagttctggacccactgcgtcctggcaacccttattatgtttaccatcttttccttctttgcagagcaactgatcgctctgaaaagaaagatttttcctaggagacgaatacataaagaagccagtcctaacaggattagagtc

SEQ ID NO: 215058 - DNA, 3768 bp, Artificial Sequence
  derived and/or modified sequence
atgctgttcaagctgttgcagaggcagacttacacttgcctgtcccacaggtacgggctgtacgtatgcttcttgggggtcgtggtcaccatcgtgtccgcgttccaattcggcgaagtggtgctcgaatggagccgggatcagtaccacgtgctgttcgactcataccgcgacaatattgccggtaaatccttccagaaccggttgtgtctgcccatgcctatcgatgtggtctacacctgggtcaacgggacggaccttgagcttctgaaggagctgcagcaagtgcgggagcaaatggaagaagaacagaaggcaatgcgggagatcctgggaaagaataccaccgagccaacgaaaaagtccgagaagcaactggaatgcctgctcacccattgtatcaaggtcccgatgctcgtactggatccggcgctcccagctaacatcactctgaaagatctgccctcattgtacccgagcttccattcggcttcagacattttcaatgtcgccaagccgaagaacccctcgactaacgtcagcgtcgtggtgttcgattcaactaaggacgtggaggacgctcattcaggcctgctcaaaggtaattccaggcagacggtgtggagaggatacctgaccactgacaaggaagtcccggggctggtcctcatgcaggacctggcttttctctcgggattccctcctaccttcaaggaaactaaccaactgaaaactaaactgccggaaaacctgtcgtccaaggtgaaacttctgcagctttattcggaagcctcggtcgcactgctcaagctcaataatcccaaggactttcaagagctgaacaagcagaccaagaaaaacatgaccatagatggaaaagaactgaccatcagtccagcatacctgctttgggacctgtccgccatctcccaatcgaagcaggacgaggatatcagcgccagccgcttcgaggacaacgaggagcttcgctacagcctgcgatctatcgagcgccacgcaccgtgggtccgcaatatcttcatagtgactaacggccagatccctagctggctcaacctcgacaatccacgcgttaccatcgtgactcaccaagacgtgtttcgcaacctgagccatctgcctacgtttagcagcccagcgatcgaatcgcacatccataggatcgaaggactgtcccagaaatttatttacctgaatgacgacgtgatgttcggaaaagacgtgtggcctgacgacttttattcacactcaaagggacaaaaagtgtaccttacctggcctgtgcccaattgcgcagaaggctgccccgggtcatggatcaaggacggatattgtgacaaggcatgtaataacagcgcctgcgactgggatggaggggattgctcgggaaactcaggtggaagccgctacatcgccggcggaggaggtacggggtcaattggggtgggacagccgtggcagtttggcggaggcatcaactccgtctcatactgcaaccaaggttgtgcgaatagctggttggccgataagttttgtgatcaggcttgcaacgtgctgagttgcggtttcgacgccggagattgcggtcaggatcacttccacgaactgtacaaagttatccttctgccgaaccagactcattacatcatcccgaagggagagtgcctcccatacttttcattcgcggaggtggccaaacggggggtggaaggagcgtattcggataacccgatcatccgccacgcgtctattgcgaacaaatggaaaacgatccatttgattatgcacagcggaatgaatgcgactaccatccactttaatctcacttttcagaacaccaatgatgaagaattcaaaatgcagatcaccgtggaggtggacactagagagggaccaaagctgaactccactgcccagaagggctacgagaacctcgtgtccccaattactctgctgccggaggcggaaattctgttcgaagatattccgaaggaaaaaaggttcccaaagttcaagcggcatgacgtgaattcgacccgtcgcgctcaggaagaagttaagatcccgctcgtcaacatctcactgctcccgaaggatgcccaactctccctgaacactctggacctgcagctcgagcacggagacatcacgctcaagggctacaacctctcgaaaagcgctctgctgaggtcgttcttgatgaactcccagcacgccaagatcaagaatcaagcaatcatcaccgacgagactaacgattcgctcgtggccccgcaggaaaagcaggtgcacaagtctatccttccgaattcgctcggagtgtccgaacgattgcaaagattgacttttccggctgtgtcggtgaaggtcaacggccatgaccagggacagaaccccccgctggacctggaaaccactgcccgctttagagtggaaactcacacccagaaaaccatcggcggaaatgtgaccaaagagaagccgccttcactgatcgtccctctggaatcacagatgaccaaggagaaaaagatcaccggaaaggagaaagaaaactccagaatggaagagaatgcagagaatcacatcggagtgactgaggttctcctgggcagaaagctccagcactacaccgattcgtatctgggcttcctgccctgggaaaagaaaaagtacttccaagatctcctcgatgaggaagagtccttgaaaactcagcttgcctactttactgacagcaagaacactggccggcaactcaaagacaccttcgcagacagcctgagatacgtgaacaaaatcctcaactcgaagttcggattcacttcccgaaaggtcccagcacacatgccgcacatgattgaccgcatcgtgatgcaggaacttcaagatatgttcccagaagagttcgacaagacttcgttccataaggtgcgccactccgaagatatgcaatttgccttctcgtacttctactacctcatgtctgccgttcagccacttaacatctcgcaggtgttcgacgaagtggataccgaccagtcgggagtgttgtccgatcgggagattcggactctggcgacccggattcatgaactgccgctgagcttgcaggatctcaccggccttgagcacatgctcattaattgctcaaagatgctgcctgccgatatcacccaactgaacaatatcccgccgacccaggagagctactacgacccgaacctccctccagtgaccaagtccctcgtcacgaactgcaagccagtgactgacaagatccataaggcttacaaggacaagaacaagtaccggttcgagatcatgggagaagaagaaatcgccttcaagatgatcagaaccaacgtgagccatgtggtcggtcaactggacgatatccggaagaacccacggaaatttgtctgcctgaacgataatatcgaccataatcataaggatgcgcaaacggtgaaggcagtcctgcgcgacttttacgaatccatgttcccaatcccttcgcagttcgagctgccgagagagtaccggaatcgcttcctccacatgcatgaattgcaagaatggcgcgcctaccgtgacaagttgaaattctggacccactgcgtgctcgccaccctgatcatgttcaccatcttctcgttcttcgcggaacaactgattgcactgaagcgcaagatcttcccgagacggcggatccacaaggaggcttccccaaaccgcatcagagtc

SEQ ID NO: 215059 - DNA, 3768 bp, Artificial Sequence
  derived and/or modified sequence
atgttattcaaactgctccagagacagacatacacgtgcctcagccataggtatggcctctacgtctgttttctgggggtcgtcgtaacgatcgtctcggcgtttcagtttggggaggtggtcctcgaatggtcccgggatcagtaccacgtattgttcgactcctaccgagacaacatcgcagggaagtcattccaaaataggctctgtttgccgatgccgatcgacgtagtatacacctgggtgaacgggaccgacttggagctcctgaaagagcttcagcaggtgagagaacaaatggaggaagaacagaaggcgatgcgggagattctgggtaaaaacaccaccgaacccacaaagaagtccgagaagcagcttgaatgcctcttgactcattgcatcaaggtccccatgctagtattagatcccgcgttgcctgcaaatatcacgctcaaagacctcccttccctctacccatcattccacagcgccagcgatatttttaacgtagccaaaccaaaaaaccccagcaccaatgtgagcgtggttgtctttgactctacaaaggacgtggaggacgcccatagcggattgttgaagggtaacagtaggcaaaccgtgtggagggggtacctgaccacggacaaagaagtaccaggcctggtcctcatgcaagacctggcttttctgtctggatttccccctacttttaaagaaaccaatcagctaaaaacaaagctgcccgagaacttatcctctaaggtaaaattgctccagctctacagtgaagcctcagttgccttgcttaagttgaacaacccaaaagacttccaggaactcaacaagcagactaagaagaatatgacaatcgatgggaaggagttgaccattagtccagcctacctgctgtgggacctatctgctatcagccaaagtaaacaggatgaagacatcagcgcctctcgatttgaggataacgaggagctgcgttattccctgagatctatcgaacgccatgccccttgggtgagaaacatattcatcgtgactaatggccagattccctcttggctgaacctggataaccctagggtcacaatagtgacccaccaagacgtctttcggaatctgtcccacttgcccacttttagtagccctgcaattgagtcccacatccatcggatcgaggggttgtctcagaaatttatctacctcaatgatgatgtgatgtttggtaaggacgtgtggcctgacgatttctattcacacagtaaaggacagaaagtgtacttgacttggcccgtgcccaactgcgctgaggggtgccccgggtcctggatcaaagacggatattgtgacaaggcttgcaacaatagcgcctgtgactgggatgggggagattgcagtggtaactccggcgggagccgctatattgccggtggaggtggcaccggttccataggggtcggacagccctggcagtttggaggaggaattaatagcgtttcatactgtaatcaggggtgcgcaaactcgtggctggcggataaattttgtgatcaggcttgcaatgtgttgtcttgcggcttcgatgcaggcgactgcggacaggaccatttccatgagctgtacaaggtgattctcttgccaaaccagacacactacatcataccaaaaggcgaatgtttaccatattttagctttgctgaagtggctaaacggggcgtggaaggagcatacagcgacaatcccataatccggcacgcgtctatcgccaataagtggaagaccatacacctcatcatgcattctgggatgaatgccaccacaattcactttaacctgacattccaaaatacaaacgacgaagagttcaagatgcaaattaccgtcgaagtggacaccagggaaggtcccaagctgaacagtactgctcagaaggggtatgaaaaccttgtaagtccgatcactctgctccccgaagcagagatcctgtttgaggacatacccaaggagaagcgcttcccaaagtttaagcgccatgatgtgaacagtactcgtcgggcacaggaggaagtgaaaattccgctggtgaatattagtctcttaccgaaagacgcgcaactgtccctgaataccctggacctgcagctggagcacggagacatcacgctcaagggctacaacctctccaagtcggctctcctgaggtctttcctgatgaactctcaacacgcaaaaataaaaaaccaggctatcataacggatgagaccaacgactctctggtcgcacctcaggagaaacaggtgcacaagtctatcctgccaaacagcctcggggtgagcgagaggctccagcgcctgacattccctgctgtttccgtgaaggtgaacggccacgaccaggggcagaatccaccgctcgacctcgagactaccgccagattcagggtggagacgcatacccaaaaaacaataggcggcaatgttaccaaggaaaagcctcccagcctgattgtacccctagagtcacagatgacaaaggagaaaaaaattaccgggaaagaaaaggagaactcacgtatggaggaaaacgcagaaaatcacataggggtgacggaagtcctgctcgggaggaagttgcagcattacaccgactcctacctcggctttctgccttgggaaaagaaaaaatactttcaagatttactagatgaggaggagtcactcaaaacacagctagcttactttaccgactccaaaaacacaggcaggcagttgaaggacacgtttgcagactccctgaggtatgtgaacaagatactgaatagcaaatttgggtttacatcaaggaaagtaccggcccatatgccccacatgattgataggatagtgatgcaggaactccaggatatgttcccagaggagtttgataagacttccttccataaagtcaggcattctgaagacatgcagttcgcctttagctacttttattatttgatgagcgccgtccaacccctgaacatctcccaagtgttcgatgaggtagacacagatcagtccggtgttctgtctgatagagagattcgaacactggcaacaagaatccatgaattgccgttgtcactgcaagacctgacaggcctagagcatatgctgataaactgcagtaaaatgttaccagcagacatcactcaactgaacaatattccacccactcaggaatcatattacgatccaaacctgccacctgtgaccaaaagtctggtaaccaactgcaaaccggtcacggataaaatccacaaagcctacaaggataagaataagtacagattcgagatcatgggagaagaagagatcgcattcaaaatgattagaacaaacgtctcacacgtcgtcggccaactggacgacattaggaaaaacccacggaagttcgtttgcctcaatgacaacatcgaccataatcacaaagacgcccagacagtgaaagcggttctgagggacttctacgaatccatgtttcccatcccttctcagttcgaactgccccgggaatataggaaccggttcttgcacatgcacgaactccaggaatggcgtgcgtaccgggacaaactgaaattctggacacattgtgtgttggccactctgatcatgttcaccattttctcattcttcgccgagcagctgattgccttaaagagaaagattttcccccgaaggagaattcataaggaagcatcgcctaaccgaataagagtg

SEQ ID NO: 215060 - DNA, 3768 bp, Artificial Sequence
  derived and/or modified sequence
atgctatttaagctgctacagcggcagacatacacgtgtctaagccacaggtacggtctctacgtttgctttctgggcgtagtggttacaattgtaagcgccttccagttcggcgaggtggttcttgagtggagcagagatcagtatcacgtcctgtttgattcctatagggataatatcgccggcaaatcatttcagaacagattgtgtctccctatgcccatagacgttgtgtacacgtgggtgaatgggacagacttggaactcttgaaggagctgcagcaggtgcgcgaacagatggaggaggaacagaaagccatgagggaaatccttgggaaaaacaccacagagcccaccaaaaagtctgagaagcaactggagtgtctactgactcactgtatcaaggtccctatgctcgtcctggaccctgccctgcctgccaatattactttaaaggatttgcctagcctttatcccagctttcatagtgcatccgatatctttaacgtggccaaacctaagaacccttcgactaatgtctctgtcgtggtattcgacagcacaaaagatgtggaggacgcacacagcggcctgctcaaaggaaactctcgtcagaccgtttggcgggggtatctgactaccgataaggaagtgcccggcttagtgctgatgcaggatctcgcctttctgtctggatttcctcccacctttaaggaaactaaccaattaaagaccaagctacctgaaaatctgtcttcaaaagtgaagcttctgcagctttattctgaggccagcgtcgccctactgaagctgaataatcctaaggatttccaggagctgaacaaacagacaaagaagaatatgacaatagatggaaaggaactcaccatctcgccagcgtacctgctgtgggacctgtctgccatttctcaaagcaagcaagacgaagacatctcagcttccagatttgaggataatgaggagctaaggtatagccttcggtccattgagaggcatgctccttgggtcaggaatatttttatagtcaccaacggacagataccatcatggctgaacctggacaatccccgcgtgaccatagtgacccatcaggacgtttttcgcaatttatcccatctgcctacattctcatctcccgctattgagagccatatacatcggatcgaggggctgtctcagaaattcatctatttaaatgatgacgtgatgtttggcaaggatgtttggcccgacgacttctactcacacagtaaaggccagaaagtctacctgacctggccagtgcccaactgcgccgaaggctgcccgggaagctggattaaagacggatactgcgataaagcatgtaacaatagtgcctgtgattgggacggaggcgactgcagtggcaattcagggggctcacgatatattgcgggtgggggcggcacagggtccatcggagtgggtcagccctggcagtttgggggaggtattaactcggtgtcttactgcaaccagggatgcgctaacagttggttagcggacaaattctgcgaccaggcttgtaatgttctctcctgcggttttgacgccggggattgcggccaggaccatttccacgaactatataaggttattctgttgccgaatcagactcattacatcatcccaaagggagagtgtctcccatacttctcgttcgctgaagtggcgaagagaggcgtcgagggggcttacagcgataaccctattatccgtcatgcatccatcgctaataaatggaagaccatccatctgataatgcacagcggcatgaacgccacgacaatacactttaatctgacgtttcaaaataccaatgatgaggagtttaagatgcagattacagtcgaggtggataccagagaggggcctaagctaaatagtactgcccagaaaggatacgagaaccttgtatccccgattacgttgctacctgaggctgaaatactgttcgaagacattcctaaggagaaacgctttcccaagtttaagaggcacgacgtaaatagcactcgtagggcacaagaggaggtgaaaattccactggtcaatatcagtctgctgcctaaggatgcccagttgtcattgaatactcttgacttgcagttagaacacggagacataactctgaaggggtacaacctgtctaagtcagcactgctcagatccttcctgatgaattctcaacacgccaagataaaaaatcaggctatcataactgatgaaactaacgacagcctcgtcgccccccaagaaaaacaagtgcacaaaagtatcctcccaaatagtttaggggttagtgagcgactgcaacgcctaacgtttcctgctgttagcgtcaaggtaaacggacatgatcagggacaaaacccccctctcgatcttgaaactacagctagattccgggtagagacgcatactcagaagacaatcggcggcaacgttactaaggagaagcccccttctctgatagtgccactggagtcgcagatgaccaaagagaagaagattactggaaaagagaaggagaacagtcggatggaagagaatgcagagaaccacatcggtgtaactgaggtgctgctgggcagaaaattgcagcactacactgacagttaccttggcttcctgccatgggaaaagaagaaatactttcaggacctgttggacgaagaagaaagcttaaaaactcaactcgcttacttcactgacagtaagaataccgggcgccagctgaaagatacatttgcggattctttgcggtatgtgaataaaatattaaacagcaagttcggcttcacctcgcggaaggtgccagcacacatgccgcacatgattgatagaattgtgatgcaagagctccaggacatgttccctgaggagttcgacaaaacgtcctttcataaggtcaggcactcagaggatatgcagtttgctttcagctacttttattacctgatgagtgcagtacagccattgaatatctctcaggtgtttgatgaggtggacaccgaccagtcaggcgttctgagcgacagagagatcaggacactcgccactcgcatacacgaactcccactgtctttacaggatctaactggcctagagcacatgttgatcaattgttcaaagatgctgcccgccgatattacacaactaaataatatcccacctacacaggagagctactatgaccctaacttaccccccgtgaccaagtccctggtaaccaattgtaagcccgtgacagacaagatccataaggcttataaggataaaaataagtatcgatttgaaattatgggcgaggaagaaattgcctttaagatgattagaacgaatgtgagccacgtggttggacagctcgatgatattaggaagaatcccagaaaattcgtttgtttaaatgataatatcgaccacaatcacaaggacgcccagactgttaaggccgtgctaagagatttttacgaatcaatgtttcctattcccagccaattcgagctgcctcgtgaatacagaaatagatttctgcacatgcacgaactgcaggaatggcgggcgtatagggataagttgaagttttggacgcactgcgtgctggcaactctgattatgttcacaattttttcatttttcgccgaacagttaatcgcactgaagaggaagattttcccgcgacgacgaattcacaaggaagcttcgccaaaccgcataagagtt

SEQ ID NO: 215061 - DNA, 3768 bp, Artificial Sequence
  derived and/or modified sequence
atgctatttaagctcctgcagcggcaaacttatacctgcttgtctcatagatacggactttatgtatgctttctgggcgtcgtagttacaatagtctctgcctttcagtttggtgaggtggtactcgagtggtctcgcgaccaatatcatgtgctcttcgatagttaccgtgacaacattgctggcaagtccttccagaacagactgtgcttaccgatgcccattgatgttgtgtacacatgggtcaatggtacagacctggagctcctgaaggagctgcagcaggtacgtgagcaaatggaggaggaacaaaaggcaatgagggagatcctaggcaaaaatactaccgaacctaccaagaaatcggagaagcagctggaatgcctgctgacacactgtataaaggtgccaatgctggtgctggacccggccctgcctgctaacatcacgctgaaggatctgccaagcctgtacccctcctttcactccgcatccgatatttttaacgttgccaagccaaagaacccatcgaccaacgtctctgtggttgtgtttgatagtacgaaggacgtggaagatgcgcattcggggctgctgaagggcaactccaggcaaacggtctggaggggttacctcactaccgataaggaggtccccggactggtgttaatgcaggatttggctttcctgtcggggttcccacccacgttcaaggagaccaatcaacttaagaccaaactcccagagaatctgtcgagtaaggtaaagttacttcaactatacagcgaagcgagcgtggctctactgaagttaaacaacccaaaagactttcaggaactcaataaacaaactaagaaaaacatgacaatagatggcaaagagctgaccatcagtcccgcgtatctgctgtgggatctgagcgctatcagtcaatctaagcaggacgaggacatcagcgcatctcggttcgaggataacgaggagttgcgctactctctccgaagcatagagcgtcatgctccctgggtcagaaacatcttcatagtcaccaacgggcagattccttcatggctcaacctggacaatcctcgtgtcaccatcgtgactcaccaagacgtgttccggaacctgagccatctgccgacctttagttccccggctatcgagtcccacatacacagaatcgagggtttgtctcagaagttcatctatcttaatgatgacgttatgttcggcaaagatgtgtggcccgacgatttctactcccatagtaagggtcagaaggtctatcttacctggccagtgcccaattgtgctgagggttgccccgggtcctggataaaggacgggtactgcgataaagcttgcaataatagcgcgtgcgactgggacgggggagattgtagtggcaattccggaggctccaggtacattgctggcggtggcgggaccggctccattggcgtgggtcaaccttggcagtttggggggggcatcaatagcgtgtcgtattgcaaccagggctgcgcaaactcatggctggccgacaaattctgtgaccaggcatgcaacgtgctgagttgcggatttgatgccggtgactgcggacaggaccattttcatgagttgtacaaagtcatcctcctccccaaccagacacactacattatacctaagggtgaatgtctgccctatttctccttcgcggaggtggcgaagcgcggagttgagggagcttactcagataacccgataatccgacatgcctcgatcgcaaacaaatggaagaccattcacttgatcatgcacagcggaatgaacgccacaacaattcattttaaccttaccttccagaataccaatgatgaggagttcaagatgcagattaccgtggaggtggacacccgcgaagggcctaagctgaatagcacagctcagaaggggtacgaaaatctggtttcccctattacccttctgccagaggccgaaatactgtttgaagacattcctaaggagaagcggttccccaagtttaaacgccacgacgtcaacagtacccgaagggcccaggaggaagtcaaaatcccgctggtcaacatttctctgctgccgaaagatgcccagctgtcactgaacacattggacttacaacttgaacatggggacattaccctgaagggctacaacctgtctaagtccgccctgctgcggtcctttctcatgaacagtcaacatgccaaaataaagaaccaggctattattactgacgagacaaatgattctctcgtcgctcctcaggaaaagcaggtccacaaatctatcttgccaaatagcctgggcgtcagtgaacgtctgcagcgcctcacgttccctgccgtgtccgtgaaggtcaacgggcacgatcaggggcagaatccccctctagatctagaaactaccgccaggttccgggtcgagacccacactcagaagaccataggtgggaatgtgacgaaggagaaacccccgagcttaattgtgccactggagtcacagatgaccaaagaaaagaaaatcacaggcaaagagaaggagaacagcagaatggaggagaacgcagagaaccacatcggcgtaactgaggtgcttctgggcagaaagctccagcactacacagatagctacctgggttttttaccctgggagaagaagaaatacttccaggatctgttagatgaagaggagagtctgaaaacccagctggcctactttaccgactcgaaaaacacaggtcgacagctgaaagatacctttgccgactcgctgaggtatgtgaacaaaatactgaattctaagtttggtttcacgtcccggaaggtccccgcgcacatgccccacatgatcgataggatcgtaatgcaggaactgcaggacatgttcccagaagagtttgacaaaacctcttttcacaaggtccgccatagtgaagacatgcagtttgcattttcgtatttctactacctgatgtccgccgtgcagccattgaatatcagtcaggttttcgacgaagttgacacagaccagtctggcgtcctgagcgatagggagatccggaccttagcaaccagaatccacgaactgcccctgagcttgcaggatctgactggactggagcatatgcttatcaactgttctaaaatgctgcccgctgatattacccagctgaataacatcccccccacgcaagaaagttactatgaccctaacctcccccccgtaacgaagtcactggtgaccaactgcaagccagtgacagacaagattcacaaggcttataaggacaagaataagtaccgcttcgaaataatgggagaagaagagattgcttttaaaatgatccgcacgaatgtcagccacgttgtcgggcaactggacgacattagaaagaatccccgcaagttcgtctgtctgaacgacaacatagaccacaaccataaggatgctcaaacggttaaggcagtgctgcgggacttttatgagagcatgttcccaatacccagccaattcgagttgcctcgggagtaccggaatcgctttctccacatgcatgagctgcaagagtggcgtgcctatcgcgacaaactgaaattctggacgcactgcgtgctggcgactttgattatgtttacaatcttttccttcttcgcagaacagctcattgcgctcaaacggaagattttcccccggcggcgcatccacaaggaggcctcccccaatcggattcgcgtt

SEQ ID NO: 215062 - DNA, 3768 bp, Artificial Sequence
  derived and/or modified sequence
atgctttttaagcttctgcaacgtcaaacttacacatgcctctcccatagatatggtttgtacgtttgctttcttggtgtcgtcgtgacaatagtctcagcattccagtttggtgaggtggtactagagtggtcaagagaccagtaccatgtgttgtttgattcgtatcgagataacattgctgggaagagctttcagaaccgcttatgtcttcctatgccaattgacgttgtttacacatgggttaatggtaccgatctcgagctgcttaaagaattgcagcaagtaagagagcagatggaagaggagcagaaggccatgagggagatattaggaaaaaacactactgagcccacaaaaaagtctgagaagcagctggagtgtcttttgacacattgcataaaggttcctatgttagtgctcgacccagctttgcctgcgaatataacccttaaagatttacctagcttgtacccttccttccactccgcttctgatatattcaacgtcgctaagcctaagaacccttctactaacgtaagtgttgtggtgtttgattcaacaaaggatgtcgaagatgctcatagtgggcttcttaagggtaattccaggcaaacagtttggaggggatatttgactactgacaaggaagtccccgggctcgttttgatgcaagatcttgcattcttatccggttttccacctactttcaaagagacaaatcagctcaaaactaagcttccggagaacttaagtagtaaggtgaagctcttgcaattgtactctgaggctagcgttgctctcttgaaactgaacaaccccaaggattttcaagaacttaacaaacaaactaagaaaaatatgactattgatgggaaggaacttacaatctctccagcctaccttctttgggatttatcggcaatctctcagagtaagcaagacgaggatatatctgcgagtaggttcgaggacaatgaggaactgcgttatagtctcagaagcatcgaaaggcatgccccatgggtgagaaatatatttatcgttaccaacggtcagataccgtcatggctcaacttggataacccccgagttaccatagtgacccaccaagatgtttttaggaacctctctcatctcccgactttctcttcccctgctatcgagtcacatattcatcgaattgaggggctctctcaaaaatttatttacttgaatgatgacgttatgttcggtaaagatgtctggccggacgacttttatagccatagtaaaggacagaaggtgtatttaacatggcctgttcctaattgtgctgaggggtgtccgggttcttggatcaaggatggatattgcgataaagcatgcaataacagcgcctgcgattgggatggtggagattgctccggaaactctgggggcagtaggtatatagcaggaggggggggtaccggttcaatcggtgttgggcagccctggcagttcgggggtggaattaacagtgtttcttactgtaaccaaggttgcgctaactcttggcttgctgataagttttgtgatcaagcgtgcaatgtgctatcctgcggattcgatgccggtgattgtggtcaagaccacttccacgaactgtacaaggtcattctcctgcctaatcagactcattatattatcccaaagggagagtgcctcccatacttttctttcgcggaagtagctaagcgaggggtggagggtgcctactcagataatccaatcattcggcatgcatctattgctaacaaatggaagactattcacctgattatgcattctggtatgaacgccacgacgattcatttcaacttaacattccaaaacacaaatgatgaagagttcaagatgcaaattacagttgaagtggacactagagagggacctaagctcaattccaccgctcaaaaaggttacgagaatctagtttccccaataactctgctgccggaggctgagatactcttcgaagacataccgaaggaaaagagatttccaaaatttaagcgacacgatgtgaatagcactaggcgtgctcaagaagaagtaaaaattcccctggtgaatatttccctccttcctaaggacgcacaattgtcacttaatactcttgatctccaactcgagcatggtgatattactcttaaggggtataacctgtcaaaaagcgctctattacgatcattcttgatgaactcccaacacgcaaaaattaagaatcaggctattataactgacgaaacgaatgattctctagttgctccacaggagaaacaagtgcataaatcaattttacctaacagcttgggcgtctcagagagactacagcgtttgacctttcctgctgtttcggttaaggttaatggacacgaccaagggcagaatccccccctggatttggagaccacagctaggtttagggttgagactcacacccagaaaacaatcggcggaaatgtcacgaaagaaaaaccaccaagtcttatcgtccccctggaaagtcaaatgacgaaagaaaagaaaattacagggaaagagaaagagaattctaggatggaagagaacgctgaaaatcacatcggtgttaccgaagttcttcttgggagaaagcttcagcattatacagactcctacctcggattccttccctgggaaaaaaaaaagtattttcaggatctgttggatgaagaagaatctctaaagacacaacttgcatacttcactgactctaagaatactggacgtcagctaaaggatactttcgctgattcgcttaggtatgtgaataaaattcttaatagcaagttcggattcacatccaggaaggtccctgctcatatgcctcacatgattgataggattgttatgcaagaacttcaggacatgtttccagaagagtttgataaaacttcatttcataaagtgaggcacagtgaggatatgcaatttgctttctcttacttttattatttaatgtccgctgttcagccccttaacatcagccaagtctttgatgaagtcgatacagatcagtcaggggttctttcggatagagaaatccgaacgctcgctaccaggatccacgagttgccactttcactgcaggatcttaccggtcttgaacatatgctaatcaattgctctaagatgttgcctgctgatattacacagctaaataatatccctccaactcaggaatcctactatgacccaaaccttccgcctgttactaagagtctagtaactaactgtaaaccagttactgacaaaatacacaaggcttataaagacaagaacaaatatagattcgagattatgggtgaggaagagatcgcattcaaaatgattcggacaaatgtttcgcacgtggtcggtcaacttgatgatatcagaaaaaatcctcgtaaattcgtttgtttgaacgacaacatcgaccataaccataaagacgctcaaacagttaaagctgtgctgagggatttctatgagagcatgttccccattccgtcccaatttgagttgcccagggaatataggaatcgctttctccatatgcatgagcttcaagaatggcgagcctatagggataagctcaaattctggacacactgcgtgttagctactctaataatgttcacaatatttagcttctttgctgagcaattgattgctttgaaaaggaagattttccctaggagaagaatacacaaggaggctagccctaataggattagggtg

SEQ ID NO: 215063 - DNA, 3768 bp, Artificial Sequence
  derived and/or modified sequence
atgctgtttaaactgctgcaacggcaaacctatacttgcctttcgcacaggtatggactgtatgtatgctttctaggtgttgtggtcactatcgtatcagccttccagttcggcgaagtagtcctggaatggtcaagagatcaataccacgtgcttttcgactcgtaccgggataacattgcaggaaagtcctttcagaatcgcctctgtctccctatgccaatcgatgttgtctatacctgggtgaatggtactgacctggagttattgaaggagctgcagcaggtccgcgagcaaatggaggaggaacaaaaggcaatgcgtgagatattaggaaaaaacaccactgaacctaccaaaaagtctgagaaacagttagaatgtctgctcactcattgtatcaaagtgcctatgctggtgctggaccctgcactccccgccaacataacactgaaggatttacccagcctgtacccatccttccactcagctagcgatatcttcaatgtagctaaacccaaaaacccatccactaacgtttccgtagtggtatttgatagcaccaaggatgtcgaggacgcacactcagggcttctgaagggcaactctcgccaaactgtctggcgaggatatctcacaacagacaaggaggtccccggactggtgcttatgcaggatctggctttcctaagcggctttcccccaacattcaaggagaccaaccagctcaaaactaaactgcccgaaaacctgtcctctaaggtcaagttactgcagctctactcagaagccagcgtcgccctcctcaaattaaacaatcctaaggacttccaggaactgaataagcagactaaaaagaacatgaccatcgacggaaaagagctgaccatctcccctgcctatcttctttgggacctgagtgcaatctcacaatccaagcaagacgaggatatctcagcctcacgattcgaagataatgaagagctccgatattcgctccgcagtatcgagcggcacgccccctgggtcagaaacatcttcatcgtgaccaacggacagattccctcgtggctcaacctggataatccccgcgtgacgatcgtgacacaccaggatgtcttccggaatctctctcacctgccaacttttagctcacccgccatcgagtctcatatccacaggatagaaggtctatctcagaagtttatttatctgaatgacgacgtcatgtttggaaaggacgtctggcccgacgatttttactcccactctaaaggacagaaggtatatctcacatggcccgtgcctaactgcgcagagggctgtccaggtagttggatcaaagacggatactgcgataaagcttgcaacaatagcgcatgtgactgggacggcggtgactgttccgggaatagcggtgggtcacggtacattgccggtggcggaggtacagggtccataggagtcgggcagccttggcaatttggtggcggcatcaatagcgtgagctattgcaatcaaggctgtgcaaattcttggctggccgataaattctgtgaccaggcctgcaacgttctgagttgtggctttgacgctggcgactgcggccaggatcacttccatgagctgtataaagtcatactgctgcccaaccagacccactatatcattcctaagggcgaatgtctgccctacttctcctttgccgaggtggcaaagcgcggggtggaaggcgcatattccgataatccaatcatcagacacgccagcatcgcaaacaagtggaagactatacacttgatcatgcattcggggatgaatgcgacaactattcactttaacctaaccttccaaaatacgaacgatgaggagttcaagatgcagatcaccgtcgaggtggacacccgcgagggacccaaactcaacagcactgcgcagaagggttatgaaaaccttgtgagccccatcactttgcttccagaggccgagatactgtttgaagatataccaaaggagaaaagatttccaaagttcaaacggcacgacgtcaatagcactcgcagggcccaggaggaggttaagatccctcttgtgaacatatctctgctcccaaaggatgcccagcttagcctgaatacactggatttacaactcgagcatggagacatcacattgaaaggctacaacctgtccaaaagcgctcttctcagatcattcctgatgaacagtcagcacgccaagattaaaaaccaagccatcattaccgatgaaacgaacgactccttggtcgcaccacaggagaagcaggtgcataagtccattctgccgaactctctcggggtctctgagaggctccagaggctcactttcccagcagtctctgtgaaggttaacggccacgaccagggtcagaatccccccctggacttggagacaacagcccggtttcgagtggaaactcatacccagaagacgatcgggggcaacgtaaccaaggagaagcctcccagtttgatagttcccttagaatcccagatgaccaaagaaaagaaaattacgggaaaggaaaaagaaaactcgcggatggaggagaatgctgagaaccacatcggcgtgaccgaagtgttgctaggaaggaaactgcaacactacaccgatagttacctcggcttcctgccctgggaaaagaaaaagtatttccaggatctgctcgatgaggaggagtctctgaagacacagctagcctattttaccgatagcaaaaataccggcaggcagctgaaggatacgtttgccgatagtctacggtacgtgaataagatcctcaactccaagttcggtttcaccagtaggaaagtcccagcccatatgccacatatgattgataggatcgtcatgcaggagctgcaggacatgtttcctgaagaattcgataagactagttttcataaggtgcggcacagcgaggacatgcagtttgcgttttcatacttctactacctgatgtcagctgtacagccattgaacatctcacaggtgtttgacgaggtggatacagatcagtcaggagtgctgtcagaccgagaaatccgtacgctggccacgaggatccatgagctgccactatctctgcaggatctgaccgggctggagcacatgctgatcaactgcagcaagatgctgcccgcggacatcacccagctgaataatatcccgcccacacaagaaagttattatgatccgaacttaccacctgtgaccaaatccctagttaccaactgtaagcccgtgacagacaaaattcataaggcatacaaagataagaacaagtatcgcttcgaaatcatgggcgaagaggagattgcctttaagatgataagaaccaatgtcagccacgtcgtcggccagctcgacgatatcaggaagaatccgcgaaaatttgtgtgcctgaacgacaacattgaccacaaccacaaagacgcccagaccgtcaaagccgtgcttcgcgatttttatgaaagcatgttccctataccctcccaattcgaactcccacgggagtatagaaataggtttcttcacatgcacgaacttcaggagtggcgcgcctacagagacaaactcaagttctggactcactgcgtgcttgcaacactgattatgtttactatcttctctttctttgccgagcagctgattgctttgaagaggaaaatatttccaagaaggcggatccacaaggaggccagtcccaatcgaattagggtg

SEQ ID NO: 215064 - DNA, 3768 bp, Artificial Sequence
  derived and/or modified sequence
atgctcttcaaactgttacagcgccaaacctacacttgcttgtcacataggtatgggttatacgtgtgttttcttggcgtggtcgtaacaattgtgagcgctttccagttcggtgaagttgtgttagagtggtcccgcgatcaatatcacgtgctctttgattcttatagagacaacatcgctgggaaatccttccagaacagattgtgtttgcccatgcccatcgatgtagtctatacctgggtaaatgggacagaccttgagctgttgaaggaactgcagcaggttagggaacagatggaagaagagcaaaaggccatgagggaaatcttaggcaaaaataccaccgaacctactaagaaatccgaaaaacaactcgaatgcctgctgacccactgcattaaggtcccaatgctggttttggatcccgccctgccagctaacattactcttaaggacttgccttcgctttaccctagcttccactcagcttcagatatcttcaacgtcgcaaagcccaaaaatccttctactaatgtgtccgtcgtggtgtttgacagcacaaaagacgttgaggatgcccattccggcctgctgaaaggaaattcgcggcagaccgtttggagaggctacctgactaccgacaaggaagtccctggactagtactgatgcaggatctcgctttcttgtccggttttccaccaacattcaaagaaacaaaccagctgaagactaaactaccagagaacctctcctctaaagtcaagttgctccaactctacagcgaggcatctgtggccctcctgaagctcaataacccaaaagatttccaagaactgaataaacagacaaagaagaacatgaccatcgatggcaaagaattaaccattagcccagcctacttgctgtgggacttgagcgcaatcagtcaaagcaagcaggacgaggacatcagcgctagcagattcgaagacaatgaggagttaaggtacagcctgaggtcgatcgaacgacacgcaccatgggtcaggaatattttcatcgtgactaacggtcagatcccaagctggcttaacctggataacccccgagtaaccattgtgactcatcaggatgtgttcaggaatctatcacacctgccgaccttctcatctccggcgattgagtctcatatccatcggattgaaggactgtcacagaaattcatctatctgaacgacgatgtcatgtttggcaaagatgtctggccagatgatttctacagccattccaagggccagaaggtgtatcttacctggccagtcccgaattgcgcggaggggtgccctgggagttggatcaaagacggctattgtgataaggcctgtaataactccgcatgtgattgggacggcggcgactgttcagggaatagtgggggtagtaggtatattgcgggcggtggaggcactggctccatcggcgtgggccagccatggcagtttggcggtggcatcaactcagtttcctattgcaatcaggggtgtgctaatagttggctggcagacaagttttgcgaccaggcctgtaacgtcctcagttgcggcttcgacgccggcgattgtggacaggatcactttcatgagctgtacaaagtgatactgctccctaatcagacgcactacataattcctaagggcgagtgtctcccctactttagctttgccgaagtggctaagagaggggtggaaggggcgtattcggacaatcctatcatcagacatgcgtcaatagccaacaaatggaagaccatccacctcattatgcatagtggaatgaatgcaacgaccattcatttcaacttaacattccagaataccaatgatgaggaattcaagatgcagattacagtagaagtggacactcgcgaaggaccaaaactgaatagcaccgcccaaaagggatatgagaacctggtctcccctattacgctgctgcccgaagctgaaatcctgttcgaagatatcccgaaggagaagagatttcccaaatttaaaaggcacgacgtcaatagcacccggcgcgctcaggaggaagtgaagatcccacttgtgaacatctctctgttacccaaggacgcgcagctttccttgaacacgctcgatcttcaattagaacacggagatatcactctaaagggttataacctatcgaaaagcgccctgcttagatccttcctgatgaatagccaacacgcaaagataaaaaatcaggctataatcaccgatgagaccaatgactctcttgtggcgccacaggagaaacaggtccataaatctatcctgccaaactccctcggcgtctctgaaagattacaacgccttacatttcccgctgtgtctgtgaaggtgaatggccacgaccaaggccagaacccaccgttagatttggagacaaccgcacggtttcgcgtggagacacacacacagaagacgataggaggaaatgtcaccaaggagaaacccccctcgctgattgtgcctctagagtcccagatgacgaaggaaaagaaaatcaccggcaaggaaaaggaaaacagcagaatggaggaaaatgctgaaaaccacattggcgtcacagaagttcttctgggacgcaaattgcagcattacactgatagctaccttggtttcctcccgtgggagaagaaaaagtactttcaagatttactagacgaggaagagagtcttaagactcagctagcctatttcacagactcgaagaataccggaagacagttaaaggacaccttcgcggatagtttacgatatgtcaacaagatccttaacagcaaatttgggtttactagtaggaaagtgcctgcccacatgcctcatatgattgatcgaatcgtgatgcaggaattgcaggacatgtttccagaagagtttgataaaacctctttccataaggtgaggcactctgaggacatgcaatttgctttctcttacttttactacctgatgtccgccgtgcagcctcttaacatatcacaagtgttcgacgaagtggataccgaccagagcggtgtcttgtcagaccgagaaattcgcacactggccacacggattcatgaactgcctttgagtctccaagacctgacaggtcttgaacatatgctcattaattgttctaaaatgctgccagccgacatcacccaactcaacaacattcctccgacccaggaaagctactatgatccaaacttaccaccagttactaagtctctggtgaccaactgcaaacctgtaaccgataagatccataaagcttacaaagacaaaaataaatatcgcttcgaaatcatgggggaggaggaaatcgcgttcaagatgatccgtaccaacgtgtcacacgtggttggacagctcgatgacatccgtaagaacccacgcaaatttgtctgcctgaatgacaacattgaccacaaccataaagacgcgcaaactgtgaaggcagtgctcagagacttctatgaaagcatgtttccgatcccatcacagttcgagctcccacgcgagtacaggaatcggtttctgcacatgcatgaactccaggaatggagggcttatcgggataaattaaagttctggactcattgcgtcctggcaactttgattatgttcaccattttttccttcttcgcggagcaactgatcgcccttaagaggaaaattttcccgcgcagacgtattcataaagaagcttcaccaaaccgcatacgcgtg

SEQ ID NO: 215065 - DNA, 3768 bp, Artificial Sequence
  derived and/or modified sequence
atgttgtttaaactcttacagagacagacttacacatgtctatcccatagatatgggctatatgtgtgcttcctaggcgtcgtggtcactatagtcagtgcattccagtttggtgaagttgtcctggaatggtctcgcgatcagtaccatgtgctattcgatagttaccgtgataacatcgccgggaagagtttccagaacagactgtgcctgccgatgcctatcgacgtagtatatacctgggtcaacggcacggatctagagctgctgaaagagttgcagcaagtgagggagcagatggaggaggaacagaaggcaatgcgcgagatactgggcaagaatactaccgagcccaccaagaagagcgagaaacagctcgagtgcttgctgacccactgcattaaggttcccatgttggtcctcgatcctgctcttcccgcaaacatcaccctgaaggatctacccagcctctatcccagtttccacagtgccagcgacatcttcaacgttgcaaagcctaagaacccatcaaccaatgtatcagttgttgtattcgactcaactaaagacgtggaagatgctcacagcgggctccttaagggaaattcccgccagacagtgtggcggggttatctgaccaccgataaggaagtgccaggcctggtgctgatgcaggatttggcattcctatctggctttccaccaacgtttaaagagacgaatcagttgaaaacgaagctgcctgagaacctgagctcaaaggttaaacttcttcagctgtacagtgaagcgtcagtagccctgctgaaactaaacaaccccaaggacttccaagaacttaacaagcagaccaaaaaaaacatgacaatagatggcaaagaactgacaatatctccagcttacttgctgtgggacttgtccgcaattagccagtccaagcaggacgaggacatatccgcaagcaggttcgaagacaatgaggagctcaggtattctctcagaagtattgagagacacgcaccttgggtgcggaatattttcatcgttacgaatggacagatccccagctggcttaatctggataatccccgggtaactattgtcacacaccaagatgtgtttagaaacctgagccacttgcctactttctcttcacccgcaattgagagtcacatccaccggatcgaggggctgagccagaagtttatttacttaaacgatgacgtgatgtttggcaaagatgtttggcctgatgacttttacagccatagcaagggccagaaagtgtatctgacctggcctgtcccaaactgcgcagaagggtgccctggatcctggatcaaggacggatattgcgacaaagcgtgtaataacagcgcttgcgattgggatgggggggactgcagtggtaacagtggtgggtctcgctacatcgctggcggggggggcactggatccatcggtgtaggccagccatggcagttcggtggagggatcaattcagtgtcctactgtaatcagggatgtgccaatagctggctggccgataaattctgtgaccaagcatgcaatgtgttgtcatgtggatttgatgcaggggattgtggccaggatcatttccatgagttatataaggtgattctgcttcctaaccagacacattacattataccaaaaggagagtgcctgccatacttttccttcgctgaggtcgccaaacgcggcgtcgagggggcatactccgacaaccccatcattcggcatgcctcgatcgctaataagtggaaaaccatacacctcatcatgcacagcggcatgaacgcaaccaccatacacttcaacctgacatttcagaatacgaacgatgaggaattcaagatgcagatcacagtggaggttgacacacgcgagggaccgaagcttaatagcaccgcgcagaaaggatatgagaatctggtgagccctatcacccttctgccggaggccgagatcctttttgaagacatcccgaaggagaagaggttccccaagttcaagaggcacgatgttaattccacaaggagggcacaggaagaagtgaaaatacccctggtgaatatttctctattgcctaaggacgcacagctgtcactgaatactctggaccttcagcttgaacatggcgacattacactcaagggatacaacctgtctaagagtgccctgttacgcagctttcttatgaattctcagcacgccaaaattaagaatcaggccatcatcacagatgagaccaacgacagcttggttgctcctcaagaaaagcaggtgcataagtcaatcttaccaaattctttgggcgtgagcgagcgactccagcggctgaccttccccgccgtgtccgtcaaggtgaacggacatgaccaggggcagaacccacctctggatctcgaaactacagctagattcagagtggaaacccacactcagaaaactattggaggcaatgtgactaaggagaaacccccgtctctgatcgtgcccctggagtcccagatgacaaaagaaaagaaaatcacggggaaagagaaggagaatagcaggatggaggagaatgcggagaatcacatcggtgtgaccgaagtcttgctcggaaggaagttgcagcactacacagacagctacctaggattcctgccatgggagaagaagaaatatttccaagacctgctggatgaagaagagtccctgaagacccagctggcctactttacagatagtaagaacacaggccggcagctcaaagacacctttgccgactctttgcgatacgttaacaaaatcttaaattccaagtttggcttcacgtcacgaaaagtgcctgcccacatgccacatatgattgatagaattgtgatgcaggaactacaggacatgtttcctgaggagtttgataagacatctttccacaaggtccgccactctgaagacatgcaattcgctttcagctacttctactatctcatgtccgctgtacagcctctgaatatttcacaagtgttcgatgaggtggatactgaccagagtggcgtgttgagcgatcgcgagattcggacattggccacaagaatccacgaattgccactgtccctgcaagatcttaccggcctggagcacatgcttattaattgcagcaagatgctgcctgctgatatcacccagctgaacaacattcctccgacgcaagaatcgtactatgatcctaacttacccccagtcaccaagtcactggtgactaactgcaaacctgtaaccgacaagattcataaagcgtataaggataagaataagtatcgcttcgaaattatgggagaagaagagattgcatttaaaatgatccggacgaatgtgtcccatgtggtgggccagctggacgacataaggaaaaacccccgcaaatttgtttgtctgaacgataacatagatcataaccacaaggacgcacagacagtgaaggccgtgttacgggatttctatgaaagcatgttcccaattccctcacagtttgaactgccacgagagtacagaaatcggtttctgcatatgcatgaactgcaagagtggagagcctaccgagacaagttgaagttctggacccattgcgtgctagcaactttgataatgtttactattttttcctttttcgctgaacagctgattgcactgaaaagaaaaatattccctaggcggaggattcacaaggaggcaagtcctaatcgcattagggta

SEQ ID NO: 215066 - DNA, 3768 bp, Artificial Sequence
  derived and/or modified sequence
atgctgttcaaactgctgcagcgtcagacatacacgtgtctttcacatagatatggcttatatgtttgctttctcggagttgttgtaacgatagtaagcgcttttcaatttggagaagttgtgctcgaatggagccgagatcaatatcatgtcctttttgattcgtatagggataatattgcgggaaaatcatttcagaacagactgtgcttaccaatgcctattgatgttgtgtatacgtgggtgaatggcacggacttggagctgcttaaagagctgcaacaagtgcgtgagcagatggaggaagaacaaaaggccatgagagaaattcttgggaaaaatacgacggaacccactaaaaaaagtgaaaaacagctggaatgcctgctgactcattgcatcaaggtacctatgcttgtacttgatcctgctctgcctgctaacataacgcttaaagatctgccttccctgtatccgagctttcactctgcgagcgatatatttaacgtggccaaacctaaaaatccgtcgaccaacgtttctgtcgtcgtgtttgatagcacgaaggatgttgaagatgcacattcaggcttgcttaaaggcaactcccgccaaacggtgtggaggggttatcttaccaccgataaggaagttcctgggcttgttttgatgcaggatcttgcctttctttcaggttttccgccgaccttcaaagaaacgaaccagttgaagacgaaattaccagaaaacctgagctctaaagttaaactgttgcagctttatagtgaggcatcggtggcgctgctgaaattgaacaatccaaaagatttccaggagctcaataaacaaacaaaaaaaaacatgacgattgatggcaaagagctgacaattagcccggcgtacctcttgtgggatctgtcagcaatctcacagtcgaaacaggacgaagatatttcggcttcgagatttgaagacaacgaggaattacggtatagccttagaagcattgagagacatgcaccgtgggtccggaatattttcatcgtgacaaatggacaaatcccgtcgtggcttaacttggacaatccgagggttactatcgttacgcaccaagatgtttttcgcaatctgagtcatcttccgacattctcctcaccagctattgaaagccatatacataggatcgaaggactatcgcaaaaattcatctatctgaacgacgatgtaatgtttggcaaggacgtatggccggacgacttctatagccatagcaagggacagaaagtttatctgacgtggccagtgcctaattgtgctgagggctgtccgggctcttggataaaagatggctactgcgataaagcgtgtaataacagcgcctgcgactgggatggaggcgactgctcagggaatagcgggggatctaggtatattgcaggtggcggaggcacaggctctattggtgtagggcagccgtggcagtttggtgggggcatcaactccgtttcgtattgcaaccagggctgcgcaaactcatggttagctgataaattctgtgaccaggcctgcaacgtgttaagctgcggttttgacgcaggcgattgcggccaagatcatttccacgaactctataaggttattcttttgccgaatcaaacacattatattattcccaaaggagaatgcttaccttattttagtttcgcagaagtggccaaacgtggtgttgaaggcgcgtattcagataaccctatcattagacatgcaagtattgcaaataaatggaaaaccatccatcttatcatgcattctggaatgaatgcgacgacaattcattttaacttgacctttcagaatacgaacgatgaagagttcaagatgcaaattacggtggaagttgatactagggaaggacccaaactgaactcgacggcacagaagggctacgaaaatttggtcagccctattactctcttaccagaagccgaaattctctttgaagatatcccgaaagagaaaagatttccgaagtttaagcgtcatgatgtaaattcgacacgtcgtgctcaggaagaagtgaaaatcccgctggtgaatatatcacttttgcctaaagatgcccaactttctttgaacactcttgatctgcaactcgagcatggagatattacgctcaaaggttataacctctctaagagtgcacttcttcgcagctttctcatgaattcacaacatgccaaaatcaaaaatcaggccatcattacggacgaaacgaacgattcacttgtagcccctcaggagaagcaagtgcacaagtcaattcttccgaattcgctgggggttagtgaacgcctccagagattaacgtttcccgcagtcagcgttaaagtgaatggccatgatcagggtcaaaatcctccgcttgatctggaaacaacggctcgcttccgcgttgagactcatacgcagaagactattggtggaaatgtgacgaaagagaaaccgccgagccttatagttccgctggaatctcaaatgacaaaggaaaaaaaaatcacaggcaaagaaaaagaaaatagcagaatggaggaaaatgcggaaaatcatattggtgttacagaagttctcttaggccggaagttgcaacattacaccgactcatacttaggtttcttgccctgggaaaaaaagaagtacttccaggacctgttagatgaggaagaatctttaaagacgcaacttgcctacttcacggattctaaaaacaccgggcgacaacttaaagacacattcgctgattcattaagatacgtaaataagatcttaaacagcaaattcggctttaccagcagaaaagttccggcacacatgcctcatatgattgatcgcatagttatgcaggaacttcaagatatgtttccggaggaattcgataagaccagtttccacaaagtccgtcattctgaagacatgcaatttgcattctcttatttttattatttaatgtcagccgtccagccgttgaatatctcccaggtatttgatgaagtggacaccgatcaatctggcgtgttaagtgatcgtgaaatccgaacccttgcaaccaggatccatgaattgccgctatccctgcaagatttaacgggacttgagcacatgttaatcaattgcagcaagatgctgccggctgacatcacgcagctgaataatattccgcctacacaagagtcgtactatgatcctaatctgcccccggttacaaaatcacttgttacaaattgcaaacccgtcacagataagatccataaagcgtacaaagacaagaacaaataccgctttgagattatgggagaagaagagattgcattcaagatgattcggaccaacgtatctcacgttgtagggcagcttgatgatattagaaaaaatccgagaaagttcgtttgcctgaacgataatatagaccataatcacaaagatgctcagaccgttaaggctgtactccgtgatttttacgaaagtatgtttccaattccgagccagtttgaactgccgagggaataccgaaatagatttttacatatgcacgaactgcaagaatggcgggcatatcgggataaattaaaattctggacacattgtgttttagcgacactcatcatgtttactatcttttcttttttcgcggaacagttgattgctttgaaacgaaagatttttccaagacgacgcatacacaaagaggcgtcgccgaaccggatccgcgta

SEQ ID NO: 215067 - DNA, 3768 bp, Artificial Sequence
  derived and/or modified sequence
atgctgtttaaactactgcaacgtcagacatacacgtgcctgtcacataggtacgggctctatgtctgcttcttgggcgtggtagtaactatcgtgtctgccttccagtttggcgaggtggttcttgagtggtccagagatcaataccatgtgcttttcgattcatatcgagacaacattgccgggaagtcattccagaatcggctctgtttgccgatgcccattgacgtggtttatacctgggtgaacggcacagacctggaacttctgaaggaattacagcaagtccgtgagcaaatggaggaggagcagaaggccatgcgcgaaatcctgggaaagaacaccaccgaaccaaccaagaaatcagagaagcagctggagtgcctcttaactcattgtatcaaagtgccgatgctcgtgctggatcccgcactgcctgcaaatattacactgaaggatttaccgagtctgtacccttcctttcattctgcgtccgacatctttaatgtggccaagccaaaaaatcctagcacaaacgtgtccgtcgtggtttttgactctacaaaggatgtcgaagacgcccattccggcctcttaaaggggaactctcgacagacggtgtggcgcggatacttaactacagacaaagaagtccctggccttgtgcttatgcaggaccttgcattcctgtctggcttccccccaaccttcaaagagacaaaccagctgaagacaaagttgcccgagaatctctcttcgaaggttaagttgcttcaactttattcagaggcaagtgtcgcgcttctgaagctgaataatcctaaggactttcaggagttgaataaacagaccaagaagaacatgactattgacggcaaagagcttaccatttcccctgcatatctcctatgggatctgagtgccatctcacagtcaaaacaagatgaggatatttccgcctccagattcgaagacaacgaggagttaaggtactccctacgctcaatcgagcgccacgctccgtgggtgcgcaacatctttatcgttacgaacggccagataccaagttggttgaatttggacaaccccagggtcactatagtgactcatcaggacgtgttccgcaatctgagccatcttccaaccttcagttctcccgccattgaaagtcacattcataggatcgaaggcctttcccagaaattcatctacctcaatgatgacgttatgttcggcaaggacgtgtggcctgatgacttttattcacatagtaaaggccagaaggtgtatctaacatggccagtccctaattgtgctgaggggtgccccggcagctggattaaggatggctactgtgacaaagcttgtaataacagcgcttgcgactgggatggaggagactgcagcggaaattctggaggttcccgctatatcgccggcggaggcggcacaggatctattggggtgggtcagccatggcaatttggtggggggattaactccgtttcctactgtaatcaagggtgcgccaactcttggctagctgataagttctgcgatcaggcgtgcaatgtgctctcatgcggctttgacgccggcgactgcgggcaggatcattttcacgaactgtataaggttatcttgttacccaatcagacacactacattattcccaagggagagtgcctaccttacttctcgttcgctgaggtcgccaaacggggagtcgaaggagcttactccgataaccctatcatcagacacgcctctattgccaataagtggaagacaattcaccttattatgcattccggaatgaatgctaccacgatacactttaatctcacttttcagaacaccaacgatgaagagtttaagatgcagattaccgtcgaggtggataccagggagggtcccaagcttaactccacggctcaaaaaggatatgagaacctggtcagtcccattaccctgctgccagaggctgaaatactgttcgaggatatcccaaaagagaagcgatttccgaagttcaaaaggcatgacgtcaattcgactagacgcgcgcaggaagaagtgaagattccattggtgaacatttccctgcttcctaaggatgcccaactcagcctcaacaccttagacctgcagctcgaacatggggacatcacactgaagggttataatctgtctaaaagcgccctcctgcgctcattcctcatgaatagccagcacgcgaaaatcaaaaatcaggcgattattacggacgagaccaatgacagtctggttgccccacaggagaagcaggtacataagtctattctgcccaactccttaggagtgtccgaaagactgcagaggctcacatttcccgccgtgtccgtcaaagtgaatgggcatgatcaaggccagaacccacctctggatctcgagaccacagcgagattccgagtcgagacgcacacacaaaagaccatagggggtaacgtaacgaaggaaaagcccccctctctcatcgtgccacttgagagccagatgactaaggaaaagaagattacggggaaggaaaaagaaaacagtaggatggaagaaaacgcagaaaatcatatcggggtgaccgaagtcctgttggggcggaaactacaacattacaccgacagttacctcggcttcttgccatgggaaaaaaaaaaatactttcaggatcttctggacgaagaagagtcactgaaaactcagctcgcctacttcacagactccaaaaataccggcagacagctgaaggacaccttcgcggacagtctgcggtacgtcaataagatccttaacagcaagtttggcttcacctcaagaaaagtgcctgctcacatgccacacatgattgatagaatcgtcatgcaagaactgcaggatatgtttcctgaagagtttgataaaaccagttttcacaaggtgcgacacagcgaggacatgcaattcgcatttagctatttttactacctcatgtcggctgttcagccactgaacatttcacaagttttcgatgaggtggacactgatcagtccggcgttctgagcgatcgggaaattcggactctcgccacgagaattcatgaactgccactttccctccaggatctgaccggtctggagcatatgctgatcaattgtagcaagatgttacctgctgatattacacagctgaataatattccccccacgcaggagagctattacgacccaaacctgccccccgtgactaagtctctcgtgaccaactgcaagcccgtgaccgacaagatccacaaagcttataaggataaaaataagtatcgttttgagatcatgggggaggaggagattgcttttaaaatgatcaggacgaatgtctcgcatgtcgtcggacaactagacgatatacgcaagaatccacgcaagttcgtgtgtctgaacgataatatcgatcacaaccacaaagatgctcagaccgtgaaagccgtgttaagagacttctacgaatcgatgtttcccattcccagccagtttgagcttccccgcgagtaccgcaatagattcctccacatgcacgaactccaggagtggcgtgcataccgggataagctgaagttctggactcactgcgtgctcgctaccctcataatgtttacgattttttcattctttgcagagcagctgatcgccctaaaacgaaaaatctttccaaggaggcggatacacaaagaggctagcccaaatcggattcgggtt

SEQ ID NO: 215068 - DNA, 3768 bp, Artificial Sequence
  derived and/or modified sequence
atgctgttcaagctcctccagaggcagacatatacgtgcttgagccataggtacggcctttacgtctgtttcctgggcgtggtggtcaccatcgtgtcagcatttcaatttggcgaggtggtgctggagtggtcgagagatcagtatcatgtcctgttcgactcatatagagacaatattgcaggtaaatctttccagaacagattgtgcctgccaatgcctattgacgtggtgtacacatgggtgaacggcaccgacctggagttgctcaaagagctgcagcaggtgcgggagcaaatggaagaggaacagaaagccatgcgcgagatcctaggcaagaacaccaccgagcccacaaagaagtctgagaagcagctcgaatgcctgctgacccactgcattaaggtgcctatgctggtgctggatccggctctgcccgccaacatcacattgaaagaccttccttcactgtatcccagctttcatagcgcgtccgacatctttaatgtggccaagccaaagaatcccagtacaaacgtctcggtggtcgtgtttgactccactaaagacgtggaggatgcgcactctggcctccttaagggcaactctcggcagacagtgtggcggggatacctgacgaccgataaagaagttccaggtcttgtgctgatgcaggacctagcatttctgtctggatttcctccgactttcaaggagacgaatcagctgaagacaaagcttcccgagaatctttcctccaaggtgaagctgctccagctgtactctgaggcgtccgttgccctcctgaagctgaacaacccaaaggatttccaagagctgaataagcagacgaaaaaaaatatgaccatcgacggtaaggagttgacgatatcacccgcatacctgctatgggatctaagtgccatatcacagtctaagcaggatgaagacatcagtgccagccgattcgaggacaatgaagagttgagatatagcctaagatcaatagagagacacgcaccgtgggtgcgtaatattttcatcgttacaaatgggcagatcccctcttggctaaatcttgataacccacgggtcactatagtgacacatcaggatgttttccgcaacttgagtcatttgcctactttctccagccctgccatcgagagtcatatccaccggatcgaaggcttgtcccagaagtttatttacctcaacgacgatgtgatgtttgggaaggacgtgtggcctgacgacttctattcacatagcaagggccagaaggtgtacctgacttggcctgtccccaactgcgctgagggctgcccagggagttggatcaaagacggctactgcgacaaagcttgcaataattcagcttgtgattgggacggcggggactgctccgggaattccggcggtagcaggtacatcgccggcggcggcggcactgggtcaattggagtggggcagccttggcaatttggaggtggcatcaattcggtgtcctactgcaaccaaggatgcgccaactcctggctggcggacaagttttgcgaccaggcatgtaacgtcttgtcatgcggattcgatgccggcgattgtggccaggaccactttcacgagctgtataaagtgatccttttaccaaaccagacccattatattatccccaagggggagtgtttgccctattttagctttgccgaggttgccaaaagaggtgtggaaggggcctatagcgacaatccaataataaggcatgcaagcattgcaaataagtggaagaccatccatctgataatgcacagtggaatgaacgcaacgacgattcattttaacctcacctttcagaataccaatgatgaagagttcaaaatgcagattactgtcgaagttgacacccgggaaggtcctaaactcaactccacagcccagaaggggtatgagaatcttgtctctcccatcacgctgttgccagaagcagagatattgtttgaagatattccaaaggaaaagcggttccccaagttcaaaaggcatgacgtgaactccaccagacgcgcacaggaggaagttaaaattcctcttgtgaacattagtctgcttcccaaggacgcccagctttccctaaacacactcgatttgcagctggagcatggtgacatcacattgaagggctataatctttccaagagtgctctgttgcgaagtttcctgatgaattctcagcacgccaaaataaaaaaccaggcaattatcaccgatgagacgaatgattcgctggtagcgccacaggaaaagcaggtgcacaagtccatactacccaatagtttgggcgtttccgaacgcctacaaagactgacctttccagccgtgagcgtgaaagtgaacggccatgaccagggtcagaaccccccccttgatctggagactaccgcccggtttagagtggaaactcacactcagaaaactattgggggaaacgtaaccaaagaaaagcctcctagccttatagtgcctctggagagccagatgactaaggagaagaagataaccggcaaggagaaggagaattctcggatggaggagaatgcggagaaccatattggcgtgactgaagtgctgcttgggcgtaagctccagcactatactgactcatatctggggtttctgccctgggagaagaagaaatattttcaagatttactggacgaggaagagagtcttaaaactcagctagcctacttcacagactctaagaacacgggtaggcagttaaaggatacgttcgcggactctctacgatacgtcaataaaatactgaacagtaagttcgggttcacctctaggaaagtgcctgcgcatatgcctcacatgatcgaccgaatagtgatgcaggagctgcaggacatgttccctgaagagttcgataaaacaagtttccacaaggtcaggcactcagaagacatgcagttcgccttcagttatttctattatctgatgtctgcggtccaaccactcaatatatctcaggtgtttgatgaggtggacaccgaccagtctggggttctgtctgacagagaaatcagaacactggcaaccaggatccatgaacttcctctcagcctccaagacctcacgggattggagcacatgcttattaactgttctaaaatgctgcctgccgacatcacacaactcaacaatattccacctacacaggaaagctactatgaccctaacctgccccctgtaacgaaaagccttgtcacaaattgtaagccagtgactgataagatacataaggcatacaaagataagaacaagtatcggttcgaaataatgggagaagaggaaatagctttcaagatgattcgcaccaatgtttcccatgtcgtcggtcagttggatgatatcaggaagaatccccgcaaatttgtgtgcctcaatgataacatcgaccataaccacaaggacgcccagaccgtgaaggccgttctgcgcgacttctacgagtccatgtttccgattccgtcccagttcgagctgccgagagagtatcggaatcggtttctgcacatgcacgagcttcaggagtggcgtgcctaccgcgacaagctcaaattctggacccactgcgtacttgccacattaatcatgtttacgatcttctcgttcttcgctgaacagctgatcgcgctgaaacgcaaaatattcccgcgccgacgaattcacaaggaggcgtcccccaaccgcatccgcgtg

SEQ ID NO: 215069 - DNA, 3768 bp, Artificial Sequence
  derived and/or modified sequence
atgctgttcaagctactgcagaggcagacctatacatgcctctcacaccgctacggactttacgtgtgttttctcggagttgttgtcactatcgtgtcagctttccagttcggagaggtggttctcgagtggtctcgtgatcagtatcatgttctcttcgactcatacagggataacatagcaggcaaatcgttccaaaatcgcctgtgcctccctatgccgatcgatgttgtgtatacgtgggtgaacggcaccgaccttgaattgttgaaggagcttcagcaggtgcgtgagcaaatggaagaggaacagaaggctatgagagaaatactgggcaagaataccacggagcccacaaagaaatccgagaagcagctggagtgtcttcttacccattgtataaaagtgcccatgctggtgttggaccctgccctgccggctaacatcacgctgaaagacctgccctccctgtaccccagcttccactcagcatctgacatatttaatgtagcaaagccaaaaaatcctagcaccaatgtgtccgtggtcgtcttcgactctaccaaagacgtagaagacgcccactccgggctgctcaagggaaattcacgccaaactgtttggcgcggctacctgacgacggacaaggaggtaccaggactcgtcttaatgcaggacctcgctttcctgagtgggttcccaccgacctttaaggaaaccaaccagctcaaaacgaaattacccgagaatctaagttcaaaggtcaaactactccaattgtactcagaagcctccgtggccctgctgaagcttaacaacccaaaggatttccaggaactgaacaaacagacgaagaagaacatgaccatcgatgggaaggaactgaccatctcgcccgcatatcttctttgggatctgtctgccatatcccagtccaagcaagacgaggacatcagcgcgtccaggtttgaggataatgaagagctgcggtactctctccgttcgattgagcggcatgcaccctgggtaaggaatattttcatagtcaccaacggccagattccctcttggctcaaccttgataacccacgagtgaccatcgtcacccaccaggatgttttcagaaacctcagccatctccctacttttagctctcccgccatcgagagccacatacatcgaatagaagggctgtcccagaagttcatatacttgaacgatgacgtgatgtttgggaaagacgtttggccagatgatttttactcacatagtaagggtcagaaagtttatctgacttggccagtgcccaattgcgctgaagggtgtcccggctcttggatcaaagacggatactgtgacaaagcatgtaataattccgcttgcgactgggacggaggggactgcagcggcaattccgggggtagtaggtacattgccggggggggcggcaccggttcaatcggtgtgggccagccgtggcagttcggcggcggtatcaatagcgtgagctattgtaaccagggatgtgctaactcttggctggcagataaattctgcgaccaagcctgcaatgttctgagttgcgggttcgacgcaggcgactgtggccaggaccatttccatgaactgtacaaggtaatccttcttccgaaccagacacattacattatccccaaaggtgagtgcctgccctacttttctttcgctgaggtggcaaaaagaggagtggagggcgcctactccgataaccctatcattcgacacgcctccatcgccaacaagtggaagaccatccacctgattatgcacagtggaatgaatgcgacaacaatacattttaatctgactttccagaatacaaacgatgaagagtttaagatgcagattaccgtagaggtggacactcgagagggcccaaaactgaattcaaccgcgcagaaagggtatgaaaatctggtgtcaccaatcactcttctccctgaggctgaaatcctcttcgaggatattcccaaagagaagcggttccctaagttcaagaggcacgatgtgaatagcacaaggagggcccaggaggaagtgaagatcccgcttgtaaatataagtctcctgcccaaagacgcccagctgtcactgaacacactggatctgcagctggagcatggcgacattaccttgaaggggtacaacctgtcaaaaagcgcactgctccggtccttcctgatgaattcacaacacgcaaagatcaagaatcaggctatcatcaccgacgaaaccaacgattcactggtggcgccccaagagaaacaggttcacaagtcaattctgcctaactctctgggtgtgtctgaacggttgcagaggttgacctttcccgccgtctccgtcaaagtgaacggccatgaccaaggtcagaaccctccactggatctggaaaccactgcccgatttagagtggagacccacacacagaaaacaatcggcggcaacgtgaccaaggagaagcccccctcattgatcgttcctcttgagtcccagatgactaaggagaagaagataacaggcaaagaaaaggagaactctcggatggaggagaacgccgagaatcacatcggcgtgacggaagttctactggggaggaagctgcaacactatactgactcctacctcgggttcctgccttgggagaagaagaagtatttccaggatcttctggacgaggaggaaagcctcaaaacacaactagcttactttacggattctaagaatacaggcagacagctgaaggacacgtttgcggattctctgagatacgtgaataaaatcctaaacagcaaatttggcttcacatcacggaaagtgcccgcacatatgccgcacatgattgatagaattgtgatgcaagaactgcaggatatgttccccgaagaatttgataaaacaagctttcataaggtacgacactccgaggatatgcagttcgctttctcctacttctattacttgatgagtgcggtccagccattgaatatctcccaagtgttcgatgaggtagataccgaccagtcaggagtcctctctgatcgggaaatccggacactagccacaagaatacacgaacttccactatcactccaggatctgaccgggttagaacatatgctcatcaactgctcaaaaatgctgccagcagatataacacaacttaacaacattccacctacgcaggaaagctattacgacccgaaccttcctcccgtgactaagtccttggtaacaaattgcaagccggtaacggacaagattcacaaggcgtataaggataaaaataaatacaggtttgagataatgggcgaagaggagatcgcctttaaaatgattcgaactaacgtgtcccacgttgttggccagctggacgatatccggaaaaacccccgcaagtttgtgtgtctgaacgataatattgaccacaatcataaggacgcacagactgttaaagcagttctccgagatttctacgaatctatgtttcccatccctagccaatttgagttgccccgtgagtatcggaatagattccttcatatgcacgagctccaggagtggcgcgcttatcgggacaagttgaaattctggacccactgtgtactcgccacgctgatcatgttcacgatctttagcttcttcgccgaacaactgattgcgctcaagcggaagattttccccagacggaggatccacaaagaggccagcccaaaccgcattcgtgtg

SEQ ID NO: 215070 - DNA, 3768 bp, Artificial Sequence
  derived and/or modified sequence
atgctgtttaaattgcttcagcgtcagacctatacctgcctgagccatcgctacggactgtacgtgtgcttcctgggcgtggtggttactatagtgagcgcattccagttcggggaggtggttctagaatggagtcgcgatcagtatcacgtgttattcgacagctatcgcgataatatagccggcaagagctttcagaacaggttatgtttgcccatgccaatcgacgtcgtttatacatgggtgaatggtactgacctggagttactgaaggagctgcagcaggtgagagaacagatggaagaggagcagaaggcaatgcgggaaattctcggcaagaacacaaccgagcctacaaagaagtctgaaaagcagttggaatgcctgctgacccattgcataaaggtgcctatgctggtgctggaccccgctttacccgctaatatcactctgaaggacctaccctccttatacccgagctttcacagcgcctccgatatatttaatgtggccaagccaaagaatccatctacaaacgtctctgtggttgtcttcgatagcaccaaggacgtcgaggatgctcactctggtctactgaaggggaatagcagacagaccgtgtggcggggatacctgaccaccgataaagaggtgcctggcctggtactgatgcaagatctggcatttctgtccgggttcccccctaccttcaaggagactaatcagctcaagacaaagctgcctgagaatctgagttccaaggtcaagttactgcaactgtactccgaggctagcgtggctctactgaagctcaataatcctaaggatttccaagagctgaacaagcagaccaaaaagaatatgactattgacggaaaagaattgaccatatctcccgcctaccttttgtgggaccttagcgccatcagccaaagcaaacaggacgaggacatatcagcctcaaggttcgaggacaatgaggagcttcggtattctctgcggtctatcgaacggcatgctccctgggtgaggaacattttcatcgtcactaatgggcaaatccccagctggctaaacctggacaacccacgggtgacaatcgtgacccaccaagatgtctttaggaacctgtcccatttacccaccttctcctctcccgccatagagagtcacatccaccggatcgaggggctctcccagaagtttatctatctgaacgatgatgttatgttcggtaaggacgtgtggccagatgatttctacagtcacagcaaggggcagaaggtgtacctgacctggcccgtccctaactgcgcagaaggttgcccaggcagttggataaaagacggctactgcgataaggcatgcaataacagtgcctgcgattgggatggtggggattgctccggcaattctggtggaagccgctacatagctggcggcggcggcactggctcaatcggcgtgggtcagccttggcagttcggcggcggaattaactcagtgtcttactgcaaccaaggttgcgcaaattcttggctggctgacaaattttgcgaccaggcctgtaacgtgctgagctgcggctttgatgcaggcgattgcggacaagatcattttcatgagctgtacaaggtgatcctgctgccaaatcagacccattacatcattcctaagggggaatgtctgccctacttctcctttgcagaggtggctaaacgcggagtggagggggcatatagcgataatccaataatcaggcacgccagtattgctaacaagtggaagaccatccatctgatcatgcactccggcatgaacgctactaccattcattttaatctgacctttcaaaacactaacgatgaagaattcaaaatgcagataaccgtggaggtcgacactagagagggacctaagctaaattccacagcccaaaagggatacgagaacctggtgagccctataaccctactgcctgaggcagagattctgtttgaagacatcccaaaagagaagcgcttccccaaattcaagaggcacgatgtcaatagtacacgacgcgcccaggaagaagttaagatccctctcgtgaacatttctttactgcccaaggatgcccaactatctctcaacaccctggacctacagctggaacatggcgacatcacactgaaaggttacaacctcagcaagtctgcattactgaggagttttctgatgaatagtcagcacgccaagatcaagaaccaggccataattaccgatgagaccaacgactctttggtggcacctcaggagaaacaagtgcataagtctatactcccaaactctctgggcgtgagcgaaaggctgcagagactcaccttccctgctgtgagcgtgaaggtgaatggccacgaccaaggacaaaaccctcccctggatctagagactacagcacgattcagggtagagacacacactcaaaaaaccattgggggaaatgtgacaaaggagaagccaccttccctgattgtgccgttagagagccagatgactaaagagaagaagatcactggcaaggagaaagaaaacagtcggatggaagagaatgctgagaatcacattggagttactgaggtgctgttggggcgcaagctacaacactacactgatagttatctgggcttcctgccctgggaaaaaaagaaatacttccaggatttactagatgaagaagagagtctaaagacacagcttgcttacttcacagactctaaaaataccggcagacagctgaaagatacatttgctgactctctgcgctatgtcaacaagatactcaattctaagtttggcttcaccagccgaaaagtgcctgctcatatgccccacatgattgaccggatcgttatgcaagaattacaggatatgtttccagaagagtttgacaaaacctctttccacaaggtcaggcatagtgaggatatgcaattcgcattttcatatttttactatctaatgagtgccgttcaaccactgaatatatcccaggtcttcgatgaagtcgacaccgaccagagcggggtgctgagtgacagggaaatcaggaccctcgccacacgcatacatgagctccctttatctctccaggacctcaccggcctcgaacacatgctgattaattgcagtaagatgctgcctgcagacataacacaactgaataacataccccccacacaggaaagctattacgacccaaacctaccacccgtgacaaagagcctcgtgacaaattgcaagcccgttaccgataaaattcacaaggcatacaaagataaaaacaagtacagattcgagattatgggtgaggaagagatagcctttaagatgatccggaccaacgtaagccacgtggtgggccagttagacgacatcaggaagaacccccggaagttcgtgtgtctcaacgataatattgaccataaccataaagatgctcagactgtgaaagcagtgctgcgcgacttctatgagagcatgtttccaatcccttctcagttcgagttgccccgagagtaccgaaatcgcttcctgcacatgcatgaactgcaggagtggcgagcctatcgagacaaactcaaattctggacacactgtgtcttagccaccctgatcatgtttacaatcttttctttcttcgccgaacaactgatcgccctcaaaaggaagattttcccccggagacgcatccataaagaggccagcccaaatagaatccgtgtt

SEQ ID NO: 215071 - DNA, 3768 bp, Artificial Sequence
  derived and/or modified sequence
atgctatttaaattactacaacgacaaacgtatacgtgtctatcgcatcgatatggtctatatgtatgttttttaggtgttgtagtaacgatagtatcggcgtttcaatttggtgaagtagtattagaatggtcgcgagatcaatatcatgtattatttgattcgtatcgtgataatatagcgggtaaatcgtttcaaaatcgattatgtttaccgatgccgatagatgttgtatatacgtgggtaaatggtacggatttagaactattaaaagaattacaacaagtacgagaacaaatggaagaagaacaaaaagcgatgcgtgaaatattaggtaaaaatacgacggaaccgacgaaaaaatcggaaaaacaactagaatgtctactaacgcattgtataaaagttccgatgttagtactagatccggcgttaccggcgaatataacgctaaaagatttaccgtcgttatatccgtcgtttcattcggcgtcggatatatttaatgttgcgaaaccgaaaaatccgtcgacgaatgtatcggttgtagtatttgattcgacgaaagatgtagaagatgcgcattcgggtctactaaaaggtaattcgcgacaaacggtttggcgaggttatctaacgacggataaagaagtaccgggtttagtactaatgcaagatttagcgtttttatcgggttttccgccgacgtttaaagaaacgaatcaattaaaaacgaaactaccggaaaatctatcgtcgaaagtaaaattattacaattatattcggaagcgtcggtagcgttattaaaattaaataatccgaaagattttcaagaactaaataaacaaacgaaaaaaaatatgacgatagatggtaaagaattaacgatatcgccggcgtatttattatgggatttatcggcgatatcgcaatcgaaacaagatgaagatatatcggcgtcgcgatttgaagataatgaagaactacgttattcgctacgttcgatagaacgacatgcgccgtgggtacgtaatatatttatagttacgaatggtcaaataccgtcgtggttaaatttagataatccgcgagtaacgatagttacgcatcaagatgtatttcgaaatttatcgcatttaccgacgttttcgtcgccggcgatagaatcgcatatacatcgtatagaaggtctatcgcaaaaatttatatatctaaatgatgatgtaatgtttggtaaagatgtatggccggatgatttttattcgcattcgaaaggtcaaaaagtttatctaacgtggccggtaccgaattgtgcggaaggttgtccgggttcgtggataaaagatggttattgtgataaagcgtgtaataattcggcgtgtgattgggatggtggtgattgttcgggtaattcgggtggttcgcgttatatagcgggtggtggtggtacgggttcgataggtgtaggtcaaccgtggcaatttggtggtggtataaattcggtttcgtattgtaatcaaggttgtgcgaattcgtggctagcggataaattttgtgatcaagcgtgtaatgttttatcgtgtggttttgatgcgggtgattgtggtcaagatcattttcatgaattatataaagttatattactaccgaatcaaacgcattatataataccgaaaggtgaatgtctaccgtatttttcgtttgcggaagtagcgaaacgtggtgttgaaggtgcgtattcggataatccgataatacgtcatgcgtcgatagcgaataaatggaaaacgatacatttaataatgcattcgggtatgaatgcgacgacgatacattttaatttaacgtttcaaaatacgaatgatgaagaatttaaaatgcaaataacggtagaagtagatacgcgagaaggtccgaaactaaattcgacggcgcaaaaaggttatgaaaatttagtatcgccgataacgctactaccggaagcggaaatattatttgaagatataccgaaagaaaaacgatttccgaaatttaaacgtcatgatgtaaattcgacgcgtcgtgcgcaagaagaagtaaaaataccgttagtaaatatatcgctactaccgaaagatgcgcaattatcgttaaatacgttagatttacaactagaacatggtgatataacgttaaaaggttataatttatcgaaatcggcgttattacgttcgtttctaatgaattcgcaacatgcgaaaataaaaaatcaagcgataataacggatgaaacgaatgattcgctagttgcgccgcaagaaaaacaagtacataaatcgatattaccgaattcgctaggtgtatcggaacgactacaacgtctaacgtttccggcggtttcggtaaaagttaatggtcatgatcaaggtcaaaatccgccgctagatttagaaacgacggcgcgatttcgagtagaaacgcatacgcaaaaaacgataggtggtaatgtaacgaaagaaaaaccgccgtcgttaatagtaccgttagaatcgcaaatgacgaaagaaaaaaaaataacgggtaaagaaaaagaaaattcgcgtatggaagaaaatgcggaaaatcatataggtgtaacggaagttttattaggtcgtaaactacaacattatacggattcgtatctaggttttctaccgtgggaaaaaaaaaaatattttcaagatctactagatgaagaagaatcgttaaaaacgcaattagcgtattttacggattcgaaaaatacgggtcgtcaactaaaagatacgtttgcggattcgttacgatatgttaataaaatactaaattcgaaatttggttttacgtcgcgtaaagttccggcgcatatgccgcatatgatagatcgtatagttatgcaagaattacaagatatgtttccggaagaatttgataaaacgtcgtttcataaagtacgacattcggaagatatgcaatttgcgttttcgtatttttattatttaatgtcggcggtacaaccgctaaatatatcgcaagtatttgatgaagttgatacggatcaatcgggtgtactatcggatcgtgaaatacgtacgttagcgacgcgaatacatgaactaccgttatcgttacaagatctaacgggtctagaacatatgctaataaattgttcgaaaatgttaccggcggatataacgcaattaaataatataccgccgacgcaagaatcgtattatgatccgaatttaccgccggttacgaaatcgctagtaacgaattgtaaaccggttacggataaaatacataaagcgtataaagataaaaataaatatcgttttgaaataatgggtgaagaagaaatagcgtttaaaatgatacgaacgaatgtatcgcatgtagttggtcaactagatgatatacgaaaaaatccgcgaaaatttgtttgtctaaatgataatatagatcataatcataaagatgcgcaaacggtaaaagcggtattacgtgatttttatgaatcgatgtttccgataccgtcgcaatttgaattaccgcgagaatatcgaaatcgttttctacatatgcatgaattacaagaatggcgagcgtatcgtgataaattaaaattttggacgcattgtgtattagcgacgttaataatgtttacgatattttcgttttttgcggaacaactaatagcgctaaaacgaaaaatatttccgcgtcgtcgtatacataaagaagcgtcgccgaatcgtatacgagta

SEQ ID NO: 215072 - DNA, 3768 bp, Artificial Sequence
  derived and/or modified sequence
atgctgttcaagttgctgcaacggcagacttatacctgtctgtcgcatcggtatggcctgtacgtctgtttcctgggtgtggtggttaccatcgtatctgcctttcagttcggcgaggtagtgctcgagtggtctcgcgaccagtaccacgtactctttgatagctatcgcgacaatatcgccggcaagtcattccagaacaggttatgcctgccaatgcctatcgatgtagtgtacacgtgggttaatggaaccgaccttgaattgctgaaggaactccaacaggtgagggaacagatggaagaagaacagaaggctatgagggaaattcttggaaagaacaccacagaacctacaaaaaagtcggagaagcaactggagtgcctgctgacccactgcatcaaagtccctatgctggtcctggaccctgccctccccgccaatattaccttgaaggacctcccatccctttacccctcatttcattctgcaagcgatattttcaatgttgccaagcccaagaatccatctacgaatgtgagcgtggttgtcttcgattctacaaaagacgtcgaggacgcccatagcggcctgctcaagggcaactcaaggcaaaccgtatggaggggctatctgaccactgataaagaggtgccgggccttgtacttatgcaagacctcgcctttcttagcggatttccccccacctttaaggaaacgaatcagttaaaaactaagctgcctgagaatctctccagcaaagtgaagctgcttcagctctacagcgaagccagtgtggccctgttaaaactgaataatccaaaggactttcaggaactgaacaaacagaccaaaaaaaacatgactatcgatggcaaggagctgactatctccccagcatacctcctgtgggatctcagcgcaatttctcagagcaagcaggatgaggacatctcggctagcaggtttgaggataacgaggagttacgctactccctgaggtccatcgagcgacacgcaccctgggtcaggaacatttttatcgtaaccaatggccaaattcccagttggctaaacctggataacccacgcgtcaccattgtcactcatcaagatgtgttcaggaatttgtctcacctgcctaccttctcaagccctgccatcgaaagccatattcaccgtatagaagggctgagccaaaaatttatctatttaaatgacgacgtcatgttcgggaaggatgtgtggcccgatgatttctacagccacagcaagggacagaaggtgtacctcacttggcctgtccctaactgtgctgaaggctgcccaggtagttggatcaaggacgggtattgcgacaaagcttgcaataacagtgcctgcgactgggatgggggggattgttctggtaacagtggtgggtcgagatacattgcaggcggaggtggaacaggttccattggggttggacagccttggcagtttggaggtggaatcaactctgtgtcttactgcaatcaggggtgtgccaactcctggctggcagataaattttgcgaccaggcttgcaacgtcttaagctgtggcttcgatgcgggggattgcgggcaggaccacttccacgagctttataaggtgatcttgttgccaaaccaaacccactacatcattcccaagggggagtgtctgccttatttcagtttcgctgaagtggccaagcgcggggttgaaggcgcctactcagataatccgataatccggcatgcttcaatagctaacaagtggaagacaatacatttaatcatgcacagtggcatgaatgcaacaactatccatttcaatttgacattccagaacaccaatgacgaagaatttaaaatgcaaatcacggtggaagtggacaccagggagggccccaaactgaacagcaccgcccagaagggatatgaaaatctcgtctcccctatcacactgctacctgaggccgagattctctttgaggacatccccaaagagaaacggttccctaagttcaagcgtcacgacgtgaactcaactcgcagagcgcaagaagaagtgaaaatcccattggtgaacatatccttgctgcccaaagacgcacagctctcactgaacactctagaccttcagcttgagcacggcgatattaccttaaaaggctacaacttgagcaaatcagcgctgctgcgatccttcctcatgaattcccagcacgcgaagatcaagaaccaggctatcatcaccgatgagactaatgatagcctcgttgccccacaggagaagcaggtgcacaaatcaatcctgccaaactccctgggtgtcagcgagaggctgcagcgcttgacgttcccagctgtttcagttaaagtgaatggtcatgaccaggggcaaaatccaccactagatctagaaaccaccgccaggttccgggtggagacacatacacaaaagaccatcgggggaaatgtgaccaaggagaaacccccgtcgctgattgttccgctcgagtcacagatgactaaagagaagaaaattaccggaaaggagaaggaaaatagtagaatggaagaaaacgctgaaaatcacattggtgtgactgaggtgttattagggcgaaagctgcagcattacaccgatagttatttgggcttcctcccctgggaaaaaaagaagtattttcaggatctgcttgacgaagaggagtccctcaaaacacagttggcctacttcaccgatagcaaaaacactggaaggcagttgaaagacaccttcgccgacagcttgcggtacgtgaacaagattttgaactccaagttcggatttacttcacggaaggtccctgcccatatgccccatatgatcgacagaatcgtgatgcaggaacttcaggatatgtttcccgaggaattcgacaaaacttccttccacaaagtacgccactctgaagatatgcagtttgccttctcttatttctactatctgatgtccgccgttcagccactaaacatcagccaagtcttcgatgaagtggataccgaccagagcggggtcttatctgatcgtgagatcaggaccctcgcgacccgcattcatgaactccccctgagcttgcaggacctgactggactagagcatatgctgattaattgttctaagatgttgccagcggacattactcagttgaataatatcccacccacccaggagagctactatgaccccaatctccctccagtaactaagtccttggtgaccaactgcaagcctgtgactgacaagatccataaagcctacaaagacaagaacaaataccggtttgaaattatgggagaggaggagatcgcttttaagatgatccgcaccaatgtgagccatgtcgtaggtcagctcgacgatattcgcaaaaacccgaggaaattcgtctgtttgaatgacaatatcgaccacaatcacaaagatgcacagaccgtgaaggctgtgctacgagacttctacgagagcatgtttccaattccaagccagtttgagctccctcgcgagtaccgcaatagatttcttcatatgcacgagttacaggaatggcgggcctatagagataagcttaaattctggactcactgtgttctggcgacactgatcatgtttacaatcttctcttttttcgccgaacagctgatagccctgaaacgaaagatctttccccgaagaagaattcataaagaggccagtcccaatcgcatccgggtg

SEQ ID NO: 215073 - DNA, 3768 bp, Artificial Sequence
  derived and/or modified sequence
atgctttttaaactgctacagcggcagacttatacatgcctttctcaccgctacggactctacgtttgttttctcggagtagttgtgactatcgtttccgcattccagtttggagaggtggtgcttgagtggtcacgcgatcagtatcatgtgttatttgactcatatcgcgacaatatagctgggaaaagttttcagaacaggctttgcctacccatgcctatcgacgtggtctatacttgggtgaacgggactgacctggaactcctgaaagagcttcagcaggtgcgggaacagatggaagaagaacagaaggctatgagagagattctggggaagaatactactgagcccacaaaaaaatcagaaaaacagctagagtgcctccttacacactgcattaaggttccaatgctggtattagaccctgccctccctgcaaacataacgctaaaagatctcccctctctatatccctcgttccattccgcttcagatatcttcaacgtcgccaagcccaaaaatccttctacaaacgtgtccgttgtggtcttcgactccacaaaagatgtcgaagacgcccactcagggctgctgaagggaaatagtcgacaaactgtgtggcgggggtatcttacaacagacaaggaggtacccggacttgtgcttatgcaggacctagctttcctatcaggatttccacccactttcaaagaaacaaaccagcttaaaactaagctgcctgaaaacttgtcctcaaaagttaaactcctgcagttgtattccgaagcttctgtggctctgctaaaactcaataatcccaaagatttccaagagttgaataaacagacaaaaaagaacatgactatagatggaaaagaactcactatttctcccgcatacctactatgggacctttccgcaatctctcagtctaaacaggatgaagatatttctgcttctagattcgaagataatgaggaactgcgatattcattaagatctatcgaaaggcacgccccttgggtgcgaaacatcttcattgtgactaacggacagatacctagttggcttaatctagataacccacgggtcactatcgttactcatcaggatgtgtttcggaatctgtcgcacttacccactttcagtagtcccgctattgaatcacatatacatcggatcgaaggactctcacagaagtttatatacttaaatgatgatgtgatgttcggaaaagatgtatggcccgatgatttctattctcattccaaaggacagaaagtttacttaacatggccagtacccaactgcgctgaaggatgcccagggtcttggatcaaagatggatattgcgacaaggcttgtaataattcagcatgcgattgggatggaggggattgttctggaaactcagggggaagtcgatacatagccgggggaggagggacaggatccatcggagtcggacagccttggcagttcggagggggaattaactctgtatcctattgcaaccaggggtgtgcaaacagttggctggctgacaaattctgtgatcaggcctgcaatgtgctctcttgtggatttgatgcaggggattgcggacaggatcatttccacgaactctacaaagtaatcctgctgcctaaccagactcattatataataccaaaaggagaatgtctgccctatttctcattcgctgaagtggcaaaaagaggagtcgaaggggcttactccgataatcctattatcaggcatgcgtccatagccaacaaatggaaaacaatacacctcatcatgcattcgggaatgaacgctacaacgattcattttaatttaacattccagaacacaaacgatgaggagtttaaaatgcagatcactgtggaagtggatacacgggaaggacctaaactcaattctactgctcaaaaagggtatgaaaaccttgtatctcccatcactttactgcctgaagcagagatactctttgaagatatccccaaagagaaacggtttcccaaattcaaaagacatgacgtgaatagtacaaggagagctcaggaagaggtgaaaatccctttggtcaatataagtctcctccccaaagatgcccagctgtcgctaaacactttagacctccagctcgaacatggggatattactcttaaagggtataacctctctaagtctgctctccttcgctcttttctcatgaactcacagcacgcaaaaataaaaaaccaggctattattacggacgaaactaacgactcactggtggcaccccaggagaaacaagtgcataaatcaatcctgccaaactctctcggagtctcagaacgactacagcggctgacatttcctgcggtgagtgtcaaagtgaatggacacgaccagggacagaatcctccactcgaccttgaaacaactgcacgcttccgggtggaaacacacactcagaaaacgatcggaggaaatgtaactaaagaaaaacctccttctttgatagtccctctcgagtctcagatgacaaaagaaaagaagatcacagggaaagaaaaggaaaattctcggatggaagaaaacgccgaaaaccatattggagtcactgaggtccttctcgggcggaaattgcagcattatactgattcctacctagggttccttccctgggaaaaaaaaaaatattttcaggatctattggacgaagaagagagtctcaaaactcagcttgcttacttcacagactcgaagaatacaggacgccagctcaaggatactttcgctgattcactgaggtatgtcaacaaaatcctcaactctaaatttgggttcacgagtaggaaagttcccgctcacatgcctcatatgatcgatagaatagttatgcaggaattacaggatatgttccctgaagaatttgataaaacaagttttcataaggtgagacattctgaagacatgcagtttgcgttcagttatttctattatctgatgtctgcggtccagcctttgaatatttcccaggtgttcgatgaagtggatactgatcagtctggagtcctgagtgatcgggaaattaggacactcgccacaaggatacacgaactccctctgagtctgcaggatctaactgggctcgaacatatgttaataaactgtagtaaaatgttacccgcagatatcactcagctaaataacatcccccctacacaggagtcttattacgatcctaatcttccaccagtgacaaaatccctagtgactaattgcaaaccggtaacagataagatacataaagcatataaagataaaaacaaatatcggttcgaaattatgggggaagaggaaatcgcatttaaaatgataaggacaaacgtctcccacgtcgtcggacagctggatgatatccgcaaaaaccctcgcaaatttgtatgtcttaatgataatatcgatcacaaccacaaagatgcccaaacagttaaagccgttctaagggatttttacgaatctatgtttccaataccttcacagttcgaactgccacgggaatatcggaacaggtttttacatatgcatgaacttcaggagtggagagcttaccgggataaattaaagttctggactcactgcgtgctcgccacacttataatgttcactattttttcattctttgccgaacagctaatagccctgaaaagaaagatctttcccagacgccgcatccacaaagaagcgtcacccaacagaatccgggta

SEQ ID NO: 215074 - DNA, 3768 bp, Artificial Sequence
  derived and/or modified sequence
atgctattcaagctgctacagcgccagacttatacctgtttgagccatcgctacggactgtacgtctgttttctcggggtggtggtgactattgtctctgcttttcagttcggagaggtggtgttggagtggtcacgtgatcagtatcacgtgctgttcgacagctatagggacaacattgctggtaagtctttccaaaatcgcctctgcctgccaatgccgattgatgttgtgtatacttgggttaacggtacggatctcgagcttttgaaagaactgcagcaagtccgagagcaaatggaagaagagcagaaggccatgcgcgagatcctgggaaaaaacacgaccgaaccaaccaagaagtccgagaagcagttggaatgtctactgactcactgtataaaggtaccaatgctggtcttggaccccgcactcccagccaatatcactctgaaggatcttcccagtctgtatcccagtttccattccgccagcgatatctttaacgttgcgaaaccaaaaaatccttccactaacgtaagtgttgtggttttcgactcgaccaaagacgttgaggacgcacactcaggccttcttaaaggaaacagtagacagacggtgtggcgcggctaccttacaaccgacaaggaggtgcccgggctcgtgcttatgcaggatctggcatttctctctgggtttccacctacattcaaagagacaaaccagcttaagacaaaactcccagagaacctctcaagcaaagtaaagctgttacagctgtattcagaagcttccgtcgccctgctgaaactgaataatccgaaagattttcaggagctgaacaaacagaccaaaaagaacatgactatagacggcaaggagttgacaatctcgccggcgtaccttttgtgggacctctcagccatcagccagtccaagcaggacgaggatatctccgcaagccggttcgaagataatgaggagctgagatatagcctccgctccatcgaaagacacgctccctgggtgagaaatattttcattgtgacgaatggacagataccttcctggttgaatctggataaccctcgggtgactatagtgacccaccaagatgtgttcaggaacttatcccatcttcctacattttcgtctcctgccattgaaagccacattcatagaatcgaaggactttcgcagaagttcatttacctcaatgacgatgtgatgttcggaaaggacgtgtggcctgatgacttctactcccactccaagggacagaaggtctatctaacatggcctgtccctaactgtgcagagggctgccctggtagttggatcaaggacgggtattgtgataaggcttgcaataatagcgcctgcgattgggacggaggggactgctccggaaattcgggcggttcacgctacatagccggcggaggcgggactgggtccatcggcgtaggtcagccatggcagttcggaggcggcattaattctgtgtcgtattgtaatcagggttgtgctaacagttggctagcagataagttctgcgatcaggcttgtaatgtgttaagctgtggtttcgatgctggtgattgtggccaagaccatttccacgagctgtacaaggtgatcctactgcccaaccaaacgcactatatcatcccaaaaggcgagtgtctaccgtacttctcgttcgcagaagttgcaaaaaggggcgtcgagggggcttatagcgataatcccatcatacgccatgcctcaatcgccaataaatggaagactatccatctgattatgcattctggtatgaatgcgaccacaattcacttcaacctcacctttcagaatacaaacgacgaggagttcaagatgcagattaccgtggaggtggatacaagagaaggacctaaactgaactcgaccgcgcaaaagggctatgagaacctagtgtctccgatcacgctgctgcctgaagcggaaattcttttcgaagatatccccaaagagaagagatttcccaagtttaagcgacacgacgtgaacagcactaggagggcacaagaggaggtgaagatccccctcgtgaatatctccttgttgcccaaagatgcacagttaagcctcaacactctagacctccagttggagcacggcgacataacgttaaagggatataacctgagcaagtccgctctgctccgctcattcctgatgaactcccagcacgcgaaaataaaaaaccaggccattattaccgatgaaaccaacgattcgttggtggccccacaggaaaagcaggtgcataagtccattctgcccaattcccttggggtgagtgagagattgcagcgattgacgttccccgcagtaagcgttaaggtgaacggacatgaccaggggcagaacccaccgctggaccttgagactaccgctagatttcgtgtggaaacccacactcaaaagaccatcggggggaatgtgacgaaggaaaagcctcccagcctgattgttcccctggagagtcagatgacaaaagagaagaagatcacagggaaagagaaagaaaacagccgcatggaggagaatgctgagaaccacatcggcgtcacggaggtgctcctaggccgtaagctccaacattacacagactcatacctagggttcctgccctgggagaagaagaagtacttccaggacctgttggatgaagaggagagcctgaaaactcagctggcttacttcactgattccaagaacactggccgccaactcaaagatacttttgcggactccctcagatacgtgaataagattcttaattccaaattcgggtttacctcccgtaaagtccctgcgcacatgccgcacatgattgacaggatcgtgatgcaggagctgcaggatatgttccctgaagagtttgacaagacctcttttcacaaagtgcggcacagcgaggacatgcagttcgccttttcctatttctactatctgatgtccgccgtgcagccactgaacatctcacaagtgttcgacgaagttgacaccgaccagagtggagtacttagcgaccgagagatcaggacgcttgctacccgcattcacgagctgcccctttccctgcaagacttgaccggcctggagcatatgctgattaactgttctaagatgctccctgctgatataactcagctgaataacataccaccaacccaggagtcctactatgaccctaacttaccccccgtcaccaagtcactggttacaaactgcaaacccgtgaccgataaaatccacaaggcctacaaagataaaaataaataccggttcgaaataatgggggaggaggaaatcgccttcaagatgatacgcactaatgtctcgcacgtagttggtcagctggatgacattcgtaaaaaccctcggaagtttgtgtgcttaaatgataacattgaccacaaccacaaagatgcccagaccgtgaaggctgtgttgcgtgacttctacgagtccatgttccccataccctcccagttcgaactaccgcgggagtataggaacagatttctccacatgcatgaactgcaggaatggagggcctacagagataaactgaagttctggacacattgcgtcttggctaccctaattatgttcacaatcttcagtttttttgctgaacaactgatcgcgcttaagcgaaaaattttccctcgtcggaggatccacaaggaggcaagccctaatcgcattagagtt

SEQ ID NO: 215075 - DNA, 3768 bp, Artificial Sequence
  derived and/or modified sequence
atgctgtttaaattgctgcagcgccagacgtatacctgcctgtcgcaccgctacgggctgtatgtgtgctttctgggtgtcgttgtgactatcgtcagcgccttccagtttggtgaagtggtgttggagtggtcacgtgaccagtaccacgttctgttcgacagctatcgtgacaacatcgccggaaaatctttccaaaaccgattgtgcctgccgatgccaattgacgttgtgtatacttgggtcaatggaactgaccttgagctgttgaaggagcttcaacaagtgcgcgaacagatggaggaggagcagaaggcgatgcgcgagattttggggaagaacaccaccgagccgaccaagaaatccgagaagcagctggagtgcttactgacacactgtatcaaagtgccaatgctggtcctggacccggcgctgcctgcgaacatcaccttgaaagatttgcccagcttatatccatcgttccacagcgcctccgacattttcaacgtcgccaaaccaaaaaatcctagcaccaacgtgagcgtggtggtgtttgactccacgaaagacgtcgaagatgctcacagcggtctgctgaaaggaaatagccgccagacggtttggaggggttacctgacaactgacaaggaggtgcctggtctagtgctgatgcaggacctcgctttcctgagcgggttcccaccgacgtttaaggagaccaatcaactaaaaacgaagctgcctgaaaatctgagcagcaaagttaagttgctgcaactgtacagcgaggccagcgttgctttgctgaagctgaacaatccaaaggattttcaggaattgaataagcaaaccaaaaaaaacatgacgattgatggtaaagaactgaccatctccccagcgtatctgctgtgggacttgtccgccatttcccaaagcaagcaggacgaggacatttcggcttctagatttgaggataatgaggaactgcgctactcacttcgcagcatcgaaagacacgccccatgggtgagaaatatttttatcgttaccaacggccaaatcccatcctggctgaatttggacaacccgcgcgtaaccatagtgacccatcaagatgtcttccgaaacctgagccacctgccaacctttagctctcctgctattgagagccacatccataggatcgaaggtttgagccagaaatttatttacttgaatgacgatgtgatgttcggaaaggatgtatggccggatgacttctactcgcatagcaaagggcagaaggtttatttgacatggccagtgccaaactgcgccgagggctgtccgggtagctggattaaggacggctactgcgacaaggcttgtaacaactcagcgtgcgattgggacggcggagattgcagcggcaactcagggggcagcaggtatatcgctgggggcggtggtaccggtagcatcggcgtgggccaaccttggcaatttggcgggggcatcaatagtgtgagctattgtaaccaaggttgtgcaaacagctggctggcggataagttctgcgatcaggcctgtaacgtcctgagttgcggtttcgatgccggcgattgcggacaggaccattttcatgagctatataaggtgattttgctgccgaaccaaacgcactacatcatccccaagggggagtgtctcccatatttcagcttcgcggaggttgctaagcgcggcgtggagggggcgtacagcgacaaccctatcatccgtcacgcgtccatcgccaataaatggaaaacaatccatttgattatgcacagcggcatgaacgccacgaccatccactttaacttgacttttcagaacacaaacgacgaggagttcaagatgcaaatcactgtagaggttgacacccgcgagggccctaaattaaatagcaccgctcagaagggatatgagaacctggtgtccccaattactttattgcctgaggccgaaatcctgtttgaagacatcccgaaagagaaacgcttcccaaagtttaaaagacacgacgtaaacagcacacgtagggcgcaggaggaagtgaaaattccgcttgttaatattagcctgttgcctaaagatgcacagctcagcctgaatacgctggatctccaattggagcacggcgatataactctgaagggatacaatctgtctaaaagcgcgctgctgcgcagcttcctaatgaactctcaacacgccaagattaaaaatcaagctattattacggacgagaccaatgacagcctggtggccccgcaggagaagcaggtccataagtcgatcctgccaaattctctgggtgtgtctgagcgcctgcagagactgacctttccggcagtgtccgtgaaggtgaatggtcacgaccagggtcagaaccctccgctggacctggagacgacggcccgcttccgcgttgaaacccacacgcaaaagaccattggtggcaacgtgacgaaagaaaagcctccatccctgattgttcctctggagagccagatgaccaaagaaaaaaaaatcaccggtaaggaaaaggagaattctcgaatggaggaaaacgccgagaatcatatcggtgtcaccgaagttctgctgggtcgaaagttgcaacattacaccgactcctatctgggctttctgccttgggaaaagaaaaaatattttcaagatctgctggacgaagaggagagtctgaagacccaactggcatatttcaccgacagcaaaaacacaggcagacagttgaaggatactttcgcagatagcctccgctacgtcaataagatcctgaattctaagttcggcttcacctctcgcaaagtcccggcgcatatgccgcacatgatcgatcggattgtcatgcaggagctccaggacatgtttcccgaggagttcgacaagaccagctttcataaggtccgacatagcgaggatatgcaattcgcgttctcgtacttctattatctaatgtctgccgtacaaccactgaatattagccaagttttcgacgaggtagacactgaccagtccggggtgctgagcgaccgcgagatccggactctggcaacgcggatccacgaactgccactgagcctgcaagatctgacaggtctcgaacatatgctgatcaattgttctaaaatgctgccggctgatattacccagctaaacaacatcccaccgactcaggagagctactatgacccaaacctgccaccggtgaccaaatcattggtgacgaactgcaaacccgtcaccgataaaatccacaaagcttacaaggataaaaacaaatataggttcgagataatgggcgaggaagaaattgcgtttaagatgattagaaccaatgtctctcacgtcgtcggtcagctggacgatataaggaagaacccacgcaagtttgtgtgcctaaatgacaacatcgaccacaaccataaagacgcgcaaaccgtcaaggccgtgctgcgtgacttctacgaaagtatgttcccgatcccgtcccagtttgagctgcctcgcgagtatcgaaaccggttcctgcacatgcacgagttgcaggaatggcgcgcttaccgagataagctgaagttctggacccactgcgtgctggccacgctgatcatgttcactatattctccttctttgctgagcagctgatagcattgaagcgcaaaatttttccacgccgccgcatccacaaggaggctagcccaaacaggattcgtgtt

SEQ ID NO: 215076 - DNA, 3768 bp, Artificial Sequence
  derived and/or modified sequence
atgctatttaaactactgcagcgacagacttacacctgcttgagtcatagatatggtctatacgtgtgctttctcggcgtggtagtaactatagtaagtgcattccagttcggagaagtggtgctcgaatggtcccgagatcaatatcatgtcctgttcgatagctacagggataatatcgctgggaaatcgtttcagaacaggttatgtttgccaatgcctatcgatgttgtttatacatgggtgaacgggacggatctggaactgctaaaagaattgcagcaggtcagggagcagatggaggaggagcagaaagcaatgcgcgagatattggggaagaatacaaccgaacccactaagaaaagcgaaaagcagctcgagtgtctcctgactcactgcataaaggttcccatgctggttcttgatcctgcgctccctgcaaacatcaccctgaaggacctaccaagtttgtacccgtcttttcacagcgccagtgacatattcaacgtagccaaacctaagaaccctagcacgaatgtgtctgtggtcgtgttcgacagtactaaagacgtggaggacgcgcattccggactgctgaagggaaattctaggcagaccgtatggcgcggttaccttacaactgacaaagaagttccaggcctggtcctgatgcaggatctcgcgtttctgtcaggattcccacccacattcaaggagacaaaccagttgaaaaccaagctacccgagaatctaagctccaaggtcaaactactccaactgtattcagaggcgtcagttgcactcttgaaactgaacaatcccaaggacttccaggagctaaacaagcagaccaagaagaacatgacaattgacggaaaagagttgacaatctccccagcctacctcttgtgggatctaagcgcaatttcacaatcgaagcaagacgaggatattagtgccagtagatttgaggataacgaagaactgcgctactccctccgcagcatagagcgccatgccccgtgggtgcgcaatatctttatcgtgacaaatgggcagatcccttcctggttgaacctggataatccccgggtgactattgttactcaccaggacgttttccggaatctcagtcatcttccaactttcagtagtcctgcgatcgaaagccacatacacaggatcgaaggcttgtcccagaagtttatttatctgaatgatgatgtcatgtttggtaaagatgtctggcccgacgacttttatagtcattcaaaggggcagaaggtgtatttgacctggcccgtgccaaattgtgccgagggttgccccgggtcttggatcaaggatggatattgtgataaagcatgcaataactctgcgtgcgattgggatggaggagactgttctgggaattcggggggcagtaggtacatcgctgggggcgggggcaccggatccattggtgttgggcagccatggcagtttggcggcggaattaacagtgtgtcctattgtaatcaagggtgcgctaactcctggctggcagataagttttgcgatcaggcatgcaacgtgctttcttgtggctttgacgcaggggattgcggccaagaccactttcatgagctttacaaggttatcctcctcccgaaccagacacactacatcattccaaagggggagtgtcttccttattttagctttgccgaggtggccaaaagaggggtggagggggcatacagcgataatcctataattcggcacgccagcattgccaacaagtggaagaccatccatttgattatgcactccgggatgaatgctaccactatacacttcaatctgaccttccaaaacaccaatgacgaggaatttaaaatgcaaataaccgtcgaggtagataccagagaaggacccaagttaaacagtacagcacaaaaaggctatgaaaacttagttagtcctatcaccctgctaccggaggccgagatcctctttgaagatattcccaaggagaagaggtttccgaaattcaagcgccacgacgtaaactctacccgcagagcccaggaggaggtcaaaattcctttggtaaacatcagcttgctcccaaaggacgcccaactgagcctgaataccttggacctacagcttgaacacggcgacattacgttgaagggctataacctcagtaagagcgcacttcttcgatcttttttaatgaactcacagcacgccaaaattaagaaccaggccatcatcaccgacgaaaccaatgacagcctggttgcaccccaagagaagcaggtgcacaaatccattctccctaacagcctgggggtatctgagcgcctgcagcgacttacctttcctgcagtgagtgtaaaagtgaatggacacgaccaggggcagaacccccctctggacctggaaaccaccgcccggttccgagtagaaacccatacacagaaaacaatcgggggtaatgtgaccaaagagaaacctcctagtctcattgtccctctggaaagccagatgactaaagagaaaaagatcacagggaaggagaaagagaattcgagaatggaagagaatgctgagaatcacattggggtaaccgaggtgctgctgggccgaaaactccagcactacacagattcatatttaggctttctgccctgggagaagaaaaaatattttcaggacttactcgacgaagaagaaagtctcaagactcagttagcttacttcaccgattctaagaacacaggacgccaactcaaggacactttcgcggactccttgcgatatgtgaacaaaatcctaaattctaaattcgggttcacgtccaggaaggtgccagcccacatgccccatatgattgatcggatcgtgatgcaggaactccaggacatgtttccagaagagttcgataagacatccttccacaaagtgagacactccgaggacatgcaatttgctttctcctatttttattacctgatgtctgccgtgcagcctcttaacataagtcaggtgttcgatgaagttgacacagaccagtccggggtactgtctgatagggagattaggacgctagccaccaggatccatgagctccctttatcgctccaggacctcacgggcctggagcacatgctgatcaactgctcaaagatgctgccagccgatatcacacagcttaacaacattcctcctacccaggagagctactatgatccgaacctgcctccggttaccaagagtctcgtcactaactgcaagccagtaacggacaaaatccataaagcatataaagacaaaaataagtatcgcttcgaaatcatgggcgaggaggaaatcgccttcaagatgataaggacaaacgtgtcccacgtggtgggccagctcgatgatatcaggaagaatccaaggaaattcgtctgtctaaacgacaatattgatcataaccataaggatgcacaaaccgtgaaagccgtcctgagggacttctacgagagcatgttccctataccgtcccagtttgagctgcccagagaatatcgcaatcgatttctccacatgcatgaactgcaggaatggagggcctacagggataagctgaaattctggacccattgcgtgttggctacactcatcatgttcaccatattttccttttttgctgagcagctgatagctctgaagcgaaaaatcttccccagacgacggatccacaaggaggcaagtccaaatagaattcgcgtg

SEQ ID NO: 215077 - DNA, 3768 bp, Artificial Sequence
  derived and/or modified sequence
atgttattcaaattgctccaacgtcagacctacacctgcctatcgcatcgttacggattatacgtttgcttcttgggcgttgtcgttactattgtgtcggcgttccagttcggtgaggttgtcttagagtggagccgtgatcagtatcatgtcctcttcgattcgtaccgagataatattgccggtaaaagcttccaaaacagattatgccttcctatgccaatcgatgtcgtttacacttgggttaatggaaccgatttggaactcttgaaagaattacaacaggtaagagagcaaatggaagaagaacaaaaagcaatgagagagatcctgggtaagaatacaacagagccaactaagaaatcagaaaaacaacttgaatgtctgctcacacattgcattaaggtaccaatgcttgttcttgatccagcattgccagctaatatcacattgaaggatttgccgagtctatacccatcctttcattctgcttcagatatttttaatgttgctaagccaaaaaacccaagcactaatgtatcagtggtggtatttgatagcaccaaggatgtcgaagatgctcattctggattacttaaagggaactctcgccaaactgtttggagaggctaccttactaccgataaagaggtgccaggattggttctcatgcaagacctcgcctttctgtccggcttcccaccaacgttcaaagaaaccaaccaactcaagactaagcttccagagaatcttagttctaaggtcaaattgttacaactttactcggaagcttccgtcgccttattgaaacttaataacccgaaggatttccaggaattgaataagcaaacaaagaaaaatatgacgattgatggtaaagaactaacgatatcacctgcttacctgctgtgggacttaagtgcaatctcacagtcgaagcaggatgaagatatttcggcatctcgattcgaagataacgaagaacttcgatattcgcttcgatcaatcgaacgccatgctccatgggttcgaaatatttttatagttactaatgggcagataccatcgtggctcaatcttgacaatccacgggttacaattgtaacacaccaggatgttttccgaaacctctcccatttgccgacattttcatcaccggcgattgaatctcatattcatcggattgaaggcctatcacaaaagttcatttatcttaatgacgatgttatgttcggaaaggatgtttggccagacgatttctactctcacagcaaaggacagaaggtctatttgacatggccagttccaaactgtgctgagggatgcccaggcagttggattaaggacggttattgtgacaaagcttgtaacaattcagcttgtgattgggatggaggggactgttctggaaattcgggaggatcacgatatatcgctggaggaggtggaacagggtctattggtgtgggccaaccatggcaattcggaggggggattaatagtgtgagttactgcaaccaaggatgtgctaactcatggttagcagataaattttgcgatcaagcgtgcaacgttctgtcgtgcggattcgatgctggggattgcggacaggatcattttcacgaactttacaaggtcatattgcttccaaaccagactcattatattatcccaaaaggtgagtgtttgccctatttctctttcgctgaggtggccaaacgaggagttgagggtgcttactcagacaatccaattattcggcatgcttcgattgctaacaagtggaagaccattcatttaattatgcacagtggaatgaatgctacaacaatccattttaacctgacgtttcaaaatacaaacgatgaggaatttaagatgcaaattacagttgaagtcgatacgcgagagggtccaaagttaaatagcaccgcacaaaagggctacgaaaacctggttagcccgatcacattgctgccagaagcggaaattttgtttgaagatatcccgaaagaaaaacgatttccaaaatttaaacgccatgatgttaatagtactagacgagctcaagaggaggtcaaaattccactcgtcaacatctcattgctcccgaaagatgcacagctttcactaaacacattagatctacagcttgagcacggagatattacacttaagggatataatctgagcaaatccgctctcttaagaagtttccttatgaatagtcagcatgctaaaattaagaatcaagcgattatcacagatgagaccaatgatagcctagtggcacctcaagaaaaacaggttcataaaagcatccttccaaattctctcggagtatccgaacgacttcaacgcctaacattccctgctgtatcagtcaaggtaaatggacatgatcaaggtcaaaatccacctcttgatcttgagacaacggctcgattccgagtggaaacacatacacagaagactattggcggtaatgtaactaaggaaaaaccaccttcgttaatcgtcccactagaaagccaaatgaccaaggaaaaaaaaattacaggaaaagaaaaagaaaacagccgtatggaggaaaatgctgaaaaccatattggagtcacggaagttttgctgggacgtaaattacaacattacactgattcctatcttggattcctgccatgggaaaaaaaaaaatatttccaagatcttttggatgaggaagagtcgcttaaaacccaacttgcctattttactgattcaaaaaatacaggccgtcagctcaaagatacatttgcggattctttgcgatatgtaaacaaaattttaaattcgaaattcggttttacatcacgaaaagtgcctgcacatatgccgcacatgattgatagaatcgtcatgcaagagctacaagatatgttcccagaagaattcgataaaacatcctttcataaagtccgacactcagaagatatgcaatttgctttctcttatttctactacctcatgtctgcggttcagcctctcaatataagccaagtgttcgatgaagtagatacagatcagtctggagttttgagcgatagagagattagaaccctcgcgaccagaattcatgaacttcctttgtctcttcaggatctcacaggtctggaacacatgttaattaattgttcaaaaatgctccctgcagatatcacacagttgaacaacattccaccgacacaagagtcttactatgatccgaatcttcctccggtaactaaatcacttgttactaattgtaaaccagtcaccgacaagattcacaaagcatataaggataaaaataaatatcgcttcgagatcatgggagaggaagaaattgcttttaaaatgatacgtaccaatgtgtcacatgttgtcggtcaacttgatgatattcgaaagaaccctcgaaagttcgtctgtttaaatgataatattgaccataatcataaggacgcacaaactgttaaagcagttttgcgggatttttacgaatcgatgttccctattccgtcacaatttgaattaccaagagaatacagaaatcgttttttgcatatgcatgaattgcaagaatggcgagcttacagagataaactcaagttctggacacattgtgtactcgccacactcatcatgttcactattttctcgttttttgctgaacaattgatagcacttaagcgaaagatctttccacggcgtagaatacacaaggaagcgtcacctaatcgaattagagtt

SEQ ID NO: 215078 - DNA, 3768 bp, Artificial Sequence
  derived and/or modified sequence
atgttatttaaactgctccaacgacaaacttacacatgtttaagtcataggtatggcctgtacgtgtgttttctcggggtggttgtgacaatagtatccgcctttcaattcggggaggtagttctcgagtggtcccgagaccagtaccatgtccttttcgactcctaccgagacaatatcgctggaaaatcatttcagaatcgattgtgcctgccaatgccaatcgacgttgtgtatacatgggtcaacggaacagatcttgaactcctaaaagagctccagcaggtgcgagagcagatggaggaagagcagaaagcgatgagggaaatcctgggtaagaacacgacagaacctaccaaaaagtctgagaagcaactggaatgcctgctgactcactgcataaaagtccccatgctggtgttagatccagcgttgccagcaaatataactctgaaagacctgccaagcctgtacccttccttccactccgccagtgatatatttaacgtggccaagccaaagaacccttccacaaacgtctccgtcgttgtcttcgactctactaaagatgtggaggatgcgcactctggactcctcaagggtaattcaagacagacagtgtggaggggctatctcaccacagacaaagaggtgccagggctcgtcctcatgcaggacctcgccttcttaagcggctttccacctacctttaaagaaacaaatcaattgaagacaaagctgcccgagaacctcagctccaaggtcaaattgttacagttatactctgaggcgtctgtggcgcttttaaaattgaataaccccaaggacttccaagaactgaataaacagactaagaagaatatgactatcgacggcaaagagctgaccatcagtccggcttacctgctctgggacttgtcggcaattagtcagtccaagcaggacgaagacatatcagccagccgtttcgaagacaacgaagaactgaggtattcacttaggtccatagaaaggcatgcaccctgggtgcgaaacatttttatcgttaccaacggccagattccatcctggttgaatctcgacaatccaagggtcacgatcgtaacccatcaagacgtgtttaggaatttgtcacacttgccgacctttagcagccccgcgatagaaagtcatatccataggattgagggtttgtctcagaaattcatctacttgaacgatgatgtgatgtttggtaaggacgtttggcccgacgacttttactcccattccaaagggcagaaagtctatttgacatggccggtgccaaactgtgccgagggctgccctggatcttggatcaaagacggctactgcgacaaagcctgtaacaattctgcttgtgattgggatggcggggactgttctggaaactccggaggctctagatatattgccggcggagggggtaccgggtcgatcggggtgggccaaccatggcagttcggtggggggatcaatagtgtgtcctattgcaatcaggggtgcgctaattcctggctggcggacaagttttgtgatcaggcttgcaacgtactttcctgtgggttcgacgccggcgactgcggccaggaccactttcatgagctgtacaaagtaattctgttgcccaatcaaacccattacatcatcccaaaaggtgagtgcctgccctatttctcgtttgcagaggtggccaaacgaggtgtggaaggtgcgtacagtgataatccaattatccgacatgcgtccattgccaataagtggaaaactattcacctgattatgcacagcgggatgaatgcgacaacaattcactttaacttgacttttcagaacaccaatgacgaagagttcaagatgcagatcactgtagaggtggacacccgagagggtccaaagctcaatagcacagctcaaaaaggctacgagaacctcgttagcccaataaccctgctacccgaagctgagattctgttcgaggacatccccaaagaaaagagatttccaaagttcaagagacacgacgttaattcaactagaagagcgcaggaagaggtaaaaattcctctcgtgaacatcagcctccttcctaaagacgcacagttgtctctaaacaccttggacctgcagctggaacatggagacataaccttaaaagggtataacctgagtaaaagcgctctcctgcgttccttccttatgaatagccagcatgccaagatcaagaaccaggcaataataaccgatgagaccaatgatagccttgtagctccacaggagaaacaggtacataaatcaattctgcctaactccttgggggttagtgagcgactccaaaggctcacttttcccgccgttagcgtgaaagttaacggccatgatcagggacagaatccgccactagacctggaaactacagctagattcagagtagagactcatacccagaagactatcggtgggaatgttaccaaggaaaaacctcctagtctgatagtacctctggaatcccagatgactaaggaaaaaaaaattacaggaaaggagaaggagaattcccgaatggaagaaaatgccgagaaccacattggtgtaaccgaagtgttattggggcgaaagctgcaacactataccgactcctatctgggctttttgccatgggaaaagaaaaagtattttcaggacctgttggacgaggaagaatctctgaaaacacaactggcatattttactgattcaaaaaatacggggaggcagctgaaggatactttcgccgactcactccgttacgttaacaagatcctgaacagtaagtttggattcaccagccgtaaggttcccgcccacatgccccatatgattgatcgaatcgtcatgcaggaactgcaggatatgtttccggaagagttcgataagacctccttccacaaagtcagacactctgaggacatgcagtttgcgttctcgtacttttactacctcatgtctgcagtgcagcccttgaacatatcccaggttttcgacgaagttgacaccgatcagtcaggagtgctgagcgatcgcgaaattagaacgctggccactagaatccacgagttacccttaagtctgcaggacctaactggccttgagcacatgctgatcaattgttctaagatgcttcctgcagacataacccagctgaataacattccgccgacccaagagtcctattatgaccctaaccttccccctgtgaccaaatctttggtgaccaattgtaaaccggtgactgacaaaattcacaaagcttataaggataaaaataaataccgtttcgaaatcatgggcgaagaggagattgctttcaaaatgatccgaactaatgtgagccacgtcgtgggtcagttagatgacattaggaagaacccgcgaaagttcgtatgtctgaatgataatatagaccataatcataaggacgcccaaacagtgaaggcagtgctgcgagacttttatgaatccatgttccccatcccgagtcagtttgagctgcctagagagtacagaaatcgttttctccacatgcacgagttgcaggaatggcgtgcatatcgagataaactgaaattttggactcactgtgtcctggccaccctgatcatgtttacaatatttagtttttttgccgagcagctgatcgctctgaaaaggaagatcttccccaggagaaggattcataaggaagctagccccaacagaatcagagta

SEQ ID NO: 215079 - DNA, 3768 bp, Artificial Sequence
  derived and/or modified sequence
atgctctttaagctgctgcaacgacagacctacacctgcttgagtcaccgctacggcttgtacgtctgcttcctgggtgttgtggtgactattgtgtccgccttccagttcggcgaggtggttctggagtggagccgggaccagtaccatgtattgtttgattcgtaccgggataacatcgccggcaaatccttccaaaatcgcctgtgtctacccatgccaattgatgtcgtttatacatgggtgaacggtaccgacctagagttgctgaaggaattacagcaggtacgcgagcagatggaagaggaacagaaagccatgagggaaattcttgggaagaatacgacggagccgaccaaaaagagcgagaaacaactggagtgtctcctcactcactgtataaaggtgcccatgcttgtattagatccggctctcccagctaatattaccttgaaggacctcccaagcctgtatccctcgttccacagtgctagcgatatctttaacgtcgctaagccgaagaacccgagtacgaatgtctctgtggtggtatttgactccaccaaggatgttgaggatgcccactcagggttgctgaaaggcaattcgagacaaactgtgtggcgtggatacctgactactgataaggaggtcccaggcctcgtgctgatgcaggatctggcgtttttatcgggcttcccgccaacgtttaaggagacgaaccagctgaagacgaagctgccggagaacttatcgtcaaaagtcaagctactgcagctctactccgaagccagcgttgctctgcttaagctgaacaacccgaaggacttccaggagttgaataaacaaacgaaaaagaacatgacaatagatggaaaggaacttaccatatcacccgcctacctgctgtgggatctaagcgctatctcgcagtcaaagcaggacgaggatatttcggcgtcccggttcgaagacaatgaggagcttcgctatagcctccgctcgattgagcgtcatgctccctgggtccgaaacatctttatcgttactaacggccagatcccctcctggctcaaccttgacaatccccgagtgacgatagtgacccatcaggacgtcttccgcaatctatctcacctgccaactttctcgtcgccagcaattgagtctcacatccaccgcatcgagggtctctcgcagaagtttatctatttgaatgatgatgtgatgttcggcaaagacgtctggcctgacgatttttattcccatagcaagggacagaaggtgtacctgacctggccagtgccgaactgcgcggagggttgtcccgggtcttggatcaaggatggctattgcgacaaggcctgcaacaattcggcgtgtgattgggacggcggcgattgctcaggcaatagcggagggtcacgttacatcgctggcggaggcggcacaggaagcatcggagtaggccagccgtggcagttcggaggcggcattaacagtgtgagttattgcaatcagggctgtgctaattcgtggcttgcagacaaattttgcgaccaagcctgcaatgtgttgtcttgcggattcgatgcgggtgactgtggccaggatcattttcatgagctgtataaggtcattctcctgcctaaccaaacacattatatcattccgaagggtgagtgccttccgtatttcagcttcgctgaggttgcaaagcgaggggtagagggcgcatacagtgacaatccgattatcaggcatgcaagcattgcgaataagtggaagaccattcatctgataatgcactccggaatgaacgcaacaacgattcacttcaatttgactttccagaatacaaatgacgaagagttcaagatgcagattactgtggaggtggacacgcgagagggccccaaactgaactccacagcacagaaaggttacgagaacctggtctcccccatcactctgctgccagaggcggagatcttattcgaggatattccaaaggaaaagcgattcccgaagtttaagagacacgacgtcaactctacccggcgggcccaggaagaggtcaagatccccctggttaacattagcctcctcccaaaggatgcccagttgtcactgaacacactggacctacagctcgaacacggcgatattacactgaagggttacaatttgtccaagtcagcactgctgcgctcctttctgatgaatagccagcacgcgaagattaagaaccaggcaattattaccgacgagacaaatgattctttggtggcaccacaggagaaacaggtccacaaaagcatactacccaattcgctgggggtgtccgagcgcctgcaacggttgacgttcccggccgtttcggtgaaggttaatggccacgaccagggccaaaacccaccactcgatttggaaactactgcacggttccgcgtggagactcatacgcaaaaaactatcggcggcaacgtgacgaaggaaaaacccccaagtctaatcgtgcccctggaaagccagatgaccaaggaaaagaaaattactgggaaagaaaaggagaatagccgcatggaagagaacgcagagaaccacatcggcgtgaccgaggtcctgctgggacgtaagctccaacactacacagactcctaccttggcttcttgccttgggagaaaaagaagtacttccaggatctgttggatgaggaagagagcctgaagacgcagctggcatactttacggatagtaagaacaccggaaggcagctgaaggacacgtttgccgactcgctgcgctatgtgaacaaaattctcaattccaagttcggattcacgagcagaaaggttcccgcccatatgccacacatgatagatcgaatcgtgatgcaagaactccaggacatgttcccggaggagttcgataagacgagcttccacaaggtccgacacagtgaagacatgcaattcgcattttcgtacttctactacctgatgagcgccgtccagccgttgaacatctcgcaggtgttcgacgaggtagatactgatcaatcgggtgtcttgtctgatcgagagattcgaaccctggcaactaggatccacgaactgccacttagcttgcaggaccttaccggcttggagcatatgcttatcaactgttcgaagatgctcccagcagatatcacccaactgaacaacattccgcccacgcaagagtcttactatgatcccaacctgccgcccgtcaccaagtcactggtaactaactgcaaaccagtcaccgataagattcacaaggcatacaaggacaaaaataagtaccgcttcgagattatgggtgaggaggagatagcctttaagatgatacgcactaatgtctcccacgttgtcggacagctggacgatattcgcaagaacccgcggaagttcgtttgtttaaacgataacattgaccacaaccacaaggacgcccaaaccgtgaaggccgtccttcgagacttctatgagtcgatgtttcccataccatcgcaatttgaactcccacgggaatatagaaaccgcttcctgcatatgcacgagttgcaagagtggcgggcgtacagggacaagctgaagttttggacccattgcgtgttggccacgctcatcatgttcaccatttttagctttttcgccgaacagcttattgcgctcaagcgcaagatcttccctagacgccgcatacacaaggaagcctcgccgaatcgaatacgagtt

SEQ ID NO: 215080 - DNA, 3768 bp, Artificial Sequence
  derived and/or modified sequence
atgctgttcaagttgcttcagcgtcaaacgtacacgtgtctgtcacataggtatggtttgtatgtttgctttttaggagtggtggttactatcgtgtcagcgtttcagttcggggaagttgtcctggagtggtctagagaccagtaccatgtgttgtttgacagctatagggataacattgccggaaaaagctttcagaatcgactatgtctgcctatgcccatagatgtcgtgtacacctgggtgaacggcactgatctggagctgttgaaggagttgcagcaggtacgggagcagatggaagaagaacaaaaagccatgagagagatcctgggcaaaaatacaaccgagccgaccaagaaatctgaaaagcagctagagtgtcttctgacccattgcattaaggtgcctatgctggtgctcgatcctgccctgccggcaaatattacacttaaggatcttccctctctctatccttcatttcattctgcctctgacatcttcaacgtcgccaagccaaaaaatccatctaccaatgttagcgtggttgtgtttgacagtacgaaagatgtggaggatgcacactcggggctgctcaagggcaactcgagacagacggtgtggaggggctacttgaccacggacaaggaagtgcccggattagtgctgatgcaggacctggcatttctctccggcttccctccgacattcaaagagacaaatcagcttaagactaaactccccgaaaacctttcctcaaaggtgaagttactgcagctatattctgaagcttcagttgccctcctgaaattgaacaatcccaaggatttccaagaactgaacaaacaaaccaaaaagaacatgactatagatggaaaggagcttacgataagcccagcctacctgctttgggacctgtccgccatttctcagagtaagcaagacgaggatatctccgcatctagattcgaagataacgaggagttgcgttactcacttagaagtatagaacgccatgctccatgggtaaggaatattttcatcgtcacaaatggtcagatcccgtcttggctgaacctcgataatccaagggtgaccattgttacacatcaggatgtgttccgaaatctgtctcatctgccaaccttctcgtcgccggcgatagagtcgcacattcaccgaatcgaaggtctgtcccagaagttcatctaccttaatgatgatgtgatgtttggtaaagatgtctggcctgacgacttctattcccattcaaaaggccaaaaagtgtacctgacgtggccagtccccaactgtgccgagggctgtccaggaagttggatcaaagatgggtactgtgacaaagcgtgtaataactctgcctgcgactgggacggaggcgattgctccggcaatagcggaggctctcgttatatcgcaggagggggtggtaccggcagtataggcgtcggacagccgtggcagtttggggggggaatcaacagcgtgtcctattgcaatcaaggttgcgccaacagctggctagccgacaagttttgtgatcaggcgtgtaacgtgctcagttgcggatttgatgccggagactgcgggcaggatcattttcacgaactgtataaggtgatcttactgccaaatcagacgcattacataatccctaaaggagaatgcttaccatacttcagctttgctgaggtggccaagcggggagtggagggcgcttacagcgataatcccatcatccgtcacgccagtatagcaaacaagtggaagactattcatttaatcatgcacagtggaatgaacgccactactatccattttaacctcactttccaaaataccaacgacgaagaattcaagatgcaaattaccgttgaagtcgacacaagagagggaccgaagctcaactcaacggcgcagaaggggtacgagaacctcgtatccccaatcactttgttgccagaagcagaaatattgttcgaggacatccccaaggagaagagatttcccaagttcaaacgacatgacgttaactctacacggcgcgcccaggaagaagtgaagatcccattagtcaatatttctctacttcccaaagacgctcagctgtcattaaacaccctagacttacagctggagcacggtgatatcacactgaagggatacaatctttccaagtcagctcttttgcggtctttcttgatgaatagccagcacgccaagattaagaatcaggcaattatcacggacgagaccaacgattcactcgtggcacctcaagagaagcaggttcacaaaagcattctacccaactcgttgggagtgagtgaacgcctccagaggcttacatttccagcagtgtcggtaaaagtgaacggacacgatcagggccagaacccaccgctcgacctagaaaccacagcccgcttccgggtggagacccatacccagaaaacaatcggggggaacgtgaccaaggagaaaccaccctcgctgatcgtgcctctggagtcacagatgactaaggagaaaaagattactggaaaagagaaggaaaatagtcgcatggaggaaaacgctgagaaccacattggagtaacagaggttctcctggggagaaagctgcagcactacaccgattcatacctgggtttcctgccatgggaaaaaaaaaaatactttcaagatctcctggacgaagaagagagccttaagactcagctcgcatatttcactgattccaaaaatacggggaggcaattaaaggatacttttgcagactctctgcggtatgtcaacaaaatccttaacagcaagtttggatttacaagccgaaaggtccctgctcatatgccccacatgattgatcggattgtgatgcaggagctgcaggatatgttcccggaggagtttgataagacctcattccataaggtcagacactctgaagatatgcagttcgcttttagctatttttattacctgatgagcgccgtacagcccctgaacataagccaggtgtttgatgaagtggacactgatcagtctggtgtcctgagcgacagagaaatacgcacgctggctacacggattcatgaactgccccttagcttacaagatttgaccggccttgagcacatgctcattaactgcagtaaaatgctacctgcagatatcacacagctgaataatatccccccaacccaggaaagttactatgacccaaacttgccaccagtgactaaatcactggtgaccaattgtaaacccgttacggataagatccacaaggcctataaagataagaacaagtaccggtttgagataatgggcgaagaggaaatcgcgtttaaaatgatccggacaaatgtttcccatgtggtgggccagttggacgatattagaaaaaacccacgaaagttcgtctgcctgaatgacaatattgaccacaatcataaggacgcccaaacagttaaggccgtgctccgtgatttttacgagagtatgtttcctatcccttcacagttcgaactacctagggagtatagaaaccggtttttgcatatgcatgaactgcaggagtggcgcgcttatagggacaaactgaagttctggacccactgtgtgctggctaccttaatcatgtttaccatcttctccttcttcgcagaacagttaatagctctgaagcgcaagattttccctcgccgaagaatccacaaggaagcttcccctaacaggatcagagtg

SEQ ID NO: 215081 - DNA, 3768 bp, Artificial Sequence
  derived and/or modified sequence
atgctatttaaacttcttcaacgtcagacatacacatgtctgtcgcatagatacgggctatatgtgtgctttctgggggtggtcgtgactatagtctctgcgtttcagtttggtgaggtggtgcttgagtggtctcgagatcagtaccatgtgttgttcgattcctatcgcgataatattgcaggcaaaagctttcagaaccggctgtgcctccctatgccaattgacgtcgtatacacctgggtaaatggcactgatttggagctacttaaggaactgcagcaggttcgcgagcaaatggaggaggagcaaaaagcgatgcgggaaatactgggaaagaacaccacggaacccaccaagaaatcggagaagcaactggagtgtctgctaacgcattgtataaaggttcccatgttggttctggacccagcactgccagccaatatcaccctgaaggacctgccatcactatacccatcatttcatagcgcgtctgatatcttcaacgtggcgaaacccaagaacccgagcacaaacgttagtgtggttgtgtttgactccactaaggatgtggaggacgcacatagtgggctgctcaaaggaaactccaggcaaaccgtttggcgggggtaccttacgacggataaagaagtccccgggttggtgctgatgcaggatctggccttcttgtccgggttcccccccacttttaaggagactaaccaactaaaaaccaaactcccagaaaacttgtcttcaaaggtgaaactgcttcagctctactctgaagcatccgtggccctgttaaagttgaataatcctaaggatttccaagagttgaacaaacagactaaaaagaatatgacgatcgacggtaaggagctcactatatctccagcctaccttctctgggacttaagcgccatttcgcaatctaagcaggacgaagacatctcagccagccgctttgaggataacgaggagctgagatacagtctgaggtccatcgagaggcacgccccttgggtacggaacatattcatcgtgacaaacgggcagattcccagctggttgaacctggacaaccctagagtcactatagtgacacaccaggacgtgtttagaaacctcagtcacctgcctacatttagtagtcccgccattgaaagccatatacatcggatcgagggtctgtcgcagaagtttatatacctcaatgacgacgtgatgttcggcaaggatgtatggccagacgatttttattcacattcaaaggggcagaaggtatacctgacctggcctgtcccaaactgcgcagagggatgtccgggttcctggataaaggacggctactgtgacaaggcgtgcaacaatagcgcttgcgactgggacggtggagactgttctggcaactccgggggtagtcgctatattgcaggcggaggcggcactggctcgatcggcgtggggcagccatggcagttcgggggaggcatcaactcagtctcatactgcaaccaggggtgcgccaactcttggcttgctgataaattttgtgatcaggcttgcaatgtgctgagctgtggtttcgacgctggcgactgtgggcaagaccattttcatgagttgtataaggtgatcctgctcccgaatcaaacccattatattatacctaagggggagtgtcttccatacttctcgtttgctgaagtggccaagagaggggtcgagggagcatattccgacaaccctattattaggcatgctagcatcgctaacaagtggaaaaccattcatttgatcatgcattccggcatgaatgccacaactattcacttcaatttgactttccaaaatacaaatgatgaggagttcaagatgcagatcacggtagaggttgacacaagagaagggccaaaactcaattccaccgcccagaaagggtacgagaacctagttagcccaatcacgctgttacctgaggctgaaattcttttcgaggatatcccaaaagagaaacgatttccaaagtttaagagacacgatgtaaattcaaccagacgagcccaggaggaggtgaagatcccactagtcaacatttcattgctcccaaaggatgcccagctgtcactgaataccctcgacctgcagctcgagcacggtgacatcacgttgaaaggttacaacctgtcaaagtcggcactcttgcggagtttcctcatgaactcacagcacgctaaaattaagaatcaagcaatcattaccgatgagaccaacgactcgctcgtcgctccccaagagaaacaagtacataaaagcatccttcctaactccctcggcgtgtcagagcgtctccagagattgacatttcctgccgtttcagttaaagttaatggtcatgaccaaggccagaaccctcccctggatttggagactaccgcgcggtttcgagtggaaacacatacacagaagacaataggcggcaacgtgaccaaagaaaaacccccgagcctgatcgtccccctagaatctcagatgaccaaggaaaagaagataacagggaaggagaaggaaaactctcggatggaggaaaacgcagaaaaccacatcggcgtaacagaggtcctgctcggtagaaagcttcagcactatacagacagctacttggggtttttaccgtgggaaaagaagaagtactttcaagacctactagatgaagaagagagcctgaaaacacagcttgcatattttactgactctaaaaataccggacgccaactcaaagatacatttgcagattccctccggtacgtgaacaagattttgaacagtaagttcggcttcactagcaggaaagtcccggctcatatgccacacatgattgacagaattgtcatgcaggaactgcaggacatgtttccggaggagttcgataaaactagcttccacaaagtccggcatagtgaggacatgcagttcgccttctcttatttctactatcttatgagcgcagtccagcctctaaacataagtcaagtgttcgatgaggtggatacagatcaatcgggcgtcttgtccgaccgggaaatccgcaccttggctacgagaattcacgagttacccctgtctttgcaggacctgactgggttagagcacatgttgattaactgttccaaaatgttgccagcagatatcacccagctcaataacatcccccccactcaagaatcctactatgacccgaatttgccacctgtgacaaagtccttagtcactaattgtaagcctgtaaccgataagattcacaaagcctacaaggacaagaataaataccgtttcgagataatgggagaggaggaaatagctttcaagatgataaggacaaacgtgtctcatgttgtcggccaattggatgatatacggaagaaccctcggaagttcgtttgcttgaatgacaacatcgatcacaatcacaaggacgcccaaacagtgaaggccgtgctgagggacttttatgagtccatgttccccattcccagccagtttgagctgccaagggaatataggaacaggtttctacatatgcatgagttgcaggagtggcgggcctacagggataagttaaaattctggacacactgtgttttagcgactctgatcatgtttacaatctttagcttttttgctgagcagcttatagcactgaagaggaaaatctttcctcggcgtaggatccataaggaagcctcccctaatagaatcagagtg

SEQ ID NO: 215082 - DNA, 3768 bp, Artificial Sequence
  derived and/or modified sequence
atgctgtttaaactgctgcagcggcagacctacacctgtctatcacacagatatggcctctacgtatgtttccttggagtggtggtgacgatcgtctcagcattccagttcggtgaagtagtgctggagtggtcgcgagaccagtaccacgtactgttcgactcatatcgagataatatagctggaaagtccttccagaacaggctgtgcctccccatgccaatagatgttgtttatacctgggttaacgggacagatttagagctcctgaaggaactacaacaggtgagggaacagatggaagaggaacagaaggctatgagggagatcctcgggaaaaatacaaccgagcccaccaagaaaagcgaaaagcaactagaatgtctgctcacacactgcatcaaagtccctatgctggtgctggatcccgctttgccggcgaacatcactcttaaggacctgccttccttatatccctctttccattcagcttctgatatattcaatgtggcaaagcccaagaacccgagtacaaacgttagtgttgtggtgttcgattctacaaaggacgtcgaggacgctcatagcggattacttaagggtaacagtagacaaacagtgtggcggggctacctgacgaccgataaggaagtacctgggcttgtattgatgcaggacctggcattcctgtcaggattcccacctacctttaaggagaccaaccagttaaagactaaattgcctgagaatctaagcagcaaggtaaagctgctccaactgtatagcgaagcttccgtggcactcctcaaactaaacaaccctaaggactttcaggaactgaataagcaaactaagaaaaacatgaccattgatggaaaggagctgacaattagcccagcttacctgttatgggacctatccgctatctcgcagtccaaacaggacgaagacattagcgcaagccggttcgaggataatgaagagctaagatattccctgcgctcaattgagagacacgcaccctgggttagaaacatctttatcgtaactaacgggcagatcccttcttggctcaacctggataatccaagggttacaatcgtgactcatcaagacgtctttcggaacctgtctcacctgccaacttttagttcgccagcaatagagagtcacatccatcgcatagagggcctatcacagaaattcatatacttgaatgacgacgttatgtttgggaaagacgtatggcctgatgacttctacagccacagcaagggtcagaaagtttatctgacctggcccgtgcccaactgcgccgaagggtgtccaggtagctggattaaggacggctactgtgacaaagcttgcaataactccgcatgcgattgggacggcggagactgttctggaaactccggaggcagccggtacattgccggggggggcggaacaggatcaatcggcgtgggccagccttggcagttcggtggggggataaactcagtctcctattgcaatcagggatgtgcgaatagttggcttgccgataaattttgtgatcaggcctgcaatgtgttgagctgcgggttcgacgccggagattgtggccaggatcactttcacgaattgtacaaggtgatcctactgcccaaccagacccactacatcatccccaaaggggagtgtctaccatacttttcttttgctgaagtggccaagcgcggagtggagggtgcttattcagacaatcccattataagacatgcatcgattgcaaacaaatggaaaactatccatttaatcatgcactcaggcatgaacgcaacgaccatacacttcaacctcactttccagaatacgaatgacgaggagttcaagatgcaaattaccgttgaagtcgacacgagagagggtcccaagctgaattctacagcccagaagggctacgagaaccttgttagtccaattacactcttgcctgaagctgagatcctgtttgaggacattcctaaagagaagaggtttccaaagttcaagaggcatgacgtaaattcaacccgtagagctcaagaagaagtgaagatacccctcgtaaatatttctctcttgccaaaagacgcccagttatccctgaatactttggaccttcagctagaacacggggatatcacactcaaggggtacaacctcagcaagtctgcactcctcagaagttttttgatgaactcacagcatgccaaaattaagaaccaagctatcattacagacgaaacgaatgatagccttgttgcccctcaggagaagcaagtccataaatctattctcccgaatagcttgggcgtgtcggaacggttgcagcgccttaccttcccagcagtcagtgtgaaagtgaacggccatgaccagggccagaatcctccactcgatctggagacaactgcccggttcagagtggaaacacacacacagaaaactatcggtggaaatgtgaccaaggaaaaaccaccgtctctgatcgtcccactcgagtcacagatgaccaaggagaaaaagattacaggaaaagagaaagagaattcacgtatggaagaaaacgctgagaaccacatcggagtgaccgaagtgcttctgggccgcaaactgcagcattacacggatagttacttgggcttcttgccttgggagaagaaaaaatatttccaagatcttctcgatgaagaggagagcctcaaaactcagttggcctactttactgatagcaagaacaccggacgccagctaaaagacaccttcgccgattccttaagatacgtaaataagatactgaattctaagttcggcttcacctctagaaaggtgccggcgcacatgcctcacatgattgacaggatcgtgatgcaggagttgcaggatatgttccccgaagagtttgacaagacttctttccataaggtgcggcactctgaggacatgcagtttgccttttcatatttctactatctaatgtctgccgttcagcccttaaatatttcacaagtattcgatgaggttgataccgatcaatctggagtgctgtcagaccgagagataaggactcttgccaccaggattcatgagctgcctctgtcgctgcaggacctgacgggccttgaacatatgttgatcaattgctccaaaatgctgcccgccgacatcacccagctcaacaacatcccaccaactcaagaatcctactatgaccccaacctaccccctgtgactaaatccctggtcacgaactgcaagcctgtgacagataaaatccataaagcatataaagacaagaacaagtatcgctttgagataatgggggaggaggaaattgccttcaaaatgattcgtaccaacgtttctcatgtagtggggcagctggatgatattcgcaaaaacccccgcaagttcgtttgcctcaatgacaacatcgaccataatcataaggatgcccagaccgttaaggcagtcctccgagatttctatgaaagtatgttccccataccctcccagttcgaattgccacgggaataccgtaatcgattcttacacatgcatgagttgcaggagtggcgggcatacagggataagttgaaattttggacgcattgcgtcttggcaacactgatcatgttcactatcttctcattcttcgccgaacagttgatcgcgctgaaaaggaaaatcttcccgcgccggcgaatccacaaagaggcatcaccgaaccgcatcagggtg

SEQ ID NO: 215083 - DNA, 3768 bp, Artificial Sequence
  derived and/or modified sequence
atgctgtttaagctcctccaacgacagacttatacctgcctatctcatcgctacgggctatacgtgtgttttctcggagtggtggtgacgatcgtctctgctttccagtttggtgaagtggtgctggagtggtccagggatcagtatcatgtgctgttcgatagctatcgcgacaatatcgcaggcaagagttttcagaacaggctgtgcctgccaatgcccatcgacgtcgtgtacacgtgggtgaacggtactgacctggagctcctcaaagagttacagcaagtgcgggaacagatggaggaagaacagaaggccatgagagagatactgggaaaaaacaccaccgaacccaccaagaaatccgaaaagcaactggagtgtctcctcacgcactgcatcaaggtgcctatgctcgtgctggatcctgcactccccgcaaatattaccctaaaggaccttcctagcttgtaccctagcttccacagcgcctcggatattttcaacgtggccaaacccaagaacccttccactaacgtctccgtcgtggtattcgatagtaccaaggacgtggaggatgcccactcggggctattgaaagggaattctaggcaaaccgtgtggcgcggatacctgacaaccgacaaggaagtaccagggctggttctgatgcaagatctggcatttctatctgggtttccccccacatttaaggagacaaatcagctcaagacaaagttgccggaaaacctctcatctaaggtgaaacttctccagctctactctgaggccagtgtcgccctgctgaaactgaataatcctaaagatttccaggaacttaacaagcaaacgaaaaaaaacatgaccattgacggtaaagagctgaccatatcccccgcatatttactctgggacctgtcagcaatttcccagtcaaagcaggacgaagacatttcagcaagccggtttgaggataatgaggaattacgctactctcttcggtccatcgagaggcacgctccatgggtccgtaacattttcattgtgacgaacggccagatcccaagctggcttaatctagacaacccgcgggtgaccattgtcacccaccaggatgtcttcagaaatctttctcacctgccaacattctcttcgccagctatcgagagccacatccaccggattgagggattgagtcaaaagtttatttatctcaatgacgacgtgatgtttgggaaagatgtgtggcccgacgacttttattcacattccaagggacaaaaggtctatcttacctggcccgttcccaattgcgcagaagggtgcccgggaagttggatcaaggatggatactgtgataaagcctgcaacaacagcgcctgtgattgggacggaggcgactgctcgggtaacagtggtgggtcgcgctacattgccggcgggggaggcaccggatccattggcgtggggcagccgtggcagtttggaggtgggatcaactctgtgtcctattgcaaccaaggatgtgctaactcctggcttgcagataagttctgcgatcaggcctgtaacgtgctgagctgtggcttcgacgccggcgactgcgggcaagatcactttcacgaattgtacaaagtgatccttctgccaaatcagacccactacattatcccaaagggcgagtgcctgccctacttcagttttgccgaggtggccaagaggggtgtcgaaggcgcttacagcgataatcctataatacgccatgccagcatcgcaaacaagtggaagacgatccacttgataatgcattcggggatgaacgccacgaccatacattttaatctgacgtttcagaacaccaacgatgaggagtttaagatgcaaattaccgtggaggtggacactagggagggaccgaagctcaactctactgcgcagaagggttacgaaaacctcgttagtccgatcacattgcttcctgaggcagaaatcctttttgaagatatccctaaggagaaaaggtttcccaaatttaagagacacgacgtgaacagcacgcggagggcacaggaggaggttaaaatccccctagttaatatcagccttcttccaaaggacgctcaactctccttgaacacactggacctccagctcgagcatggagatattacactaaaaggatacaacctttccaagagcgccctgttgcgctcttttctgatgaactcacaacacgctaagatcaaaaatcaggcaattatcaccgatgaaaccaacgactccctggtggctccacaggaaaaacaggtacacaagagtattctccccaattccctgggagtatccgaaagactgcagcggctgacctttcctgcagtctccgttaaagtgaacggccacgaccaaggccagaaccctccgttagatcttgagacaaccgcacgattcagagtggaaacgcatactcagaaaacaatcggagggaatgtgaccaaagaaaagccaccttcactgattgtgcccctcgagtctcagatgactaaggagaaaaaaattaccgggaaagagaaggagaattccagaatggaggagaatgctgaaaatcatatcggcgtcacggaggtgctactcgggagaaaattgcagcactacactgactcatatttgggtttcctcccttgggagaagaagaaatattttcaagacctcttagacgaggaagagagcctgaagacgcagctggcgtacttcaccgattcaaagaacaccgggcggcagctcaaggacaccttcgcagattcattgcgttatgtgaacaagattctcaatagcaagtttggattcacaagccgcaaagtgcccgctcacatgccgcatatgatcgacagaattgtcatgcaggaactgcaagatatgtttcccgaggagttcgataagacgtctttccacaaagtgagacacagtgaggacatgcagttcgccttctcttatttctactacctgatgagtgcagtgcaaccactgaatatttctcaagtctttgacgaggtggacaccgaccagtcaggcgtgctgtccgatagagagatccgcacactggccacaaggatccatgagctccctctgtccctgcaggatttaactggcctggagcatatgctcatcaactgctccaagatgcttcctgctgacattacgcagctgaataacatcccccccactcaggagtcctattacgaccctaacctcccaccggtaaccaaaagcttagtcaccaattgtaaaccagtgaccgataagatccacaaagcatacaaagacaagaacaagtataggttcgagatcatgggcgaggaagaaatagccttcaagatgatacgcactaatgtgtcccacgtagtcgggcaacttgacgacattcggaaaaatccaaggaagtttgtctgcttgaacgacaatatcgaccataaccacaaggatgcccaaaccgtgaaggctgtcctacgagatttctacgagtccatgtttccgattccatcacagttcgaactacctcgggaatatcggaatagattcctccacatgcacgaactgcaggaatggcgcgcttacagggacaaactcaagttctggacgcattgcgtgttagctaccctgatcatgttcaccatcttcagtttctttgcggagcaacttatcgcactgaagcgcaaaattttcccccgtcggcgcattcataaagaagcctcgcctaaccgcattcgggtg

SEQ ID NO: 215084 - DNA, 3768 bp, Artificial Sequence
  derived and/or modified sequence
atgctgtttaagctcctacagcgccaaacttatacctgcctgagccaccgatacggactgtatgtttgctttctgggggtggtggtaaccatcgtgtctgccttccagtttggcgaggttgttctggagtggagtcgagatcagtaccacgtcttgtttgactcttatagggacaacattgcagggaaatcctttcaaaataggctttgcctccctatgccaattgacgtggtctacacctgggtgaatggaaccgacctcgagttactgaaagagctgcagcaggttagggagcaaatggaggaagaacaaaaggccatgcgcgagatactgggtaagaacacaaccgagccgacaaagaaaagcgagaaacaactggagtgcctacttacgcattgtatcaaagtgcctatgttggtcttagacccagccctgcccgctaatattaccttaaaagatttacccagcttgtatcctagctttcacagcgcatccgatatctttaatgttgcaaaaccaaagaatccatccacaaacgtctcagtggtcgtgttcgacagcaccaaggatgtggaagacgctcacagcggtctactgaaaggcaactcccgccagacagtttggagaggttacctcactaccgacaaggaagtgccagggctggtgctgatgcaagacttggctttcctcagcggattcccacccacatttaaggagacaaatcagcttaagacaaagctgcccgaaaatctctcgtcaaaggtaaagctgctgcagctttacagtgaagcttccgtggctttgctcaaactgaacaacccgaaagactttcaagagctaaacaagcaaacgaaaaagaacatgaccatcgacggtaaggagctgaccatcagtcccgcatacctgctgtgggatctgtctgcaatctcacagagcaagcaggatgaggatataagcgcctctcggtttgaggacaatgaggagctgcggtattcactgagatccattgagcgccatgctccctgggttagaaatatttttatcgtgactaacgggcagattccaagctggctgaatttagataatcccagggttactattgtgactcaccaggacgttttccgcaatctgtcccatctgcctacattctcaagtcccgccatagagagccacatccaccggatcgagggtctttcccagaaattcatctacttgaacgacgacgtcatgtttgggaaggatgtgtggccagatgatttctatagccacagcaagggccagaaggtctacttaacgtggcctgttccaaattgcgccgaaggctgcccgggttcctggattaaagacggctactgcgataaggcctgtaataattctgcttgcgactgggacggcggcgactgcagtgggaatagcggagggtcgagatacatcgcggggggcggtggaaccggttccattggggttggccagccctggcaattcggaggcggaattaattcagtaagctactgtaaccaaggttgtgctaattcgtggctggcagacaagttttgcgatcaggcatgcaatgtgctttcctgcggctttgacgctggcgattgtgggcaggatcacttccacgaactgtacaaggttatccttcttcctaaccagactcattacataatccctaaaggggaatgtctgccatatttctccttcgccgaggtggccaaaaggggggtcgaaggggcatattcagacaaccctatcataagacatgcgtcaatcgccaataagtggaagacaattcacctcataatgcacagcgggatgaatgcaaccactatccactttaatctcacctttcagaacacgaatgacgaggagtttaagatgcagattaccgtggaggtggacacacgggaggggcccaagctgaattcaacagcacagaagggttatgagaatctggtctcccctatcactctgctcccagaggccgagatcctatttgaggatataccaaaggaaaagcggtttcctaagttcaaaaggcatgacgtgaactctacaaggcgcgctcaggaagaggtgaaaatacctctcgtcaacatcagcttgcttcccaaggatgcgcagctttcactcaacacactagatctgcaactcgaacacggcgacattacactgaagggctacaatctgtcgaaatcagccctactcagatcttttctcatgaactctcagcatgctaaaatcaaaaaccaggctattatcactgacgaaacgaatgatagtctagtggcacctcaggaaaagcaggtgcataagtcgatcttacctaacagtctgggtgtgtccgagaggcttcagcgcttgacctttcccgcagtgtcggttaaagtaaacggacatgatcaggggcagaacccacctctcgatctcgaaactactgcgcggtttagggttgaaacccacacccagaagactatcggtggaaacgtcaccaaggagaagcccccgagcctgatcgtacccctggaatcacagatgactaaagaaaaaaagatcacaggtaaggagaaggaaaactcgaggatggaagagaacgccgagaaccatatcggggtaacagaggtgttgctggggcggaagctccagcactacaccgactcatacctgggattccttccttgggagaagaaaaagtattttcaggatctgctggatgaggaggagagcctaaagacccagctggcctactttaccgattctaaaaatacaggacgacagctgaaggataccttcgcagactccctgcgatacgtgaataagattcttaacagtaagtttgggttcacaagccggaaggtcccggctcatatgccacacatgattgaccgaatcgtgatgcaggagctacaagacatgttccccgaggaattcgataagacatccttccataaagtgcgacacagcgaagacatgcagtttgccttctcctacttctattatctgatgagtgccgtgcaacccctgaatataagccaggtctttgacgaggtcgacacagaccagtcaggggtgctgagcgatcgagaaattaggactctggctacccgcatacacgagctccccttgtccctacaggacctcacaggattagagcacatgctgattaattgcagcaaaatgcttccggctgacatcactcaacttaataatattccccccacccaggagtcatactatgatcccaatttacccccagtgacgaagtccctcgtgaccaactgcaaaccggtgacggacaaaatccataaagcatacaaagataagaacaagtacaggttcgaaatcatgggtgaagaggagattgcgttcaagatgataagaacaaatgtgtcccacgtagtgggacagctggacgacattagaaagaacccccgcaagttcgtttgtctgaatgacaacattgaccataatcataaggacgctcagacagttaaggccgtgctgcgggacttctacgaaagcatgttccctattccgagtcagtttgaacttccgcgggaatacaggaataggttcctgcatatgcacgagctccaagaatggcgggcttacagggataagctcaagttttggacccactgcgtgctcgccacgctcattatgttcacaattttctctttttttgccgagcagctcattgctctgaagcggaaaatatttccccgacggcgtatacataaagaggcaagccccaatcgaatacgtgta

SEQ ID NO: 215085 - DNA, 3768 bp, Artificial Sequence
  derived and/or modified sequence
atgctcttcaagctgctccagcgccagacctatacatgtctgtcccatcgctacggcttgtatgtgtgcttcctcggggtggtggttaccatcgtgtctgcttttcaatttggtgaagtcgtgctcgagtggagtagagaccagtaccacgtgctgtttgactcttaccgggataatatcgctgggaaaagcttccaaaacaggctgtgcctgcccatgccaattgacgtggtgtatacatgggtcaatggcaccgatctggaactgctgaaagagctccagcaggtgagagagcagatggaagaagagcaaaaagccatgcgcgaaatcctcggcaaaaataccaccgaacctacaaaaaaatctgaaaaacagctcgagtgtcttctcacacactgcatcaaggttcccatgctcgtgctggaccccgctctgccggcaaacatcacgctcaaggatctgcccagcctgtaccccagctttcattcagcctccgatatctttaatgtggccaagccgaagaacccttcaacaaacgtgtccgtggtcgtgttcgactccaccaaagacgttgaggacgcacactctggtctcctgaaaggcaactcccggcagacagtgtggagaggctacctgacgaccgataaggaggtccccggattggtactgatgcaggatctcgcgtttctctcaggatttcctcccaccttcaaggagaccaaccagctgaagaccaagctccctgagaatctgagcagtaaagtaaaattgctgcagttgtacagtgaagcctctgtggcgctgctgaagctcaataatccgaaagattttcaagagctgaacaaacaaactaagaagaacatgactattgacggcaaagagttgacaatttcccccgcttatcttctttgggatctctctgcgatttctcagagtaagcaggacgaggacattagcgcatccaggtttgaagataatgaggaattgagatacagtctgcgatccatcgaacggcatgccccatgggtgcgcaacatctttattgtcacgaacggtcaaatcccttcatggctgaatttggacaacccgagagtgacaattgtcacacaccaggacgtctttaggaacctgagccatcttcctactttttcctctcccgcgatagagtctcacatccatcgaattgaaggattgtcacaaaaatttatttatctgaatgacgacgtgatgttcggaaaggacgtctggcccgatgacttttatagtcacagtaagggtcagaaggtgtaccttacctggcccgttccaaactgcgcagaaggatgcccaggctcctggattaaagatggctattgtgacaaagcatgcaataattctgcatgtgactgggacggaggagactgctctgggaatagtggggggagcagatacatcgcagggggcggaggaacaggcagtatcggtgtgggacaaccatggcagttcggcggcgggattaactctgtatcctactgtaaccaaggctgtgccaattcatggctggccgataagttttgtgaccaagcctgcaacgtgctcagctgtggctttgacgcaggtgactgcgggcaagatcacttccatgaactctataaggtgattctgctgccaaatcagacccattatattatccctaagggggaatgtcttccatactttagctttgcggaggtcgccaaaaggggagtggaaggggcatattccgacaacccaatcatccgccacgcctccatagcgaacaagtggaaaaccatacacctgatcatgcactctgggatgaatgccacgacaattcatttcaacctgacctttcagaacactaacgatgaagagttcaaaatgcagatcactgtggaagtggatacaagagaaggtcccaagctgaactctactgcacaaaagggttacgaaaacctggtgtcaccgatcacactgctgcccgaggcagagatcttgttcgaagacattccgaaggaaaagcggtttcccaagttcaagcggcatgatgtgaactcaaccagaagggcacaggaggaggtgaagatccccctggtgaatatatccctgctcccgaaagacgcccaattgagtctcaacacgttggacttgcagctggagcacggagatatcaccctgaagggctataatctgtccaagagcgcattgttgagatcctttctgatgaatagccagcacgccaagattaagaatcaggctatcatcacagacgagactaacgattcactcgtggcaccccaggagaaacaggtccacaagtcaattcttcccaacagcctcggagtgtcagagaggctccaaaggctgacttttccagctgtgagcgtgaaggtcaatggacacgaccaaggccagaacccacccctggatcttgagacaactgcacgcttcagggtggagacccatactcagaaaactatcggcggaaatgtgactaaggaaaaacctcccagcctgatcgtgcctctggaaagccagatgaccaaagaaaagaagatcactggtaaggaaaaggagaatagccggatggaagagaatgcggagaatcacattggagtgactgaggtgctgttgggacgcaaactgcagcattataccgacagctacctggggtttctgccttgggagaagaaaaaatattttcaggatcttctggatgaagaggagtcacttaagacgcagctggcctacttcactgactcaaaaaataccggaagacagctgaaggatacatttgcggactcactgcgctacgtgaacaagatactgaattcaaagtttggctttacgtccagaaaagtccccgcccatatgccccacatgatagaccggattgtgatgcaagagttgcaggatatgtttccagaggagttcgataagacaagctttcacaaggtccgacacagcgaagacatgcagttcgccttctcttatttttactacctgatgagtgccgtccaacccctgaatatttctcaggtgttcgacgaggtagacacagaccagtccggagtcctgtctgatagggaaatacgaacactcgcaactcgaatccatgaactgcccctgagtctccaagaccttacgggactcgaacatatgctgattaactgtagtaaaatgctcccagcggacatcacgcagttgaataatattccgcccacccaggaaagctactatgaccccaatctcccccctgtgacaaaatctctggtgactaattgcaagcctgtgactgacaagatccacaaagcgtacaaggataagaataagtaccgctttgagatcatgggcgaagaggagatcgcctttaaaatgatccgcaccaacgtgtcccacgtggtggggcagttggacgatatacgaaagaacccgaggaaattcgtgtgtctcaatgacaacatagatcataatcacaaagatgcccagactgtcaaggccgtgttgagagacttctatgagagtatgtttcccatcccatcccagttcgaactgccgagggaatatcgcaatcgctttttgcatatgcacgaacttcaagagtggagagcttacagggacaagctcaaattctggacacactgcgtgctggcgacgttgattatgtttacaatcttctccttttttgccgaacagctgatagctctgaagaggaaaatttttccgaggcgcagaatccacaaggaagcctcacccaatagaattcgggtg

SEQ ID NO: 215086 - DNA, 3768 bp, Artificial Sequence
  derived and/or modified sequence
atgcttttcaaactgctgcaaagacagacctatacatgtttgtctcatcgatacggcctgtacgtctgtttcttgggggtggtcgtgaccatcgtctcagcatttcagttcggagaggttgtgttggagtggtcgcgggaccagtatcatgtcctgttcgattcttacagggataatattgccggaaagtcctttcagaacaggctgtgcctaccgatgcccatcgatgtcgtgtacacttgggtgaacgggacagacctggaacttctgaaagaacttcagcaggtgcgagagcagatggaggaggagcagaaagccatgcgggagatcctcgggaagaacaccaccgagccaactaaaaagtccgaaaagcagctggagtgcttgttgactcattgcatcaaagtcccgatgctggtcctggaccctgctctgccagccaatatcacgctaaaagacctgccgtctctgtatcctagctttcatagcgcttctgacattttcaacgtcgctaagcccaagaatccaagcacgaatgtatccgtggtggtcttcgactcaacgaaggacgtcgaggatgcgcactctggtctgctgaagggaaatagtcgacagaccgtgtggcgagggtaccttacaactgataaggaggtccctggcctggtgctgatgcaagacctggctttcctgtcaggttttccacccacattcaaggagaccaatcaactgaaaaccaagctaccggagaacctgtctagtaaggttaagctcttgcagctgtacagtgaggcctcagtagcccttctcaaactgaataacccgaaggatttccaggaattgaacaagcagacgaagaaaaacatgactattgatggaaaagagctgactattagccctgcctatctgctgtgggatctctcagccatcagtcagtcaaagcaggacgaggacatcagcgccagtaggttcgaagataacgaggaactgaggtacagtctgagaagtatcgagaggcacgccccctgggtccggaacatcttcattgtgacgaacgggcagatcccaagttggctcaatctggacaatcctcgcgttacaatcgtcacgcatcaggacgttttccgaaatctgtcacacctgcctactttcagtagccccgctattgaaagccatatacaccgaattgagggcttgagtcagaagtttatttacctcaatgatgacgtgatgtttggtaaagatgtgtggcccgatgacttttattcccactctaagggccagaaagtttatctgacttggcctgtaccgaactgcgccgagggctgcccaggttcatggataaaagacggctactgtgataaagcctgcaacaacagtgcttgtgactgggacgggggagactgcagcggtaactctggcggatcacgttacatcgcaggtggggggggcacgggctcaattggcgtcggccagccttggcaattcggaggcggaataaattccgtctcttattgcaatcaggggtgcgcaaacagctggctggctgacaaattttgtgatcaggcctgtaatgtattgtcctgcggctttgatgctggcgactgtggtcaagaccacttccatgaactgtacaaggtcatactcctacccaaccagacgcattatattatccccaagggggaatgtctgccctacttctcgttcgccgaagtagctaagaggggagttgaaggtgcctactcagataatccaattatccgccatgcctcgatcgcaaacaagtggaagactattcacttaatcatgcactccgggatgaatgccaccaccattcacttcaatctcacgttccaaaataccaacgacgaagaatttaaaatgcagatcaccgtcgaggtggacacgcgggaggggccgaagctcaacagtaccgcccagaaagggtacgagaatctggtgtctccgatcacgctcctgcccgaagcagaaattctcttcgaggacattccaaaagagaagcggtttcccaagttcaagaggcacgacgtgaacagcacaaggagagcccaggaggaagtgaagatccctttggtgaatatctccctactgccaaaggacgcccaactgtcactcaacacacttgatttacaactggagcatggggatatcaccttaaaggggtataaccttagcaagagtgcgttgctgcgctcattcctcatgaattctcagcacgcaaagattaagaatcaggcaattatcacggacgaaaccaacgattcactcgtggcacctcaagagaagcaggttcataaatccatactgccaaactccctgggagtctctgagcgtctgcagcgactgacctttccggcagtgtcagtcaaagtgaacggtcacgatcaagggcagaaccctcctctggatctcgagaccacagccaggtttcgagttgagacccacacccagaaaaccataggaggaaacgtgacaaaagagaagcctcccagtttgatcgtgccattagagagccagatgactaaagaaaagaaaattactgggaaagaaaaggaaaattcccgaatggaagaaaacgcagagaaccacataggggtgaccgaggtcctgcttggacggaaactgcagcactacactgatagttatttgggattcctgccctgggaaaagaaaaagtatttccaggatcttctggacgaagaagaatccctgaaaacccagctcgcatactttacagactcgaagaacacgggcagacagctcaaagacacttttgcagactctttgcggtatgtgaataagattctaaacagcaagttcggctttacatcccgcaaggttcctgcccacatgccccacatgatcgacagaatcgtgatgcaagaacttcaggacatgtttccagaggaatttgataaaacgtcctttcacaaggtccgccacagtgaggatatgcagtttgcctttagctatttctattatctgatgtccgctgtgcaacccctcaacattagccaggtttttgatgaagtggataccgaccagtccggggtgttatctgacagagagatccggacactggcaacaaggatccacgaactgccgctgtctctccaagatctgactggtctggagcatatgctgatcaactgttcaaagatgctaccggcagacattacgcaacttaataatataccacccactcaggagagctattacgatccaaaccttccgccagtgactaaatcgttggtaacgaactgcaagcctgttaccgacaagatacataaggcctacaaggataagaacaaatatcgatttgaaatcatgggcgaagaggagatagcctttaaaatgattcgaacaaatgttagccacgtggtgggacaacttgatgatattcgcaagaaccccagaaagtttgtttgcttgaacgataacatcgaccacaatcataaggacgcacaaacagtgaaagccgttctccgagacttctacgaaagcatgttccctatacctagccagtttgagctgccacgggagtaccggaaccgcttcctgcacatgcacgagctacaggagtggagagcgtaccgcgataagttaaagttttggactcactgcgtccttgccaccctgatcatgtttacgatcttttctttctttgccgagcaacttatcgctctgaaaaggaagatcttcccgaggcgacgcatccacaaggaggcgagtccgaacagaatcagagtc

SEQ ID NO: 215087 - DNA, 3768 bp, Artificial Sequence
  derived and/or modified sequence
atgttatttaagcttcttcaacgtcaaacttatacttgtcttagtcatagatatggattatatgtatgtttcttaggagttgttgttactattgtctctgcatttcaatttggagaagttgttcttgaatggtcaagagatcaatatcatgttctttttgactcttatagagataatattgcaggaaaaagttttcaaaatagattatgtcttcctatgccaattgatgttgtttatacttgggttaacggtacagatcttgagttattaaaggagttacaacaagttagagaacaaatggaagaagaacagaaagcaatgagagaaattttaggaaagaatactacagagccaacaaaaaaaagtgaaaaacaacttgaatgtttacttacacattgtataaaagttccaatgttagtattagatcctgctttaccagcaaatataactttaaaagatcttccatcattatatccatcatttcattcagcatcagatatctttaatgttgctaaaccaaaaaatccatcaacaaatgtatcagttgttgtcttcgatagtacaaaagatgttgaagatgcccatagtggattattaaagggtaattcaagacaaacagtttggcgtggttatttaactacagataaagaggttccagggcttgttttaatgcaagatttagcatttctctcaggttttccacctacttttaaagaaactaatcaacttaaaaccaaattaccagaaaatttaagtagtaaagttaaattattacaattatattcagaagctagtgtagccttgttaaagttaaataatccaaaagatttccaagaacttaataagcaaactaaaaaaaatatgactatcgatggaaaggaacttactatttctccagcttatttattatgggatctttctgctatatcacaaagtaaacaagatgaagatatttcagcttcaagatttgaagataatgaagaattaagatatagtttacgttctattgaaagacatgctccatgggtaagaaacattttcatagttacaaatggacaaattccaagttggttaaatttagataatccaagagttacaatcgtaactcaccaagatgtttttagaaatctttcacatttaccaacatttagttctccagctatagaatcacatattcacagaattgaaggattaagtcaaaaattcatttatcttaatgatgatgttatgtttggaaaagacgtttggccagatgatttttattctcattcaaagggtcaaaaggtttatcttacatggccagttccaaattgcgcagaaggatgtccaggtagttggattaaagatggatattgtgataaagcatgtaataattctgcatgtgactgggatggaggagattgttcaggaaattcaggaggttcaagatatattgctggaggaggaggtacgggatcaattggtgttggacaaccatggcaattcggtggaggaattaattcagttagttattgtaatcaaggatgtgcaaattcatggcttgcagataaattttgtgatcaagcatgtaatgttttatcatgtggatttgacgctggagattgtggtcaagatcattttcatgaattatataaggttattttgttaccaaatcaaacacattacattattccaaaaggagaatgcttaccatatttttcgtttgcagaagtagcaaaaagaggggttgaaggtgcttattcagataatccaataatacgtcatgcttcaattgcaaacaaatggaaaacaattcatttaattatgcattcaggtatgaatgcaacaacaattcatttcaatcttacttttcaaaatactaatgatgaagaattcaaaatgcaaattactgttgaagtagacacacgtgaaggtccaaaacttaatagtacagctcaaaaaggatatgaaaatttagtatctccaataacattacttccagaggctgaaatattatttgaagatattccaaaagaaaagagatttccaaagtttaaaagacatgatgttaactcaactagaagagcacaagaggaagttaagattccacttgttaatatatctttattaccaaaagatgcacaattaagtcttaatactttagatttgcaattagaacatggggatattactcttaaaggttataatttatctaaatcagctttacttcgatcttttcttatgaattcacaacacgctaaaattaaaaatcaagctattatcactgatgaaacaaacgattcattagttgcacctcaagaaaagcaagtacataaaagtatattaccaaactcccttggtgttagtgaaagattacaacgtttgacatttccagctgtaagtgttaaggttaatggacatgatcaaggtcaaaatccaccattagatttagaaactacagcaagatttagagttgaaactcacactcaaaaaactattggaggaaatgttactaaagaaaaaccaccaagtcttattgtacctttagaatctcaaatgacaaaggaaaaaaagataacaggaaaagaaaaggaaaatagtcgtatggaagaaaacgcagaaaatcatattggagtaacagaagtcttattaggacgtaaattacaacattatacagatagttatttaggttttttaccatgggaaaagaaaaaatattttcaagacttattggatgaagaagaatctttaaaaacccaattagcatattttacagattcaaaaaatactggaagacaattaaaagatacgtttgcagattcattgagatatgtaaataaaattttaaattctaaattcgggttcacaagtagaaaagtacctgcacatatgccacacatgattgacagaatagtaatgcaagaacttcaagatatgtttccagaagaatttgataaaacatctttccataaggtaagacactctgaagatatgcaatttgctttttcttatttttattatttaatgtcagctgttcaacctctcaatattagtcaggtatttgatgaagttgatacagatcaaagcggagttctttcagatagagaaattagaacattagctactagaattcatgaattaccattgtcactacaagatttgacaggattagaacatatgttaattaattgctcaaagatgttaccagcagatataacacaattaaataatattccaccaacacaagagagttattacgatccaaacttaccaccagttacaaaatcattagtaactaattgtaagccagtcacagataagatccataaagcatacaaagataagaataaatatagatttgaaattatgggagaagaagaaatagcttttaagatgattagaactaacgtctctcatgttgttggacaattggatgacattagaaaaaatccaagaaaattcgtatgtttaaacgataatattgatcataatcataaagatgctcaaacagttaaggctgttttacgtgatttttacgagtcaatgttcccaataccatctcaatttgaattaccaagagaatacagaaatagatttttacatatgcatgaattacaagaatggagggcatatagagataaacttaaattttggactcactgcgtacttgcaactttaatcatgtttactatttttagtttctttgctgaacaattaattgcattgaaaagaaaaattttccctagaagaagaattcataaagaagcaagtccaaatagaattcgagtt

SEQ ID NO: 215088 - DNA, 3768 bp, Artificial Sequence
  derived and/or modified sequence
atgctgttcaaattactgcagagacagacatatacctgtctttctcaccggtacggcctgtacgtgtgcttccttggagttgtggtgactattgtcagcgcgtttcagttcggggaggtggtgctcgaatggtcccgcgatcagtatcatgtgctatttgacagttaccgagacaatattgcaggtaaaagcttccagaacagactttgtctgcctatgcccatagacgtggtgtacacctgggtgaatgggacggatttagagctgctgaaagaactgcaacaggtccgcgagcagatggaggaggagcaaaaggcaatgagggaaatactcggaaagaatacaacagaaccaacgaagaaaagtgagaagcagcttgaatgcctcctgacccattgcatcaaagtgcccatgctggtgctggatccagcattgcccgccaacatcactctaaaagacctgccttccctctatccctctttccactctgccagtgatatttttaacgtcgccaaacccaaaaacccgtcaaccaacgttagcgtagtggtctttgattcaaccaaggatgtagaagacgcgcatagtggtctcctgaaggggaactctagacaaaccgtttggaggggataccttactacagacaaagaggtgcctggactagttctcatgcaggatctggccttcctgagcggcttcccgcccaccttcaaagaaactaaccaacttaagaccaaactgccagaaaatctgagttctaaggttaagcttctccagctgtattcggaggccagcgtggcattactcaagctgaataatcccaaggactttcaagaattgaataaacagacaaaaaagaatatgaccatcgacggaaaagaactcactatatcaccagcctacctgctgtgggatctctcagcgatctcccagtctaaacaggatgaagacatctcagctagcaggtttgaggataatgaggagctaaggtattcactgcggagcatagaacgtcatgccccgtgggttagaaatattttcattgtaactaacggacagatcccgagttggcttaatctcgataacccgcgggtcacgatagtgacgcatcaggacgtctttagaaatctgtcccacctaccaacattttcatccccggcaatagaatctcacattcaccggatcgagggactgtcccagaagtttatctaccttaacgacgatgtgatgttcggcaaggatgtatggccagacgatttttactcccactctaaggggcagaaggtctacctgacttggccagtgcctaactgtgcagaaggttgccctggctcatggattaaagacggctactgcgataaggcatgcaacaactcagcttgtgattgggacggcggagattgtagcggaaactctggaggcagtcgctatatagccggcgggggcggcactgggagtataggcgtcggacagccatggcaatttggcggggggatcaacagcgtgtcctactgcaatcaaggatgcgctaactcctggttggcggataaattttgcgaccaggcatgtaatgtcctgtcttgtggattcgacgcaggagattgtgggcaggatcatttccatgaactctacaaagtaatccttctaccaaatcagacacactacatcatccctaagggagaatgcctgccatacttctctttcgccgaggtggccaagaggggagttgagggtgcctattccgacaatccaatcattcggcacgccagcattgctaataagtggaagacaattcatctgatcatgcactcaggcatgaatgcaacgacaattcatttcaatctgacgttccagaacacaaatgacgaggaatttaaaatgcagatcacagtcgaggttgacacgcgcgaagggcctaagctgaatagcacagcgcagaagggatacgaaaatctggttagtccaatcacactgcttcccgaggccgaaattctgttcgaagatatcccaaaggagaagcgttttcccaagtttaagcgacacgacgttaattcgacccgacgcgcccaggaagaggtgaagatccctctggttaatatttccctgctgccaaaagacgcgcagctgtcactcaatacactggatttacaactcgagcatggggacattaccttgaagggttacaatctgagcaaatcggcgttactgcgttcttttctcatgaattcccagcatgcgaagataaaaaatcaggctatcattacagacgaaaccaacgactcgctggttgctccccaggaaaagcaagtgcataagtccatcctgcccaatagtctgggtgtcagcgagcggctccagaggctcacgttcccagcagtgtcggttaaggtcaatggacatgatcagggccaaaaccctcctctagatctcgagaccacggcaagatttagagtggagacacatacccagaaaacaataggcgggaacgtcacaaaagagaaacccccctccctgattgtgcccttggaatcacagatgaccaaagaaaagaaaatcactggcaaggagaaggagaattccaggatggaagaaaacgccgagaatcatattggggtgactgaggttctcctgggccgtaagctgcagcactatacagattcctacctgggcttcctcccatgggagaaaaagaagtactttcaggacctgctcgacgaggaggaatctctgaagacacaactggcatatttcaccgattctaaaaacactgggagacagctgaaggacacctttgccgatagcttgcggtacgtgaataaaatcttgaatagtaagtttggtttcacgtctcgtaaagtccccgcccatatgcctcacatgattgatcgtatcgtgatgcaggagttacaagacatgtttccagaagagtttgacaagaccagcttccacaaagtgcgccactccgaggatatgcagtttgcattcagttatttctattacctcatgtctgccgtgcagcccctcaacatctcccaggtcttcgacgaagttgacacagaccagtccggagttctgtccgaccgggaaatcaggaccctggccacccgaatccacgagctgccattgtcactgcaggacctcacgggacttgagcacatgctgattaactgctcaaagatgctacctgctgatattacgcaactgaataatattccacctacccaggagagctattacgatccaaatctcccaccagtgacaaaatcccttgttaccaactgcaaaccggtgactgataaaattcataaggcctataaggacaaaaacaagtaccgcttcgagatcatgggagaggaagaaatcgcttttaagatgatcagaacaaacgtgtcccacgtagttggacagctggatgatatacggaaaaatccccggaagtttgtatgcttgaacgacaacatcgatcataatcacaaagacgctcagacagttaaagctgtgctaagagacttttacgagtcgatgtttcctatcccaagccaattcgaactgccacgggaataccgaaacagattcctgcatatgcatgaattgcaagaatggagagcatacagggataagctgaagttctggactcactgcgtcctggccacccttatcatgttcaccatcttttctttctttgccgagcagctgattgccctgaaaaggaagatattcccacggcggcgcatccataaggaggcctcgcctaatagaattagggtc

SEQ ID NO: 215089 - DNA, 3768 bp, Artificial Sequence
  derived and/or modified sequence
atgcttttcaagctcttgcagcggcagacctatacctgcctcagccacagatacggtctgtacgtgtgctttttgggcgtagtggtaaccattgtttctgctttccagtttggcgaggtggtgttggagtggtcaagggaccagtatcacgtgctgttcgatagctatagggacaacatcgcaggaaagagctttcagaataggttgtgtctgcctatgcccattgacgttgtgtatacctgggtgaacgggacagatttggaactcctgaaagagcttcagcaggtacgcgagcagatggaagaggagcagaaagctatgagggaaatactgggaaagaatacgacagagcccacgaagaaatcagagaagcagctcgaatgcctgcttacccactgtatcaaagtccccatgctggtgctggaccccgctcttccagcaaacatcacactgaaggatctgccgtctctgtacccctcatttcacagtgcctcagatatctttaacgtggcaaagcccaagaaccccagcactaacgtgtcagtcgtggtgttcgattctaccaaggacgttgaggatgcccattctggactgctgaaaggcaacagcaggcagacggtgtggaggggctatctgacaacagataaagaggtccccggactcgtgcttatgcaggacctcgcatttctcagtggcttccctccaaccttcaaagagacaaaccagctcaagaccaaactgcctgagaaccttagcagtaaagtgaaactcctgcaactttattctgaggcctccgtggcactgcttaagctgaacaatcctaaggacttccaggagctgaataagcaaacaaagaaaaatatgaccattgacgggaaggagcttactatctccccagcttatctgctttgggatttgagcgctattagccaatctaaacaagatgaggatatttcagcctctaggtttgaggataatgaggagctcagatattccctcaggagcatcgaaaggcacgcaccctgggtacgaaacattttcatcgttaccaatggccaaatcccctcctggctcaacctggacaatcctagggtaacgatagtcactcatcaggacgtgtttagaaaccttagccacctgcccacctttagctccccagcaatcgagagtcacatacaccgaatagagggcctctctcagaaatttatttatctgaatgatgacgtaatgttcggtaaggacgtctggccagacgatttttattcacattctaagggacagaaggtgtatcttacctggcccgttccaaattgcgccgagggttgtcccggatcctggatcaaggacgggtactgtgataaggcgtgcaacaactccgcctgtgactgggatgggggagattgcagcggtaacagtgggggttctagatacattgcaggagggggtgggaccggatccattggagtgggtcagccttggcagttcggcggtggcattaatagtgtgagttactgtaatcagggttgtgcaaacagctggctggctgacaagttttgtgatcaggcctgtaacgtgctttcctgcggatttgacgccggagactgcggccaagatcacttccacgagctgtataaagttattctgctgcctaaccagacccattacatcattcccaagggggagtgtctgccatacttcagttttgctgaggtggccaaaagaggtgttgaaggggcctactcagataaccccataatccggcatgcttctattgcaaataaatggaagactatccatcttataatgcattctggtatgaacgccactactattcatttcaacttgacgtttcagaataccaatgacgaggaatttaaaatgcagatcacagtggaggtagacactagggaggggcctaagttgaacagcacagcacagaagggctacgagaacctggtttctccaataacgttgctgcctgaggccgaaatcctgtttgaggatatcccaaaggagaagcgatttcctaagttcaaacgacacgacgtcaatagcacacggagagcgcaagaagaagtgaaaattccactggtgaacatttcccttcttcccaaggacgcccagttgagccttaacacacttgacttgcagctggagcatggcgatattactcttaaaggctataatttgagcaagagcgccctcttgcgatcttttctgatgaatagccagcacgccaagatcaagaaccaggccattatcaccgacgaaaccaacgactcacttgttgcaccccaggaaaaacaggtacacaaatccatcttgccaaactccctgggcgtcagcgagcgcctgcagagactcacttttccggcggtatctgttaaggtcaatggccacgaccagggacagaatccaccactggatttggagactacagcccggttccgcgtggaaacacatactcagaaaaccatcgggggaaatgtgactaaggagaaacccccatcacttatcgttccacttgagtcccagatgactaaggaaaaaaaaatcacggggaaggagaaagagaattcaaggatggaagaaaatgccgaaaatcatatcggggtgactgaagtgcttctcggacgcaagctgcagcactataccgactcctacctgggctttctgccctgggaaaagaagaaatacttccaggacttgctggatgaagaggagagtctgaagacccagcttgcctactttaccgacagcaagaataccggaaggcaattgaaggataccttcgccgatagcctgcggtacgtcaataagattctgaattcaaaattcggatttacctcccgcaaagtgcctgcacacatgcctcatatgatcgatagaattgtgatgcaggagctgcaggatatgttccctgaagaatttgacaagacaagcttccataaagtgaggcattcagaagacatgcagttcgcgttctcttatttctactatcttatgtctgctgtgcagccgttgaatatatcccaggtgtttgacgaagtggacacagatcagtccggcgtccttagcgacagggagattcgcacgctcgctactcgaattcacgagctccccctttctctgcaggaccttactggactggagcacatgttgattaattgctccaaaatgctgcccgcagacatcacacagcttaacaacatcccccccacacaagagagttactacgatcctaatctgcccccggtaacgaaatcactggtgacaaactgcaaacctgtcaccgataagattcataaggcttataaggataagaataagtacagattcgaaatcatgggagaggaagagatagcctttaagatgatacggacaaacgtttctcacgtggtgggacaactggatgatattcgaaaaaacccccgcaaatttgtgtgcttgaatgacaacatcgaccataaccacaaggatgcacagacagttaaggctgtactccgcgacttttacgagtccatgttccctatcccttcacagttcgaacttcccagagagtatagaaatcgctttctgcatatgcatgaactccaggaatggcgggcatatagggacaaactgaagttctggacgcattgtgtcttggcaaccctgatcatgtttactattttctcattctttgccgagcaactgatcgcccttaagcgcaagattttcccaaggcggaggatacacaaggaagctagtcctaacagaatcagggtg

SEQ ID NO: 215090 - DNA, 3768 bp, Artificial Sequence
  derived and/or modified sequence
atgctgttcaagttattgcagagacaaacttatacctgtcttagccatagatatggcttatacgtgtgctttttgggggtcgttgtgacaattgtgtcagcttttcagttcggcgaagttgtgttagaatggtcccgagaccaataccacgtgctgttcgattcgtaccgtgacaatatcgccggcaagagcttccaaaataggctgtgcttgccgatgcccattgatgtggtttacacctgggtgaatggaacagacctcgaactgctcaaagaactgcagcaggttagagagcagatggaggaggaacagaaggctatgagggagatccttggtaaaaacacgactgagccgacgaaaaagtcggaaaagcagctggaatgtctcctgacacactgcatcaaagttcctatgctggtgctcgaccccgccctgcctgctaacataactctcaaggatctgcctagcctatacccaagctttcacagtgccagtgacatattcaatgttgccaagcccaagaaccctagtaccaatgtgagcgtggtcgtgtttgatagtactaaagatgtagaagatgctcactctggtttgctgaagggcaactcaagacagacagtgtggaggggctatctgaccactgacaaggaggtcccgggattggtactgatgcaggacttggcctttttgagtggatttcctcccaccttcaaggagacgaatcagttgaagacaaagttaccggaaaatctttctagcaaggtaaaattgctgcagctttattctgaggcctctgtggcactccttaagctaaacaacccaaaagactttcaggagctcaataagcagacgaagaaaaacatgactattgatggcaaggagctgaccatcagtccagcctatctcctttgggacttgagtgccataagccagtccaaacaggatgaggatatcagcgcctcccgttttgaggataatgaagaacttaggtattctctccggtcgattgagagacatgctccttgggtcagaaacatattcattgtaaccaatgggcagataccaagctggcttaacctagataatcccagggtaacgatcgtgacacaccaggacgtatttaggaatctgtcccacctgcccactttttctagcccagccattgaaagtcacatccaccggattgaggggctgtctcagaagtttatatatttaaatgatgatgttatgttcggcaaagatgtttggccagacgacttctattcccactcaaaaggccaaaaagtgtatctcacttggcctgtccctaattgcgccgaagggtgccccggtagttggattaaggatgggtactgtgacaaggcttgcaacaattcagcgtgtgactgggacggtggagattgctctggcaattccgggggctctcggtatatcgctggcggaggtggaaccggctccataggagtgggacaaccatggcagtttggcggaggtattaattcagtatcctattgtaatcagggctgcgccaatagttggttggctgacaagttctgtgaccaggcttgcaatgtgctgagctgtggatttgatgctggggattgcggtcaagatcactttcacgagctttacaaagtgatcctcctgccaaaccaaactcactatattatccctaagggcgaatgtttgccatacttcagctttgcagaagtcgccaaacgaggggtcgagggagcctactcggataacccaataatccggcacgcatctatagccaataagtggaagaccatacatctgatcatgcactcaggaatgaacgcaaccaccatccactttaacctgacttttcaaaatactaatgatgaggaattcaagatgcagattacagtcgaagttgacacaagggagggccctaagctgaattcgaccgctcaaaagggctacgagaacctggtttctccaattaccctactgccggaggccgaaattctctttgaggacatccccaaggaaaagcggtttcctaagttcaagagacacgatgtaaattcaactagacgggcacaggaggaagtcaagatccctctggtcaacatttcattattgcccaaggatgcacagctgtccttgaacaccctggatctccagctggaacacggagacatcactctgaaaggctacaacctgtctaaaagcgctctactgcgttccttcctgatgaattctcaacacgccaagatcaagaaccaagccataatcacggatgagacgaacgacagtctggtggccccccaagaaaaacaggttcataagtccatactgcctaacagcctgggcgtatctgaacgcttgcagcgcctgacgtttcctgccgtctcggtgaaagtgaatggtcatgaccagggccagaaccctcctttagatttggagacaactgctcggtttagggtggagacgcatacacagaagaccattggaggaaacgtgacaaaagaaaaacccccctccctgatagtgcctttggagtcccaaatgacaaaagaaaaaaagattaccgggaaagaaaaggagaactcaaggatggaggagaacgcagaaaatcatatcggagtgacggaggtgcttctgggcaggaagctgcagcactacacagactcatatctgggctttctgccctgggagaaaaagaagtactttcaggatctcctggacgaggaagagagcctgaaaacgcagctagcgtacttcacagatagcaagaacaccggaaggcagttgaaggacacctttgccgattcgctcagatatgtgaataagatccttaacagcaagttcggattcacctcccgaaaagtaccagcacacatgccccacatgattgatcggatcgtgatgcaggagctccaggacatgtttcctgaggagtttgacaagacatcatttcataaggtgcgccatagcgaggacatgcagttcgctttctcctacttctactatctaatgagcgccgtccagcctttgaacattagccaagtctttgatgaggtcgacacggatcagtctggcgtgctcagcgacagagagatcaggacactcgccacccgaatccatgagctgcccctcagtttgcaagatctgaccgggctggaacatatgctcatcaactgtagcaaaatgcttcccgcagatatcacacaactgaataacatcccaccaacacaggaatcatattatgaccctaacctgcccccggtgacaaaatcactggtgaccaactgtaagccagtgacggataaaatacacaaggcgtacaaagataagaataaatacagatttgagatcatgggcgaggaagaaatcgcgtttaagatgatccgcaccaacgtgtcacacgtagtcgggcagctagacgatatccgcaagaacccccgtaagttcgtctgtctgaacgacaatatcgaccacaatcataaggacgctcagacagtgaaggccgttctgagggacttttacgagtcgatgtttcctatcccctcacaatttgaacttcctcgcgaatacaggaaccgttttctgcacatgcatgagttgcaagaatggcgggcctatcgcgacaagctaaagttttggactcactgtgtgttggctacactgattatgttcaccatttttagcttctttgccgaacagcttatcgccctgaagcggaagatcttcccgaggcggcggattcacaaagaagcctctcctaataggatacgtgtg

SEQ ID NO: 215091 - DNA, 3768 bp, Artificial Sequence
  derived and/or modified sequence
atgctctttaagcttctccagcggcaaacctacacatgtctttcccaccggtatgggctttacgtttgctttctgggggtggtggtgacaatcgtgagcgcatttcagtttggcgaagtggttctagagtggtctagagaccagtatcacgtcctgtttgattcatacagggataacattgcagggaagtcctttcagaacagactgtgtctgccaatgccaatcgatgtagtttatacatgggtgaacggcactgacctggaactgctaaaagaacttcagcaagtcagagagcagatggaggaggagcagaaagctatgcgtgagattctcggaaagaataccactgaaccgacaaagaaaagcgaaaagcagcttgagtgtctcctgacgcattgcattaaggttcctatgttggtcctcgaccccgcgcttcctgcaaacatcactcttaaggatttgccttcactgtacccctcttttcactcggccagtgacattttcaacgtggccaaacctaagaatcccagcaccaatgtctctgttgttgtgtttgattccacgaaagacgtggaagacgcgcattcaggtctgctgaagggtaattcgcgacagactgtgtggcggggataccttactactgacaaggaggtgcctggcttggtactcatgcaagacctcgcttttctgtctgggttcccacccactttcaaagagacaaaccaactgaagactaagttgccggaaaatttgagtagcaaagttaagctgttacagctatactctgaagcttctgtagctctgctcaaattaaacaacccaaaggacttccaggagctgaataaacaaactaagaagaacatgactattgacggaaaagaactgacgatatcacccgcttacttgctgtgggacctgtccgcaatttctcaatcgaagcaggatgaggacatcagcgcatctagatttgaagataacgaggagctccgatacagcctgaggtccattgagagacacgcaccctgggtgcggaacattttcattgttaccaatggtcagatccccagctggttgaatctcgacaatccaagggtgaccattgtgacccaccaagatgtgttccgcaacctaagtcaccttccgaccttctcttcccctgcaatcgagtcacacatacacaggatcgaagggctgtcccagaagtttatctatctaaacgacgatgtgatgtttggcaaagatgtttggcctgacgacttctattcccatagcaaaggccagaaggtgtatttaacatggcccgtgccaaattgcgcggagggatgccccggctcttggattaaagacggttactgtgacaaggcttgcaataactccgcatgtgattgggatggtggcgattgtagtgggaattctggcggcagcaggtatattgctgggggcggaggaactggcagcatcggagtgggacaaccttggcagttcggcggaggcattaactccgtgtcctactgcaatcaaggttgcgcgaattcgtggctagcagacaaattctgcgatcaggcatgcaatgtgttaagctgtggcttcgacgcgggggactgcggtcaggaccactttcacgagctctacaaggtcattctgctgccaaaccagacccattacatcatccccaaaggggaatgtctgccttatttcagctttgcagaagtggctaagaggggggttgagggcgcgtattctgacaaccctattatacgtcatgcgtccattgccaacaaatggaaaactattcatctgatcatgcactccggaatgaacgccaccactattcatttcaatctgacattccagaataccaatgacgaggaatttaagatgcaaataaccgtcgaagtggatacacgagagggccctaagcttaattcaactgctcagaaagggtatgaaaacctggtgtccccaatcacactgctccccgaagctgagatactgttcgaagacatcccaaaggaaaagagatttccgaagtttaaacgacacgatgtcaattcaacacgcagggctcaggaggaggtgaagattccccttgtgaacataagcttgctaccgaaagatgcacaactctctctcaatactctagatctacagttggaacatggggacattacgctcaaaggctacaaccttagcaaaagtgctttgcttaggtccttcctgatgaacagccaacatgcgaagattaagaatcaggccatcatcactgatgagactaacgatagcctagtggcacctcaagaaaagcaggtgcataagtcaatcctgcctaactcactcggggtctctgagaggttgcagcgcctgaccttcccagctgtgagcgtcaaggtgaatggtcatgatcagggccagaacccaccactggatctcgagaccactgctaggttcagagtagaaacccacacacagaagacgatcggggggaatgtgactaaagaaaaaccaccaagtcttattgtgcctcttgaatctcagatgacgaaagagaagaagatcaccggcaaggagaaggagaactccaggatggaggagaacgccgaaaatcatattggggttaccgaagtgcttcttgggcggaagctgcagcattacacagactcgtatctgggcttcctgccatgggaaaagaagaaatactttcaggacttgttggacgaggaggaatccctgaagacgcagctggcctacttcacggactctaagaacaccggtaggcagctgaaagacactttcgccgactcattacgctacgttaacaagattctgaattctaagttcggctttacgagcagaaaggtccctgctcacatgccacatatgattgataggatcgttatgcaggagctgcaggatatgttcccagaggagtttgataaaacatcattccacaaagtccgccactctgaggacatgcaattcgccttcagctatttctactacttaatgagcgccgttcaacccctaaacatttcccaggtgtttgacgaagtcgatacggaccaatctggggtactgagtgacagagaaatccgcactctggccaccagaattcatgagctaccgctgtctctgcaggaccttaccggactcgaacacatgctcatcaactgctccaagatgctgcctgctgacattacacaactgaacaatataccccctactcaggagtcatactacgatccgaacctgccacctgtgacaaagagcctggtgaccaattgcaagcccgttacagataagatacacaaagcgtacaaggacaaaaataagtatcgttttgaaatcatgggcgaagaggagatagctttcaagatgataagaaccaatgtttcacatgtggtggggcagctggacgatatccggaaaaatcccagaaagtttgtctgtcttaacgacaacatcgatcacaatcacaaagacgcgcagaccgttaaagctgtgctaagggatttttacgagtctatgtttcctatcccgtcacagtttgagcttccgcgtgaataccggaataggtttcttcacatgcatgagctgcaagagtggcgcgcataccgcgataagctaaagttttggacgcattgtgtcctagcgacccttataatgttcaccatcttttcattctttgccgagcagctgatcgcgttgaagcgaaaaatctttccacggagacgaatccacaaggaagcgagtccaaatcgcattcgggtg

SEQ ID NO: 215092 - DNA, 3768 bp, Artificial Sequence
  derived and/or modified sequence
atgttgtttaagttgcttcagaggcagacttatacctgtctgtctcatagatacggcctgtatgtgtgcttcttgggtgttgtggtgactatcgtgagcgctttccagtttggagaggttgtcctggagtggagccgcgaccagtatcatgtgttgttcgacagctatcgcgacaacatcgcaggaaaaagcttccagaacagattgtgcttgccaatgcctatcgatgtggtatatacttgggtcaacggaaccgatctcgagctccttaaggaactccagcaggtgcgtgaacagatggaagaagaacaaaaggctatgcgcgagattttgggcaagaacactacagagcctaccaagaagagtgaaaagcaacttgaatgtcttttgacacactgtatcaaagtgcctatgcttgtgttggaccccgctctccccgccaacatcaccctgaaagacctcccatctctgtaccctagctttcatagtgcctcagacatcttcaacgtggcaaaacccaagaaccccagcacaaacgtctccgttgttgtcttcgactccactaaagatgtagaggacgcacatagtggattgttgaagggtaactccaggcaaaccgtctggaggggatacctcactacagacaaggaagttccaggactggtgcttatgcaagacctggcctttttgtccggtttcccacccaccttcaaagaaactaaccagttgaagactaagctgcccgagaatctcagttccaaggtaaagctgctccagttgtactctgaggcatcagtggctctcctgaagttgaacaatccaaaggactttcaggagcttaacaaacagactaagaaaaatatgactatagacggcaaagagcttactatctccccagcctatctcctctgggatctttcagccatttctcaatctaagcaagatgaggacataagcgctagtaggttcgaggacaatgaagaactgcgctacagcctcaggtcaatcgaacgccacgctccttgggtgagaaacatctttatcgtgaccaacggacagatcccttcctggcttaacctggacaaccccagggtgacaattgtcactcaccaagatgtgttcaggaatttgtctcatctgccaacatttagcagtccagccattgaatcccatattcatcgcatcgaaggactctcccagaagttcatctacctcaatgacgacgtaatgttcggcaaggacgtgtggcctgatgacttctactctcactccaagggtcagaaagtgtatctcacatggcctgttccaaattgcgccgaaggatgccccggatcatggattaaggacggttactgtgataaagcttgcaacaacagtgcctgtgattgggatggtggcgactgctccggtaacagcggaggatccaggtatatcgccggaggtggcggcacaggctccattggcgtgggccagccttggcaattcggaggtggcatcaactcagtgtcttactgcaaccagggatgcgctaatagctggttggcagataaattctgtgaccaggcctgcaatgtattgtcatgcggatttgatgcaggagattgtggccaggaccattttcacgagctgtacaaagtgatattgctgcccaaccagacccactacatcattccaaagggagaatgcttgccctacttctcctttgcagaggtggcaaagcgtggagtcgaaggtgcttacagtgacaacccaattattagacacgcttccattgccaataagtggaaaaccattcatctcataatgcacagcggaatgaatgccaccaccattcacttcaaccttacatttcaaaatactaacgacgaggaattcaagatgcaaatcaccgtggaagttgatacaagagagggccctaaacttaattccacagctcagaaaggctacgaaaatctcgtctccccaatcaccctgctccctgaggctgaaattctttttgaggacattcctaaggaaaaaagatttcctaagttcaagagacatgatgttaattctacccgtagggctcaagaagaagtcaaaatacccctcgtgaatattagtcttctgccaaaggatgctcagctctctctgaacacactggacctccagctggagcatggcgacatcaccctcaagggctacaatctttcaaagtccgcactgcttagatcctttcttatgaactcccagcacgctaaaatcaaaaaccaagctatcataactgatgaaactaacgactcactcgtggctcctcaagagaaacaagtgcacaagagtatcttgcctaattctttgggtgtgtctgagaggctgcagagactgacctttcctgccgtttctgttaaggttaacggacacgatcaaggacagaacccacctctcgatctggagaccacagcaaggttcagagttgaaacccatactcagaagacaattggtggcaacgtgacaaaggagaaacccccctcactcattgtgccactggagtcacagatgaccaaggagaagaagatcaccggaaaagagaaggagaatagcaggatggaggagaacgccgagaaccatatcggcgtaactgaggtgctgcttggtcgcaaattgcagcattacactgactcctacctcggattcctcccatgggagaagaaaaaatattttcaggacttgctcgatgaggaggaatcactcaagactcaactggcttacttcaccgactctaaaaacactggtaggcagttgaaggatacttttgctgatagcctccgttacgtgaacaagatcctcaattccaagtttggttttactagcaggaaggtgcccgcacatatgccacacatgatcgatcgcatcgtcatgcaggagctccaggatatgttccccgaagagttcgataagactagcttccataaggtccgtcacagcgaggacatgcagttcgcattcagctatttctattatctgatgagcgccgttcagccattgaatatttcacaggtattcgatgaagtcgatacagaccaatctggagttttgtctgaccgcgagattagaacattggctacacgtattcacgaattgcctctcagccttcaggacttgaccggtctcgagcacatgcttatcaattgtagtaaaatgttgcccgctgacatcactcagcttaacaacatccccccaacacaggagtcttactacgaccccaacctcccaccagttaccaaaagtctggtgaccaactgcaaacccgtgaccgacaaaatccacaaggcctataaagacaagaataagtataggttcgagattatgggcgaggaggaaatcgcttttaagatgattcgtaccaacgtaagccacgttgtgggccaactggacgacattcgtaaaaaccctaggaagttcgtttgcttgaacgacaatatcgatcacaaccataaggacgcacagaccgtgaaagccgtgcttcgcgacttttatgagtctatgttccctatcccttcacagttcgaactgcctcgtgagtataggaaccgtttcctgcacatgcatgaactccaagagtggagagcctacagggacaagctgaagttctggacccattgtgtccttgccactctcatcatgttcactattttttcattttttgcagagcagcttattgcactgaagcgcaagatcttcccccgtcgtcgcattcacaaggaggcctctcccaatcgtattcgcgtg

SEQ ID NO: 215093 - DNA, 3768 bp, Artificial Sequence
  derived and/or modified sequence
atgctctttaaattactacagaggcagacatatacatgtctttctcatcgatatggactgtatgtctgttttctcggagtagttgtgacgattgttagtgctttccagtttggggaagtggtcttagagtggagtcgggatcagtaccatgtcctatttgattcttacagagataacatcgctgggaaaagtttccagaatagactgtgtcttccaatgcctatcgatgtggtgtatacttgggttaatgggacagatctggaacttctcaaagaactccagcaggttcgggaacagatggaagaagaacagaaggcaatgcgggagatacttggaaaaaatacaactgaacctactaagaaatctgaaaaacagctcgaatgtctcctcacacactgtattaaagtgcccatgcttgtactagacccagctttacccgctaatatcacactgaaggatctcccctctctttatcctagttttcattccgcctctgatatcttcaacgtggctaaacccaaaaatccttccacaaatgtgtccgtggttgtttttgattcaacaaaagatgtcgaagatgctcatagtggactcctaaaagggaactcacgccagacagtctggcgtgggtatttgactactgataaagaggtgcccggactcgtacttatgcaggatttagcttttctgtcaggatttccccctacttttaaggagacaaatcagttaaaaacaaaacttcccgaaaatctgtcatcgaaagtcaaattactacagctctatagtgaagcctcagtagccctgctgaagctgaataaccccaaagatttccaggaacttaataaacagactaagaaaaatatgactatagatggaaaggaactcacaatatcaccagcttaccttttatgggatctcagtgccatatcccagagtaaacaggatgaagatatctctgcctcacgattcgaagataacgaggaactccggtattccctacgatccatcgaacggcatgcaccctgggtgcggaacatattcattgtgacaaacggacagataccttcatggctaaacttggataaccctcgcgtgactatagtcactcaccaggatgtattcagaaacttgtcacatctccccactttctcatctccagcaattgaaagtcacatccacaggatcgaagggctcagtcagaagtttatctatcttaatgacgatgtgatgtttgggaaggacgtgtggcctgatgatttttactctcacagtaaagggcagaaagtgtatctaacatggcccgtccccaattgcgctgaaggatgtcctggatcatggataaaggatgggtattgtgataaagcatgtaataacagtgcgtgtgattgggacgggggggattgtagtggaaattctgggggaagtaggtatatagcaggggggggaggaacaggatcaataggggtggggcagccttggcagtttggaggggggattaattccgtgtcttactgtaatcaggggtgcgcaaattcttggctagcggataaattctgcgatcaggcatgcaacgttttatcttgtgggttcgacgctggagattgtgggcaggatcactttcatgagctatacaaagtgattctcctccctaaccagacacactacataattcctaagggggaatgtctgccctatttctcattcgcagaagtggctaaaagaggggtggaaggggcctattccgataaccccatcatccgacatgcatccattgcaaataagtggaaaactatccaccttatcatgcactccggaatgaatgctacaactatacatttcaacctaacattccagaacacaaacgatgaagaattcaagatgcagataactgtagaagttgatacacgagaaggacccaaactcaactccacggcccagaaggggtatgaaaacctggtgtcgccaatcactctccttcctgaagccgagatccttttcgaagatatccccaaagaaaagagatttcctaaatttaaaagacacgatgtcaattctacaaggcgcgcacaggaagaagtgaagattccactagtgaacatctccctgctcccaaaagacgcacagttatcactaaacactctggatctgcagttagagcacggagatataacgctgaaaggatacaatctatctaagtccgccctactccgctcatttttaatgaattcccagcatgctaaaatcaaaaaccaggctattataacagacgaaacaaatgattctctagtggcacctcaggaaaagcaggtgcataaatctatcctgcctaattcccttggagttagtgagcggcttcagaggctgacatttcctgcagtcagtgtgaaagtaaatgggcatgaccaggggcagaacccacctctcgacttagaaacaacagcacggttccgagtagagactcatactcagaaaactattggagggaacgtcacaaaagaaaaaccaccttctctaatcgtgccactcgaatctcagatgactaaagaaaaaaagataacaggaaaagagaaggagaactctcgaatggaggaaaacgccgaaaaccacataggggtgactgaagtacttctcgggcgtaaattgcagcactacacagattcctatcttggatttcttccctgggaaaaaaaaaagtattttcaggacctcctcgatgaagaggaatccttgaaaacacagttggcctatttcacagatagtaaaaatactggacggcagctcaaagatacttttgccgattcactaagatatgtaaacaagatcctgaactcaaaatttggatttacatctaggaaagtgcctgctcacatgcctcatatgatagatcgaatcgtgatgcaggagctgcaggatatgttccccgaagaattcgacaagacatctttccataaagtcaggcactccgaagatatgcagttcgctttctcttatttttattacctcatgtcagccgtgcagccccttaacatctcacaagtgtttgatgaagtcgatactgatcagagtggagtgttgtcggatagggagatacgaactctcgccacacgaattcatgaactgccactgagtctgcaggatctgacggggcttgaacatatgctcatcaattgtagtaaaatgctgcccgctgatatcacacaacttaacaacatcccacccactcaggaaagttattatgatccaaatctacctccggtgacaaaatcactggttacaaattgtaaaccagtaactgataaaatacataaagcctataaagacaaaaataagtatagattcgagattatgggagaagaagagattgcatttaaaatgatcagaacaaacgtttcacacgttgtggggcagctcgatgatatccgcaagaaccctaggaaattcgtgtgtctgaatgataacatagatcataaccataaggatgcgcagacagtcaaagcagtgctgagagatttctacgaatctatgtttcccatcccttcacagttcgaactaccacgggaatatcggaatcgcttcctccatatgcatgaactgcaagaatggcgcgcatatagggacaagctgaagttctggactcactgtgtcttagctacattgattatgtttacaatcttttcattctttgcagagcagctcatagcacttaaacggaaaatatttccaaggcgaaggatccataaagaagcctcaccaaatcggattcgggtt

SEQ ID NO: 215094 - DNA, 3768 bp, Artificial Sequence
  derived and/or modified sequence
atgttgttcaagctgctgcagcgccagacatacacctgcttgtcacaccgctatggcctgtatgtctgcttcctcggcgtcgtagtcacaatagtttcggcgttccagtttggcgaggtggtcctcgaatggagccgggatcagtaccatgtcctttttgactcttatcgcgacaatatcgcggggaagtctttccaaaatagactgtgtttgccgatgccaatcgacgtcgtttacacttgggtgaacgggaccgacctggagttgcttaaggagctacagcaggtgcgggagcagatggaagaggaacagaaagcaatgcgggagattttagggaagaatacgaccgaacctactaaaaagtcggagaagcagctcgaatgtctcctaacccactgtattaaagtccctatgctcgtgctggacccagctttacccgcgaatattactttgaaggatcttccctcactgtacccctccttccatagcgcctcagacatttttaatgttgcaaaaccaaagaacccttctaccaatgtctcagtggtggtgttcgacagcacaaaggatgttgaggacgcccatagcgggttgctgaaaggcaactctcgccagaccgtctggaggggctacctgactacagacaaggaggtgcctggtcttgtgctgatgcaggacttggcctttctctccgggttcccgcctactttcaaagaaaccaaccagctcaagacaaaactgccggaaaacctcagctcaaaggtaaaactactgcagctctacagtgaagcttcagtagccctcctcaagctcaataaccccaaagattttcaggagctaaacaaacagacaaagaagaacatgacaatcgacggtaaggaactaaccattagtcccgcctatctcctgtgggacctctcggcaatatcacagagcaagcaggatgaggatatcagcgcctcccgatttgaggataatgaagagctccggtattcactacggtccatcgagaggcatgctccctgggtgcgcaatatattcatcgttaccaacgggcagataccatcgtggcttaatttggacaaccccagggtgacaattgtcacgcatcaagacgtgttccgaaatctctcccacctgccaaccttctctagtcccgcaatagaaagccacatacataggattgaggggcttagtcagaaatttatctacctcaacgatgatgttatgttcggcaaggacgtttggcccgatgacttttactcccacagcaaggggcagaaagtgtatcttacatggccagtcccgaattgcgctgaaggctgcccaggatcatggattaaagacggatattgtgacaaggcttgcaataattcggcttgcgattgggacgggggggactgttcaggcaactcaggtgggagcaggtatattgccggcggaggaggcactggcagtattggagtgggacagccatggcagttcgggggcggtatcaattccgtgtcctactgcaaccagggctgtgccaattcatggctggctgataaattctgcgatcaggcttgcaacgtattgtcctgcggatttgatgcaggggactgtgggcaagaccacttccacgagctgtataaggtcattctgctgcccaaccaaacacactacataatccctaagggagagtgcctcccatatttcagctttgcggaggtggcaaaaagaggagtggagggcgcttactctgataaccctatcatccgacatgcatccattgccaataaatggaagacaatccatctgattatgcatagtgggatgaacgctaccacgatccactttaatctcacattccaaaacaccaatgatgaagagttcaagatgcagatcactgttgaagttgatacccgtgaaggaccgaagcttaacagcaccgctcagaagggttatgaaaacctggtttctcccatcactttactgcccgaagccgagatactgttcgaggacatccctaaagagaaacgattccctaaattcaagcgccatgacgttaactctaccaggcgcgcccaggaagaagttaagatccctttggtgaacataagccttctgcccaaggatgctcagctgtctctcaatacgctggacttgcagctggaacacggagacattaccctgaaaggctacaacctcagcaaaagtgctctgctccggtcattcctgatgaactcccagcatgccaagattaaaaaccaggctatcattaccgacgagacaaatgatagtctcgtggctccgcaggagaagcaggtgcacaagagtattcttcccaacagtttgggtgtgtccgaacgtttacaacgacttacctttcctgccgtgtcagtgaaggtgaacggccatgaccaaggacagaaccccccccttgatctggaaaccacggctaggttccgagtcgaaacccacacccagaaaactatcggaggcaacgttacaaaagagaagccacctagtcttatcgtcccgctggagagccagatgactaaggagaaaaaaatcaccggaaaagaaaaagagaattcccgaatggaggagaatgcagaaaatcatataggagtgaccgaagtgcttctcgggagaaaactgcaacattatacggatagctatttagggtttctaccatgggagaagaaaaagtactttcaggatttactcgatgaggaagagtctctgaagacccagcttgcgtacttcaccgacagcaaaaatacaggaagacagctgaaggataccttcgctgattctctgcggtatgtgaacaagatcttgaactccaaattcgggttcacatccaggaaggttcccgcgcatatgcctcatatgatcgaccgaatcgttatgcaggaactccaagatatgtttccggaagaattcgataagacgagctttcataaggttcgccactccgaggacatgcagttcgcctttagttatttttactatctgatgagcgcagtgcagccccttaacatcagccaagtgttcgatgaagtggacaccgatcaatcaggggtactgtctgaccgcgaaattcggacacttgccacccgaatacacgaactgcccctgagcctgcaagacctcaccgggctggaacatatgttaattaattgttctaagatgctgcctgccgatataacccagctcaataatatcccaccaacacaggagtcttactatgatccgaatttgcctcccgtcactaagagcctcgtcaccaactgtaagcctgtgacagataagatccataaggcatataaagataagaacaaatatcgcttcgagatcatgggtgaggaggagatcgcctttaaaatgatccgtaccaatgttagccatgtggttggtcagctcgatgatatccgtaaaaaccctcgcaagtttgtgtgccttaatgacaatatcgaccacaaccataaggacgcgcagaccgtcaaggccgtcctccgcgacttttacgagagcatgttccctattccctcgcagtttgaactgccgagggaatatagaaatagatttcttcacatgcacgagctccaggagtggagggcctaccgagataagttgaagttttggacccactgtgtgctcgcaactttaattatgttcactattttcagcttttttgccgaacagctgatcgctctcaagcgaaagattttcccaaggagacgcatccacaaagaggcctcgccaaataggatcagggtt

SEQ ID NO: 215095 - DNA, 3771 bp, Artificial Sequence
  derived and/or modified sequence
atgctgttcaagctgctgcagagacagacctacacctgcctgagccacagatacggcctgtacgtgtgcttcctgggcgtggtggtgaccatcgtgagcgccttccagttcggcgaggtggtgctggagtggagcagagaccagtaccacgtgctgttcgacagctacagagacaacatcgccggcaagagcttccagaacagactgtgcctgcccatgcccatcgacgtggtgtacacctgggtgaacggcaccgacctggagctgctgaaggagctgcagcaggtgagagagcagatggaggaggagcagaaggccatgagagagatcctgggcaagaacaccaccgagcccaccaagaagagcgagaagcagctggagtgcctgctgacccactgcatcaaggtgcccatgctggtgctggaccccgccctgcccgccaacatcaccctgaaggacctgcccagcctgtaccccagcttccacagcgccagcgacatcttcaacgtggccaagcccaagaaccccagcaccaacgtgagcgtggtggtgttcgacagcaccaaggacgtggaggacgcccacagcggcctgctgaagggcaacagcagacagaccgtgtggagaggctacctgaccaccgacaaggaggtgcccggcctggtgctgatgcaggacctggccttcctgagcggcttcccccccaccttcaaggagaccaaccagctgaagaccaagctgcccgagaacctgagcagcaaggtgaagctgctgcagctgtacagcgaggccagcgtggccctgctgaagctgaacaaccccaaggacttccaggagctgaacaagcagaccaagaagaacatgaccatcgacggcaaggagctgaccatcagccccgcctacctgctgtgggacctgagcgccatcagccagagcaagcaggacgaggacatcagcgccagcagattcgaggacaacgaggagctgagatacagcctgagaagcatcgagagacacgccccctgggtgagaaacatcttcatcgtgaccaacggccagatccccagctggctgaacctggacaaccccagagtgaccatcgtgacccaccaggacgtgttcagaaacctgagccacctgcccaccttcagcagccccgccatcgagagccacatccacagaatcgagggcctgagccagaagttcatctacctgaacgacgacgtgatgttcggcaaggacgtgtggcccgacgacttctacagccacagcaagggccagaaggtgtacctgacctggcccgtgcccaactgcgccgagggctgccccggcagctggatcaaggacggctactgcgacaaggcctgcaacaacagcgcctgcgactgggacggcggcgactgcagcggcaacagcggcggcagcagatacatcgccggcggcggcggcaccggcagcatcggcgtgggccagccctggcagttcggcggcggcatcaacagcgtgagctactgcaaccagggctgcgccaacagctggctggccgacaagttctgcgaccaggcctgcaacgtgctgagctgcggcttcgacgccggcgactgcggccaggaccacttccacgagctgtacaaggtgatcctgctgcccaaccagacccactacatcatccccaagggcgagtgcctgccctacttcagcttcgccgaggtggccaagagaggcgtggagggcgcctacagcgacaaccccatcatcagacacgccagcatcgccaacaagtggaagaccatccacctgatcatgcacagcggcatgaacgccaccaccatccacttcaacctgaccttccagaacaccaacgacgaggagttcaagatgcagatcaccgtggaggtggacaccagagagggccccaagctgaacagcaccgcccagaagggctacgagaacctggtgagccccatcaccctgctgcccgaggccgagatcctgttcgaggacatccccaaggagaagagattccccaagttcaagagacacgacgtgaacagcaccagaagagcccaggaggaggtgaagatccccctggtgaacatcagcctgctgcccaaggacgcccagctgagcctgaacaccctggacctgcagctggagcacggcgacatcaccctgaagggctacaacctgagcaagagcgccctgctgagaagcttcctgatgaacagccagcacgccaagatcaagaaccaggccatcatcaccgacgagaccaacgacagcctggtggccccccaggagaagcaggtgcacaagagcatcctgcccaacagcctgggcgtgagcgagagactgcagagactgaccttccccgccgtgagcgtgaaggtgaacggccacgaccagggccagaacccccccctggacctggagaccaccgccagattcagagtggagacccacacccagaagaccatcggcggcaacgtgaccaaggagaagccccccagcctgatcgtgcccctggagagccagatgaccaaggagaagaagatcaccggcaaggagaaggagaacagcagaatggaggagaacgccgagaaccacatcggcgtgaccgaggtgctgctgggcagaaagctgcagcactacaccgacagctacctgggcttcctgccctgggagaagaagaagtacttccaggacctgctggacgaggaggagagcctgaagacccagctggcctacttcaccgacagcaagaacaccggcagacagctgaaggacaccttcgccgacagcctgagatacgtgaacaagatcctgaacagcaagttcggcttcaccagcagaaaggtgcccgcccacatgccccacatgatcgacagaatcgtgatgcaggagctgcaggacatgttccccgaggagttcgacaagaccagcttccacaaggtgagacacagcgaggacatgcagttcgccttcagctacttctactacctgatgagcgccgtgcagcccctgaacatcagccaggtgttcgacgaggtggacaccgaccagagcggcgtgctgagcgacagagagatcagaaccctggccaccagaatccacgagctgcccctgagcctgcaggacctgaccggcctggagcacatgctgatcaactgcagcaagatgctgcccgccgacatcacccagctgaacaacatcccccccacccaggagagctactacgaccccaacctgccccccgtgaccaagagcctggtgaccaactgcaagcccgtgaccgacaagatccacaaggcctacaaggacaagaacaagtacagattcgagatcatgggcgaggaggagatcgccttcaagatgatcagaaccaacgtgagccacgtggtgggccagctggacgacatcagaaagaaccccagaaagttcgtgtgcctgaacgacaacatcgaccacaaccacaaggacgcccagaccgtgaaggccgtgctgagagacttctacgagagcatgttccccatccccagccagttcgagctgcccagagagtacagaaacagattcctgcacatgcacgagctgcaggagtggagagcctacagagacaagctgaagttctggacccactgcgtgctggccaccctgatcatgttcaccatcttcagcttcttcgccgagcagctgatcgccctgaagagaaagatcttccccagaagaagaatccacaaggaggccagccccaacagaatcagagtgtag

SEQ ID NO: 215096 - DNA, 3771 bp, Artificial Sequence
  derived and/or modified sequence
atgctgttcaagctgctccaacggcaaacgtatacgtgtctgagtcatcgatatggactgtacgtgtgtttcttgggtgtcgttgtcaccatcgtcagcgcttttcagtttggcgaagtcgttctcgagtggagtcgggatcagtaccacgtcctgttcgactcgtacagagataatatagcgggaaagagctttcagaatcggctgtgccttcccatgcccatcgatgtggtgtatacatgggtgaatggcactgatctggaattgctgaaagaactgcagcaggtgagagagcagatggaggaagaacagaaggccatgagggagattctaggaaaaaacacaacggagcctacaaaaaagtccgagaagcagttagagtgccttctaacacactgcataaaagtacctatgctggtgctggacccagctctgcccgcaaacattaccctgaaagacctgccatcactctaccccagcttccatagcgcaagcgatatttttaacgtcgctaagcctaagaatccctccactaacgtgagcgtggttgtgtttgacagcacaaaggatgtcgaagacgcacactctgggttgctcaaggggaacagccgacagactgtgtggcggggctacctgaccacagataaagaggttcctggtctcgtactgatgcaggacttggcttttctgtccggctttccccccaccttcaaggaaaccaatcagttgaagacaaagctgccagagaatctcagtagtaaggtaaaactgctgcaactttacagcgaagcgtcagtggcactactgaagctgaacaaccccaaagacttccaggaattgaacaagcagaccaagaaaaacatgacgatcgatggaaaggagctcaccatctccccagcgtatctgctgtgggacctgtctgcaatctctcagtccaagcaggatgaagacatctccgccagtcgattcgaagacaatgaggagctccgttacagtctgaggtccatcgaaagacatgccccatgggttagaaatatctttatagtcactaacggccaaattccctcttggttgaacctggacaatcctcgggttacaatcgtcacccaccaagatgtgttccggaacctctctcatttgccaaccttttcttccccagctattgaatctcacattcacagaatagaaggactcagccagaagttcatttacctaaatgatgacgtgatgttcggtaaagacgtgtggcccgacgatttttatagccactcaaagggccagaaagtgtacctgacttggcccgttccaaactgtgccgaaggttgtcctgggagctggatcaaggatggctactgcgataaagcttgcaacaacagcgcctgcgactgggatgggggcgactgcagcggtaatagcggaggctctagatacatcgcgggcggcggggggactgggtcaatcggcgttgggcagccctggcagttcggagggggcattaacagtgtgtcctactgcaatcaggggtgtgctaattcctggttagctgataagttctgtgaccaagcgtgcaacgtactctcctgcggattcgatgctggcgattgcggtcaggatcactttcacgagctgtacaaagttatattactgcccaaccagacccattacattattcccaaaggagagtgtctgccgtatttctcctttgcagaggtggccaaacgtggggtagagggtgcctacagcgacaatcccattattcggcacgccagtattgccaataagtggaaaaccatccatctgattatgcattccgggatgaacgccacgactatccatttcaacctcaccttccagaacactaacgacgaagaatttaaaatgcaaattactgtcgaggtcgacactcgcgaaggcccgaagttaaattctacagctcagaagggatacgagaatctcgtgtctcctatcaccttgttacccgaggccgagatcctattcgaagatatccctaaagagaagcgattccccaagtttaagcggcacgacgtgaactccactaggcgtgcgcaggaagaagtgaaaattcccctcgtcaatattagtctcctgcctaaggatgcccaactatctctgaataccctggatctgcagttggaacatggcgacatcacccttaaaggttacaatttgagcaaatctgccctcttacgaagttttctgatgaactcccagcatgctaaaattaagaaccaggctattatcacggacgagacgaacgatagtctggtagctccccaggaaaagcaggtgcataagtctattctgccaaacagccttggcgtgtctgagcggctacagaggttgactttccccgcagtcagcgtgaaagtgaacgggcacgaccagggccaaaacccccctctggacctggagactacggccagattccgagtcgaaacacacacacagaaaacaatcggggggaatgtgaccaaagagaagcccccatcccttattgtgccactggagagccagatgaccaaggagaagaaaatcacaggaaaagaaaaggagaacagccgtatggaggaaaacgcagaaaaccacataggagtaaccgaagttctgctcggcagaaaactgcagcactataccgactcatatctgggctttctcccttgggagaagaagaaatatttccaggacctgctggatgaagaggaatcattgaagacccaactggcctactttacagatagcaagaacacaggacggcaattaaaggatacttttgcagactcgctccgatatgtcaataagatactgaactccaaatttggatttactagtaggaaagtcccagcccatatgcctcacatgatagaccgaatcgtcatgcaggaactccaagatatgttccctgaggagtttgacaagaccagcttccacaaagtccggcactcggaagatatgcagtttgccttcagctacttctactacctgatgagcgccgttcaacccctgaacatcagccaggtcttcgatgaggtggacacggatcaatctggagtgctctctgatcgcgaaatacggactctagccacaagaatccacgagctgcctttgtcgttacaggacctaacggggcttgagcacatgttaattaactgctcaaagatgctgccagccgatatcacccaattgaacaatattccgcccacccaggagtcatattacgaccccaatctcccgcccgtcacaaagagcttggtcacaaactgcaagccagtgacagacaagattcataaggcctacaaagataagaataagtaccgctttgagatcatgggcgaggaagagatcgcatttaaaatgatccgaacaaatgtgtcccatgttgtgggtcagctcgatgatatccgcaaaaaccccagaaagttcgtgtgtctgaacgacaatatcgatcacaaccacaaggacgcgcaaaccgtcaaagcagtcttacgcgacttctatgagtcaatgttccccattccctcacagttcgagctccctcgcgagtatcgcaatagattccttcatatgcatgagcttcaggaatggcgagcgtaccgcgataagcttaagttttggacacactgtgtgctggctacactgatcatgttcaccatcttcagcttttttgcagaacagctgatcgcactgaagcggaagatatttcctcgtagaaggattcataaagaagcttctccaaaccgcattcgggtttag

SEQ ID NO: 215097 - DNA, 3771 bp, Artificial Sequence
  derived and/or modified sequence
atgctgttcaagctgctgcagaggcagacctacacctgcctgagccacagatatggcctgtatgtgtgcttcctgggcgtggtggtgaccatcgtgtctgccttccagtttggagaggtggtgctggagtggagccgggaccagtaccacgtgctgtttgacagctacagagacaacattgctgggaagagcttccagaaccggctgtgcctgcccatgcccattgatgtggtgtacacctgggtgaatggaacagacctggagctgctgaaggagctgcagcaggtgcgggagcagatggaggaggagcagaaggccatgagggagatcctgggcaagaacaccacagagcccaccaagaagtctgagaagcagctggagtgcctgctgacccactgcatcaaggtgcccatgctggtgctggaccctgccctgcctgccaacatcaccctgaaggacctgcccagcctgtaccccagcttccacagcgccagtgacatcttcaacgtggccaagcccaagaaccccagcaccaacgtgtctgtggtggtgtttgacagcaccaaggatgtggaggatgcccacagcggcctgctgaagggcaacagccggcagacagtgtggaggggctacctgaccacagacaaggaggtgcccggcctggtgctgatgcaggacctggccttcctgagcggcttcccccccaccttcaaggagaccaaccagctgaagaccaagctgcctgagaacctgagcagcaaggtgaagctgctgcagctgtacagcgaggcctctgtggccctgctgaagctgaacaaccccaaggacttccaggagctgaacaagcagaccaagaagaacatgaccattgatggcaaggagctgaccatcagccctgcctacctgctgtgggacctgagcgccatcagccagagcaagcaggatgaggacatcagcgccagcagatttgaggacaatgaggagctgcgctacagcctgcggagcattgaaagacatgccccctgggtgaggaacatcttcatcgtgaccaacggccagatccccagctggctgaacctggacaacccccgggtgaccatcgtgacccaccaggatgtgttcaggaacctgagccacctgcccaccttcagcagccctgccatcgagagccacatccacagaattgagggcctgagccagaagttcatctacctgaatgatgatgtgatgtttgggaaggatgtgtggccagatgacttctacagccacagcaagggccagaaggtgtacctgacctggcctgtgcccaactgtgccgagggctgccccggctcctggatcaaggatggctactgtgacaaggcctgcaacaacagcgcctgtgactgggatggaggagactgcagcggcaacagcggcggcagccgctacatcgccggcggcggcggcaccggcagcattggagtgggccagccctggcagtttggaggcggcatcaacagcgtgtcctactgcaaccagggctgtgccaacagctggctggccgacaagttctgtgaccaggcctgcaatgtgctgagctgtggctttgatgctggggactgtggccaggaccacttccacgagctgtacaaggtgatcctgctgcccaaccagacccactacatcatccccaagggagaatgtctgccctacttctcctttgctgaggtggccaagaggggcgtggagggcgcctacagcgacaaccccatcatcagacatgccagcatcgccaacaagtggaagaccatccacctgatcatgcacagcggcatgaatgccaccaccatccacttcaacctgaccttccagaacaccaatgatgaggagttcaagatgcagatcaccgtggaggtggacacccgggagggccccaagctgaacagcacagcccagaagggctatgagaacctggtgagccccatcaccctgctgcctgaggccgagatcctgtttgaggacatccccaaggagaagcgcttccccaagttcaagagacatgatgtgaacagcacccggcgggcccaggaggaggtgaagatccccctggtgaacatcagcctgctgcccaaggatgcccagctgagcctgaacaccctggacctgcagctggagcacggggacatcaccctgaagggctacaacctgagcaagagcgccctgctgcggagcttcctgatgaacagccagcacgccaagatcaagaaccaggccatcatcacagatgagaccaatgacagcctggtggccccccaggagaagcaggtgcacaagagcatcctgcccaacagcctgggcgtgtctgagcggctgcagaggctgaccttccctgctgtgtctgtgaaggtgaatggacatgaccagggccagaacccccccctggacctggagaccacagcccgcttccgggtggagacccacacccagaagaccatcggcggcaatgtgaccaaggagaagccacccagcctgattgtgcccctggagagccagatgaccaaggagaagaagatcaccgggaaggagaaggagaacagcaggatggaggagaatgctgagaaccacatcggcgtgacagaggtgctgctgggcaggaagctgcagcactacacagacagctacctgggcttcctgccctgggagaagaagaagtacttccaggacctgctggatgaggaggagagcctgaagacccagctggcctacttcacagacagcaagaacacaggccggcagctgaaggacacctttgctgacagcctgcgctacgtgaacaagatcctgaacagcaagtttggcttcaccagcaggaaggtgcctgcccacatgccccacatgattgaccgcatcgtgatgcaggagctgcaggacatgtttcctgaggagtttgacaagaccagcttccacaaggtgcgccacagcgaggacatgcagtttgccttctcctacttctactacctgatgtctgctgtgcagcccctgaacatcagccaggtgtttgatgaggtggacacagaccagagcggcgtgctgagtgaccgggagatccgcaccctggccacccgcatccacgagctgcccctgagcctgcaggacctgaccggcctggagcacatgctgatcaactgcagcaagatgctgcctgctgacatcacccagctgaacaacatcccccccacccaggagagctactatgaccccaacctgccccctgtgaccaagagcctggtgaccaactgcaagcctgtgacagacaagatccacaaggcctacaaggacaagaacaagtacagatttgagatcatgggagaggaggagatcgccttcaagatgatccgcaccaacgtgagccacgtggtgggccagctggatgacatcaggaagaaccccaggaagtttgtgtgcctgaatgacaacatcgaccacaaccacaaggatgcccagacagtgaaggctgtgctgcgggacttctatgagagcatgttccccatccccagccagtttgagctgccccgggagtacagaaaccgcttcctgcacatgcatgagctgcaggagtggagggcctacagagacaagctgaagttctggacccactgtgtgctggccaccctcatcatgttcaccatcttctccttctttgctgagcagctgattgccctgaagaggaagatcttcccccggcggcgcatccacaaggaggccagccccaaccgcatccgggtgtag

SEQ ID NO: 215098 - DNA, 3771 bp, Artificial Sequence
  derived and/or modified sequence
atgctgttcaagctgctgcagcggcagacctacacctgcctgagccatcgttatgggctctatgtgtgtttcctcggggttgtcgtaaccattgtgtcagcctttcagtttggtgaagtcgtgttagagtggagcagggatcaatatcatgtgttgttcgactcctatcgcgacaacatcgccggtaagtcatttcaaaacagattgtgcctccctatgccaattgatgtggtatacacatgggtcaatggaactgatctagaacttctaaaagaactacagcaggttcgggaacagatggaggaggagcaaaaggcgatgagagagattctaggcaaaaataccacagagccaactaagaagtctgagaaacagttagagtgtttgcttacacattgcattaaagtgccaatgctggtcttggaccccgcgctccccgctaacatcaccctgaaggaccttccgtcactgtatccctcattccactctgccagtgacatctttaatgtggccaagccgaaaaatccaagcactaacgtgagtgtcgtcgtcttcgattccactaaagatgtggaagatgcccactccggcttgttgaaagggaatagccggcagaccgtgtggcggggctacttgacaacagacaaggaggtaccagggttagtgctcatgcaagatctggcttttctgagcgggtttcccccaaccttcaaagaaaccaaccagctgaaaactaaattgcccgagaacttgtcaagtaaagttaaactcctccagctgtattcggaagcttctgtggctctgctgaaactgaacaacccgaaagacttccaggagctgaataaacagaccaagaagaacatgacaatcgatgggaaggagttaaccatcagccctgcctacctcctctgggacctttccgctattagtcaatctaagcaagatgaagatatctcggctagtcgctttgaagataatgaagagctgcgttatagccttcgttctattgaacgccatgccccctgggtccgcaatatctttattgtcaccaacgggcagattccaagttggctgaatctcgacaatccgcgggtgacgatcgtcacccaccaagacgtcttccgcaacctgtcccatctgccaactttctccagtccagctatcgagagtcacatccatcgcatcgagggcctgagccagaaattcatctatctcaacgatgatgtaatgttcggaaaggacgtgtggccagatgacttttacagtcacagcaagggccagaaagtttatctgacatggcccgtccccaactgtgccgaggggtgccccggttcctggatcaaagatggttattgtgataaggcctgtaacaactctgcatgtgattgggatggtggagactgttctggaaatagtggtggctctaggtacatcgccggaggcggaggcaccggttcaattggcgtcggccagccctggcagtttggcggcgggattaatagcgtgagctactgcaatcagggatgtgccaatagttggctggctgataaattttgtgatcaggcttgcaatgtgctatcgtgcggttttgacgcaggagattgtggtcaagaccatttccatgagttgtacaaagtcattctactgccaaaccaaacacactatattatcccgaagggcgagtgccttccttatttctcattcgcagaggtggcaaaaagaggagttgagggcgcgtattccgataatccaatcatccgccatgcctccattgcaaataagtggaagaccatccatctcattatgcacagcggcatgaacgctaccaccattcatttcaatctgacttttcaaaacacgaacgacgaggaattcaagatgcagatcaccgtggaggtcgatacaagggaggggccaaagctaaactccacagctcagaaggggtacgaaaatctggtttcgcctatcacgctcttgccagaagctgaaatactctttgaagacattccgaaggagaagagattcccaaagttcaaacgccatgacgttaatagcacaaggcgcgcccaggaggaagtgaagatcccgttagtgaacataagtcttctccctaaggacgcccagctgtccctaaatactctggatctgcagttggaacatggcgacattacgctcaaagggtacaatcttagtaagagcgctctgttgcgctctttcttgatgaatagccaacacgctaaaattaaaaaccaggcaattattaccgacgaaactaatgattctctcgtcgccccccaggagaaacaagtgcataagagcatcttgccaaactcactgggagttagtgagcggctgcagcgtctgactttccccgcagttagtgtcaaagtgaacggccacgaccagggccagaatccaccattagacttggaaacaacagctcgtttcagggtggagacacatactcagaagactatcggtggcaacgtaacaaaagaaaaaccacctagcctcattgttccattggagagtcagatgactaaagagaaaaaaatcaccggaaaagagaaggaaaacagccgcatggaggaaaatgccgagaaccatatcggggttacagaggtgctgctgggtcggaaactccagcactataccgatagctaccttgggttcctgccgtgggaaaaaaagaagtattttcaggatctccttgacgaggaggaatcactgaaaacccagctcgcatatttcacagactcaaaaaacacgggacgccagctaaaggatacgtttgccgacagcctgcggtacgtgaataaaattctgaactcgaaatttgggttcactagccgtaaggttccggcccatatgccacacatgatcgaccgcatagtgatgcaggagctgcaggacatgtttcccgaggagttcgacaaaacatcctttcataaggtgagacatagtgaggatatgcaattcgccttctcatacttctactatttgatgtccgcagtccaaccactgaacatctcacaagtgttcgacgaggtagatacagaccagagcggtgtgctgtcagaccgtgagataagaactctggcaactcggatacacgagctgccactgtctttacaggacttgacaggcctggaacacatgcttatcaactgttccaaaatgttgcccgctgatattacacagctcaataatataccacccacacaagaaagctattatgatccaaatctccccccggtaacaaagtcgctcgttaccaattgcaagccagtcacagacaagattcacaaagcttacaaagacaaaaataaatatcgctttgaaattatgggggaagaagagatagcgtttaaaatgataagaacaaacgtctcgcatgtggtaggccagctcgacgatattcggaagaacccgaggaagtttgtgtgtctcaatgacaatatcgaccacaaccacaaggacgctcagacggtgaaagcagtgctgcgcgacttttacgagtcgatgttccctatacccagtcaattcgaattacccagagagtatagaaatcgcttcttgcacatgcatgaattacaggaatggcgggcctatagggacaaattgaagttctggacccattgtgttctcgcaaccctcattatgtttacgattttttcgttcttcgccgagcagctgatcgcactgaagaggaaaatcttccctagaagaaggatacacaaggaagcatctcctaatagaatcagagtgtag

SEQ ID NO: 215099 - DNA, 3771 bp, Artificial Sequence
  derived and/or modified sequence
atgctgttcaagcttcttcagcgacagacttacacatgtctgtctcatcgctacggtttatacgtctgcttcctcggagtggttgtgactattgtgagcgccttccagtttggggaggtggtcttagagtggtcacgggatcaataccatgtactgtttgactcctatagggacaacatcgctgggaagagctttcaaaacagactgtgcttacccatgcccatcgacgttgtgtatacatgggtgaatggaactgatctggagctgctaaaagaactgcagcaggtccgcgaacagatggaagaggagcaaaaagccatgcgcgaaatacttggaaaaaatacgactgaacccacaaaaaagtccgagaagcagttagagtgtctcctgacccattgtatcaaggtccctatgttggtgctcgacccagcgctgcccgcaaatattacacttaaggacttgccctccttgtatccatcattccactcggcgtccgatatattcaatgttgctaagccaaaaaatccctcaaccaatgtgtccgtggttgtgtttgacagtaccaaagatgtcgaagacgcccactccggattgctgaaagggaattctaggcagactgtttggcggggataccttactacagataaggaagtgccagggctggtgttgatgcaagacctggcattcctgagcgggttcccaccaaccttcaaagaaacaaatcaattaaagacgaagctaccagaaaacctttcaagcaaagtgaagctcctccaactgtatagcgaagcctccgtggccctgctcaagctaaataatccaaaagatttccaggagctgaataagcagacgaagaagaacatgactatcgacggcaaggaactgactatttcaccagcttatctgttgtgggaccttagcgcaatttcccagtcaaagcaggatgaggacatatccgcgtcccgatttgaagacaacgaggagctgaggtattcactgcgcagcattgagcgacacgcaccctgggtcaggaacatatttatcgtgactaatggtcagatccccagctggctgaatcttgataaccctagggtaaccatcgtcactcaccaggacgttttcaggaatctgtcacacctgccgacgttcagtagcccagccatcgaatcccatatccaccggattgaaggtctatcccagaagttcatctacttaaacgatgacgtaatgttcggtaaggacgtgtggcctgacgacttctactcccacagtaaggggcagaaagtgtatttgacatggccggtacccaactgtgcagaaggctgtcctggcagttggattaaagacggttattgcgacaaggcttgtaataattccgcttgtgactgggatggcggtgactgtagcggcaacagcggaggtagccggtatatcgccggtggaggaggaaccgggagcatcggggtcggccagccctggcagtttggtggtggcatcaacagcgtcagctactgtaatcagggctgtgcgaacagttggttagccgataaattttgtgaccaggcctgtaacgtgttgtcttgtggctttgacgccggagactgtggccaggaccacttccacgaattgtataaagtcatcttactaccaaatcagacccattacattatccctaagggggaatgcctgccatactttagctttgcggaagttgcaaagaggggcgtggaaggtgcgtacagtgataatccgataatccggcacgccagcattgcgaataaatggaagactattcacttaatcatgcattctgggatgaatgctacaacgattcattttaacctgacctttcagaatactaacgatgaggagttcaaaatgcagatcactgtggaagtcgacacaagggaaggtcccaaattgaattcaacagctcagaagggctatgagaatctcgtgtcccccatcactttgctccccgaggccgagatcttgttcgaggatatccccaaggaaaagcgttttcccaagtttaagcgccatgacgtgaacagcacccggcgtgcccaggaggaggttaaaattccactggtgaatattagcctcctgccgaaagacgcccagctgtccctgaacacattggatctccagctcgagcatggagacatcaccttgaaaggctataacctgagtaaatctgcactgctacggtcctttctcatgaattcacagcacgcaaaaatcaaaaatcaggcaattatcaccgatgaaactaacgactctcttgtcgccccacaggagaaacaggtgcataagtccattttacccaactccctgggtgttagcgagcggctgcagcgcctgacgttccccgctgtgtcggtgaaagtcaatggacatgaccagggacagaaccctccactggaccttgagactacagcgcgattccgagtcgagactcacacccagaaaactataggtggcaatgttaccaaggaaaaacctccatctctgatcgttcccctggaaagtcaaatgaccaaagagaagaaaatcacaggtaaagaaaaggaaaatagcagaatggaagaaaacgccgagaaccacatcggggttaccgaagtgctcctcggtagaaagctacagcactacacagattcatacctgggcttcctcccatgggagaaaaagaagtatttccaagacctgttggacgaggaagaatcgcttaagacgcagctagcttactttaccgacagtaagaacactgggagacagctgaaggacacattcgcagacagcctgcgctatgtcaataagattctcaattctaagtttggcttcacctccagaaaggtcccagcccacatgcctcacatgattgataggattgtgatgcaagaattacaggacatgtttcccgaggagttcgacaagacaagctttcacaaagtgcggcattctgaagacatgcaatttgccttctcctatttctattacctcatgtcagctgtgcagccccttaatattagtcaagtcttcgatgaggttgacacggatcagtcaggcgtcttatccgatcgtgagatccggacgctcgctactagaatacacgaactgccgctgagtcttcaggacctcactggacttgagcacatgctgataaattgctccaagatgctgcccgctgatataacccagctcaacaatatacctccgacacaagagtcttactacgatccaaatctgccccctgtaacaaaaagtctcgtcactaattgtaagcccgttacagacaagattcataaggcatataaggataaaaacaaatatagatttgagatcatgggcgaagaggagatcgcctttaagatgattaggacaaacgtatcccacgttgtgggacagctggacgacatacgaaagaatcccaggaaattcgtgtgccttaacgacaatatcgatcacaaccataaagatgcgcagaccgttaaggccgttttgagagacttctacgaaagcatgtttcccattcctagtcagtttgagttgcctcgagaatatcgtaatcggttcctgcacatgcatgagctgcaagagtggcgtgcttacagggataagctgaagttctggacccattgcgtgcttgcgaccctcattatgttcaccatcttctccttctttgctgagcagctcatcgctcttaaaagaaaaatctttcctcgtcggagaatacataaggaagcgtcccctaataggattcgggtgtag

SEQ ID NO: 215100 - DNA, 5701 bp, Artificial Sequence
  derived and/or modified sequence
agacccgggcggcgccggccgcctcgccggccgcaggtccgcctccgccgcgccgagggcgtgggctcccggctcccggaagcggcggccgcggcgcggagccgagcgggcgtccgtcgccggagctgcaatgagcggcgcccggaggctgtgacctgcgcgcggcggcccgaccggggcccctgaatggcggctcgctgaggcggcggcggcggcggcggcggctcaggctcctcggggcgtggcgtggcggtgaaggggtgatgctgttcaagctcctgcagagacagacctatacctgcctgtcccacaggtatgggctctacgtgtgcttcttgggcgtcgttgtcaccatcgtctccgccttccagttcggagaggtggttctggaatggagccgagatcaataccatgttttgtttgattcctatagagacaatattgctggaaagtcctttcagaatcggctttgtctgcccatgccgattgacgttgtttacacctgggtgaatggcacagatcttgaactactgaaggaactacagcaggtcagagaacagatggaggaggagcagaaagcaatgagagaaatccttgggaaaaacacaacggaacctactaagaagagtgagaagcagttagagtgtttgctaacacactgcattaaggtgccaatgcttgtcctggacccagccctgccagccaacatcaccctgaaggacctgccatctctttatccttcttttcattctgccagtgacattttcaatgttgcaaaaccaaaaaacccttctaccaatgtctcagttgttgtttttgacagtactaaggatgttgaagatgcccactctggactgcttaaaggaaatagcagacagacagtatggaggggctacttgacaacagataaagaagtccctggattagtgctaatgcaagatttggctttcctgagtggatttccaccaacattcaaggaaacaaatcaactaaaaacaaaattgccagaaaatctttcctctaaagtcaaactgttgcagttgtattcagaggccagtgtagcgcttctaaaactgaataaccccaaggattttcaagaattgaataagcaaactaagaagaacatgaccattgatggaaaagaactgaccataagtcctgcatatttattatgggatctgagcgccatcagccagtctaagcaggatgaagacatctctgccagtcgttttgaagataacgaagaactgaggtactcattgcgatctatcgagaggcatgcaccatgggttcggaatattttcattgtcaccaacgggcagattccatcctggctgaaccttgacaatcctcgagtgacaatagtaacacaccaggatgtttttcgaaatttgagccacttgcctacctttagttcacctgctattgaaagtcacattcatcgcatcgaagggctgtcccagaagtttatttacctaaatgatgatgtcatgtttgggaaggatgtctggccagatgatttttacagtcactccaaaggccagaaggtttatttgacatggcctgtgccaaactgtgccgagggctgcccaggttcctggattaaggatggctattgtgacaaggcttgtaataattcagcctgcgattgggatggtggggattgctctggaaacagtggagggagtcgctatattgcaggaggtggaggtactgggagtattggagttggacagccctggcagtttggtggaggaataaacagtgtctcttactgtaatcagggatgtgcgaattcctggctcgctgataagttctgtgaccaagcatgcaatgtcttgtcctgtgggtttgatgctggcgactgtgggcaagatcattttcatgaattgtataaagtgatccttctcccaaaccagactcactatattattccaaaaggtgaatgcctgccttatttcagctttgcagaagtagccaaaagaggagttgaaggtgcctatagtgacaatccaataattcgacatgcttctattgccaacaagtggaaaaccatccacctcataatgcacagtggaatgaatgccaccacaatacattttaatctcacgtttcaaaatacaaacgatgaagagttcaaaatgcagataacagtggaggtggacacaagggagggaccaaaactgaattctacagcccagaagggttacgaaaatttagttagtcccataacacttcttccagaggcggaaatcctttttgaggatattcccaaagaaaaacgcttcccgaagtttaagagacatgatgttaactcaacaaggagagcccaggaagaggtgaaaattcccctggtaaatatttcactccttccaaaagacgcccagttgagtctcaataccttggatttgcaactggaacatggagacatcactttgaaaggatacaatttgtccaagtcagccttgctgagatcatttctgatgaactcacagcatgctaaaataaaaaatcaagctataataacagatgaaacaaatgacagtttggtggctccacaggaaaaacaggttcataaaagcatcttgccaaacagcttaggagtgtctgaaagattgcagaggttgacttttcctgcagtgagtgtaaaagtgaatggtcatgaccagggtcagaatccacccctggacttggagaccacagcaagatttagagtggaaactcacacccaaaaaaccataggcggaaatgtgacaaaagaaaagcccccatctctgattgttccactggaaagccagatgacaaaagaaaagaaaatcacagggaaagaaaaagagaacagtagaatggaggaaaatgctgaaaatcacataggcgttactgaagtgttacttggaagaaagctgcagcattacacagatagttacttgggctttttgccatgggagaaaaaaaagtatttccaagatcttctcgacgaagaagagtcattgaagacacaattggcatacttcactgatagcaaaaatactgggaggcaactaaaagatacatttgcagattccctcagatatgtaaataaaattctaaatagcaagtttggattcacatcgcggaaagtccctgctcacatgcctcacatgattgaccggattgttatgcaagaactgcaagatatgttccctgaagaatttgacaagacgtcatttcacaaagtgcgccattctgaggatatgcagtttgccttctcttatttttattatctcatgagtgcagtgcagccactgaatatatctcaagtctttgatgaagttgatacagatcaatctggtgtcttgtctgacagagaaatccgaacactggctaccagaattcacgaactgccgttaagtttgcaggatttgacaggtctggaacacatgctaataaattgctcaaaaatgcttcctgctgatatcacgcagctaaataatattccaccaactcaggaatcctactatgatcccaacctgccaccggtcactaaaagtctagtaacaaactgtaaaccagtaactgacaaaatccacaaagcatataaggacaaaaacaaatataggtttgaaatcatgggagaagaagaaatcgcttttaaaatgattcgtaccaacgtttctcatgtggttggccagttggatgacataagaaaaaaccctaggaagtttgtttgcctgaatgacaacattgaccacaatcataaagatgctcagacagtgaaggctgttctcagggacttctatgaatccatgttccccataccttcccaatttgaactgccaagagagtatcgaaaccgtttccttcatatgcatgagctgcaggaatggagggcttatcgagacaaattgaagttttggacccattgtgtactagcaacattgattatgtttactatattctcattttttgctgagcagttaattgcacttaagcggaagatatttcccagaaggaggatacacaaagaagctagtcccaatcgaatcagagtatagaagatcttcatttgaaaaccatctacctcagcatttactgagcattttaaaactcagcttcacagagatgtctttgtgatgtgatgcttagcagtttggcccgaagaaggaaaatatccagtaccatgctgttttgtggcatgaatatagcccactgaccaggaattatttaaccaacccactgaaaacttgtgtgttgagcagctctgaactgattttacttttaaagaatttgctcatggacctgtcatcctttttataaaaaggctcactgacaagagacagctgttaatttcccacagcaatcattgcagactaactttattaggagaagcctatgccagctgggagtgattgctaagaggctccagtctttgcattccaaagccttttgctaaagttttgcactttttttttttcatttcccatttttaagtagttactaagttaactagttattcttgcttctgagtataacgaattgggatgtctaaacctatttttatagatgttatttaaataatgcagcaatatcacctcttattgacaatacctaaattatgagttttattaatatttaagactgtaaatggtcttaaaccactaactactgaagagctcaatgattgacatctgaaatgctttgtaattattgacttcagcccctaagaatgctatgatttcacgtgcaggtctaatttcaaagggctagagttagtactacttaccagatgtaattatgttttggaaatgtacatattcaaacagaagtgcctcattttagaaatgagtagtgctgatggcactggcacattacagtggtgtcttgtttaatactcattggtatattccagtagctatctctctcagttggtttttgatagaacagaggccagcaaactttctttgtaaaaggctggttagtaaattattgcaggccacctgtgtctttgtcatacattcttcttgctgttgtttagtttgttttttttcaaacaaccctctaaaaatgtaaaaaccatgtttagcttgcagctgtacaaaaactgcccaccagccagatgtgaccctcaggccatcatttgccaatcactgagaattagtttttgttgttgttgttgttgttgtttttgagacagagtctctctctgttgcccaggctggagtgcagtggcgcaatctcagctcactgcaacctccgcctcccgggttcaagcagttctgtctcagccttctgagtagctgggactacaggtgcatgccaccacaccctgctaatttttgtatttttagtagagacgggggttccaccatattggtcaggcttatcttgaactcctgacctcaggtgatccacctgcctctgcctcccaaagtgctgagattacaggcataagccagtgcacccagccgagaattagtatttttatgtatggttaaaccttggcgtctagccatattttatgtcataatacaatggatttgtgaagagcagattccatgagtaactctgacaggtattttagatcatgatctcaacaatattcttccaaaatggcatacatcttttgtacaaagaacttgaaatgtaaatactgtgtttgtgctgtaagagttgtgtatttcaaaaactgaaatctcataaaaagttaaatttttgtctgaca

SEQ ID NO: 215101 - protein, 637 aa, Artificial Sequence
  derived and/or modified sequence
MTKRKKLRTSGEGLCPPKPLKNPRLGDFYGDPQSSMLGCLHHPEEPEGKLGPVPSTQQHGEEPGKAVSSSPDEETGSPCRLLRQPEKEPAPLPPSQNSFGRFVPQFAKSRKTVTRKEEMKDEDRGSGAFSLETIAESSAQSPGCQLLVETLGVPLQEATELGDPTQADSARPEQSSQSPVQAVPGSGDSQPDDPPDRGTGLSASQRASQDHLSEQGADDSKPETDRVPGDGGQKEHLPSIDSEGEKPDRGAPQEGGAQRTAGAGLPGGPQEEGDGVPCTPASAPTSGPAPGLGPASWCLEPGSVAQGSPDPQQTPSRMGREGEGTHSSLGCSSLGMVVIADLSTDPTELEERALEVAGPDGQASAISPASPRRKAADGGHRRALPGCTSLTGETTGESGEAGQDGKPPGDVLVGPTASLALAPGSGESMMGAGDSGHASPDTGPCVNQKQEPGPAQEEAELGGQNLERDLEGFRVSPQASVVLEHREIADDPLQEPGAQQGIPDTTSELAGQRDHLPHSADQGTWADSLAVELDFLLDSQIQDALDASDFEAPPEQLFPSGNKPGPCWPGPSSHANGDPVAVAKAQPSRLIMGTHRDLEAFKRLNYRKTKLGGKAPLPYPSKGPGNIPRGDPPWREL

SEQ ID NO: 215102 - protein, 668 aa, Artificial Sequence
  derived and/or modified sequence
MTKRKKLRTSGEGLCPPKPLKNPRLGDFYGDPQSSMLGCLHHPEEPEGKLGPVPSTQQHGEEPGKAVSSSPDEETGSPCRLLRQPEKEPAPLPPSQNSFGRFVPQFAKSRKTVTRKEEMKDEDRGSGAFSLETIAESSAQSPGCQLLVETLGVPLQEATELGDPTQADSARPEQSSQSPVQAVPGSGDSQPDDPPDRGTGLSASQRASQDHLSEQGADDSKPETDRVPGDGGQKEHLPSIDSEGEKPDRGAPQEGGAQRTAGAGLPGGPQEEGDGVPCTPASAPTSGPAPGLGPASWCLEPGSVAQGSPDPQQTPSRMGREGEGTHSSLGCSSLGMVVIADLSTDPTELEERALEVAGPDGQASAISPASPRRKAADGGHRRALPGCTSLTGETTGESGEAGQDGKPPGDVLVGPTASLALAPGSGESMMGAGDSGHASPDTGPCVNQKQEPGPAQEEAELGGQNLERDLEGFRVSPQASVVLEHREIADDPLQEPGAQQGIPDTTSELAGQRDHLPHSADQGTWADSLAVELDFLLDSQIQDALDASDFEAPPEQLFPSGNKPGPCWPGPSSHANGDPVAVAKAQPRTFVGIQASEASRMEDATNVVRGLIVELSNLNRLIMGTHRDLEAFKRLNYRKTKLGGKAPLPYPSKGPGNIPRGDPPWREL

SEQ ID NO: 215103 - DNA, 2420 bp, Artificial Sequence
  derived and/or modified sequence
acctcgcggggcgcgggaaagaggcagagcgcgcgcagatttctcaaggggaagataaaatgactaagaggaagaagctgcggacctcaggagagggactctgtcctccaaaacccctaaagaacccaaggctaggagacttctatggggacccccagagttccatgttgggctgtttacatcaccctgaggagccagagggcaaattgggacctgttccctctacacagcagcacggggaggaaccaggaaaggccgtctccagctcccctgatgaggaaacaggatctccctgccggctcctccgtcaaccagaaaaggagccagctccccttcctccttcccagaactcattcgggaggtttgttccccagtttgcaaaatccaggaagacagtgacaagaaaagaagagatgaaggatgaggaccgtgggagtggggcctttagcctggaaacaatcgcagagtccagcgcccagagtccaggatgccagctgctagtggagaccctgggggtccccctccaggaggccacggagctgggggacccaacgcaggcagacagtgcccgccctgagcagagcagccagagccctgtgcaggcggtgcccggcagtggggattctcagcctgatgaccctccagacagggggacggggttgtccgcctcacagagggccagccaagaccacctgtcagaacaaggggccgatgacagcaagcctgagacagacagggttccaggtgacggtggccaaaaggaacacctaccaagcattgattctgaaggggagaagccagacagaggagccccccaggagggaggggcccaaaggacagcaggggctggcctgcctggagggccccaggaggagggagacggtgtcccctgtaccccagcatcagctcctacctcaggccctgctccaggactgggccctgcctcttggtgcctggaacccgggtctgtggcccagggctcccctgacccccagcagacccccagcaggatgggtagggaaggggaagggactcatagcagcctgggatgctcctccctcgggatggttgtcatcgcagacctgagcacagaccccactgagctggaagagagggctctggaggtggctgggcccgatgggcaggccagtgccatatcacctgcctctcccaggaggaaggccgctgatggaggccacaggagggccttgccaggctgcacctcgctcactggggaaaccacaggagaaagtggggaggcagggcaggatggcaagccccccggcgatgtcctagtgggccctacagcctccctggctctggcacctgggagcggagagtccatgatgggtgctggagattccggtcatgcatccccggacacaggtccatgtgtcaatcagaagcaggagccaggtcctgctcaagaggaagccgagttaggtggccagaacctcgaacgagacctcgaggggttccgtgtgtccccgcaagcctctgttgtgctggaacacagagaaatagcagacgaccctctccaggagcccggggctcagcagggcattccagacaccacctcagagctggcagggcagcgagaccacctgcctcattctgcagaccagggcacctgggcagactctttagctgtggaactcgacttcctgctggacagccagatacaggatgccctggacgcctctgacttcgaagccccacctgagcagctctttccttcggggaacaagccgggcccttgctggccgggccccagctcacatgccaatggagaccctgttgcagtggccaaggcccagccgagccggctgatcatgggcacccaccgggacctggaagctttcaagcgccttaactaccggaagacaaagctgggaggcaaagcccccctgccttacccttccaaggggcctgggaatatccctcgaggggacccaccctggagggagttgtaggccactttgaggtctgtgtttcctttgccacccagcccccatgtccgcagacctcctccaagatgctccagggggtcctagtggaccctacaaacctcccttcagttgcccggaagttggtcttccatggacaacacaaaggaggccgtgaggtcctggcctcacctggccagggtcaaggtcatttgccacccttggcttcagggagggaaactgtgtctcccacagccccagtgacttcaagcgggcctgggctccaggaagctggccacctctgagcagggcccatcctgtccggatttgcaaattttagggtcctgagccaagtatggatggttcagaatttgtttctttcctggaggagaagagagctccctttgttttctttctccccatttccattttatttcttctgggaagacccataataaatgattctgtagaggc

SEQ ID NO: 215104 - DNA, 2513 bp, Artificial Sequence
  derived and/or modified sequence
acctcgcggggcgcgggaaagaggcagagcgcgcgcagatttctcaaggggaagataaaatgactaagaggaagaagctgcggacctcaggagagggactctgtcctccaaaacccctaaagaacccaaggctaggagacttctatggggacccccagagttccatgttgggctgtttacatcaccctgaggagccagagggcaaattgggacctgttccctctacacagcagcacggggaggaaccaggaaaggccgtctccagctcccctgatgaggaaacaggatctccctgccggctcctccgtcaaccagaaaaggagccagctccccttcctccttcccagaactcattcgggaggtttgttccccagtttgcaaaatccaggaagacagtgacaagaaaagaagagatgaaggatgaggaccgtgggagtggggcctttagcctggaaacaatcgcagagtccagcgcccagagtccaggatgccagctgctagtggagaccctgggggtccccctccaggaggccacggagctgggggacccaacgcaggcagacagtgcccgccctgagcagagcagccagagccctgtgcaggcggtgcccggcagtggggattctcagcctgatgaccctccagacagggggacggggttgtccgcctcacagagggccagccaagaccacctgtcagaacaaggggccgatgacagcaagcctgagacagacagggttccaggtgacggtggccaaaaggaacacctaccaagcattgattctgaaggggagaagccagacagaggagccccccaggagggaggggcccaaaggacagcaggggctggcctgcctggagggccccaggaggagggagacggtgtcccctgtaccccagcatcagctcctacctcaggccctgctccaggactgggccctgcctcttggtgcctggaacccgggtctgtggcccagggctcccctgacccccagcagacccccagcaggatgggtagggaaggggaagggactcatagcagcctgggatgctcctccctcgggatggttgtcatcgcagacctgagcacagaccccactgagctggaagagagggctctggaggtggctgggcccgatgggcaggccagtgccatatcacctgcctctcccaggaggaaggccgctgatggaggccacaggagggccttgccaggctgcacctcgctcactggggaaaccacaggagaaagtggggaggcagggcaggatggcaagccccccggcgatgtcctagtgggccctacagcctccctggctctggcacctgggagcggagagtccatgatgggtgctggagattccggtcatgcatccccggacacaggtccatgtgtcaatcagaagcaggagccaggtcctgctcaagaggaagccgagttaggtggccagaacctcgaacgagacctcgaggggttccgtgtgtccccgcaagcctctgttgtgctggaacacagagaaatagcagacgaccctctccaggagcccggggctcagcagggcattccagacaccacctcagagctggcagggcagcgagaccacctgcctcattctgcagaccagggcacctgggcagactctttagctgtggaactcgacttcctgctggacagccagatacaggatgccctggacgcctctgacttcgaagccccacctgagcagctctttccttcggggaacaagccgggcccttgctggccgggccccagctcacatgccaatggagaccctgttgcagtggccaaggcccagccgaggaccttcgtggggatccaggcctctgaggcctccaggatggaggatgccaccaacgtcgtgcgtggcctcatcgttgagctctccaacctgaaccggctgatcatgggcacccaccgggacctggaagctttcaagcgccttaactaccggaagacaaagctgggaggcaaagcccccctgccttacccttccaaggggcctgggaatatccctcgaggggacccaccctggagggagttgtaggccactttgaggtctgtgtttcctttgccacccagcccccatgtccgcagacctcctccaagatgctccagggggtcctagtggaccctacaaacctcccttcagttgcccggaagttggtcttccatggacaacacaaaggaggccgtgaggtcctggcctcacctggccagggtcaaggtcatttgccacccttggcttcagggagggaaactgtgtctcccacagccccagtgacttcaagcgggcctgggctccaggaagctggccacctctgagcagggcccatcctgtccggatttgcaaattttagggtcctgagccaagtatggatggttcagaatttgtttctttcctggaggagaagagagctccctttgttttctttctccccatttccattttatttcttctgggaagacccataataaatgattctgtagaggc

SEQ ID NO: 215105 - DNA, 1914 bp, Artificial Sequence
  derived and/or modified sequence
atgaccaagagaaagaagctgagaaccagcggcgagggcctgtgcccccccaagcccctgaagaaccccagactgggcgacttctacggcgacccccagagcagcatgctgggctgcctgcaccaccccgaggagcccgagggcaagctgggccccgtgcccagcacccagcagcacggcgaggagcccggcaaggccgtgagcagcagccccgacgaggagaccggcagcccctgcagactgctgagacagcccgagaaggagcccgcccccctgccccccagccagaacagcttcggcagattcgtgccccagttcgccaagagcagaaagaccgtgaccagaaaggaggagatgaaggacgaggacagaggcagcggcgccttcagcctggagaccatcgccgagagcagcgcccagagccccggctgccagctgctggtggagaccctgggcgtgcccctgcaggaggccaccgagctgggcgaccccacccaggccgacagcgccagacccgagcagagcagccagagccccgtgcaggccgtgcccggcagcggcgacagccagcccgacgacccccccgacagaggcaccggcctgagcgccagccagagagccagccaggaccacctgagcgagcagggcgccgacgacagcaagcccgagaccgacagagtgcccggcgacggcggccagaaggagcacctgcccagcatcgacagcgagggcgagaagcccgacagaggcgccccccaggagggcggcgcccagagaaccgccggcgccggcctgcccggcggcccccaggaggagggcgacggcgtgccctgcacccccgccagcgcccccaccagcggccccgcccccggcctgggccccgccagctggtgcctggagcccggcagcgtggcccagggcagccccgacccccagcagacccccagcagaatgggcagagagggcgagggcacccacagcagcctgggctgcagcagcctgggcatggtggtgatcgccgacctgagcaccgaccccaccgagctggaggagagagccctggaggtggccggccccgacggccaggccagcgccatcagccccgccagccccagaagaaaggccgccgacggcggccacagaagagccctgcccggctgcaccagcctgaccggcgagaccaccggcgagagcggcgaggccggccaggacggcaagccccccggcgacgtgctggtgggccccaccgccagcctggccctggcccccggcagcggcgagagcatgatgggcgccggcgacagcggccacgccagccccgacaccggcccctgcgtgaaccagaagcaggagcccggccccgcccaggaggaggccgagctgggcggccagaacctggagagagacctggagggcttcagagtgagcccccaggccagcgtggtgctggagcacagagagatcgccgacgaccccctgcaggagcccggcgcccagcagggcatccccgacaccaccagcgagctggccggccagagagaccacctgccccacagcgccgaccagggcacctgggccgacagcctggccgtggagctggacttcctgctggacagccagatccaggacgccctggacgccagcgacttcgaggccccccccgagcagctgttccccagcggcaacaagcccggcccctgctggcccggccccagcagccacgccaacggcgaccccgtggccgtggccaaggcccagcccagcagactgatcatgggcacccacagagacctggaggccttcaagagactgaactacagaaagaccaagctgggcggcaaggcccccctgccctaccccagcaagggccccggcaacatccccagaggcgaccccccctggagagagctgtag

SEQ ID NO: 215106 - DNA, 2007 bp, Artificial Sequence
  derived and/or modified sequence
atgaccaagagaaagaagctgagaaccagcggcgagggcctgtgcccccccaagcccctgaagaaccccagactgggcgacttctacggcgacccccagagcagcatgctgggctgcctgcaccaccccgaggagcccgagggcaagctgggccccgtgcccagcacccagcagcacggcgaggagcccggcaaggccgtgagcagcagccccgacgaggagaccggcagcccctgcagactgctgagacagcccgagaaggagcccgcccccctgccccccagccagaacagcttcggcagattcgtgccccagttcgccaagagcagaaagaccgtgaccagaaaggaggagatgaaggacgaggacagaggcagcggcgccttcagcctggagaccatcgccgagagcagcgcccagagccccggctgccagctgctggtggagaccctgggcgtgcccctgcaggaggccaccgagctgggcgaccccacccaggccgacagcgccagacccgagcagagcagccagagccccgtgcaggccgtgcccggcagcggcgacagccagcccgacgacccccccgacagaggcaccggcctgagcgccagccagagagccagccaggaccacctgagcgagcagggcgccgacgacagcaagcccgagaccgacagagtgcccggcgacggcggccagaaggagcacctgcccagcatcgacagcgagggcgagaagcccgacagaggcgccccccaggagggcggcgcccagagaaccgccggcgccggcctgcccggcggcccccaggaggagggcgacggcgtgccctgcacccccgccagcgcccccaccagcggccccgcccccggcctgggccccgccagctggtgcctggagcccggcagcgtggcccagggcagccccgacccccagcagacccccagcagaatgggcagagagggcgagggcacccacagcagcctgggctgcagcagcctgggcatggtggtgatcgccgacctgagcaccgaccccaccgagctggaggagagagccctggaggtggccggccccgacggccaggccagcgccatcagccccgccagccccagaagaaaggccgccgacggcggccacagaagagccctgcccggctgcaccagcctgaccggcgagaccaccggcgagagcggcgaggccggccaggacggcaagccccccggcgacgtgctggtgggccccaccgccagcctggccctggcccccggcagcggcgagagcatgatgggcgccggcgacagcggccacgccagccccgacaccggcccctgcgtgaaccagaagcaggagcccggccccgcccaggaggaggccgagctgggcggccagaacctggagagagacctggagggcttcagagtgagcccccaggccagcgtggtgctggagcacagagagatcgccgacgaccccctgcaggagcccggcgcccagcagggcatccccgacaccaccagcgagctggccggccagagagaccacctgccccacagcgccgaccagggcacctgggccgacagcctggccgtggagctggacttcctgctggacagccagatccaggacgccctggacgccagcgacttcgaggccccccccgagcagctgttccccagcggcaacaagcccggcccctgctggcccggccccagcagccacgccaacggcgaccccgtggccgtggccaaggcccagcccagaaccttcgtgggcatccaggccagcgaggccagcagaatggaggacgccaccaacgtggtgagaggcctgatcgtggagctgagcaacctgaacagactgatcatgggcacccacagagacctggaggccttcaagagactgaactacagaaagaccaagctgggcggcaaggcccccctgccctaccccagcaagggccccggcaacatccccagaggcgaccccccctggagagagctgtag

SEQ ID NO: 215107 - DNA, 1914 bp, Artificial Sequence
  derived and/or modified sequence
atgacgaaacggaagaagctgcggacctctggggaaggactgtgcccgccaaagccccttaagaacccaaggttgggagacttctatggcgatccacaatcttcaatgctggggtgtctgcatcatccagaagagcccgaagggaagctggggccagtcccctccactcagcaacacggtgaagagcctggaaaggccgtgagttccagtcccgacgaagagaccggcagcccctgcaggcttctgcgtcaaccagaaaaagaacctgctccacttccaccttcacaaaattctttcggccgctttgttccacagttcgccaaatctcggaaaaccgttactcggaaagaggaaatgaaagacgaggaccgcgggtccggggccttcagcttggagacaatagccgagtcctctgcccaaagccccggttgtcagctgctggtagagacgctgggcgtgcccttgcaagaggccactgagttgggcgatccgactcaggctgacagcgcaagacctgagcagtcgagccagagcccagtgcaggctgttcctgggtctggagatagtcagcccgatgacccccctgacaggggcaccgggctgtctgcctcgcagagagccagccaggaccacttgagcgaacagggtgccgatgactcaaaacctgagaccgatagggttcctggggacggtggacagaaggagcacctgccaagcattgactcggagggcgaaaagcccgatagaggggccccccaagagggcggcgcccaaaggacagccggcgcaggactgcccggggggccccaggaggaaggcgatggagttccttgtacccccgcttccgcccctactagtggccctgcgcccggactgggtcctgccagttggtgtctggagcccgggtctgtggcgcaaggatcaccagatccccagcagacacctagtagaatggggcgggaaggcgagggaacccattcttcactcgggtgctccagcctcggtatggttgttattgctgatctctcaaccgacccaaccgaattggaggagagagctctggaggtggccggtcccgatggacaagcctccgccatttcccctgcatcaccgcggcggaaagcagccgacggcggacaccgtagagccctgccaggatgcacctcgttgactggagagactaccggagagtctggagaggccgggcaggacggcaagccccctggcgatgtgttagttgggcccacggcttctctcgctctggccccaggctcgggagaatctatgatgggtgctggtgatagcggacacgcctcgccggacacgggcccttgcgtcaaccaaaagcaggaacccggacctgcccaggaggaggctgaactcggaggccagaatttggagcgtgacttggaagggtttagggtctcgccccaggcatctgtggtgttagaacaccgggagattgcagacgatcctctgcaggaacccggagctcagcagggaatcccggatacaacttcggagctggctgggcaaagggaccacctcccccattcagctgatcagggaacatgggctgactccctggcagtggagcttgattttttattagactcacagattcaagacgcgctggacgccagcgattttgaagcaccccccgagcagctgtttccatccggtaataagcctggaccttgctggcccggtccttcctcccacgccaatggagacccggtggcggtggccaaggcccagccaagcaggttaattatgggcactcatcgcgacctggaggcttttaaaaggcttaattacagaaagactaaactgggaggcaaggcccccttaccgtatccatccaaaggcccaggaaacatccctagaggagaccctccctggagggaactgtag

SEQ ID NO: 215108 - DNA, 2007 bp, Artificial Sequence
  derived and/or modified sequence
atgacaaaacgaaagaagctccgtacatctggtgaaggcctttgccctcctaaaccactgaagaaccctcggctgggagatttctacggagaccctcaatcgagtatgctgggctgcctccaccatcctgaggagcctgagggcaaactaggaccagtgccgtcaacacagcagcatggagaggagcctggcaaagccgtgtcaagctcacctgacgaggaaactggtagtccttgcaggctgttgcgccagcctgaaaaagagcccgcccctctcccccccagccagaactcatttggaagattcgtgccccagttcgccaaatccagaaagactgtaacaaggaaggaagagatgaaggacgaagacagagggagtggcgccttttctctggagacaattgcagaaagcagcgctcagagtcccggttgccagctacttgtcgagactctgggcgtgccactgcaggaagctaccgaacttggggatccaacccaagccgatagcgcccgccccgaacagagcagccaatccccagttcaggccgtgcccgggtcaggagactcccagcctgacgaccccccggacaggggaaccggcctgagtgcttctcagcgtgccagccaggaccatctatccgagcagggagcagatgactctaaacccgagacagacagggtgcccggagatgggggccagaaggagcatctcccctccatcgactctgagggcgaaaaaccggatagaggggccccccaagagggaggcgcccaaagaaccgcgggcgcaggactccccggcggcccacaggaggaaggtgacggggtcccgtgtacgccagctagtgccccaacttccggccctgctcccggcctcggcccagcgagctggtgcttagagcctggatccgtcgcccagggtagccccgacccccagcagacccccagccgcatgggcagggagggtgaagggacacatagctccctgggctgtagtagcctcggaatggtggtcatcgctgacctgagtaccgacccaaccgagctggaagaaagagcccttgaggtggccggtccggacggccaggcttcagccatttctccagcctcccccagacgcaaggccgcggatggcggacaccggagagcccttcctgggtgcacgtcccttacaggtgaaacaactggtgagagcggagaggcgggacaggacggtaaaccacccggcgacgtgttggtcggccctacggcaagcctggccctagcccccgggtcgggggagtctatgatgggcgctggggacagtggtcatgcatctcccgataccgggccatgtgtcaatcagaaacaggagccaggtcccgcccaggaagaagccgaactgggtggtcagaacctggagagggatctagagggctttcgagtgagccctcaggcatcggttgttctggagcaccgtgagattgcagatgaccccctccaagagccaggggcccagcagggaatccccgacactacatccgaactggccggtcagcgtgatcatttgccccatagtgccgaccagggcacctgggccgatagtctggccgtggagttggactttctactagattcccaaattcaggacgctcttgatgcctctgacttcgaagccccgcccgagcaactctttcctagcggcaacaagccaggcccctgctggcccggtcccagttctcatgcaaacggagaccctgttgcggtagccaaagcccagccaagaactttcgtggggattcaggccagtgaggctagtaggatggaagatgccacaaacgttgtccgcggtttaatagtggaactgtccaatctgaacaggctcattatgggcacccatagagatctggaagccttcaaacgccttaattatcgcaagaccaagcttggaggtaaagctcccctgccctatccctccaagggccctggtaacatcccgcgcggtgatcccccctggcgggaactgtag

SEQ ID NO: 215109 - DNA, 1914 bp, Artificial Sequence
  derived and/or modified sequence
atgaccaagaggaagaagctgcggaccagcggggagggcctgtgcccccccaagcccctgaagaacccccggctgggggacttctatggagacccccagagctccatgctgggctgcctgcaccaccctgaggagcctgagggcaagctgggccctgtgcccagcacccagcagcacggggaggagcccgggaaggctgtgagcagcagcccagatgaggagaccggcagcccctgccgcctgctgcggcagcctgagaaggagcccgcccccctgccccccagccagaacagctttggccgctttgtgccccagtttgccaagagcaggaagacagtgaccaggaaggaggagatgaaggatgaggaccggggcagcggggccttcagcctggagaccatcgccgagagcagcgcccagagccctggctgccagctgctggtggagaccctgggcgtgcccctgcaggaggccacagagctgggggaccccacccaggccgacagcgcccggcctgagcagagcagccagagccctgtgcaggccgtgcccggcagcggggacagccagccagatgaccccccagaccggggcaccggcctgagcgccagccagagggccagccaggaccacctgtctgagcagggcgcagatgacagcaagccagagacagacagagtgcctggagatggcggccagaaggagcacctgcccagcattgacagcgagggggagaagccagacagaggagccccccaggagggcggggcccagaggacagctggagctggcctgcccggcggcccccaggaggagggagatggagtgccctgcaccccagccagcgcccccaccagcggccctgcccctggcctgggccctgcctcctggtgcctggagcccggctctgtggcccagggcagcccagacccccagcagacccccagcaggatgggccgggagggggagggcacccacagcagcctgggctgcagcagcctgggcatggtggtgattgctgacctgagcacagaccccacagagctggaggagcgggccctggaggtggccggcccagatggccaggccagcgccatcagccctgccagccccaggaggaaggccgcagatggcggccacagaagagccctgcccggctgcaccagcctgactggagagaccactggagagagcggggaggccggccaggacggcaagcccccaggagatgtgctggtgggccccacagccagcctggccctggcccctggcagcggggagagcatgatgggcgctggggacagcggccacgccagcccagacaccggcccctgtgtgaaccagaagcaggagcccggccctgcccaggaggaggccgagctgggcggccagaacctggagcgggacctggagggcttccgggtgagcccccaggcctctgtggtgctggagcaccgggagattgctgatgaccccctgcaggagcccggggcccagcagggcatcccagacaccaccagcgagctggccggccagagggaccacctgccccacagcgctgaccagggcacctgggccgacagcctggccgtggagctggacttcctgctggacagccagatccaggatgccctggatgccagtgactttgaggcccctcctgagcagctgttccccagcggcaacaagccaggcccctgctggccaggccccagcagccacgccaacggggaccctgtggccgtggccaaggcccagcccagccgcctcatcatgggcacccaccgggacctggaggccttcaagaggctgaactacaggaagaccaagctgggcggcaaggcccccctgccctaccccagcaagggccctggcaacatccccaggggggaccccccctggagggagctgtag

SEQ ID NO: 215110 - DNA, 2007 bp, Artificial Sequence
  derived and/or modified sequence
atgaccaagaggaagaagctgcggaccagcggggagggcctgtgcccccccaagcccctgaagaacccccggctgggggacttctatggagacccccagagctccatgctgggctgcctgcaccaccctgaggagcctgagggcaagctgggccctgtgcccagcacccagcagcacggggaggagcccgggaaggctgtgagcagcagcccagatgaggagaccggcagcccctgccgcctgctgcggcagcctgagaaggagcccgcccccctgccccccagccagaacagctttggccgctttgtgccccagtttgccaagagcaggaagacagtgaccaggaaggaggagatgaaggatgaggaccggggcagcggggccttcagcctggagaccatcgccgagagcagcgcccagagccctggctgccagctgctggtggagaccctgggcgtgcccctgcaggaggccacagagctgggggaccccacccaggccgacagcgcccggcctgagcagagcagccagagccctgtgcaggccgtgcccggcagcggggacagccagccagatgaccccccagaccggggcaccggcctgagcgccagccagagggccagccaggaccacctgtctgagcagggcgcagatgacagcaagccagagacagacagagtgcctggagatggcggccagaaggagcacctgcccagcattgacagcgagggggagaagccagacagaggagccccccaggagggcggggcccagaggacagctggagctggcctgcccggcggcccccaggaggagggagatggagtgccctgcaccccagccagcgcccccaccagcggccctgcccctggcctgggccctgcctcctggtgcctggagcccggctctgtggcccagggcagcccagacccccagcagacccccagcaggatgggccgggagggggagggcacccacagcagcctgggctgcagcagcctgggcatggtggtgattgctgacctgagcacagaccccacagagctggaggagcgggccctggaggtggccggcccagatggccaggccagcgccatcagccctgccagccccaggaggaaggccgcagatggcggccacagaagagccctgcccggctgcaccagcctgactggagagaccactggagagagcggggaggccggccaggacggcaagcccccaggagatgtgctggtgggccccacagccagcctggccctggcccctggcagcggggagagcatgatgggcgctggggacagcggccacgccagcccagacaccggcccctgtgtgaaccagaagcaggagcccggccctgcccaggaggaggccgagctgggcggccagaacctggagcgggacctggagggcttccgggtgagcccccaggcctctgtggtgctggagcaccgggagattgctgatgaccccctgcaggagcccggggcccagcagggcatcccagacaccaccagcgagctggccggccagagggaccacctgccccacagcgctgaccagggcacctgggccgacagcctggccgtggagctggacttcctgctggacagccagatccaggatgccctggatgccagtgactttgaggcccctcctgagcagctgttccccagcggcaacaagccaggcccctgctggccaggccccagcagccacgccaacggggaccctgtggccgtggccaaggcccagcccaggacctttgtgggcatccaggccagcgaggccagcaggatggaggatgccaccaacgtggtgcggggcctcatcgtggagctgagcaacctgaacagactcatcatgggcacccaccgggacctggaggccttcaagaggctgaactacaggaagaccaagctgggcggcaaggcccccctgccctaccccagcaaaggacctggcaacatccccaggggggaccccccctggagggagctgtag

SEQ ID NO: 215111 - DNA, 1914 bp, Artificial Sequence
  derived and/or modified sequence
atgaccaagcggaagaagctgcggaccagcggcgagggcctgtgcccacccaagccactgaaaaatcccaggctgggagacttttacggagacccacagtcctccatgctaggttgcctgcaccacccggaggagccagagggaaagcttggcccagtgccctcaactcagcagcacggcgaagaaccaggcaaagctgtgtctagctcccccgacgaggagacaggcagcccatgtcggctgcttagacagcctgagaaagagcctgctcctttgcctccgagccagaattcgttcggaagatttgtcccacagttcgccaagagcagaaaaaccgttactagaaaagaggagatgaaagatgaggaccgtggatctggcgccttttcattggaaaccattgccgagtcttctgcccagtctccgggctgccagctgctcgttgaaaccctgggcgtacccctgcaagaggcgacagaactgggagacccaacacaggcagacagtgcccgcccagaacagtcttctcagagcccggtgcaagcggttcccggttcaggagactcacagcctgacgacccaccagaccggggaacaggcctaagcgcaagtcagagagcctcacaagaccacctgtccgaacagggggcagatgactccaagcccgaaaccgatcgcgttccgggggacggggggcagaaagaacacctgccttcaattgatagcgaaggagagaagccggatcgcggcgctccccaggagggtggagcccagaggacggccggagctggcttaccgggaggaccacaggaggagggcgacggggtaccatgcacccctgcgtcagcccccaccagcggccctgctcctgggctgggacccgcttcctggtgtctagagcctgggtcagttgcacagggttcccccgatcctcagcagaccccatccaggatgggcagggagggagagggcacacattcttccctcgggtgcagttcactgggcatggtcgtgatagctgacctctccactgaccctaccgagctggaagagcgggctttagaggtcgccgggcccgatggccaggccagcgcaattagccccgcctcacccagaaggaaggctgccgatggcgggcatcgccgggctctacctgggtgcacatcccttacaggggaaaccacaggggagagcggcgaggcaggacaggacggaaagccgcccggggacgtgttggtcgggccaaccgcttctttggcactcgcacccggatcaggggaatccatgatgggagccggggactcgggtcatgcttccccggataccggaccctgcgtcaaccagaaacaggaacctggtccagctcaggaggaggctgagctgggtggacaaaatctggaacgcgacttggaaggattcagggttagcccgcaggcctccgtcgtgctggaacaccgcgagatcgctgacgaccccttgcaagagcccggcgcacagcaaggtattccagatactactagtgaactggccggccaacgggaccacttaccccactcagctgatcaggggacttgggccgatagcctggccgtggaattggattttctgttagactctcagatccaggatgccctagacgcctccgattttgaggccccccctgagcagttgttcccctctggaaataagcctggaccatgctggccggggccatcttctcatgccaacggtgaccccgttgccgttgccaaggctcagcccagccggctgattatgggaacacaccgtgatttagaagcctttaaacgccttaattacagaaagacaaagctggggggaaaggctcctttgccttacccctctaaagggccgggaaacatccccagaggggatccaccgtggcgcgagttatag

SEQ ID NO: 215112 - DNA, 2007 bp, Artificial Sequence
  derived and/or modified sequence
atgaccaagcggaagaagctgcggaccagcggcgagggcctgtgcccacctaaacctctgaagaacccccgtttaggcgatttttacggcgacccgcagagcagcatgctcggttgtcttcaccaccctgaagaaccggaaggaaagctcggaccagttccatcaacacagcagcatggagaggaacctgggaaggctgtttcctccagccccgacgaagagaccggctcaccttgtcgactgctaaggcagcccgaaaaagagcccgctccgctgccaccctctcagaactcatttggacgatttgtgcctcagttcgcaaagtctcgaaagacagtgactaggaaggaggaaatgaaagatgaagatcgcggcagtggggcctttagcctcgagactattgccgaatcctctgctcagtcgccaggctgccagctgctcgtggagactctcggcgttcctctgcaagaagctaccgagctcggcgatcctacccaggctgatagcgctcgcccagaacaaagctcgcagagccctgtacaggctgtacctggtagtggggactctcagccagatgacccaccagatcgcggaactgggctgagtgcctcgcagagagccagtcaggaccacctgtcagagcaaggtgctgacgattctaaaccagaaacggatcgcgtccccggggatggcgggcagaaagagcacttaccatctatcgattccgagggcgagaagccagacagaggggcacctcaagaagggggcgcacagaggactgcgggagccggcctgcctggtggccctcaggaagaaggagatggtgtgccttgcaccccggcttccgcccctaccagtggcccagcacccgggctgggcccagcctcatggtgtctagagccaggtagcgtggcccagggaagccccgatccccaacagacgccaagccgaatgggtcgcgagggagagggaacccattcttcactgggatgctcctctctcgggatggtcgtcatcgccgatctttctaccgatcctactgagctagaggaaagggcattggaagtggctggtcctgatggacaggcaagtgcaatctcccccgcctcccctcgtagaaaggcagctgatggcggacatcgccgtgctcttcctggctgcacgagcttgaccggagaaaccactggcgaatcgggtgaggctggccaggatggcaaaccccctggagacgtattagttggaccaacagcctcgctagcccttgctcctgggagtggggagtcaatgatgggtgctggggactctggccatgcctctccggacaccggaccatgcgtaaatcaaaaacaggagcctggtccggcccaggaagaggcagaactgggagggcaaaatctggaaagagacctcgaaggctttcgggtgtcgcctcaggccagtgtggtcctcgagcaccgcgaaatcgcggacgacccgctgcaggagcccggtgcacagcaaggtatcccagacacaacatctgaacttgccgggcagagggaccatctgccacactctgcagaccaggggacctgggcagatagtttggccgtcgagctggactttctgctggattcccaaattcaagatgcactggacgcaagcgatttcgaggctccacctgagcagctgtttccgtctggcaataagcccggcccttgttggccagggccctccagccacgctaatggagatcccgtggccgtggccaaagcgcagccccgcacttttgtcggaattcaggcttccgaagccagtcggatggaggatgctaccaatgttgtccgggggctcattgttgagttgtcaaatctgaacagactgattatgggaactcatagagacctggaggcgtttaagcggttaaactacaggaaaacgaagctgggtggcaaggcacctctgccctacccgagcaaaggaccaggcaacatcccacggggcgatcccccttggagagaattatag

SEQ ID NO: 215113 - DNA, 1914 bp, Artificial Sequence
  derived and/or modified sequence
atgacgaagaggaaaaaattgcgaacttccggtgagggcctgtgcccaccaaaacctctgaagaacccaaggctcggagacttttatggagatcctcagagcagcatgcttggttgcctgcaccaccccgaagaacccgagggcaagctcggccctgtccctagtacccagcagcacggagaggagcccggaaaagccgtgtctagctctccagatgaggagacaggctctccctgccggctgctgcggcagcccgagaaggagccagccccactgccaccttctcaaaacagtttcggacgattcgtgccacagtttgcaaagtcaaggaagactgtaacccgaaaagaggagatgaaagatgaggataggggttcaggagcattctcattggagactatcgcagagagtagcgcccagtcccccggttgccagctcctggtcgaaacacttggcgttccgttgcaggaagcaactgagcttggcgatccgacccaggctgattcagctagaccagaacaaagttcccagagtccagtccaggccgtccctgggtcgggcgactcacaaccggacgacccaccggacagaggaactggactaagcgcctcccagagggccagtcaagatcatctgtcagagcagggagctgacgactccaagcccgagaccgatcgggtgccaggcgatggcggacagaaagagcacctcccctcgatcgactcggagggggaaaaaccagaccgcggagcacctcaggaaggcggagcccaacggacagcaggtgccggattaccagggggtccgcaggaagaaggggacggcgtcccctgcactcctgcctcagcccctactagcggccctgccccaggcttgggacctgccagttggtgtctggagccagggtcagttgcacagggatcccccgaccctcagcagaccccttctagaatgggaagggagggcgaaggtacacactcctctctcggctgctccagtttaggtatggtcgtgatcgccgatctaagcactgatcctacagaactagaagaaagagcattagaagtggccggacccgacggtcaggcaagcgcgatatctcccgcatcacctagacgcaaagctgcggacggcggacatcggagggcattgccgggatgtacatctcttacaggcgaaaccaccggggagtccggagaagccggacaggacggtaagccaccgggagacgtgcttgtgggtccgacagccagtcttgccctggctccagggtctggtgaatcaatgatgggggcaggcgattctggccatgctagtcccgacacgggcccttgcgtgaatcagaagcaagagccaggccctgcacaagaggaagcagagctgggagggcaaaatcttgagcgtgatctcgagggattccgggtgtccccccaggcatctgtcgtcctggagcaccgcgaaatcgccgacgatcctctacaagagcctggcgctcaacaggggattccagatacgactagcgaactagccggtcagcgcgaccacctgccgcatagtgccgatcagggcacctgggcggattcccttgccgtggaactcgacttcttactggattcacagatccaggatgcgctggacgcctctgactttgaggcgccacctgaacagcttttcccaagtggcaataagccaggcccttgttggcctggcccttcctcccatgctaatggcgatcccgtggcagtggccaaggctcagccaagtaggctgattatgggtacccaccgggatcttgaagccttcaaacggctaaattatcggaagacaaagctcggcggaaaagcaccgttgccttatccaagtaagggaccaggaaatatcccgaggggtgacccaccgtggcgtgaactgtag

SEQ ID NO: 215114 - DNA, 2007 bp, Artificial Sequence
  derived and/or modified sequence
atgacaaaaagaaaaaagctgagaacatctggcgagggtctgtgcccacccaagcccctcaagaatcctcggcttggcgatttttatggggaccctcagagctcaatgctcgggtgtttacatcatcccgaggagcctgagggcaaactcggcccagtgccctctacacagcaacacggggaggaaccgggaaaagctgtgtcgtcatctccagacgaggagacggggtctccctgtcgattacttagacagcccgaaaaggagcctgcccctctccccccatcccagaactcttttggcagattcgtaccacagttcgctaaatcgaggaagactgtaacacgcaaagaagaaatgaaagatgaggacagaggctctggagcatttagcttggaaactatcgctgaatcctcagcccagagccccggatgtcagctactggtcgagacacttggagttcctcttcaggaggctaccgaactcggcgaccctacacaagctgactccgccagacctgagcagtcctcacagagtccagtccaggccgtgcccggtagcggcgactctcaacctgatgacccacctgacagagggacaggactgtccgcttcccagagggccagccaggatcacctgtccgaacaaggagctgatgacagcaagcccgaaacggaccgtgtccccggagacggtgggcaaaaggagcatttaccctcaatcgactctgagggagaaaagcctgatcggggagcgcctcaagaaggcggtgcacagaggacggcaggagcaggcctgcccggaggacctcaggaagagggagacggggtaccgtgcacacccgcttccgctcctacatctggtccagccccaggccttggtcctgcatcatggtgcctggaacccggttcagtggcacagggttctcccgatccccagcaaactcccagtagaatgggacgggaaggggaaggcacacattcttcacttgggtgcagcagtcttggcatggtggtaatagcagatcttagtactgacccaacagaactggaggaaagagcgctggaggtggctggcccagacggccaagcatctgctattagcccagcttcaccgaggagaaaagctgcggacgggggtcaccgccgagcactcccgggatgcacttcgctcaccggcgagaccacgggggaaagcggcgaagccggacaagatgggaagccccctggggacgtgctggtcgggccaactgcttctctggctctggctccagggtcgggtgaatcgatgatgggggctggggactcagggcacgccagcccagacacggggccttgtgtaaatcagaaacaagagccgggtccggcacaggaggaggctgagttggggggacagaacttggagagagacctagaaggttttagagtgagccctcaggcgagcgtggttctggagcaccgcgagattgctgacgacccgttacaggagccaggcgcacagcagggtatccctgataccaccagtgagcttgcaggacaacgggaccatctgccccacagcgccgaccagggaacctgggccgacagccttgcagtcgaattggactttctgttggacagccagatccaggatgcactcgacgcaagcgacttcgaagctcccccagagcaactgtttccatcgggcaataagcctggtccttgctggcccggaccatcttctcatgctaatggagacccagtggccgtggccaaagcccagcctaggaccttcgtcggcatccaagcatctgaagcctcaaggatggaggatgccactaacgtggtgaggggactcatagtggagctgagcaaccttaaccgacttatcatgggcacgcatcgagacttggaagccttcaaaaggcttaattaccggaagacaaaactggggggtaaagctccactgccctacccgagtaaaggccctgggaacatacctcgaggcgaccccccatggcgcgaactgtag

SEQ ID NO: 215115 - protein, 353 aa, Artificial Sequence
  derived and/or modified sequence
MRLPRRAALGLLPLLLLLPPAPEAAKKPTPCHRCRGLVDKFNQGMVDTAKKNFGGGNTAWEEKTLSKYESSEIRLLEILEGLCESSDFECNQMLEAQEEHLEAWWLQLKSEYPDLFEWFCVKTLKVCCSPGTYGPDCLACQGGSQRPCSGNGHCSGDGSRQGDGSCRCHMGYQGPLCTDCMDGYFSSLRNETHSICTACDESCKTCSGLTNRDCGECEVGWVLDEGACVDVDECAAEPPPCSAAQFCKNANGSYTCEECDSSCVGCTGEGPGNCKECISGYAREHGQCADVDECSLAEKTCVRKNENCYNTPGSYVCVCPDGFEETEDACVPPAEAEATEGESPTQLPSREDL

SEQ ID NO: 215116 - DNA, 1062 bp, Artificial Sequence
  derived and/or modified sequence
atgcgcctccccagaagagccgcattaggtctgcttcctctgctgttactgttgccaccagccccagaggccgctaagaaacccacaccttgccatagatgcaggggattggttgacaaatttaatcagggcatggtggataccgctaaaaagaatttcgggggaggaaacacagcctgggaggagaaaacccttagcaaatacgaaagcagcgagatcagactgctcgaaatcttggagggcttgtgtgaaagttccgatttcgagtgcaatcagatgctcgaggcacaggaggaacatctcgaggcctggtggcttcaactgaagagcgagtaccctgatcttttcgaatggttttgtgtgaagactctcaaggtttgttgttcaccagggacctacggccctgactgtcttgcctgccaaggcggatcacagaggccttgtagcggaaatggacactgtagtggcgatggctcacgtcaaggcgatggttcctgtcggtgtcacatggggtaccaggggcctctctgtacggactgtatggatggatatttctcaagtctacggaatgagacgcacagcatatgtaccgcttgtgacgagagctgtaagacctgctccggactcaccaacagggactgtggggagtgcgaggtgggatgggtgctggatgagggcgcttgtgttgatgtcgatgaatgcgccgcagagcctcctccctgcagcgcggctcagttctgtaaaaacgctaatggatcgtacacctgcgaagagtgtgacagttcatgtgtggggtgcacgggagagggtccaggcaattgtaaagagtgcatcagcggatatgcacgggagcacggccagtgcgctgacgtggatgaatgtagcctggccgagaagacttgtgtgaggaagaatgagaattgctacaataccccaggttcttacgtatgtgtttgccccgacggatttgaggagacggaagacgcatgcgttccacctgcagaggctgaggctaccgagggcgagtcaccgacgcaattaccctcaagggaggatctgtag

SEQ ID NO: 215117 - DNA, 1062 bp, Artificial Sequence
  derived and/or modified sequence
atgcgcctgccaaggagggccgcattgggattactgccgttgctcctccttcttccgccagctcctgaggctgccaaaaagcccacaccttgtcaccggtgccggggactggtggacaagttcaaccaaggaatggtggacaccgcgaaaaagaatttcggagggggaaatacagcttgggaagaaaagacactctctaagtatgaaagtagcgagatccgcttgctagaaattctcgagggtctgtgcgagtcaagcgacttcgagtgcaaccagatgttagaagcccaggaagaacaccttgaagcgtggtggcttcagctgaagagcgagtatccagacctgttcgaatggttctgcgttaagaccctgaaggtttgctgctcacccggcacctacggtccagactgtttggcatgtcaaggagggagccagagaccctgctccggaaatggccactgttccggcgacgggagccgacagggtgacggcagttgccgatgtcacatgggctaccagggccctttatgcaccgattgtatggacggatactttagcagcttgcgaaacgagacgcattcaatctgcacagcttgtgacgaatcatgtaaaacctgttctgggctgacaaaccgggattgtggtgagtgtgaagttggttgggtgctggacgagggcgcgtgtgtggatgtggatgaatgtgccgcagagccacccccctgctccgccgctcagttctgtaagaatgcaaacggatcgtatacgtgcgaagagtgtgacagctcttgcgtgggttgcacaggtgaaggaccaggaaactgcaaggaatgcatatctggctacgctagggagcacggacagtgcgcagatgtggatgagtgttcacttgcagagaaaacctgcgtaaggaagaacgagaattgctataatacacctggatcttacgtttgcgtgtgccctgacgggttcgaggaaacagaggacgcatgtgtcccccccgctgaagccgaagctacagaaggagagtcacctactcagctgccttccagagaggacctctag

SEQ ID NO: 215118 - DNA, 1062 bp, Artificial Sequence
  derived and/or modified sequence
atgaggttaccccgcagggcagcactgggcctgcttccattactgcttttattgccccccgctcctgaagcagcaaaaaaacctacaccgtgccaccgatgcagagggctagtagataaatttaaccaggggatggtcgataccgcgaagaaaaatttcggtggaggtaacacggcgtgggaagaaaaaacgctttctaaatatgaaagttccgagatccgcctgttggaaatactcgaaggtctctgtgagtctagtgacttcgaatgcaaccaaatgcttgaggctcaagaggagcatcttgaggcatggtggctccagctgaagtccgagtaccctgacctgtttgagtggttttgtgttaaaaccctgaaggtgtgctgttcccctggcacctacggaccggactgcttagcatgtcagggagggtcccagagaccatgttctggaaacggccattgtagcggcgacggatcgaggcagggtgacggtagctgtagatgtcatatgggttaccagggccccctgtgcaccgattgcatggatggttatttttccagtctccggaacgaaacacactctatatgcacagcctgcgatgaatcttgtaagacttgctctggcttaacgaatcgagattgcggagaatgcgaggtaggttgggtattagatgagggtgcctgtgtcgatgtcgatgagtgtgcggcagaaccaccaccatgcagcgcagcccagttctgcaaaaacgccaatggtagctacacctgtgaggagtgcgactcctcttgcgtcggttgtaccggcgaagggcctgggaactgtaaagaatgtatcagcggatatgcccgagagcacggacagtgtgcggacgttgacgaatgctcactcgcagagaaaacatgcgtacggaaaaacgaaaactgttataatacgcctggctcctatgtgtgtgtatgtcccgacgggtttgaggagacggaagatgcttgtgtgccaccggccgaagctgaagctaccgaaggagagtccccaacccaactgccttcacgcgaggacctgtag

SEQ ID NO: 215119 - DNA, 1062 bp, Artificial Sequence
  derived and/or modified sequence
atgagactgcccagaagagccgccctgggcctgctgcccctgctgctgctgctgccccccgcccccgaggccgccaagaagcccaccccctgccacagatgcagaggcctggtggacaagttcaaccagggcatggtggacaccgccaagaagaacttcggcggcggcaacaccgcctgggaggagaagaccctgagcaagtacgagagcagcgagatcagactgctggagatcctggagggcctgtgcgagagcagcgacttcgagtgcaaccagatgctggaggcccaggaggagcacctggaggcctggtggctgcagctgaagagcgagtaccccgacctgttcgagtggttctgcgtgaagaccctgaaggtgtgctgcagccccggcacctacggccccgactgcctggcctgccagggcggcagccagagaccctgcagcggcaacggccactgcagcggcgacggcagcagacagggcgacggcagctgcagatgccacatgggctaccagggccccctgtgcaccgactgcatggacggctacttcagcagcctgagaaacgagacccacagcatctgcaccgcctgcgacgagagctgcaagacctgcagcggcctgaccaacagagactgcggcgagtgcgaggtgggctgggtgctggacgagggcgcctgcgtggacgtggacgagtgcgccgccgagccccccccctgcagcgccgcccagttctgcaagaacgccaacggcagctacacctgcgaggagtgcgacagcagctgcgtgggctgcaccggcgagggccccggcaactgcaaggagtgcatcagcggctacgccagagagcacggccagtgcgccgacgtggacgagtgcagcctggccgagaagacctgcgtgagaaagaacgagaactgctacaacacccccggcagctacgtgtgcgtgtgccccgacggcttcgaggagaccgaggacgcctgcgtgccccccgccgaggccgaggccaccgagggcgagagccccacccagctgcccagcagagaggacctgtag

SEQ ID NO: 215120 - DNA, 1357 bp, Artificial Sequence
  derived and/or modified sequence
gcggccgggaggccggagcagcacggccgcaggacctggagctccggctgcgtcttcccgcagcgctacccgccatgcgcctgccgcgccgggccgcgctggggctcctgccgcttctgctgctgctgccgcccgcgccggaggccgccaagaagccgacgccctgccaccggtgccgggggctggtggacaagtttaaccaggggatggtggacaccgcaaagaagaactttggcggcgggaacacggcttgggaggaaaagacgctgtccaagtacgagtccagcgagattcgcctgctggagatcctggaggggctgtgcgagagcagcgacttcgaatgcaatcagatgctagaggcgcaggaggagcacctggaggcctggtggctgcagctgaagagcgaatatcctgacttattcgagtggttttgtgtgaagacactgaaagtgtgctgctctccaggaacctacggtcccgactgtctcgcatgccagggcggatcccagaggccctgcagcgggaatggccactgcagcggagatgggagcagacagggcgacgggtcctgccggtgccacatggggtaccagggcccgctgtgcactgactgcatggacggctacttcagctcgctccggaacgagacccacagcatctgcacagcctgtgacgagtcctgcaagacgtgctcgggcctgaccaacagagactgcggcgagtgtgaagtgggctgggtgctggacgagggcgcctgtgtggatgtggacgagtgtgcggccgagccgcctccctgcagcgctgcgcagttctgtaagaacgccaacggctcctacacgtgcgaagagtgtgactccagctgtgtgggctgcacaggggaaggcccaggaaactgtaaagagtgtatctctggctacgcgagggagcacggacagtgtgcagatgtggacgagtgctcactagcagaaaaaacctgtgtgaggaaaaacgaaaactgctacaatactccagggagctacgtctgtgtgtgtcctgacggcttcgaagaaacggaagatgcctgtgtgccgccggcagaggctgaagccacagaaggagaaagcccgacacagctgccctcccgcgaagacctgtaatgtgccggacttaccctttaaattattcagaaggatgtcccgtggaaaatgtggccctgaggatgccgtctcctgcagtggacagcggcggggagaggctgcctgctctctaacggttgattctcatttgtcccttaaacagctgcatttcttggttgttcttaaacagacttgtatattttgatacagttctttgtaataaaattgaccattgtaggtaa

SEQ ID NO: 215121 - DNA, 1062 bp, Artificial Sequence
  derived and/or modified sequence
atgaggctcccgaggcgagccgcgttaggtctgctcccgctgcttctacttctacctccagcacccgaagccgctaagaagcccacaccgtgccatcgatgtaggggattggtcgacaagttcaatcagggcatggttgatacagcgaagaaaaactttgggggggggaacacagcctgggaagagaaaactttgtcaaaatacgaatcttcggagatccgtctgcttgaaattttggagggtctgtgcgagtcttcagatttcgagtgcaaccaaatgttggaggcccaggaagagcacctcgaggcctggtggctccaactgaaatcagagtaccctgatctctttgagtggttctgcgtcaagacactgaaggtgtgctgctctccaggcacttatggacccgactgcctagcttgccaaggcggttcacagcggccatgcagcggcaatgggcactgttccggagacggctccaggcagggggacggctcttgcagatgtcacatgggctaccaggggccactgtgcacggattgtatggatggatacttcagttcacttagaaacgagactcacagtatttgcacagcttgcgacgaaagctgcaagacgtgctctggattaacaaaccgagactgcggagaatgcgaagtagggtgggtgttggatgagggcgcctgtgtagatgttgatgaatgcgccgcagagccccccccatgttcagcagcccagttttgtaagaacgcaaacgggtcgtacacttgcgaggagtgcgacagttcttgtgtggggtgtacgggagaaggacctggtaactgtaaggagtgtatttccggctacgctcgtgaacacggccagtgcgctgatgtggacgaatgctccttggccgaaaaaacttgtgtccggaagaatgagaactgttacaacacccccgggtcctacgtctgtgtttgccccgatggattcgaagagaccgaagatgcttgcgtgccacccgccgaagctgaagctaccgagggcgagagtccaacacaactaccatctcgcgaagacttgtag

SEQ ID NO: 215122 - DNA, 1062 bp, Artificial Sequence
  derived and/or modified sequence
atgaggctgcccaggagagctgccctgggcctgctgcccctgctgctgctgctgcccccagcccctgaggccgccaagaagcccaccccctgccaccgctgccggggcctggtggacaagttcaaccagggcatggtggacacagccaagaagaactttggaggcggcaacacagcctgggaggagaagaccctgagcaaatatgagagcagcgagatccggctgctggagatcctggagggcctgtgtgagagcagtgactttgagtgcaaccagatgctggaggcccaggaggagcacctggaggcctggtggctgcagctgaagtctgagtacccagacctgtttgagtggttctgtgtgaagaccctgaaggtgtgctgcagccctggcacctacggccctgactgcctggcctgccagggcggcagccagaggccctgcagcggaaatggccactgcagcggagatggcagccggcagggagatggcagctgccgctgccacatgggctaccagggccccctgtgcacagactgcatggatggctacttcagcagcctgagaaatgagacccacagcatctgcacagcctgtgatgagagctgcaagacctgcagcggcctgaccaacagagactgtggggagtgtgaggtgggctgggtgctggatgagggcgcctgtgtggatgtggatgaatgtgccgctgagcccccaccctgcagcgctgcccagttctgcaagaatgccaacggcagctacacctgtgaggagtgtgacagcagctgtgtgggctgcacaggagagggccctggcaactgcaaggagtgcatcagcggctacgcccgggagcacggccagtgtgctgatgtggatgaatgttccctggccgagaagacctgtgtgaggaagaatgaaaactgctacaacaccccaggcagctatgtgtgtgtgtgcccagatggctttgaggagacagaagatgcctgtgtgcccccagctgaggccgaggccacagaaggagagagccccacccagctgcccagccgggaggacctgtag

SEQ ID NO: 215123 - DNA, 1062 bp, Artificial Sequence
  derived and/or modified sequence
atgcggctgccccggcgggccgccctgggcctgctgcccctgctgcttctgttgccccccgcacccgaggcagccaagaagcctaccccctgccacagatgccggggcctggttgataagtttaaccagggtatggtcgatactgcaaaaaaaaactttggcggtggcaacacagcttgggaggagaagaccttatcaaagtatgaaagttccgaaattcgcttgctagaaatcctcgagggcctgtgtgaatctagtgatttcgagtgcaatcagatgttggaggctcaagaggaacatctggaggcctggtggctgcagctgaagtccgagtaccctgacctgttcgagtggttttgtgtgaagaccttgaaagtgtgttgctctccggggacatatgggcccgattgtctcgcatgccagggaggcagccagaggccatgctccggcaacggccattgttcaggcgatggctccaggcagggagacgggagttgccggtgtcatatggggtatcaaggaccactttgcacagattgtatggatgggtacttcagcagcctgcgcaacgaaacacacagcatttgtaccgcatgtgacgaatcatgcaagacctgctccggcctcacgaaccgggactgtggtgagtgtgaggtggggtgggtgctggacgaaggagcctgtgtcgacgtggacgaatgtgccgctgaaccacccccttgcagcgcggctcaattctgcaaaaacgcaaatggtagttacacttgcgaggaatgcgattcgtcctgtgtgggctgcacaggagaagggccagggaactgcaaggaatgtatatcaggatacgcccgagaacacggccagtgtgctgatgtggatgaatgctccctcgctgagaaaacctgtgtgaggaaaaacgaaaattgttacaacacacctggcagctacgtgtgtgtgtgtccagatggattcgaggaaacagaggatgcctgtgttcccccagccgaggcagaggcaaccgaaggtgaaagccccactcaactgccgagcagggaagatctgtag

SEQ ID NO: 215124 - RNA, 1062 nt, Artificial Sequence
  derived and/or modified sequence
augcgccugccaaggagggccgcauugggauuacugccguugcuccuccuucuuccgccagcuccugaggcugccaaaaagcccacaccuugucaccggugccggggacugguggacaaguucaaccaaggaaugguggacaccgcgaaaaagaauuucggagggggaaauacagcuugggaagaaaagacacucucuaaguaugaaaguagcgagauccgcuugcuagaaauucucgagggucugugcgagucaagcgacuucgagugcaaccagauguuagaagcccaggaagaacaccuugaagcgugguggcuucagcugaagagcgaguauccagaccuguucgaaugguucugcguuaagacccugaagguuugcugcucacccggcaccuacgguccagacuguuuggcaugucaaggagggagccagagacccugcuccggaaauggccacuguuccggcgacgggagccgacagggugacggcaguugccgaugucacaugggcuaccagggcccuuuaugcaccgauuguauggacggauacuuuagcagcuugcgaaacgagacgcauucaaucugcacagcuugugacgaaucauguaaaaccuguucugggcugacaaaccgggauuguggugagugugaaguugguugggugcuggacgagggcgcguguguggauguggaugaaugugccgcagagccaccccccugcuccgccgcucaguucuguaagaaugcaaacggaucguauacgugcgaagagugugacagcucuugcguggguugcacaggugaaggaccaggaaacugcaaggaaugcauaucuggcuacgcuagggagcacggacagugcgcagauguggaugaguguucacuugcagagaaaaccugcguaaggaagaacgagaauugcuauaauacaccuggaucuuacguuugcgugugcccugacggguucgaggaaacagaggacgcaugugucccccccgcugaagccgaagcuacagaaggagagucaccuacucagcugccuuccagagaggaccucuag

SEQ ID NO: 215125 - RNA, 1062 nt, Artificial Sequence
  derived and/or modified sequence
augagguuaccccgcagggcagcacugggccugcuuccauuacugcuuuuauugccccccgcuccugaagcagcaaaaaaaccuacaccgugccaccgaugcagagggcuaguagauaaauuuaaccaggggauggucgauaccgcgaagaaaaauuucgguggagguaacacggcgugggaagaaaaaacgcuuucuaaauaugaaaguuccgagauccgccuguuggaaauacucgaaggucucugugagucuagugacuucgaaugcaaccaaaugcuugaggcucaagaggagcaucuugaggcaugguggcuccagcugaaguccgaguacccugaccuguuugagugguuuuguguuaaaacccugaaggugugcuguuccccuggcaccuacggaccggacugcuuagcaugucagggagggucccagagaccauguucuggaaacggccauuguagcggcgacggaucgaggcagggugacgguagcuguagaugucauauggguuaccagggcccccugugcaccgauugcauggaugguuauuuuuccagucuccggaacgaaacacacucuauaugcacagccugcgaugaaucuuguaagacuugcucuggcuuaacgaaucgagauugcggagaaugcgagguagguuggguauuagaugagggugccugugucgaugucgaugagugugcggcagaaccaccaccaugcagcgcagcccaguucugcaaaaacgccaaugguagcuacaccugugaggagugcgacuccucuugcgucgguuguaccggcgaagggccugggaacuguaaagaauguaucagcggauaugcccgagagcacggacagugugcggacguugacgaaugcucacucgcagagaaaacaugcguacggaaaaacgaaaacuguuauaauacgccuggcuccuauguguguguaugucccgacggguuugaggagacggaagaugcuugugugccaccggccgaagcugaagcuaccgaaggagaguccccaacccaacugccuucacgcgaggaccuguag

SEQ ID NO: 215126 - DNA, 891 bp, Artificial Sequence
  derived and/or modified sequence
atggagcccagcggcggcgagcaggagcccggcgccgtgagattcctggacctgccctgggaggacgtgctgctgccccacgtgctgaacagagtgcccctgagacagctgctgagactgcagagagtgagcagagccttcagaagcctggtgcagctgcacctggccggcctgagaagattcgacgccgcccaggtgggcccccagatccccagagccgccctggccagactgctgagagacgccgagggcctgcaggagctggccctggccccctgccacgagtggctgagcgacgaggacctggtgcccgtgctggccagaaacccccagctgagaagcgtggccctgggcggctgcggccagctgagcagaagagccctgggcgccctggccgagggctgccccagactgcagagactgagcctggcccactgcgactgggtggacggcctggccctgagaggcctggccgacagatgccccgccctggaggagctggacctgaccgcctgcagacagctgaaggacgaggccatcgtgtacctggcccagagaagaggcgccggcctgagaagcctgagcctggccgtgaacgccaacgtgggcgacgccgccgtgcaggagctggccagaaactgccccgagctgcaccacctggacctgaccggctgcctgagagtgggcagcgacggcgtgagaaccctggccgagtactgccccgtgctgagaagcctgagagtgagacactgccaccacgtggccgagagcagcctgagcagactgagaaagagaggcgtggacatcgacgtggagccccccctgcaccaggccctggtgctgctgcaggacatggccggcttcgcccccttcgtgaacctgcaggtgtag

SEQ ID NO: 215127 - DNA, 612 bp, Artificial Sequence
  derived and/or modified sequence
atggagccccccatggagcccagcggcggcgagcaggagcccggcgccgtgagattcctggacctgccctgggaggacgtgctgctgccccacgtgctgaacagagtgcccctgagacagctgctgagactgcagagagtgagcagagccttcagaagcctggtgcagctgcacctggccggcctgagaagattcgacgccgcccaggtgggcccccagatccccagagccgccctggccagactgctgagagacgccgagggcctgcaggagctggccctggccccctgccacgagtggctgagcgacgaggacctggtgcccgtgctggccagaaacccccagctgagaagcgtggccctgggcggctgcggccagctgagcagaagagccctgggcgccctggccgagggctgccccagactgcagagactgagcctggcccactgcgactgggtggacggcctggccctgagaggcctggccgacagatgccccgccctggaggagctggacctgaccgcctgcagacagctgaaggacgaggccatcgtgtacctggcccagagaagaggcgccggcctgagaagcctgagcctggccgtgaactag

SEQ ID NO: 215128 - DNA, 573 bp, Artificial Sequence
  derived and/or modified sequence
atggagccccccatggagcccagcggcggcgagcaggagcccggcgccgtgagattcctggacctgccctgggaggacgtgctgctgccccacgtgctgaacagagtgcccctgagacagctgctgagactgcagagagtgagcagagccttcagaagcctggtgcagctgcacctggccggcctgagaagattcgacgccgcccaggtgggcccccagatccccagagccgccctggccagactgctgagagacgccgagggcctgcaggagctggccctggccccctgccacgagtggctgagcgacgaggacctggtgcccgtgctggccagaaacccccagctgagaagcgtggccctgggcggctgcggccagctgagcagaagagccctgggcgccctggccgagggctgccccagactgcagagactgagcctggcccactgcgactgggtggacggcctggccctgagaggcctggccgacagatgccccgccctggaggagctggacctgaccgcctgcagacagctgaaggacgaggccatcgtgtacctggcccagagatag

SEQ ID NO: 215129 - DNA, 627 bp, Artificial Sequence
  derived and/or modified sequence
atggagccccccatggagcccagcggcggcgagcaggagcccggcgccgtgagattcctggacctgccctgggaggacgtgctgctgccccacgtgctgaacagagtgcccctgagacagctgctgagactgcagagagtgagcagagccttcagaagcctggtgcagctgcacctggccggcctgagaagattcgacgccgcccaggtgggcccccagatccccagagccgccctggccagactgctgagagacgccgagggcctgcaggagctggccctggccccctgccacgagtggctgagcgacgaggacctggtgcccgtgctggccagaaacccccagctgagaagcgtggccctgggcggctgcggccagctgagcagaagagccctgggcgccctggccgagggctgccccagactgcagagactgagcctggcccactgcgactgggtggacggcctggccctgagaggcctggccgacagatgccccgccctggaggagctggacctgaccgcctgcagacagctgaaggacgaggccatcgtgtacctggcccagagaagaggcgccggcctgagaagcctgagcctggccgtgaacgccaacgtgggcgactag

SEQ ID NO: 215130 - DNA, 891 bp, Artificial Sequence
  derived and/or modified sequence
atggaaccttccggcggcgaacaggagcctggcgcagtgagattcttagatctgccttgggaagacgtgctactgccccatgtgctgaatcgcgtcccccttcgacagttgctcagacttcagcgagtgtcacgggcatttcgatctttggtgcagctgcacctcgctggattgcggagattcgacgccgcccaggttggcccgcaaattccacgcgctgcattggctcgccttctgcgcgacgcagaaggcctccaagagcttgcactagcaccctgccacgagtggctgtccgacgaagacttggtgcctgtactggcccgcaacccacagctgaggtctgtggctcttggtggatgcggtcagctgtcaagacgtgctctcggtgctctcgccgaggggtgtcctcgcctccagcgtctgtctctggcacactgcgactgggtggacggactggccttgcgcgggctggctgaccgctgtcctgccctcgaggagctcgacctgactgcatgtaggcagctcaaggacgaggccatagtgtacctggcccagcgccgaggagctggtctacgttccctgtccctggctgtaaacgccaatgtaggggacgccgccgtccaggagctggctaggaattgccccgaactgcaccacctggatctgactggatgcctgagagtcggttccgacggcgtcagaacgctcgcagagtattgccctgtactcaggtctctgagggtaagacactgtcaccatgtggccgagtcgtcgctcagtcgcctgcggaaaaggggcgttgatatcgatgtggaacctccactgcaccaggcattggtgctgttacaagatatggcaggcttcgctccgtttgtaaatctgcaggtttag

SEQ ID NO: 215131 - DNA, 612 bp, Artificial Sequence
  derived and/or modified sequence
atggaacctccaatggagccctctggcggggagcaggagcctggcgcagtgcgtttccttgacctgccatgggaagacgtgctcctgccacacgtgctgaacagagtgcctctgagacagcttctgcgactgcagagggtatcacgcgcctttcggagcttggtgcagctacaccttgcaggcctgagaaggttcgatgccgcccaggtggggcctcagattccgagggcagcgctggcccgccttctccgagatgcagagggcctgcaggaactggcccttgcaccctgccacgaatggctgtcggacgaggatctggtccccgtgctcgccaggaacccacaacttagaagcgtggcgctggggggatgtggacaattatcgcgccgtgccctcggggctctggcagaaggatgtcccaggctgcaaaggttgagtctggcacattgtgattgggtggacggccttgccctaaggggattggccgaccgctgccccgctctagaggagctcgatttaacggcgtgccgccagctgaaggatgaggcaatagtctacctggctcagcgcagaggggctgggttacgttcactgagcttagcagtgaattag

SEQ ID NO: 215132 - DNA, 573 bp, Artificial Sequence
  derived and/or modified sequence
atggagcccccaatggaaccgtcaggaggggagcaggagcccggtgccgttcggtttttggacctgccctgggaagacgtcttgctcccacacgtgctgaacagggttccgttacgccagctgctgaggctgcagagggtaagccgtgcgtttcgctcactggtccagttacacctggccgggctacgacggtttgatgcggcccaggtgggccctcagattccacgggccgcactggcccgcctcttgcgcgatgcagaagggctgcaggaactggccttggctccgtgtcacgaatggctgtccgatgaggacctggtccctgtgcttgcccggaatcctcagcttcggagcgttgcacttgggggttgtggccagttatctcgaagggctctgggcgctctggctgagggctgtcccagactacagcggctgagcctggcgcactgtgactgggtggatggcctagctcttcgggggctggccgacagatgtccagccctcgaagagttggatttgacagcctgccggcagttgaaggacgaagcaattgtttacctggcgcagcgatag

SEQ ID NO: 215133 - DNA, 627 bp, Artificial Sequence
  derived and/or modified sequence
atggagccaccaatggaaccatcaggcggagaacaggagcctggcgcggtcagattcctcgatctcccatgggaggacgtgcttctgccccacgtgttgaatcgcgttcccctccgtcaactgctaaggctacagcgcgtctcccgagccttccgttccctggtccagctgcacttggctggactgcggcgcttcgacgccgcacaagtcgggccccaaataccacgcgctgcgttggcacgactcctaagggatgcagaggggctccaggagctggctctggcgccatgtcacgaatggttgtccgacgaggacctagttccagtgctcgctcgcaatccacagctgcgatccgtagctctcgggggatgtggccagctgtctagacgcgctttgggcgctctggccgaagggtgtccccgcctgcagcgcctgtccctggctcactgtgattgggtggatggcctggcgctgcgcgggctggctgatagatgtcccgccttagaggaactcgatcttactgcttgtcggcaattgaaagacgaggcaatcgtgtacctggcacagaggaggggcgccggactccgctcattatcactggccgtgaatgcaaacgtaggagactag

SEQ ID NO: 215134 - DNA, 891 bp, Artificial Sequence
  derived and/or modified sequence
atggagcccagcggcggggagcaggagcccggggctgtgcgcttcctggacctgccctgggaggatgtgctgctgccccacgtgctgaacagagtgcccctgcggcagctgctgcggctgcagagggtgtcccgggccttccgcagcctggtgcagctgcacctggccggcctgcggagatttgatgctgcccaggtgggcccccagatccccagggctgccctggcccggctgctgagagatgctgagggcctgcaggagctggccctggccccctgccacgagtggctgagtgatgaggacctggtgcctgtgctggccaggaacccccagctgcggtctgtggccctgggcggctgcggccagctgagcagaagagccctgggcgccctggccgagggctgcccccggctgcagaggctgagcctggcccactgtgactgggtggatggcctggccctgcggggcctggccgaccgctgcccagccctggaggagctggacctgacagcctgccggcagctgaaggatgaggccatcgtgtacctggcccagaggagaggagctggcctgcggagcctgagcctggccgtgaatgccaacgtgggagatgctgctgtgcaggagctggccaggaactgcccagagctgcaccacctggacctgaccggctgcctgcgggtgggcagtgatggagtgaggaccctggccgagtactgccctgtgctgcggagcctgcgggtgcgccactgccaccacgtggccgagagcagcctgagccggctgaggaagaggggcgtggacattgatgtggagccccccctgcaccaggccctggtgctgctgcaggacatggccggctttgccccctttgtgaacctgcaggtgtag

SEQ ID NO: 215135 - DNA, 612 bp, Artificial Sequence
  derived and/or modified sequence
atggagccccccatggagcccagcggcggggagcaggagcccggggctgtgcgcttcctggacctgccctgggaggatgtgctgctgccccacgtgctgaacagagtgcccctgcggcagctgctgcggctgcagagggtgtcccgggccttccgcagcctggtgcagctgcacctggccggcctgcggagatttgatgctgcccaggtgggcccccagatccccagggctgccctggcccggctgctgagagatgctgagggcctgcaggagctggccctggccccctgccacgagtggctgagtgatgaggacctggtgcctgtgctggccaggaacccccagctgcggtctgtggccctgggcggctgcggccagctgagcagaagagccctgggcgccctggccgagggctgcccccggctgcagaggctgagcctggcccactgtgactgggtggatggcctggccctgcggggcctggccgaccgctgcccagccctggaggagctggacctgacagcctgccggcagctgaaggatgaggccatcgtgtacctggcccagaggagaggagctggcctgcggagcctgagcctggccgtgaactag

SEQ ID NO: 215136 - DNA, 573 bp, Artificial Sequence
  derived and/or modified sequence
atggagccccccatggagcccagcggcggggagcaggagcccggggctgtgcgcttcctggacctgccctgggaggatgtgctgctgccccacgtgctgaacagagtgcccctgcggcagctgctgcggctgcagagggtgtcccgggccttccgcagcctggtgcagctgcacctggccggcctgcggagatttgatgctgcccaggtgggcccccagatccccagggctgccctggcccggctgctgagagatgctgagggcctgcaggagctggccctggccccctgccacgagtggctgagtgatgaggacctggtgcctgtgctggccaggaacccccagctgcggtctgtggccctgggcggctgcggccagctgagcagaagagccctgggcgccctggccgagggctgcccccggctgcagaggctgagcctggcccactgtgactgggtggatggcctggccctgcggggcctggccgaccgctgcccagccctggaggagctggacctgacagcctgccggcagctgaaggatgaggccatcgtgtacctggcccagaggtag

SEQ ID NO: 215137 - DNA, 627 bp, Artificial Sequence
  derived and/or modified sequence
atggagccccccatggagcccagcggcggggagcaggagcccggggctgtgcgcttcctggacctgccctgggaggatgtgctgctgccccacgtgctgaacagagtgcccctgcggcagctgctgcggctgcagagggtgtcccgggccttccgcagcctggtgcagctgcacctggccggcctgcggagatttgatgctgcccaggtgggcccccagatccccagggctgccctggcccggctgctgagagatgctgagggcctgcaggagctggccctggccccctgccacgagtggctgagtgatgaggacctggtgcctgtgctggccaggaacccccagctgcggtctgtggccctgggcggctgcggccagctgagcagaagagccctgggcgccctggccgagggctgcccccggctgcagaggctgagcctggcccactgtgactgggtggatggcctggccctgcggggcctggccgaccgctgcccagccctggaggagctggacctgacagcctgccggcagctgaaggatgaggccatcgtgtacctggcccagaggagaggagctggcctgcggagcctgagcctggccgtgaatgccaacgtgggggactag

SEQ ID NO: 215138 - DNA, 891 bp, Artificial Sequence
  derived and/or modified sequence
atggagcccagcggcggcgagcaggagcccggcgccgtgcggttccttgacctgccctgggaggacgtgttgctgccccacgttcttaacagggttcctctgcgccagttactcagactgcaaagggtatcccgggcctttcgcagcctggtacagctccacttggctggccttaggagattcgacgccgcccaggtggggccccagattcctcgcgccgccctggccagactgctgcgcgatgccgaagggctgcaagaactggccttggccccatgtcacgagtggctgtccgatgaggatctagtgccggtactggcccggaaccctcagctcaggtctgtggccctaggcggttgtgggcaactttctagacgggccttaggagccttggcagaagggtgcccacgcctccagcgcctgtccctagcacattgtgattgggtggacgggcttgcactgagaggcctagctgataggtgccccgccctggaggaattggatctgacagcttgccggcaacttaaggacgaggctattgtctacctggcccagcgtcgtggcgccggtctacgcagcttgagtctggcggtgaacgccaatgttggagacgcggccgtacaggagctggctaggaattgcccagagctccaccacctggatctaacaggatgcctgcgcgtaggaagcgacggagtgcgaaccctggccgaatactgcccagtccttcggagtttgcgagtcagacactgccatcatgtcgcagagagttctctatcccgtttgcgaaagcgaggtgtggacatcgacgtggaaccaccgctccatcaggctttggtcctgctgcaagacatggcaggtttcgccccgttcgtcaatctccaggtctag

SEQ ID NO: 215139 - DNA, 612 bp, Artificial Sequence
  derived and/or modified sequence
atggagccccccatggagcccagcggcggcgagcaggagcccggcgctgtgcgatttcttgatttgccttgggaggacgtactgttgcctcacgtattgaacagagtgcctttacggcaattgctgagactgcagcgagttagccgtgcctttagatcactagtgcagctgcaccttgctggcttacgccgcttcgatgcagcacaggtgggcccccagattccaagggccgcacttgcccggctgctgagagatgctgaggggcttcaggagctcgccttggctccctgtcatgaatggctatcagatgaggacttggtgccagtgttagccaggaatcctcaattaaggtcagttgctctcggtgggtgcggacagttgagcagaagggcattgggggccctcgctgaggggtgtcctagactccagagactgagtctcgcacactgtgattgggtcgacggcttggccttaagaggtctggctgacaggtgtccggctctggaggagctcgacctgactgcatgtaggcagctgaaagatgaagcgattgtgtaccttgcccaacggcgcggcgctggactcagaagtttaagcctggctgttaactag

SEQ ID NO: 215140 - DNA, 573 bp, Artificial Sequence
  derived and/or modified sequence
atggagccccccatggagcccagcggcggcgagcaggagcccggcgctgtgcgcttcctggatctcccgtgggaggatgtactgttgccgcatgtgctcaatagggtaccccttagacagttgctgagactgcaacgggtgtcccgagcgtttcgtagtttggttcaattgcatctggccggcttgcgcaggtttgatgcagcacaggtaggaccacagattccacgtgcagccctggcacgcctgctcagagatgcagagggcctgcaagaattggcccttgcaccgtgccacgaatggcttagcgacgaagacctcgtgccagtcctggcacggaacccgcagctgcgctccgttgccctggggggttgcgggcagctgtcaaggcgcgctcttggggctctggcggaggggtgtcccaggctacaaaggctctccctggcccattgcgactgggtggacggtctcgccctgagagggctggctgaccggtgccctgcacttgaagaacttgaccttacggcatgccggcagttaaaagacgaggcaatagtgtacctggctcagaggtag

SEQ ID NO: 215141 - DNA, 627 bp, Artificial Sequence
  derived and/or modified sequence
atggagccccccatggagcccagcggcggcgagcaggagcccggcgctgtgaggtttctggatctaccatgggaggacgtcctgctgcctcacgtgctcaacagagtacccctgcgccagttgttacggctccagagagttagccgcgcattcaggagtctagtgcaactgcaccttgcaggcctcaggagattcgacgcagcacaagtaggccctcaaatccccagggcagctcttgcacgtctgctcagagacgctgagggtctgcaggagttggccctcgcaccttgtcatgagtggctctctgatgaagatctggtgcccgtactggcgcgaaacccccaactcaggtccgtggcactagggggatgcggtcagctgtctcgacgagctctaggagccctggctgaaggttgtcccaggcttcaaaggctgagcctcgcgcactgcgattgggtagatggactcgcactccggggcctggcagataggtgcccagccctggaggagctcgatttgaccgcctgtagacagctcaaggacgaggctatcgtctatctagcacagcgccgcggtgcaggacttcgaagcctgagtctggctgtcaacgcaaacgtgggagattag

SEQ ID NO: 215142 - DNA, 891 bp, Artificial Sequence
  derived and/or modified sequence
atggagccctcaggaggtgaacaggagccaggggcagtaaggtttctagacttgccttgggaggacgtgctgcttcctcacgtcctcaaccgggtgccactgagacagcttctgaggctccagagagtatctagggcatttaggtccttggttcagctgcacctggccggactgaggcgattcgacgcggcacaagtggggcctcagattccaagggcggctttggcgagactgctgcgagatgctgagggcctccaagagctggctctggcaccctgccacgagtggctcagcgatgaggatttggtccctgtgctggcaagaaacccacaactgcgatcggtcgccctcggcggttgcgggcagttgagcagaagagctcttggagcgctggctgaaggctgtcccagactacaaagactcagcctcgcccattgcgattgggtggatggactagccctccgaggcctggccgacagatgcccagcgttggaggaactcgatctgacagcgtgtcgccagctgaaggacgaggccatagtatatttggcgcagcggaggggcgctggccttcgctccttgtcgttggctgtcaatgccaacgtgggggatgctgccgtgcaggagttagccaggaattgtcccgaattgcatcatctcgatctgaccgggtgtctccgggtcggatcggatggggtgcggactttggctgagtattgtcccgtgctccggagccttcgtgtccggcactgccaccatgtcgctgagtcctcattgagtcggctgcgaaagagaggcgtcgatattgacgtggaacctccactgcaccaggccttggttctcttgcaggacatggccggttttgcaccattcgtgaatctgcaggtttag

SEQ ID NO: 215143 - DNA, 612 bp, Artificial Sequence
  derived and/or modified sequence
atggagccacctatggagccgtccggaggcgaacaggagccgggtgccgtcaggttcctcgacctaccttgggaagacgtgctgctgccacacgtgctgaatcgggtgcctctcagacagctgctgagactgcagagagtgtctagagccttccggtcactcgtgcagctgcacttagccggactgcgcaggttcgacgccgcacaagttggaccacagatccccagagccgctttggctaggttgctccgcgacgccgaggggcttcaggagttggctctcgccccttgtcatgaatggttgtcagacgaggacctcgtaccagttctcgcccgaaatccacaattgagaagcgtcgcccttggtggctgtggccagctcagccgtagggcacttggtgctctggccgaggggtgccctcgcctccagcggcttagcctggcacactgcgattgggtcgacgggctggcactgcgtggtctggcagacaggtgccctgcactagaagaactcgacctcacagcctgccgccagctcaaagacgaggcgatagtgtatctcgcccaacgtaggggagccggacttcgaagcctctccctagccgtgaactag

SEQ ID NO: 215144 - DNA, 573 bp, Artificial Sequence
  derived and/or modified sequence
atggaaccccctatggaaccaagtgggggtgagcaggaaccgggagccgtgcgctttttggatctcccatgggaggatgtacttcttccccatgtcctgaatagagtgccactgcgtcagctgttgcggttgcagcgcgtctcaagagcgtttcgaagtctggtgcagctgcatctggcagggctgagaaggttcgatgcagctcaagtggggccacagattcccagggccgctctggcgagactcctgcgagatgcagaaggtcttcaggaactggcactggcaccgtgtcatgaatggctgtccgacgaagatttagtccccgtcttagccagaaatccgcaactgcggagtgtcgctctcgggggttgcggacagttatcccgacgggctctgggagcactcgccgaaggttgtccaagactacagcggctctcgctggcgcactgcgattgggtagacggcctggcgcttcggggtctggccgacagatgccctgctctggaggagctggatctcaccgcatgtcgccagctgaaggatgaggctatcgtctacttagcacaacggtag

SEQ ID NO: 215145 - DNA, 627 bp, Artificial Sequence
  derived and/or modified sequence
atggagccaccgatggagccatcaggtggagaacaggagcccggtgccgttcgctttctggatctgccatgggaggatgtgctgcttccgcatgtgctcaatcgagtgccactgcggcagctcctgaggctacagagggtcagcagagcctttcgatcgctggtgcaactccatctggccggtctgagacgatttgacgccgctcaggtcggtccccaaataccccgtgctgccttagctcgtctgttacgcgacgctgaggggctgcaggagctcgccttggcaccgtgccatgagtggctctcggacgaagacttggtcccagtcctggcaagaaatccccagctgcgttctgtagcgttgggcggatgcggacaactcagccgaagggcccttggggctctggccgagggatgtcccagactccagcggctctcccttgcccactgcgactgggtcgacggcttggccctgaggggactagcagatagatgccctgcactggaagaactggatctgactgcgtgcagacagcttaaggacgaggcgattgtttacctggcccaaagaaggggcgcaggccttaggagtctgtcgctggcagtcaatgctaacgtgggcgactag

SEQ ID NO: 215146 - DNA, 903 bp, Artificial Sequence
  derived and/or modified sequence
atggagccccccatggagcccagcggcggcgagcaggagcccggcgccgtgagattcctggacctgccctgggaggacgtgctgctgccccacgtgctgaacagagtgcccctgagacagctgctgagactgcagagagtgagcagagccttcagaagcctggtgcagctgcacctggccggcctgagaagattcgacgccgcccaggtgggcccccagatccccagagccgccctggccagactgctgagagacgccgagggcctgcaggagctggccctggccccctgccacgagtggctgagcgacgaggacctggtgcccgtgctggccagaaacccccagctgagaagcgtggccctgggcggctgcggccagctgagcagaagagccctgggcgccctggccgagggctgccccagactgcagagactgagcctggcccactgcgactgggtggacggcctggccctgagaggcctggccgacagatgccccgccctggaggagctggacctgaccgcctgcagacagctgaaggacgaggccatcgtgtacctggcccagagaagaggcgccggcctgagaagcctgagcctggccgtgaacgccaacgtgggcgacgccgccgtgcaggagctggccagaaactgccccgagctgcaccacctggacctgaccggctgcctgagagtgggcagcgacggcgtgagaaccctggccgagtactgccccgtgctgagaagcctgagagtgagacactgccaccacgtggccgagagcagcctgagcagactgagaaagagaggcgtggacatcgacgtggagccccccctgcaccaggccctggtgctgctgcaggacatggccggcttcgcccccttcgtgaacctgcaggtgtag

SEQ ID NO: 215147 - DNA, 903 bp, Artificial Sequence
  derived and/or modified sequence
atggagccaccaatggaacctagcggaggggaacaggagcccggggcagtaagattcctggacttaccgtgggaggacgtccttttacctcatgtcctgaatcgcgtccccttgcgccaactgctccggctgcagcgggttagcagagcctttcgatctctggtccagctccatctggctgggctacggagattcgacgccgctcaggtaggccctcagatcccgcgagcagcgttggcacggcttcttagagacgcggagggtctccaggagctcgctcttgccccctgtcacgagtggttgtccgatgaggacttggttccagtcctagcacggaacccacagctgcggtccgtcgcgctcggcggttgtgggcagttgagcaggagggccctcggagctctggccgaggggtgtccccgactgcaacgcttgtctctggctcactgtgactgggtcgacgggctggcactccgcggcttggcagaccggtgccctgcactggaagagttagatctgacagcttgtcgccagttaaaggacgaagctatcgtctacctggcccagagacggggagctgggctgagaagcttaagcctcgccgtcaacgcaaacgtcggagacgctgccgtacaggaactggctcgcaactgtcccgaactgcaccatttggacctcaccggatgtctcagggtggggtctgatggcgtacgcaccctggccgaatattgccctgttttaagaagtttacgcgtccgacactgtcaccatgtagctgaatccagcctctcacgcctacggaagcggggtgttgatatcgatgtagaaccacctctacaccaggccctagtgttgttacaggacatggcaggcttcgccccgtttgttaatctccaagtgtag

SEQ ID NO: 215148 - DNA, 903 bp, Artificial Sequence
  derived and/or modified sequence
atggagccccccatggagcccagcggcggggagcaggagcccggggctgtgcgcttcctggacctgccctgggaggatgtgctgctgccccacgtgctgaacagagtgcccctgcggcagctgctgcggctgcagagggtgtcccgggccttccgcagcctggtgcagctgcacctggccggcctgcggagatttgatgctgcccaggtgggcccccagatccccagggctgccctggcccggctgctgagagatgctgagggcctgcaggagctggccctggccccctgccacgagtggctgagtgatgaggacctggtgcctgtgctggccaggaacccccagctgcggtctgtggccctgggcggctgcggccagctgagcagaagagccctgggcgccctggccgagggctgcccccggctgcagaggctgagcctggcccactgtgactgggtggatggcctggccctgcggggcctggccgaccgctgcccagccctggaggagctggacctgacagcctgccggcagctgaaggatgaggccatcgtgtacctggcccagaggagaggagctggcctgcggagcctgagcctggccgtgaatgccaacgtgggagatgctgctgtgcaggagctggccaggaactgcccagagctgcaccacctggacctgaccggctgcctgcgggtgggcagtgatggagtgaggaccctggccgagtactgccctgtgctgcggagcctgcgggtgcgccactgccaccacgtggccgagagcagcctgagccggctgaggaagaggggcgtggacattgatgtggagccccccctgcaccaggccctggtgctgctgcaggacatggccggctttgccccctttgtgaacctgcaggtgtag

SEQ ID NO: 215149 - DNA, 903 bp, Artificial Sequence
  derived and/or modified sequence
atggagccccccatggagcccagcggcggcgagcaggagcccggcgccgttcgtttcctggacctcccctgggaggacgtgctcctaccgcatgtcttgaatcgggtgccgttgcgccagcttcttaggctccaacgcgtctcaagggcttttaggagcctagtccagctgcatctggcaggcctgagaaggtttgatgcagcccaggtaggtccccagattcctcgcgctgcgctggcccggctgctgagggacgccgagggactacaagaactcgccctcgcaccctgtcacgagtggctaagcgacgaagacctggtgcctgtgttagcccgtaatccccaactcaggtcagttgccctcggaggctgcggacaactaagtaggagagccttaggtgcactggcagaagggtgtcctcgcctgcagcggctgagtctcgctcattgtgactgggtggatgggcttgctcttagaggccttgctgacaggtgccctgctctagaggagctggacctaaccgcctgcagacagctaaaagatgaggcaatagtgtacctggcccagcggagaggcgccggcttgagaagcctttctctcgccgtcaatgccaatgtcggggacgccgcagtacaagagctggcccgaaactgtcctgagcttcaccatctggacctgacaggctgtcttagagtgggctctgatggagtcaggacattggctgagtattgccctgttttacgctccctgcgagttcgtcactgccatcacgtagccgagagttccctgtcaagactgcgtaaacgaggagtggacattgatgttgagcctccattgcaccaggccctggtgcttttgcaagacatggctggcttcgctccctttgtcaacttacaggtgtag

SEQ ID NO: 215150 - DNA, 903 bp, Artificial Sequence
  derived and/or modified sequence
atggaaccgccaatggagccgtccggaggagaacaagagccgggagccgtaaggtttctagacctgccctgggaagacgtgctgctgcctcatgtgctgaatagggttcccctccggcagttgctacggttacagcgggttagcagagccttcagatcactggtgcagttgcacctggccggactgcgcagattcgacgccgcacaggtcggtccacagattccaagggcagccctggctcgtctgctgagggatgcagaagggcttcaagaattggccctggctccctgccacgagtggctcagtgatgaggacctcgtccctgtgctggcacgtaatccgcagctccgttccgtggcgctcggcggatgcgggcagctcagcagaagagctctgggggctttggccgagggatgtccaaggctacagcgcctctctctggcccactgcgattgggtggacggcttggccctgcggggactggccgataggtgtcctgccctggaggaattggacctcaccgcatgtaggcagctcaaagatgaggccatagtctatctcgcccagaggaggggtgccggactgaggtctctgagcctggcagttaatgccaatgtcggagatgccgcagtgcaggagctcgccaggaattgtcctgagctgcaccatctcgacctgaccggctgccttcgcgtaggtagtgatggagtgaggacactggccgagtattgccccgtgctgagatcactccgtgtcagacactgccaccacgttgccgagtcttctttatcccgcttaaggaaaaggggtgtggatatcgatgtggagccaccattgcatcaagcactggttctgctccaggacatggctggctttgccccatttgtgaatctgcaggtgtag

SEQ ID NO: 215151 - protein, 811 aa, Artificial Sequence
  derived and/or modified sequence
MPKPPKPRNNLEDRHNPGIQGRREHRPGPGRVRAASSPGGSAPRAERRLWGEGWESGAAPHPHSSRVSALRPCGVVGAWVGMGVCQRTRAPWKEKSQLERAALGFRKGGSGMFASGWNQTVPIEEAGSMAALLLLPLLLLLPLLLLKLHLWPQLRWLPADLAFAVRALCCKRALRARALAAAAADPEGPEGGCSLAWRLAELAQQRAAHTFLIHGSRRFSYSEAERESNRAARAFLRALGWDWGPDGGDSGEGSAGEGERAAPGAGDAAAGSGAEFAGGDGAARGGGAAAPLSPGATVALLLPAGPEFLWLWFGLAKAGLRTAFVPTALRRGPLLHCLRSCGARALVLAPEFLESLEPDLPALRAMGLHLWAAGPGTHPAGISDLLAEVSAEVDGPVPGYLSSPQSITDTCLYIFTSGTTGLPKAARISHLKILQCQGFYQLCGVHQEDVIYLALPLYHMSGSLLGIVGCMGIGATVVLKSKFSAGQFWEDCQQHRVTVFQYIGELCRYLVNQPPSKAERGHKVRLAVGSGLRPDTWERFVRRFGPLQVLETYGLTEGNVATINYTGQRGAVGRASWLYKHIFPFSLIRYDVTTGEPIRDPQGHCMATSPGEPGLLVAPVSQQSPFLGYAGGPELAQGKLLKDVFRPGDVFFNTGDLLVCDDQGFLRFHDRTGDTFRWKGENVATTEVAEVFEALDFLQEVNVYGVTVPGHEGRAGMAALVLRPPHALDLMQLYTHVSENLPPYARPRFLRLQESLATTETFKQQKVRMANEGFDPSTLSDPLYVLDQAVGAYLPLTTARYSALLAGNLRI

SEQ ID NO: 215152 - protein, 730 aa, Artificial Sequence
  derived and/or modified sequence
MGVCQRTRAPWKEKSQLERAALGFRKGGSGMFASGWNQTVPIEEAGSMAALLLLPLLLLLPLLLLKLHLWPQLRWLPADLAFAVRALCCKRALRARALAAAAADPEGPEGGCSLAWRLAELAQQRAAHTFLIHGSRRFSYSEAERESNRAARAFLRALGWDWGPDGGDSGEGSAGEGERAAPGAGDAAAGSGAEFAGGDGAARGGGAAAPLSPGATVALLLPAGPEFLWLWFGLAKAGLRTAFVPTALRRGPLLHCLRSCGARALVLAPEFLESLEPDLPALRAMGLHLWAAGPGTHPAGISDLLAEVSAEVDGPVPGYLSSPQSITDTCLYIFTSGTTGLPKAARISHLKILQCQGFYQLCGVHQEDVIYLALPLYHMSGSLLGIVGCMGIGATVVLKSKFSAGQFWEDCQQHRVTVFQYIGELCRYLVNQPPSKAERGHKVRLAVGSGLRPDTWERFVRRFGPLQVLETYGLTEGNVATINYTGQRGAVGRASWLYKHIFPFSLIRYDVTTGEPIRDPQGHCMATSPGEPGLLVAPVSQQSPFLGYAGGPELAQGKLLKDVFRPGDVFFNTGDLLVCDDQGFLRFHDRTGDTFRWKGENVATTEVAEVFEALDFLQEVNVYGVTVPGHEGRAGMAALVLRPPHALDLMQLYTHVSENLPPYARPRFLRLQESLATTETFKQQKVRMANEGFDPSTLSDPLYVLDQAVGAYLPLTTARYSALLAGNLRI

SEQ ID NO: 215153 - DNA, 2436 bp, Artificial Sequence
  derived and/or modified sequence
atgcccaagccccccaaaccacggaataatcttgaagatagacacaatcctggaatccaaggacgtagagaacaccgacctggtccaggtcgggtgagggctgccagctcacccggagggtcagcacccagagcagaacggcgcctgtggggcgaggggtgggagtctggtgctgcaccccatccccatagctctcgcgtctccgctctgaggccctgtggcgtggtgggagcatgggttggtatgggtgtgtgtcagcgtaccagagccccttggaaagaaaaatcacagcttgagagggcagccctcggtttcaggaaaggcggatctggtatgttcgcatccggctggaaccagactgtgcccatagaggaggcggggtcaatggccgcgctgctcctcctgcccttactactgctgctgcctctcctcctactgaagttgcacttgtggccacaactgcgctggctgcccgccgatctggctttcgccgtaagggccctgtgttgtaagcgagcactgagagcccgagctctggccgcagctgcagctgaccctgagggacctgagggaggctgttctcttgcatggaggctcgccgagttagcccaacagagagccgcccatacgttcctaatacacgggtctcgcagattcagctatagcgaggccgagagagagagcaatcgagccgcaagagccttcttgagagcgttgggctgggattggggaccagatggcggagacagcggagaagggagtgccggcgagggtgagcgggcggcccccggggctggcgatgccgctgcagggagcggagccgaattcgccggcggtgatggggcagctagggggggtggagccgccgcacctctcagccctggggctacagttgccttgttactgccagcagggccagaatttttgtggttgtggttcggacttgcaaaagcaggtctccgtactgcttttgtaccaacagcgctgcgaaggggacctctgctgcactgcttacgatcttgtggagcccgagccctagtcctggcacccgagtttctagaaagtttagagcccgacctgccagcgctaagggccatgggattgcatttgtgggctgctgggccgggtacgcatcctgccgggatttccgatttgctggccgaggtgagtgctgaggttgatgggcctgtccccgggtacctatcctctccccagtcaattactgacacctgcttgtatatctttacaagcggcacaactgggctccccaaggcagcgaggatttcccatttgaagattctgcaatgtcagggtttttatcagctatgcggggtgcaccaggaggacgtgatttacttggcgctcccactatatcatatgagcggatcactcctcgggatcgtcggatgcatgggcattggggccacagtggtgcttaaatcaaaattcagtgctggacagttctgggaagactgtcagcagcatagagttaccgtcttccaatacatcggagaactgtgccgttatctagtgaaccagcccccgtcaaaagcagaacgtgggcacaaggtccgcctggccgtcggctctgggctcaggccggatacctgggaacggtttgtgcggaggttcgggcctttacaggtgctcgaaacatatggcttgaccgagggcaacgtggccacaatcaactacaccgggcagagaggcgccgtcggtcgcgcttcatggttgtataagcatatcttcccgttttctcttattcggtacgatgtaaccacaggtgaaccaattcgggatccccagggtcactgcatggctacttcccctggggagcccggactgctggtggccccggtttcacaacagagccccttccttggatacgccgggggtcctgagctcgcccaggggaagctcctaaaagacgtctttcggcccggggatgtgttctttaatactggcgatctgcttgtgtgcgacgaccaaggattcctaaggtttcacgatagaaccggtgacacattccggtggaaaggagaaaacgtggccaccaccgaagtggccgaagtcttcgaagccttagacttcctccaagaggtgaatgtctatggtgtgacagtgcctggccacgagggccgggctgggatggcagccctcgtgcttcgacctcctcacgcccttgatctaatgcagctctatacgcacgtaagcgagaatcttccaccatacgcacgccctcggttcctgagattacaggagagtctggctacaaccgaaaccttcaaacagcagaaggtgcgtatggcaaacgagggcttcgatccatctactctctcagacccactttatgtgctggatcaggctgtaggcgcatacctcccgttgactacagctaggtacagcgctctactagcaggtaacctccgtatttag

SEQ ID NO: 215154 - DNA, 2193 bp, Artificial Sequence
  derived and/or modified sequence
atgggcgtgtgtcaaagaaccagagcaccctggaaagaaaagtcccagctcgaacgggccgccctgggttttaggaagggcggatccggtatgttcgcctccggctggaaccagacggtccccatagaggaggccggcagcatggcagctctgctcttattacctctgctcctgctgctccctttgttgttgctgaaacttcacctttggccccagctacgatggctgcccgctgatttggcctttgccgtaagggccttatgttgcaagcgggccctgcgcgcccgagccttggctgctgcagccgccgatccggaaggccccgaagggggatgctccctggcttggagactggcagagcttgctcagcagcgggctgcacatacgttcttgattcacggcagtcggaggttcagctactcagaagccgagcgggaatcaaatcgtgccgctagggccttcctgagggccctgggatgggactggggacctgatggtggcgattcaggcgaaggaagtgctggagaaggcgagcgtgcagctcctggtgccggtgacgccgcagctggcagcggagccgaattcgccgggggggacggtgccgcccgggggggcggggccgccgcgccactcagtcccggggccactgtggccctgctgttgcccgcgggcccagaatttctgtggctgtggtttggattagcaaaggcaggcttaagaaccgcattcgtgcccacagccctccgtaggggtcccttgctgcactgcctgagaagttgtggggccagagctctggttctggctcccgaattcttagaaagcctggaacccgacctgcccgctctccgagctatgggtcttcacctgtgggccgcggggccgggcacgcatcctgcaggcatttcagatctcctggcggaggtctctgctgaagtggatggccccgtgccaggttacttgagcagcccccaaagcatcacagatacctgtctgtatatttttacgtccggcaccactggcctgcccaaagccgcaagaataagtcaccttaaaatactccagtgtcaggggttctatcaattatgcggcgttcaccaggaggacgttatctacctcgcactgccactttatcacatgtcaggaagcttactgggaatcgtgggatgcatgggtatcggggccaccgttgtgctgaaatccaaatttagtgcggggcaattttgggaagactgtcaacagcacagagtgacagtattccagtacattggtgaactctgccgatatctggttaaccagcccccctccaaagctgagagggggcacaaggtgaggcttgcggttggatcagggctgcggccagatacttgggagcggttcgtgagacgatttggtcctttgcaggttctagagacgtatggactgacggaggggaacgtggccacaatcaactacacaggacagaggggcgccgtagggcgggccagctggctgtataaacatatcttccctttttcactgattcggtacgatgtcacgaccggcgaaccgatcagggaccctcaagggcattgtatggcaacctcccccggtgagcctggacttctggtggcccctgtgagccagcagtcgccattcctgggctacgcaggagggccggaacttgcccaggggaaactcctcaaagatgtattccgcccgggagacgtgttttttaataccggggacctactggtgtgtgatgaccagggattccttagatttcatgacagaactggtgatacctttaggtggaagggagagaatgtggcgactaccgaggtggcggaagtgttcgaagccctcgacttcttgcaagaggtaaacgtgtatggcgtgaccgtccccggccacgagggtcgggcgggcatggccgcgctggtgctgaggccacctcacgctctcgacctgatgcagctctatacacacgtgagtgagaatctgcctccctacgccagaccgcgatttttacggctgcaggagagcctagcaacgacagaaactttcaaacagcagaaggttcgaatggcaaacgagggattcgatccttcaacattaagcgatcccctgtacgtccttgatcaggctgttggcgcttatcttccactgacgacggcgcgctacagcgcactgttggctggaaacttacgcatctag

SEQ ID NO: 215155 - DNA, 2436 bp, Artificial Sequence
  derived and/or modified sequence
atgcccaagccacccaagcccaggaacaacctggaggacagacacaaccctggcatccagggccggcgggagcacaggcctggccctggccgggtgcgggccgccagcagccctgggggcagcgcccccagggctgagcggcggctgtggggcgagggctgggagagcggggccgccccccacccccacagcagccgggtgtctgccctgcggccctgtggggtggtgggcgcctgggtgggcatgggcgtgtgccagaggacccgggccccctggaaggagaagagccagctggagagagctgccctgggcttcagaaaaggaggcagcggcatgtttgccagcggctggaaccagacagtgcccatcgaggaggccggctccatggccgccctgctgctgctgcccctgctgctgctgctgcccctgctgctgctgaagctgcacctgtggccccagctgcgctggctgcctgctgacctggcctttgctgtgcgggccctgtgctgcaagagggccctgcgggcccgggccctggccgctgctgctgctgaccctgagggccctgagggcggctgcagcctggcctggaggctggccgagctggcccagcagagagctgcccacaccttcctgatccacggcagccgccgcttctcctacagcgaggccgagcgggagagcaacagagctgcccgggccttcctgcgggccctgggctgggactggggcccagatggaggagacagcggggagggcagcgctggggagggggagagagctgcccctggagctggagatgctgctgctggcagcggggctgagtttgctggaggagatggagctgcccggggcggcggcgctgctgcccccctgagccctggggccaccgtggccctgctgctgcctgctggccctgagttcctgtggctgtggtttggcctggccaaggccggcctgaggacagcctttgtgcccacagccctgcggcggggccccctgctgcactgcctgcggagctgtggggcccgggccctggtgctggcccctgagttcctggagagcctggagccagacctgcctgccctgcgggccatgggcctgcacctgtgggccgccggccctggcacccaccctgctggcatcagtgacctgctggccgaggtgtctgctgaggtggatggccctgtgcccggctacctgagcagcccccagagcatcacagacacctgcctgtacatcttcaccagcggcaccaccggcctgcccaaggccgcccgcatcagccacctgaagatcctgcagtgccagggcttctaccagctgtgtggggtgcaccaggaggatgtgatctacctggccctgcccctgtaccacatgagcggcagcctgctgggcatcgtgggctgcatgggcattggagccaccgtggtgctgaagagcaagttctctgctggccagttctgggaggactgccagcagcaccgggtgaccgtcttccagtacatcggggagctgtgccgctacctggtgaaccagccccccagcaaggccgagcggggccacaaggtgcggctggccgtgggcagcggcctgcggccagacacctgggagagatttgtgcggcgcttcggccccctgcaggtgctggagacctacggcctgacagagggcaatgtggccaccatcaactacacaggccagagaggagctgtgggccgggcctcctggctgtacaagcacatcttccccttcagcctcatccgctatgatgtgaccaccggggagcccatccgggacccccagggccactgcatggccaccagccctggagagcccggcctgctggtggcccctgtgtcccagcagagccccttcctgggctacgccggcggccctgagctggcccagggcaagctgctgaaggatgtgttccggcctggagatgtgttcttcaacacaggagacctgctggtgtgtgatgaccagggcttcctgcgcttccatgacagaactggagacaccttccgctggaagggagaaaatgtggccaccacagaggtggccgaggtgtttgaggccctggacttcctgcaggaggtgaatgtgtatggagtgacagtgcccggccacgagggccgggccggcatggccgccctggtgctgcggcccccccacgccctggacctgatgcagctgtacacccacgtgtctgagaacctgcccccctatgcccggccccgcttcctgcggctgcaggagagcctggccaccacagagaccttcaagcagcagaaggtgaggatggccaatgaaggatttgaccccagcaccctgagtgaccccctgtatgtgctggaccaggccgtgggcgcctacctgcccctgaccacagcccgctacagcgccctgctggccggcaacctgcgcatctag

SEQ ID NO: 215156 - DNA, 2193 bp, Artificial Sequence
  derived and/or modified sequence
atgggcgtgtgccagaggacccgggccccctggaaggagaagagccagctggagcgggccgccctgggcttcaggaagggcggcagcggcatgtttgccagcggctggaaccagacagtgcccatcgaggaggccggctccatggccgccctgctgctgctgcccctgctgctgctgctgcccctgctgctgctgaagctgcacctgtggccccagctgcgctggctgcctgctgacctggcctttgctgtgcgggccctgtgctgcaagagggccctgcgggcccgggccctggccgctgctgctgctgaccctgagggccctgagggcggctgcagcctggcctggaggctggccgagctggcccagcagagagctgcccacaccttcctgattcatggcagccgccgcttctcctacagcgaggccgagcgggagagcaacagagctgcccgggccttcctgcgggccctgggctgggactggggcccagatggaggagacagcggggagggcagcgctggggagggggagcgggccgcccctggagctggagatgctgctgctggcagcggggctgagtttgctggaggagatggagctgcccggggcggcggggccgccgcccccctgagccctggggccaccgtggccctgctgctgcctgctggccctgagttcctgtggctgtggtttggcctggccaaggccggcctgaggacagcctttgtgcccacagccctgcggcggggccccctgctgcactgcctgcggagctgtggggcccgggccctggtgctggcccctgagttcctggagagcctggagccagacctgcctgccctgcgggccatgggcctgcacctgtgggccgccggccctggcacccaccctgctggcatcagtgacctgctggccgaggtgtctgctgaggtggatggccctgtgcccggctacctgagcagcccccagagcatcacagacacctgcctgtacatcttcaccagcggcaccaccggcctgcccaaggccgcccgcatcagccacctgaagatcctgcagtgccagggcttctaccagctgtgtggggtgcaccaggaggatgtgatctacctggccctgcccctgtaccacatgagcggcagcctgctgggcatcgtgggctgcatgggcatcggggccaccgtggtgctgaagagcaagttctctgctggccagttctgggaggactgccagcagcaccgggtgacagtgttccagtacatcggggagctgtgccgctacctggtgaaccagccccccagcaaggccgagcggggccacaaggtgcggctggccgtgggcagcggcctgcggccagacacctgggagagatttgtgagaagatttggccccctgcaggtgctggagacctacggcctgacagagggcaatgtggccaccatcaactacacaggccagagaggagctgtgggccgggcctcctggctgtacaagcacatcttccccttcagcctcatccgctatgatgtgaccactggagagcccatccgggacccccagggccactgcatggccaccagccctggagagcccggcctgctggtggcccctgtgtcccagcagagccccttcctgggctacgccggcggccctgagctggcccagggcaagctgctgaaggatgtgttccggcctggagatgtgttcttcaacacaggagacctgctggtgtgtgatgaccagggcttcctgcgcttccatgacagaactggagacaccttccgctggaagggggagaatgtggccaccacagaggtggccgaggtgtttgaggccctggacttcctgcaggaggtgaatgtgtatggagtgacagtgcccggccacgagggccgggccggcatggccgccctggtgctgcggccccctcatgccctggacctgatgcagctgtacacccacgtgtctgagaacctgcccccctatgcccggccccgcttcctgcggctgcaggagagcctggccaccacagagaccttcaagcagcagaaggtgaggatggccaatgaaggatttgaccccagcaccctgagtgaccccctgtatgtgctggaccaggccgtgggcgcctacctgcccctgaccacagcccgctacagcgccctgctggccggcaacctgcgcatctag

SEQ ID NO: 215157 - DNA, 2436 bp, Artificial Sequence
  derived and/or modified sequence
atgcccaagccccccaagccccggaacaacctggaggaccggcacaaccctggcatccagggccgccgcgagcatcggcccggtccgggaagagttagggccgcttctagccctgggggctctgctcctagggcagagaggcgcctctggggggaagggtgggaatccggcgccgccccccatccacactccagtagagtgtcagccctcaggccatgcggagtggtaggggcttgggtggggatgggcgtgtgccagaggacccgcgccccgtggaaggagaaatcccagctcgaacgggcggcgctcggctttaggaagggggggtcgggtatgtttgcttccggctggaaccaaacagtgccgatagaggaggctggaagcatggccgccttactccttttacctctactccttctccttccgctactgctgcttaagctgcacctgtggccacaactgcggtggttacctgccgacctcgcttttgcagtgcgggccctgtgttgcaaaagggccttaagagcccgcgccctggctgctgcggccgccgacccagagggaccagaaggcggctgttcgctcgcctggcgactggcagagctggcccagcagcgcgccgcccacacctttctcatacatgggagccgccgcttctcttacagcgaagcagagagggaatccaaccgcgcagcaagggcctttctgcgcgctctcggctgggactgggggcctgatggaggtgattccggcgaagggtcggcgggagaaggcgagcgtgccgctcctggtgccggagatgcagccgccggctcaggtgccgaatttgccggaggggatggcgctgcccgcggtggtggggccgcagcacccttatcacccggtgccactgtggccctgcttctacccgccggtcctgagttcctgtggctttggttcggactcgcaaaagccgggcttaggaccgcatttgtgcccacggcactacgcagaggccccttactccattgcttgcgttcatgcggggcccgcgccttagttcttgctccagagttcctggagtcacttgaacctgatctccctgctctacgcgccatgggtctgcatctttgggcagccggaccagggacacacccggccggtatctcagatctgcttgctgaagtctcggccgaagtggacggcccggtgccaggttacctgagcagccctcagagcatcaccgatacatgtctctacattttcacaagtggaactacaggattgcctaaggccgctcggatcagccatctgaaaatcctgcagtgccaggggttttatcagctgtgcggagtgcatcaggaagatgtgatttacttggcactccctttatatcatatgtcggggagtctgttggggatcgtggggtgcatgggcatcggagctacggtagtgttaaaatcaaagtttagcgctgggcagttttgggaggactgtcagcaacatagggtcactgtgttccagtacataggcgaactgtgtcgctatctggttaatcagccaccaagcaaggctgagcggggccacaaagtaagactggctgtgggcagcggtctgcgcccagacacatgggagagattcgttagaaggtttgggcccctccaggttctcgagacctatggccttacagagggcaatgtcgccaccattaattacacaggccaacggggcgcagtaggacgggcttcctggctgtacaaacacatatttccattctctctcatccgctatgatgtgaccacaggtgaaccaattagggacccacaaggacattgtatggcgacttcacctggagagcccggactactggtagccccagtctctcagcagtcaccgttcctgggatacgctggaggcccagagctggcacagggaaagttattgaaggacgtgtttagacctggtgacgtgttttttaatactggagacctgcttgtgtgtgacgatcagggatttcttcgcttccacgatagaacgggggatactttccgttggaaaggggagaatgttgccacaacagaagtcgcagaggttttcgaggccctggatttcctccaggaagttaatgtttacggagtgaccgtgcccgggcatgagggtcgtgccgggatggcagcactcgtacttcgcccccctcatgcgcttgatctcatgcagttgtatacccatgtgagcgagaacctgcccccatatgcccgcccccgcttcctgcgcctgcaggaaagtctagctacaaccgagacattcaaacagcagaaggtacgtatggccaatgagggctttgacccatctaccttgtctgaccccctgtacgtgctggaccaggccgtgggagcatacttacctttaactacagctcggtactcagcccttctggccggaaatctccgtatttag

SEQ ID NO: 215158 - DNA, 2193 bp, Artificial Sequence
  derived and/or modified sequence
atgggcgtgtgccagcggacccgggccccctggaaggagaagagccagttggagagagccgcactggggttccggaaggggggaagcggcatgttcgcttccgggtggaaccaaacagtgcccatcgaggaggccggaagcatggccgcactgctcctgctgccattgctgctgctcctgcctttacttctgttgaaactgcacctgtggccacagctgcgttggctgccggccgaccttgcatttgcagtgcgagccttatgctgcaagcgggctctgcgcgctcgggccctcgccgctgccgctgccgatccagagggccccgaaggaggctgtagcctggcctggagactggctgaacttgctcaacaaagagctgcccacactttcctgattcacgggagcaggcgcttttcctattccgaagccgaacgggaaagtaatagggcagcacgcgctttccttagagcactggggtgggactggggccccgatggtggagattcaggagaaggctcggcgggcgagggggaaagagcagcccccggtgccggcgacgctgccgctggaagtggggccgaattcgcagggggcgatggggccgcccggggtgggggtgctgctgcccccttgtcgccaggtgcaaccgtggccttactgttgccggctggccccgagttcctgtggctgtggtttggcctggccaaggccggtctaaggaccgcctttgtacctactgctctacggcgcggtccgctgttgcactgtctgcggtcatgcggcgctcgggctctggttcttgccccagaatttctggaaagccttgagcctgacttgcctgcactgagagcaatgggcctgcatttgtgggccgccggtccaggtactcaccccgcgggcataagcgacttgctggcagaggtaagcgcagaggttgacggaccagtgcctggctatctgagttcaccacagagtatcaccgacacttgtctgtacatcttcacatcagggacaaccggcctacccaaagccgcaaggatttcccacttgaaaatactccagtgtcagggtttctaccagctctgtggcgtgcaccaggaagatgtgatttatctcgccctgccactatatcacatgagcggcagcctgctcggtattgtgggatgtatgggaatcggtgcgacagtggtccttaaatccaagttttccgccggacagttctgggaggattgtcagcaacatagggtgaccgtgtttcagtacattggcgaactgtgtcgttacctcgtgaaccagcccccgtccaaagcggagcggggccacaaggtgcggcttgcggtcggcagcggccttcgtccggacacctgggaacgctttgtaagaaggttcggaccactgcaagtgctcgaaacctacggcttaacagagggaaacgtggcaacgatcaattacaccggccagagaggcgctgtgggtcgcgcaagctggctttataaacatatttttccattcagtctcattcgctacgatgtgactaccggggagcccattcgcgatccacaggggcattgcatggccacatcccccggagagcctggactccttgtcgccccagtgtctcagcagtcgccgttcctgggatatgccggtgggcccgagctcgcgcagggaaagctgctgaaagatgtttttaggcccggagatgtgttcttcaataccggggatcttctggtgtgcgatgaccagggctttcttagattccatgatagaaccggggatactttcaggtggaagggtgagaacgttgcgacgaccgaggtcgcggaagtgtttgaggccctggatttcctccaggaggtgaatgtctacggcgtcacagtgccagggcacgagggccgagcaggcatggccgccctcgttcttcgcccacctcacgcactcgacctgatgcaattgtacacacatgtaagtgagaacctgccgccttacgcgcgtccaaggtttttgagactgcaggagtccctggctaccaccgaaacatttaagcaacagaaggttagaatggctaacgagggattcgatccctccacactgtccgaccccctctacgttctagatcaagccgtgggagcctatttacctttgacgaccgcacgttacagcgcgctgctggctggcaacctgcgcatatag

SEQ ID NO: 215159 - DNA, 2436 bp, Artificial Sequence
  derived and/or modified sequence
atgccaaaacctcccaaacctcgtaataacctcgaagacaggcataatccagggattcaaggcagacgggaacatcggccagggcctggccgtgtcagagctgccagctctccagggggatcagcaccccgagcagaacggcgactgtggggcgagggatgggagtctggcgcagccccacacccacattcttccagggtatcagctctgagaccatgcggagttgtgggggcttgggtcggcatgggtgtatgccagcgaaccagagccccatggaaagaaaaaagtcagctcgaaagggctgcgctggggtttcggaaggggggaagcgggatgttcgcttccggatggaatcagacagtccctattgaagaggccggatcgatggctgctctgcttttattacccctgctattgttgctgcctctgcttcttctgaaacttcacttgtggccccaattacggtggctaccagctgacttggccttcgccgtgagagccctctgttgcaagcgagctttaagagcccgagctttagcagcggctgctgccgaccccgagggaccagaaggcggatgctcattggcatggcgactggctgaattagcccaacagcgagctgctcacacattcctgatccatggctcacgtcgttttagttactcagaggcggagagggagagcaaccgcgctgcaagggcgttccttagagctttaggttgggactggggaccggacggtggagacagcggcgaggggtcagcaggcgagggtgaacgagcggctcccggagctggggacgcagcagcagggagcggggcagaattcgccggaggagacggggctgcaagagggggaggtgctgccgctccattgtccccaggcgctacagtggcacttctcttgcctgctgggcctgaattcctgtggctgtggttcggcctggctaaagccggtctacggacagcatttgtccccaccgcgctgagacgaggccctctgctccactgccttagatcctgtggcgctagggcccttgtcctagccccagagtttctcgaaagcctggagcctgacctgcctgcactgagggctatgggactccacctgtgggccgcaggcccaggcacccatcctgcagggattagcgacttattagccgaggtctcggccgaagtcgacgggccagtgccgggttatctgtcaagcccacagagcattacagacacatgtctctacatctttacctccggcacaactggacttccaaaggctgcaagaatttctcacctgaagatactgcagtgtcagggcttttatcagctgtgtggtgtacaccaagaggatgttatctatctggccttgcccctgtaccacatgagcggctccctgctaggtattgtcggatgtatgggcatcggcgctaccgtggtgctgaaatctaaatttagtgcagggcagttttgggaggactgtcaacagcaccgggttacagtgttccaatacataggagagttatgtagatacctcgtcaaccaaccgccttccaaggctgagcggggacacaaagtacggctggctgtcgggagcgggttgcgccctgacacctgggagcggtttgtacggcgttttggcccactgcaggttttggagacctacggactgacggaaggcaacgtagctactatcaattatacaggacaacggggagccgtcggccgagcctcatggctttataaacacatctttcccttcagcctgatccgctatgatgtcactacgggcgagcctataagggatcctcaggggcattgtatggccaccagccccggagaacccggactgctcgtggcaccggtgagccagcagtctcctttcctaggatatgcgggaggccctgagttagcccagggtaagctgctgaaagatgtcttccggccaggtgacgtgttctttaacaccggagatctgctggtgtgtgatgatcagggctttctaaggttccacgatcgcactggggacacattcagatggaaaggagaaaatgtcgctaccactgaagttgccgaggtctttgaagccctcgatttcctgcaagaggtgaatgtgtatggcgtaactgtgccagggcacgaaggacgggcaggcatggctgcgctagtgctcagacctccccacgcactagacctgatgcagttgtatactcacgtgtccgagaacctacccccatacgccagaccgcgttttctgcggctgcaggaatcgctcgccacgacagaaacgttcaagcagcaaaaggtgcgcatggcaaacgaaggcttcgaccctagcacgctttctgatcctctctacgtgctggatcaagcagtgggcgcatacttgcccctcacaactgctcggtattccgcactgctggcaggcaacctgagaatatag

SEQ ID NO: 215160 - DNA, 2193 bp, Artificial Sequence
  derived and/or modified sequence
atgggcgtgtgccagcggacccgggctccatggaaagagaagtctcaattggagagagcagccctcggatttcgcaagggtggatccggcatgttcgcctctgggtggaaccaaaccgtgcctatcgaagaagcaggaagtatggctgccctgctcctgcttcctctgttgttactgttaccattattgttgctgaaactgcacctttggccccaacttcgatggctccctgctgacctcgccttcgctgtgcgggctttgtgctgcaaaagggctttgagggcgagagcacttgctgccgctgcagcagacccggaggggccagagggtggatgttcactggcgtggaggcttgctgagctggcacaacaaagagctgcacacacattcttaatacacggatctaggcggttctcctacagcgaagcggaaagagagtccaaccgcgctgctagggccttcttacgtgcactcggatgggattggggcccagacggaggagactcaggtgagggttccgctggagaaggcgaaagagctgcccctggcgctggtgatgccgcagctggctccggtgccgagtttgctggtggcgatggcgctgcgaggggagggggagccgctgcacctcttagtcctggcgctacagtagccctgcttctgccagccggacctgagttcctgtggctgtggttcggcctggctaaagctgggttacggactgcgttcgtccccactgccctccggaggggcccactcttacactgtcttagaagctgtggggcaagagcacttgtactcgccccagaatttctggaatcgctggagcctgacctaccggcactccgtgctatgggtctgcacctgtgggccgcaggcccagggacccatcctgccggaatcagtgatctgctcgctgaggtatccgccgaggtggatgggcctgtccctggttatcttagtagcccccagtccattacagacacttgtctctacattttcacaagcggtacgacaggacttcctaaggctgcccgaatcagtcacttgaagattctgcagtgtcaaggcttttaccagctctgcggggtgcaccaagaggatgtgatctatctcgcgctgcccctgtaccacatgagcgggtctctcctcggaatcgtcgggtgcatgggtatcggcgcaacagtggttctgaaaagcaagttctccgcaggccagttctgggaggactgccagcagcaccgtgtgaccgtcttccaatacatcggagaactctgcaggtatcttgttaatcagccccctagtaaggctgagagaggccacaaagtgagactggcagtgggatctgggctccggcctgacacatgggagcggttcgtcagaaggtttgggccactgcaagtgctggagacctacggtttgacagaaggcaatgtagccacaatcaattataccgggcagaggggggcagtgggaagggcaagctggctctacaagcatattttcccgttcagcctgatccggtatgatgttaccactggggaaccaattcgggaccctcaggggcactgtatggccaccagcccaggagaacccggtttactcgttgcccctgtgtcacaacagtccccattcctgggatacgcgggtgggcctgaactcgcccagggaaagcttttgaaggatgtcttccgccctggcgacgttttctttaatacaggggatctgttagtttgtgacgatcaggggtttttgagattccatgatcggacaggcgacacctttcgatggaagggcgaaaacgtagcaacaactgaggtcgcggaagtctttgaggcgctggattttctgcaagaggtgaacgtttacggtgtcacagtccccggacatgaaggacgcgctgggatggccgcactcgtcttgagacctcctcatgccctggacctcatgcagctctatacacatgtgagcgaaaacctgcccccatatgctcgccctcgcttcctgaggttacaggagagtttggctacaacagagactttcaagcagcagaaggttcggatggctaacgaaggctttgacccaagcaccttgtccgatcctctctatgtcctggatcaagcagtgggtgcgtaccttccgctgacaaccgcccgatacagcgccctccttgctgggaatctgcgcatctag

SEQ ID NO: 215161 - DNA, 3351 bp, Artificial Sequence
  derived and/or modified sequence
aaaaggtctgtcatcctccagttgaagtctgtgtgcctaccaagaatggccggaggactcgctgcttgacgggagggatgctccagcttggtctccagggacaactgtacctggagataaagtctggataccagggagggacagagatgctcttccttccacagtgtggccacttgctgggccatgtgaaccagcagaggagagttccttggctatgctgttgttcccccgctgtccagggagaatggaggtggactgaggagtgaagtttgggcgaactgcacagagctgctcctcttcaccccgaaaatttgtctttttacagaatccaggttctcccctccctcatcactgctgttgcttcctttgaaagtctaaaccactggaggcttctttttccttcctctctccttccccagtttcctctgtcccaattaaaaccaggatggagagcatttgctggctggccccaattattgtacccttgcccaaagggaggggcctctgtcgtgacccctcagaaatctggcagtctgggtttccacctttcccctatttaactctcagcccccacccatcccctggggttgcggctggcaggccgggacttgcagaaccaaatgggccaggggccaagttcattcttttgggagagagcaatggtaccttcccttaacgggaaaacgagaaatattgaggggaagatggactgcgatccaaacgccctggctctcaggcctggactctagggcttagccagatgcctaaaccgcccaagccgagaaacaacttagaagacagacataaccctgggattcagggaaggcgcgagcaccgcccaggacctggtagggtgcgagccgcgagcagtccgggagggagcgcgcctagggcggagcgtaggctgtggggggagggctgggagtccggggccgccccacacccgcactcctcccgggtttctgctctccgcccgtgtggagtggtgggggcctgggtgggaatgggcgtgtgccagcgcacgcgcgctccctggaaggagaagtctcagctagaacgagcggccctaggttttcggaagggaggatcagggatgtttgcgagcggctggaaccagacggtgccgatagaggaagcgggctccatggctgccctcctgctgctgcccctgctgctgttgctaccgctgctgctgctgaagctacacctctggccgcagttgcgctggcttccggcggacttggcctttgcggtgcgagctctgtgctgcaaaagggctcttcgagctcgcgccctggccgcggctgccgccgacccggaaggtcccgaggggggctgcagcctggcctggcgcctcgcggaactggcccagcagcgcgccgcgcacacctttctcattcacggctcgcggcgctttagctactcagaggcggagcgcgagagtaacagggctgcacgcgccttcctacgtgcgctaggctgggactggggacccgacggcggcgacagcggcgaggggagcgctggagaaggcgagcgggcagcgccgggagccggagatgcagcggccggaagcggcgcggagtttgccggaggggacggtgccgccagaggtggaggagccgccgcccctctgtcacctggagcaactgtggcgctgctcctccccgctggcccagagtttctgtggctctggttcgggctggccaaggccggcctgcgcactgcctttgtgcccaccgccctgcgccggggccccctgctgcactgcctccgcagctgcggcgcgcgcgcgctggtgctggcgccagagtttctggagtccctggagccggacctgcccgccctgagagccatggggctccacctgtgggctgcaggcccaggaacccaccctgctggaattagcgatttgctggctgaagtgtccgctgaagtggatgggccagtgccaggatacctctcttccccccagagcataacagacacgtgcctgtacatcttcacctctggcaccacgggcctccccaaggctgctcggatcagtcatctgaagatcctgcaatgccagggcttctatcagctgtgtggtgtccaccaggaagatgtgatctacctcgccctcccactctaccacatgtccggttccctgctgggcatcgtgggctgcatgggcattggggccacagtggtgctgaaatccaagttctcggctggtcagttctgggaagattgccagcagcacagggtgacggtgttccagtacattggggagctgtgccgataccttgtcaaccagcccccgagcaaggcagaacgtggccataaggtccggctggcagtgggcagcgggctgcgcccagatacctgggagcgttttgtgcggcgcttcgggcccctgcaggtgctggagacatatggactgacagagggcaacgtggccaccatcaactacacaggacagcggggcgctgtggggcgtgcttcctggctttacaagcatatcttccccttctccttgattcgctatgatgtcaccacaggagagccaattcgggacccccaggggcactgtatggccacatctccaggtgagccagggctgctggtggccccggtaagccagcagtccccattcctgggctatgctggcgggccagagctggcccaggggaagttgctaaaggatgtcttccggcctggggatgttttcttcaacactggggacctgctggtctgcgatgaccaaggttttctccgcttccatgatcgtactggagacaccttcaggtggaagggggagaatgtggccacaaccgaggtggcagaggtcttcgaggccctagattttcttcaggaggtgaacgtctatggagtcactgtgccagggcatgaaggcagggctggaatggcagccctagttctgcgtcccccccacgctttggaccttatgcagctctacacccacgtgtctgagaacttgccaccttatgcccggccccgattcctcaggctccaggagtctttggccaccacagagaccttcaaacagcagaaagttcggatggcaaatgagggcttcgaccccagcaccctgtctgacccactgtacgttctggaccaggctgtaggtgcctacctgcccctcacaactgcccggtacagcgccctcctggcaggaaaccttcgaatctgagaacttccacacctgaggcacctgagagaggaactctgtggggtgggggccgttgcaggtgtactgggctgtcagggatcttttctataccagaactgcggtcactattttgtaataaatgtggctggagctgatccagctgtctctgacctaca

SEQ ID NO: 215162 - DNA, 2410 bp, Artificial Sequence
  derived and/or modified sequence
cacacccgcactcctcccgggtttctgctctccgcccgtgtggagtggtgggggcctgggtgggaatgggcgtgtgccagcgcacgcgcgctccctggaaggagaagtctcagctagaacgagcggccctaggttttcggaagggaggatcagggatgtttgcgagcggctggaaccagacggtgccgatagaggaagcgggctccatggctgccctcctgctgctgcccctgctgctgttgctaccgctgctgctgctgaagctacacctctggccgcagttgcgctggcttccggcggacttggcctttgcggtgcgagctctgtgctgcaaaagggctcttcgagctcgcgccctggccgcggctgccgccgacccggaaggtcccgaggggggctgcagcctggcctggcgcctcgcggaactggcccagcagcgcgccgcgcacacctttctcattcacggctcgcggcgctttagctactcagaggcggagcgcgagagtaacagggctgcacgcgccttcctacgtgcgctaggctgggactggggacccgacggcggcgacagcggcgaggggagcgctggagaaggcgagcgggcagcgccgggagccggagatgcagcggccggaagcggcgcggagtttgccggaggggacggtgccgccagaggtggaggagccgccgcccctctgtcacctggagcaactgtggcgctgctcctccccgctggcccagagtttctgtggctctggttcgggctggccaaggccggcctgcgcactgcctttgtgcccaccgccctgcgccggggccccctgctgcactgcctccgcagctgcggcgcgcgcgcgctggtgctggcgccagagtttctggagtccctggagccggacctgcccgccctgagagccatggggctccacctgtgggctgcaggcccaggaacccaccctgctggaattagcgatttgctggctgaagtgtccgctgaagtggatgggccagtgccaggatacctctcttccccccagagcataacagacacgtgcctgtacatcttcacctctggcaccacgggcctccccaaggctgctcggatcagtcatctgaagatcctgcaatgccagggcttctatcagctgtgtggtgtccaccaggaagatgtgatctacctcgccctcccactctaccacatgtccggttccctgctgggcatcgtgggctgcatgggcattggggccacagtggtgctgaaatccaagttctcggctggtcagttctgggaagattgccagcagcacagggtgacggtgttccagtacattggggagctgtgccgataccttgtcaaccagcccccgagcaaggcagaacgtggccataaggtccggctggcagtgggcagcgggctgcgcccagatacctgggagcgttttgtgcggcgcttcgggcccctgcaggtgctggagacatatggactgacagagggcaacgtggccaccatcaactacacaggacagcggggcgctgtggggcgtgcttcctggctttacaagcatatcttccccttctccttgattcgctatgatgtcaccacaggagagccaattcgggacccccaggggcactgtatggccacatctccaggtgagccagggctgctggtggccccggtaagccagcagtccccattcctgggctatgctggcgggccagagctggcccaggggaagttgctaaaggatgtcttccggcctggggatgttttcttcaacactggggacctgctggtctgcgatgaccaaggttttctccgcttccatgatcgtactggagacaccttcaggtggaagggggagaatgtggccacaaccgaggtggcagaggtcttcgaggccctagattttcttcaggaggtgaacgtctatggagtcactgtgccagggcatgaaggcagggctggaatggcagccctagttctgcgtcccccccacgctttggaccttatgcagctctacacccacgtgtctgagaacttgccaccttatgcccggccccgattcctcaggctccaggagtctttggccaccacagagaccttcaaacagcagaaagttcggatggcaaatgagggcttcgaccccagcaccctgtctgacccactgtacgttctggaccaggctgtaggtgcctacctgcccctcacaactgcccggtacagcgccctcctggcaggaaaccttcgaatctgagaacttccacacctgaggcacctgagagaggaactctgtggggtgggggccgttgcaggtgtactgggctgtcagggatcttttctataccagaactgcggtcactattttgtaataaatgtggctggagctgatccagctgtctctgacct

SEQ ID NO: 215163 - DNA, 2436 bp, Artificial Sequence
  derived and/or modified sequence
atgcccaagccccccaagcccagaaacaacctggaggacagacacaaccccggcatccagggcagaagagagcacagacccggccccggcagagtgagagccgccagcagccccggcggcagcgcccccagagccgagagaagactgtggggcgagggctgggagagcggcgccgccccccacccccacagcagcagagtgagcgccctgagaccctgcggcgtggtgggcgcctgggtgggcatgggcgtgtgccagagaaccagagccccctggaaggagaagagccagctggagagagccgccctgggcttcagaaagggcggcagcggcatgttcgccagcggctggaaccagaccgtgcccatcgaggaggccggcagcatggccgccctgctgctgctgcccctgctgctgctgctgcccctgctgctgctgaagctgcacctgtggccccagctgagatggctgcccgccgacctggccttcgccgtgagagccctgtgctgcaagagagccctgagagccagagccctggccgccgccgccgccgaccccgagggccccgagggcggctgcagcctggcctggagactggccgagctggcccagcagagagccgcccacaccttcctgatccacggcagcagaagattcagctacagcgaggccgagagagagagcaacagagccgccagagccttcctgagagccctgggctgggactggggccccgacggcggcgacagcggcgagggcagcgccggcgagggcgagagagccgcccccggcgccggcgacgccgccgccggcagcggcgccgagttcgccggcggcgacggcgccgccagaggcggcggcgccgccgcccccctgagccccggcgccaccgtggccctgctgctgcccgccggccccgagttcctgtggctgtggttcggcctggccaaggccggcctgagaaccgccttcgtgcccaccgccctgagaagaggccccctgctgcactgcctgagaagctgcggcgccagagccctggtgctggcccccgagttcctggagagcctggagcccgacctgcccgccctgagagccatgggcctgcacctgtgggccgccggccccggcacccaccccgccggcatcagcgacctgctggccgaggtgagcgccgaggtggacggccccgtgcccggctacctgagcagcccccagagcatcaccgacacctgcctgtacatcttcaccagcggcaccaccggcctgcccaaggccgccagaatcagccacctgaagatcctgcagtgccagggcttctaccagctgtgcggcgtgcaccaggaggacgtgatctacctggccctgcccctgtaccacatgagcggcagcctgctgggcatcgtgggctgcatgggcatcggcgccaccgtggtgctgaagagcaagttcagcgccggccagttctgggaggactgccagcagcacagagtgaccgtgttccagtacatcggcgagctgtgcagatacctggtgaaccagccccccagcaaggccgagagaggccacaaggtgagactggccgtgggcagcggcctgagacccgacacctgggagagattcgtgagaagattcggccccctgcaggtgctggagacctacggcctgaccgagggcaacgtggccaccatcaactacaccggccagagaggcgccgtgggcagagccagctggctgtacaagcacatcttccccttcagcctgatcagatacgacgtgaccaccggcgagcccatcagagacccccagggccactgcatggccaccagccccggcgagcccggcctgctggtggcccccgtgagccagcagagccccttcctgggctacgccggcggccccgagctggcccagggcaagctgctgaaggacgtgttcagacccggcgacgtgttcttcaacaccggcgacctgctggtgtgcgacgaccagggcttcctgagattccacgacagaaccggcgacaccttcagatggaagggcgagaacgtggccaccaccgaggtggccgaggtgttcgaggccctggacttcctgcaggaggtgaacgtgtacggcgtgaccgtgcccggccacgagggcagagccggcatggccgccctggtgctgagacccccccacgccctggacctgatgcagctgtacacccacgtgagcgagaacctgcccccctacgccagacccagattcctgagactgcaggagagcctggccaccaccgagaccttcaagcagcagaaggtgagaatggccaacgagggcttcgaccccagcaccctgagcgaccccctgtacgtgctggaccaggccgtgggcgcctacctgcccctgaccaccgccagatacagcgccctgctggccggcaacctgagaatctag

SEQ ID NO: 215164 - DNA, 2193 bp, Artificial Sequence
  derived and/or modified sequence
atgggcgtgtgccagagaaccagagccccctggaaggagaagagccagctggagagagccgccctgggcttcagaaagggcggcagcggcatgttcgccagcggctggaaccagaccgtgcccatcgaggaggccggcagcatggccgccctgctgctgctgcccctgctgctgctgctgcccctgctgctgctgaagctgcacctgtggccccagctgagatggctgcccgccgacctggccttcgccgtgagagccctgtgctgcaagagagccctgagagccagagccctggccgccgccgccgccgaccccgagggccccgagggcggctgcagcctggcctggagactggccgagctggcccagcagagagccgcccacaccttcctgatccacggcagcagaagattcagctacagcgaggccgagagagagagcaacagagccgccagagccttcctgagagccctgggctgggactggggccccgacggcggcgacagcggcgagggcagcgccggcgagggcgagagagccgcccccggcgccggcgacgccgccgccggcagcggcgccgagttcgccggcggcgacggcgccgccagaggcggcggcgccgccgcccccctgagccccggcgccaccgtggccctgctgctgcccgccggccccgagttcctgtggctgtggttcggcctggccaaggccggcctgagaaccgccttcgtgcccaccgccctgagaagaggccccctgctgcactgcctgagaagctgcggcgccagagccctggtgctggcccccgagttcctggagagcctggagcccgacctgcccgccctgagagccatgggcctgcacctgtgggccgccggccccggcacccaccccgccggcatcagcgacctgctggccgaggtgagcgccgaggtggacggccccgtgcccggctacctgagcagcccccagagcatcaccgacacctgcctgtacatcttcaccagcggcaccaccggcctgcccaaggccgccagaatcagccacctgaagatcctgcagtgccagggcttctaccagctgtgcggcgtgcaccaggaggacgtgatctacctggccctgcccctgtaccacatgagcggcagcctgctgggcatcgtgggctgcatgggcatcggcgccaccgtggtgctgaagagcaagttcagcgccggccagttctgggaggactgccagcagcacagagtgaccgtgttccagtacatcggcgagctgtgcagatacctggtgaaccagccccccagcaaggccgagagaggccacaaggtgagactggccgtgggcagcggcctgagacccgacacctgggagagattcgtgagaagattcggccccctgcaggtgctggagacctacggcctgaccgagggcaacgtggccaccatcaactacaccggccagagaggcgccgtgggcagagccagctggctgtacaagcacatcttccccttcagcctgatcagatacgacgtgaccaccggcgagcccatcagagacccccagggccactgcatggccaccagccccggcgagcccggcctgctggtggcccccgtgagccagcagagccccttcctgggctacgccggcggccccgagctggcccagggcaagctgctgaaggacgtgttcagacccggcgacgtgttcttcaacaccggcgacctgctggtgtgcgacgaccagggcttcctgagattccacgacagaaccggcgacaccttcagatggaagggcgagaacgtggccaccaccgaggtggccgaggtgttcgaggccctggacttcctgcaggaggtgaacgtgtacggcgtgaccgtgcccggccacgagggcagagccggcatggccgccctggtgctgagacccccccacgccctggacctgatgcagctgtacacccacgtgagcgagaacctgcccccctacgccagacccagattcctgagactgcaggagagcctggccaccaccgagaccttcaagcagcagaaggtgagaatggccaacgagggcttcgaccccagcaccctgagcgaccccctgtacgtgctggaccaggccgtgggcgcctacctgcccctgaccaccgccagatacagcgccctgctggccggcaacctgagaatctag

SEQ ID NO: 215165 - protein, 316 aa, Artificial Sequence
  derived and/or modified sequence
MAVQVVQAVQAVHLESDAFLVCLNHALSTEKEEVMGLCIGELNDDTRSDSKFAYTGTEMRTVAEKVDAVRIVHIHSVIILRRSDKRKDRVEISPEQLSAASTEAERLAELTGRPMRVVGWYHSHPHITVWPSHVDVRTQAMYQMMDQGFVGLIFSCFIEDKNTKTGRVLYTCFQSIQAQKSSESLHGPRDFWSSSQHISIEGQKEEERYERIEIPIHIVPHVTIGKVCLESAVELPKILCQEEQDAYRRIHSLTHLDSVTKIHNGSVFTKNLCSQMSAVSGPLLQWLEDRLEQNQQHLQELQQEKEELMQELSSLE

SEQ ID NO: 215166 - protein, 317 aa, Artificial Sequence [sequence omitted]

SEQ ID NO: 215167 - DNA, 951 bp, Artificial Sequence
  derived and/or modified sequence
atggcagtacaggtggtccaggccgtgcaggctgtccacctggaaagcgatgccttcctggtgtgcctcaatcacgcgctcagtacggaaaaggaagaggtcatgggcttatgtattggtgagcttaacgatgatacacgtagcgactcgaaatttgcatatacgggaaccgaaatgcgaactgttgccgagaaggtcgacgcagttcggattgtccatatacactcagtgattattctgcgcagaagtgacaagagaaaggaccgggtggaaattagcccagagcagctgtcagccgcatccaccgaagcggagcgcctagcggaactgaccggtcgaccgatgcgcgttgttgggtggtaccatagtcacccacacatcaccgtgtggccaagccatgtggatgttcggacacaggcgatgtatcagatgatggatcagggatttgtaggactgatttttagctgttttatcgaagacaagaacacaaagaccggccgcgtgctttatacctgtttccagtctattcaggctcagaagtccagcgaaagccttcatggccccagagacttttggagcagtagtcaacacatctccatcgaagggcaaaaggaagaggaacgatatgaaagaatcgagatcccgatccacatcgttcctcacgtcactattggcaaggtatgtctcgagagcgccgtcgagctcccaaagattctctgtcaggaggagcaggacgcctaccgcaggatccacagcctgacccatctggattcagtaacaaagatccacaacggctctgtgtttacaaagaatttgtgtagccagatgagtgccgttagtggccccttgctacagtggctagaagaccgcctcgaacagaaccagcagcacctgcaagagctccaacaagaaaaggaagagctcatgcaggagttaagctctctggaatag

SEQ ID NO: 215168 - DNA, 954 bp, Artificial Sequence
  derived and/or modified sequence
atggcagtgcaggtggtacaggccgtacaggccgtccatttggagtccgatgccttccttgtgtgtttgaatcatgccctgagtaccgaaaaggaagaagtgatgggcctgtgcattggggaggtgtcgtctccttctaggtccgactccaagtttgcgtacaccggaaccgagatgcgcactgtggctgaaaaggtggacgctgtgagaatagtgcacatccactccgtcatcatcttgaggcgcagcgacaaacgtaaggatcgggtggaaatttcccccgagcagctcagcgctgcgtcaacggagacccatagactggcggagctgacaggccgaccaatgagggttgtcggatggtatcactcccacccacacataacagtgtggccctctcacgtggacgtacggacccaggcaatgtaccagatgatggaccagggatttgtggggctcattttttcttgcttcatcgaagataagaatactaagactggcagggtcctgtacacttgcttccagtcaattcaggcgcagaaaagttctgaatccctgcacggcccaagggatttctggagcagctcccagcatatctccatagaaggtcaaaaggaggaagagaggtatgagaggatagaaataccaatacatattgtgccccatgtgactattggaaaggtgtgtctggagtccgccgtggaattgccgaaaatcctgtgccaggaagagcaggacgcctataggcggatccactctctgacccacctcgactccgtaaccaagatccacaatggtagcgaggtgttcaccaagaatttgtgcagccagatgtccgccgtttcgggaccccttctgcagtggttggaagacaggctcgaacagaatcagcaacacctgcaggaactgcagcaggaaaaagaggagctcatgcaggagctcagcagccttgagtag

SEQ ID NO: 215169 - DNA, 951 bp, Artificial Sequence
  derived and/or modified sequence
atggctgtgcaggtggtgcaggccgtgcaggccgtgcacctggagagtgatgccttcctggtgtgcctgaaccacgccctgagcacagagaaggaggaggtgatgggcctgtgcattggagagctgaatgatgacaccaggagtgacagcaagtttgcctacacaggaacagagatgaggacagtggccgagaaggtggatgctgtgagaattgtgcacatccacagcgtcatcatcctgcggcggagtgacaagaggaaggacagagtggagatcagccctgagcagctgtctgctgccagcacagaggccgagcggctggccgagctgaccggccggcccatgagggtggtgggctggtaccacagccacccccacatcaccgtgtggcccagccacgtggatgtgaggacccaggccatgtaccagatgatggaccagggctttgtgggcctcatcttcagctgcttcatcgaggacaagaacaccaagacaggccgggtgctgtacacctgcttccagagcatccaggcccagaagagcagcgagagcctgcacggcccccgggacttctggagcagcagccagcacatcagcattgagggccagaaggaggaggagagatatgagcgcatcgagatccccatccacatcgtgccccacgtgaccatcggcaaggtgtgcctggagagcgctgtggagctgcccaagatcctgtgccaggaggagcaggatgcctaccgccgcatccacagcctgacccacctggacagcgtgaccaagatccacaacggcagcgtcttcaccaagaacctgtgcagccagatgtctgctgtgtctggccccctgctgcagtggctggaggaccggctggagcagaaccagcagcacctgcaggagctgcagcaggagaaggaggagctgatgcaggagctgagcagcctggagtag

SEQ ID NO: 215170 - DNA, 954 bp, Artificial Sequence
  derived and/or modified sequence
atggctgtgcaggtggtgcaggccgtgcaggccgtgcacctggagagtgatgccttcctggtgtgcctgaaccacgccctgagcacagagaaggaggaggtgatgggcctgtgcattggagaggtgagcagccccagcagaagtgacagcaagtttgcctacacaggaacagagatgaggacagtggccgagaaggtggatgctgtgagaattgtgcacatccacagcgtcatcatcctgcggcggagtgacaagaggaaggacagagtggagatcagccctgagcagctgtctgctgccagcacagagacccaccggctggccgagctgaccggccggcccatgagggtggtgggctggtaccacagccacccccacatcaccgtgtggcccagccacgtggatgtgaggacccaggccatgtaccagatgatggaccagggctttgtgggcctcatcttcagctgcttcatcgaggacaagaacaccaagacaggccgggtgctgtacacctgcttccagagcatccaggcccagaagagcagcgagagcctgcacggcccccgggacttctggagcagcagccagcacatcagcattgagggccagaaggaggaggagagatatgagcgcatcgagatccccatccacatcgtgccccacgtgaccatcggcaaggtgtgcctggagagcgctgtggagctgcccaagatcctgtgccaggaggagcaggatgcctaccgccgcatccacagcctgacccacctggacagcgtgaccaagatccacaacggcagcgaggtgttcaccaagaacctgtgcagccagatgtctgctgtgtctggccccctgctgcagtggctggaggaccggctggagcagaaccagcagcacctgcaggagctgcagcaggagaaggaggagctgatgcaggagctgagcagcctggagtag

SEQ ID NO: 215171 - DNA, 951 bp, Artificial Sequence
  derived and/or modified sequence
atggccgtgcaggtggtgcaggccgtgcaggccgtgcacctggagagtgatgctttcttagtatgtctgaaccacgccttgagcacagagaaagaagaagtgatgggtctctgtatcggggaactgaacgatgatacccggtcagactctaaatttgcttacaccggcacagagatgcgtacagtggcagagaaggtcgatgcggtgcgcatcgtacatatccactcggttatcattctgagaagaagtgacaaaagaaaggatcgggtggagatcagtcccgagcagctgagcgccgctagtacggaggccgagagacttgcagagctgactggacgcccgatgcgcgtggtgggctggtaccactcccacccccacattactgtttggccatcccacgttgacgttcggacgcaggctatgtatcaaatgatggatcagggtttcgtgggattgatcttctcctgcttcatagaagacaagaatactaagaccggaagggtgctgtacacatgcttccagagcatccaagctcaaaaaagctcagaaagtttgcacggaccccgcgacttctggagtagctctcaacacatttctatagaagggcagaaggaagaggagcgctatgagaggatcgaaattcctatccacatcgtgcctcacgtcacgatcgggaaggtttgtctggagtctgccgtggagctgcccaagattctttgccaggaagaacaggatgcttatcgccgtatccacagtctgacccatcttgacagcgtcaccaaaattcataacggcagcgtgtttacaaaaaatctgtgtagccagatgtcagctgtgtccggccccctccttcaatggctggaagataggctcgagcaaaaccaacagcatttgcaagaactgcaacaagaaaaggaagaactaatgcaggagctcagtagcctcgaatag

SEQ ID NO: 215172 - DNA, 954 bp, Artificial Sequence
  derived and/or modified sequence
atggccgtgcaggtggtgcaggccgtgcaggccgtgcacctggagtcagacgcttttctggtctgtctcaatcacgcactgtcaaccgaaaaggaggaagtgatgggcctctgcattggtgaggtgagttccccctcccgttccgattccaagttcgcgtacacaggaaccgagatgcgaacagtggctgagaaagtcgacgcggtccgcattgtccacattcactcggttataatcctgcgtcgatctgacaaacgaaaagaccgcgttgagatctctcccgagcagctgtcggccgcaagtactgaaactcacaggctggccgaacttacagggcgccccatgcgcgtagtgggctggtaccactcacacccacatattacagtgtggccctcccacgtggacgtgagaacccaagccatgtaccagatgatggatcagggattcgtcggcctgattttctcatgttttatcgaggacaagaatacgaagactgggagagtgctctatacctgcttccagtccattcaggcccagaaatcctctgaatctttgcacgggccgcgggatttttggtcatcttcccaacacataagcatcgaaggccaaaaggaagaggagcggtatgaaagaattgagataccgattcacatcgtgccacacgtgaccataggcaaggtgtgcctggagtccgctgtcgagctcccaaagatcttatgccaggaagaacaggatgcctataggagaatccatagtctcacccacctggactctgttacgaagatccataacggcagcgaggtttttactaaaaatctctgttcacagatgtcggccgtttctggaccactcctgcagtggctcgaggaccgcctcgagcaaaaccagcagcacctgcaggaactccagcaggaaaaggaagagcttatgcaggagctgagctccctagagtag

SEQ ID NO: 215173 - DNA, 951 bp, Artificial Sequence
  derived and/or modified sequence
atggctgtgcaggtagtgcaagccgtgcaagccgtgcacctagaatccgacgctttcctagtctgtctgaaccacgccctgtccacggagaaggaggaggtgatgggcctgtgcattggcgaattaaacgatgacacgcgctccgacagcaaattcgcttatactggcaccgaaatgaggacagtagcagagaaggtggatgctgtcagaatagttcacatccattccgtcataatactcagaaggtctgacaagcggaaagatagggtcgagatcagccccgagcagctgtcggccgcttctaccgaagctgaacggctggccgagttgactggacgtcccatgagagtggtaggctggtatcactcacatccacacatcactgtttggccctcccacgttgatgtaaggactcaagccatgtaccagatgatggatcaggggttcgtaggattgatatttagctgttttatcgaagacaagaacaccaaaaccggacgggtcctgtacacatgtttccagtccattcaggcccagaagagctctgaatccctgcatggccctcgagatttctggtcttcttctcagcatatcagcatcgagggccaaaaagaagaagaacggtatgaacgtattgagataccaattcatatagtgcctcacgttacaattggaaaggtttgcctggaatcggctgtcgagctgccaaaaatattgtgccaggaagaacaagatgcgtatagacgcattcatagtctgactcatctggatagtgtgacgaagattcacaacggaagtgtattcactaagaacttatgtagtcaaatgagcgctgtgagcgggccactgttgcagtggctagaggacaggctggagcagaatcaacaacatcttcaggaactgcaacaagagaaggaagagttaatgcaggaactgtccagccttgaatag

SEQ ID NO: 215174 - DNA, 954 bp, Artificial Sequence
  derived and/or modified sequence
atggcagtacaagtggtgcaggcagtccaggctgtccacctggaatccgatgctttcctggtgtgcctgaatcacgcactctcaactgagaaggaggaagtgatgggcctctgcatcggtgaagtgagctccccgtctagatccgattctaagtttgcctatactggcactgagatgcgtacagtggctgagaaagtcgacgcagtgcgcatagtgcacattcactcagtgatcatcctgcgcagatccgacaaaaggaaagaccgcgtggaaatcagtcccgagcaactatccgcagcctccaccgagacccacaggctggccgaactcaccggacggcctatgcgggtagtgggttggtaccatagccaccctcatatcaccgtctggccctcacatgtggacgtgcggacccaagcaatgtaccaaatgatggatcagggctttgtcgggttgatcttctcttgctttattgaagacaaaaatactaaaacagggcgtgtgctttacacgtgctttcaaagtattcaggctcaaaaatcatcagaaagtctgcacggccctagagatttttggagcagtagccagcacatttccattgaggggcaaaaagaggaggaaagatatgagaggattgagatacctatccatattgtaccgcatgtaacaattggaaaggtgtgtctggagtcggcggtggaattgcctaaaatcctttgccaagaggaacaggatgcctatcgcagaatacattctcttacccacttggatagtgtgaccaaaatacacaacggaagcgaagtatttactaagaatctttgtagccagatgtccgccgtgtccggtcctcttctgcagtggttagaagaccgactggagcagaaccagcagcacctgcaagaattgcagcaggagaaagaagagctgatgcaagagctctcaagccttgagtag

SEQ ID NO: 215175 - DNA, 2846 bp, Artificial Sequence
  derived and/or modified sequence
cggacgtgagaagggtcgggccaagatggcggtgcaggtggtgcaggcggtgcaggcggttcatctcgagtctgacgctttcctcgtttgtctcaaccacgctctgagcacagagaaggaggaagtaatggggctgtgcataggggagttgaacgatgatacaaggagtgactccaaatttgcatatactggaactgaaatgcgcacagttgctgaaaaggttgatgccgtcagaattgttcacattcattctgtcatcatcttacgacgttctgataagaggaaggaccgagtagaaatttctccagagcagctgtctgcagcttcaacagaggcagagaggttggctgaactgacaggccgccccatgagagttgtgggctggtatcattcccatcctcatataactgtttggccttcacatgttgatgttcgcacacaagccatgtaccagatgatggatcaaggctttgtaggacttattttttcctgtttcatagaagataagaacacaaagactggccgggtactctacacttgcttccaatccatacaggcccaaaagagttcagagtcccttcatggtccacgagacttctggagctccagccagcacatctccattgagggccagaaggaagaggaaaggtatgagagaatcgaaatcccaatccatattgtacctcatgtcactatcgggaaagtgtgccttgaatcagcagtagagctgcccaagatcctgtgccaggaggagcaggatgcgtataggaggatccacagccttacacatctggactcagtaaccaagatccataatggctcagtgtttaccaagaatctgtgcagtcagatgtcggcagtcagcgggcctctcctacagtggttggaggacagactggagcaaaaccaacagcatttgcaggaattacaacaagaaaaggaagagcttatgcaagaactttcttctctagaataaatcaggagacaaaatggggaaagatgaaaatatccagtgtaaagttacttaagctaaatcaatttcaaagaagaaaaacttggaggactcattttacctgacttcaagacttactataaagctatagtaatcaagatagatggtattggcagaggaacagacacatacgtcaatggaacagatgagagaacccagaaataaacccatataaatatgctcagctgattttgaaaaagtgaaaaagcaattcaatggaggaagaatagcctttctgacaaattatgctagagcaattagacacccatggcgaggagaaaaaagaacctctacttaaacctcacatcttatataaaatttaactcaaaatgtataacggacttaaatgtgatacataaaactagataactttgaaaaaagccacaggagaaaaatcttcaggatcttgggctaggtgacaagttcttggactttgccccgaaagcacatccataaaagacaaaatctgatatattggacttcttcaaaatttaaaaacttgtgatttaagaagaggaaaagataagctacagattgagatgaatttgcaaaccatatatctgatcaatttggaatatataaagtgtactaaaaactcaactgaagtcaggcatggtagctcatgcttgtaatctcaccactttgggaggccaagatgggaggagtgcttgaggttaggcgttccagaccagcctgggcaacatagtgagactcttgtctctacaaaaagtttttttaaaaaattaactgggcaccatgacacacaccagtagtcccagctactagggaggcaggaggatcacttgagcccaggagtttgaggctgcggtgagctgtgatcacaccaccacactccaacctgtgtaacagagtgaggcctcatctcaaaaaaaaaaaaaggccacaaaactcaacaataaaaacaaacagtccaattagaaaatgggcaaaagacatgaatagatgtttcactgaagaggatctatagatggcaagtaagcatatgaaaagctgttaaactccataagtcatcagggaatgcaaattgaaaccacagcgaggctatgacttacttatctcaatggctaaagaaaaaatagtgaaaataccaaatactgatgaggatacaaactggatattttatacattgctgacaggaatgtaaaatggtacagccactctgggaaagagtttatgaatttcttatcaagttaaacataattttttaatcaagttaaacataagacccagcagttgtgctcctggacattcattccagagaaatgaaaacctatattgtacttgtactcaaatattcataggagctttatttgtaatagccccaaactggaaacaacccagatgtcctacaacaggtacatggttaaacaaaccatccataacttggaatactgctctggaatgaaaaggaactaactgttgatacaagaacttggttgtacctcaggggtattatggtgaacaaaaaaaaaaccagtctcaaatggtcacatactgtatgatcgcatttatataacattcttgaggtgacaaaattattgaaatgaagaacagattaatggttgccagggatagggactggagggggtgtggggtatgtatgactataaagggatgacgcaaggagttcctttgtgctgatggaacagttctatatgattatgatgattacgatgttgattataacatttgattatgaggttaagcacatgagtctttacctgtgctgaagttgtatggacctacatacacacaaatgaatgcatgtaaaatctggtgatactgaataaagtctgtggtctagatagcagta

SEQ ID NO: 215176 - DNA, 954 bp, Artificial Sequence
  derived and/or modified sequence
atggcggtgcaggtggtgcaggcggtgcaggcggttcatctcgagtctgacgctttcctcgtttgtctcaaccacgctctgagcacagagaaggaggaagtaatggggctgtgcataggggaggtgagtagtcccagtaggagtgactccaaatttgcatatactggaactgaaatgcgcacagttgctgaaaaggttgatgccgtcagaattgttcacattcattctgtcatcatcttacgacgttctgataagaggaaggaccgagtagaaatttctccagagcagctgtctgcagcttcaacagagacacacaggttggctgaactgacaggccgccccatgagagttgtgggctggtatcattcccatcctcatataactgtttggccttcacatgttgatgttcgcacacaagccatgtaccagatgatggatcaaggctttgtaggacttattttttcctgtttcatagaagataagaacacaaagactggccgggtactctacacttgcttccaatccatacaggcccaaaagagttcagagtcccttcatggtccacgagacttctggagctccagccagcacatctccattgagggccagaaggaagaggaaaggtatgagagaatcgaaatcccaatccatattgtacctcatgtcactatcgggaaagtgtgccttgaatcagcagtagagctgcccaagatcctgtgccaggaggagcaggatgcgtataggaggatccacagccttacacatctggactcagtaaccaagatccataatggctcagaagtgtttaccaagaatctgtgcagtcagatgtcggcagtcagcgggcctctcctacagtggttggaggacagactggagcaaaaccaacagcatttgcaggaattacaacaagaaaaggaagagcttatgcaagaactttcttctctagaataa

SEQ ID NO: 215177 - DNA, 951 bp, Artificial Sequence
  derived and/or modified sequence
atggccgtgcaggtggtgcaggccgtgcaggccgtgcacctggagagcgacgccttcctggtgtgcctgaaccacgccctgagcaccgagaaggaggaggtgatgggcctgtgcatcggcgagctgaacgacgacaccagaagcgacagcaagttcgcctacaccggcaccgagatgagaaccgtggccgagaaggtggacgccgtgagaatcgtgcacatccacagcgtgatcatcctgagaagaagcgacaagagaaaggacagagtggagatcagccccgagcagctgagcgccgccagcaccgaggccgagagactggccgagctgaccggcagacccatgagagtggtgggctggtaccacagccacccccacatcaccgtgtggcccagccacgtggacgtgagaacccaggccatgtaccagatgatggaccagggcttcgtgggcctgatcttcagctgcttcatcgaggacaagaacaccaagaccggcagagtgctgtacacctgcttccagagcatccaggcccagaagagcagcgagagcctgcacggccccagagacttctggagcagcagccagcacatcagcatcgagggccagaaggaggaggagagatacgagagaatcgagatccccatccacatcgtgccccacgtgaccatcggcaaggtgtgcctggagagcgccgtggagctgcccaagatcctgtgccaggaggagcaggacgcctacagaagaatccacagcctgacccacctggacagcgtgaccaagatccacaacggcagcgtgttcaccaagaacctgtgcagccagatgagcgccgtgagcggccccctgctgcagtggctggaggacagactggagcagaaccagcagcacctgcaggagctgcagcaggagaaggaggagctgatgcaggagctgagcagcctggagtag

SEQ ID NO: 215178 - DNA, 954 bp, Artificial Sequence
  derived and/or modified sequence
atggccgtgcaggtggtgcaggccgtgcaggccgtgcacctggagagcgacgccttcctggtgtgcctgaaccacgccctgagcaccgagaaggaggaggtgatgggcctgtgcatcggcgaggtgagcagccccagcagaagcgacagcaagttcgcctacaccggcaccgagatgagaaccgtggccgagaaggtggacgccgtgagaatcgtgcacatccacagcgtgatcatcctgagaagaagcgacaagagaaaggacagagtggagatcagccccgagcagctgagcgccgccagcaccgagacccacagactggccgagctgaccggcagacccatgagagtggtgggctggtaccacagccacccccacatcaccgtgtggcccagccacgtggacgtgagaacccaggccatgtaccagatgatggaccagggcttcgtgggcctgatcttcagctgcttcatcgaggacaagaacaccaagaccggcagagtgctgtacacctgcttccagagcatccaggcccagaagagcagcgagagcctgcacggccccagagacttctggagcagcagccagcacatcagcatcgagggccagaaggaggaggagagatacgagagaatcgagatccccatccacatcgtgccccacgtgaccatcggcaaggtgtgcctggagagcgccgtggagctgcccaagatcctgtgccaggaggagcaggacgcctacagaagaatccacagcctgacccacctggacagcgtgaccaagatccacaacggcagcgaggtgttcaccaagaacctgtgcagccagatgagcgccgtgagcggccccctgctgcagtggctggaggacagactggagcagaaccagcagcacctgcaggagctgcagcaggagaaggaggagctgatgcaggagctgagcagcctggagtag

SEQ ID NO: 215179 - protein, 496 aa, Artificial Sequence
  derived and/or modified sequence
MEEQREALRKIIKTLAVKNEEIQSFIYSLKQMLLNVEANSAKVQEDLEAEFQSLFSLLEELKEGMLMKIKQDRASRTYELQNQLAACTRALESSEELLETANQTLQAMDSEDFPQAAKQIKDGVTMAPAFRLSLKAKVSDNMSHLMVDFAQERQMLQALKFLPVPSAPVIDLAESLVADNCVTLVWRMPDEDSKIDHYVLEYRRTNFEGPPRLKEDQPWMVIEGIRQTEYTLTGLKFDMKYMNFRVKACNKAVAGEFSEPVTLETPAFMFRLDASTSHQNLRVDDLSVEWDAMGGKVQDIKAREKDGKGRTASPINSPARGTPSPKRMPSGRGGRDRFTAESYTVLGDTLIDGGEHYWEVRYEPDSKAFGVGVAYRSLGRFEQLGKTAASWCLHVNNWLQVSFTAKHANKVKVLDAPVPDCLGVHCDFHQGLLSFYNARTKQVLHTFKTRFTQPLLPAFTVWCGSFQVTTGLQVPSAVRCLQKRGSATSSSNTSLT

SEQ ID NO: 215180 - DNA, 1847 bp, Artificial Sequence
  derived and/or modified sequence
ctgcgcaatgcgcgcggtgatggagcgctaaccgggggcgcggcggcggcgagggctcggcgggccattggctaccggccgcggcaaaggcagcttggggacccagcgtgcgcggggcccgcgggccgggccggggtgacctgggctgcagccatggaagaacagagggaggccctgaggaagatcatcaaaacactggctgtgaagaatgaagaaattcagagctttatctactccctgaaacagatgctgctgaacgtggaggcgaactcggcgaaggtgcaggaggacctcgaagcagagttccagtccctcttctccctcctggaggagctgaaagaaggcatgcttatgaagataaaacaggaccgtgccagccgtacctacgagctgcagaaccagctggctgcctgcacgcgggccctggagagctccgaggagcttctggagacagccaaccagactctgcaggccatggacagcgaggactttcctcaggctgccaagcaaatcaaagatggagtgaccatggcccctgccttccggctatcattgaaagcgaaggtcagtgacaacatgagtcacctcatggtggacttcgcgcaagagcggcagatgctacaggcactcaagttcctgcctgtgcccagcgcacccgtgatcgacctggctgagtccctggtggcagataactgtgtgaccctggtgtggcgcatgccggatgaggacagcaagattgaccactacgtgctggagtaccggcggaccaacttcgagggcccgccccgcctcaaggaggaccagccctggatggtcatcgagggcatccggcagacagagtacaccctgacaggtctcaagtttgacatgaaatacatgaacttccgtgtgaaggcctgtaacaaggcagttgcaggagagttctctgagccggtgactctggagacaccagcgttcatgttccgcctggatgcgtccacatcccaccagaacctgcgggtggatgatctctccgtggagtgggacgctatgggcgggaaggtgcaggatatcaaggctcgcgagaaagatggcaaggggcggacggcgtctcccatcaactccccagccagaggtactccatctcccaagaggatgccctcaggtcgtgggggacgggaccgcttcaccgctgagtcctacacagttctgggggacacgctgatcgacggcggggagcattactgggaggtgcgctacgagccggacagcaaggcgttcggcgtgggcgtggcctaccgcagcctgggccgcttcgagcaactgggcaagacggccgcctcctggtgcctgcacgtcaacaattggctgcaggtcagcttcacggccaagcacgccaacaaggtcaaggtgctggacgcccccgtgcccgactgcctgggtgtgcactgtgacttccaccaaggcctcctgtccttctacaatgcccgcaccaaacaagtgctgcacactttcaagaccaggttcacacagccgctgctgcctgctttcacggtatggtgtggcagcttccaggtgacgacaggcctgcaggtccccagtgctgtgcgctgcctgcaaaagcgaggcagtgctaccagcagctccaacaccagcctcacctaggcccccaggcacccacccagctggggtgtttttgggggagtcgccgccaagcccaggctgctggagccaggcaccctcctctgtcacttgctgcttggagccttaactccagatgggggggtcaccaagagggagtgggcaccctggcgggccctctccccacctcacctcttaataaaggtcagacactggccaggcgaggc

SEQ ID NO: 215181 - DNA, 1491 bp, Artificial Sequence
  derived and/or modified sequence
atggaggaacagcgtgaggcccttaggaaaattataaaaacactggcagttaagaatgaagagatccaaagtttcatctatagcctgaagcagatgctgcttaacgtcgaagctaacagcgcaaaggtgcaagaggatctcgaggccgaatttcaaagtctcttctccttgctcgaagagctgaaggaaggaatgcttatgaagattaagcaggaccgggcttctcggacttacgagctccagaatcagttggctgcatgtacgcgagccctggaatcatccgaggagctactggagacggccaatcaaaccctccaggcgatggattctgaagattttccacaggcggccaaacagatcaaagatggcgtaaccatggcaccagccttcaggctgtcgcttaaggccaaggtgagtgacaacatgagtcacctgatggtcgacttcgcccaagagcgacaaatgctccaggccttgaaatttctgccggtgccaagcgcccctgtgatcgacctggctgagagcctggtggcagacaactgcgtcaccctggtatggcggatgcctgacgaggattctaaaatcgaccactacgttctagagtaccgcagaacaaactttgaaggaccccctaggctcaaggaggatcaaccctggatggttatcgagggcatacgacaaactgagtatacactcaccggacttaaatttgacatgaagtacatgaattttagagtgaaggcttgcaacaaagctgtcgcgggcgaattcagcgagcccgtgaccctcgaaacccccgccttcatgttcagactagacgcctctacttcccaccagaacctgagggttgacgatctgagcgtggaatgggacgccatggggggaaaggtccaggacatcaaggcgcgcgagaaagacgggaaggggagaactgccagccccattaattccccagctcgaggcacaccctctccaaaaagaatgccatccggccgggggggcagagatcgctttaccgctgaatcgtatactgtgctgggcgacacactgatcgatggcggtgagcactactgggaggtaaggtacgagcccgactccaaggctttcggggtgggcgttgcctataggtccttaggccggtttgagcagttgggaaagacggccgcctcttggtgtttacatgtcaacaactggctccaagtgtcattcactgcaaagcatgccaataaagttaaggtcttggacgccccggtgcccgattgcttaggagttcactgcgacttccatcaagggttgctgtctttttacaatgcccgtacgaagcaggtcctccacacttttaaaaccagattcacccagcctctgttgcccgcttttaccgtctggtgtggaagtttccaggtgaccacaggtctccaggtaccttctgccgttagatgcctgcagaagcgggggtccgcaacatcttccagtaatacaagccttacatag

SEQ ID NO: 215182 - DNA, 1491 bp, Artificial Sequence
  derived and/or modified sequence
atggaggagcagcgggaggccctgaggaagatcatcaagaccctggccgtgaagaatgaggagatccagagcttcatctacagcctgaagcagatgctgctgaatgtggaggccaacagcgccaaggtgcaggaggacctggaggccgagttccagagcctcttcagcctgctggaggagctgaaggagggcatgctgatgaagatcaagcaggaccgggccagcaggacctatgagctgcagaaccagctggccgcctgcacccgggccctggagagcagcgaggagctgctggagacagccaaccagaccctgcaggccatggacagcgaggacttcccccaggccgccaagcagatcaaggatggagtgaccatggccccagccttccggctgagcctgaaggccaaggtgtctgacaacatgagccacctgatggtggactttgcccaggagcggcagatgctgcaggccctgaagttcctgcctgtgcccagcgcccctgtgattgacctggccgagagcctggtggccgacaactgtgtgaccctggtgtggaggatgccagatgaggacagcaagattgaccactacgtgctggagtacagaaggaccaactttgagggccccccccggctgaaggaggaccagccctggatggtgattgagggcatccggcagacagagtacaccctgaccggcctgaagtttgacatgaagtacatgaacttccgggtgaaggcctgcaacaaggctgtggccggggagttcagcgagcctgtgaccctggagaccccagccttcatgttccggctggatgccagcaccagccaccagaacctgcgggtggatgacctgtctgtggagtgggatgccatgggcggcaaggtgcaggacatcaaggcccgggagaaggatggcaagggccgcacagccagccccatcaacagccctgcccggggcacccccagccccaagaggatgcccagcggccggggcggccgggaccgcttcaccgctgagagctacacagtgctgggggacaccctgattgatggaggagagcactactgggaggtgcgctatgagccagacagcaaggcctttggagtgggcgtggcctaccgcagcctgggccgctttgagcagctgggcaagacagctgcctcctggtgcctgcacgtgaacaactggctgcaggtgtccttcaccgccaagcacgccaacaaggtgaaggtgctggatgcccctgtgcctgactgcctgggcgtgcactgtgacttccaccagggcctgctgtccttctacaatgcccggaccaagcaggtgctgcacaccttcaagacccgcttcacccagcccctgctgcctgccttcaccgtgtggtgtggcagcttccaggtgaccaccggcctgcaggtgcccagcgctgtgcgctgcctgcagaagaggggcagcgccaccagcagcagcaacaccagcctgacctag

SEQ ID NO: 215183 - DNA, 1491 bp, Artificial Sequence
  derived and/or modified sequence
atggaggagcagcgggaggccctgcggaagatcatcaagaccctggcagtcaagaacgaagagatccagtcctttatctacagtctaaagcagatgctgttaaacgtcgaggcaaattcggcaaaggtgcaagaagacctggaggctgaatttcaaagcttattctcgcttctggaagaattgaaagaaggtatgctgatgaagatcaaacaggatagggcctccaggacctatgagctgcaaaaccagcttgctgcttgtacccgagccctcgagagctctgaggaactgctggagacggctaatcaaaccctgcaagcaatggatagtgaggacttcccccaggccgccaagcagatcaaggatggggtgactatggcccctgccttcagacttagcctgaaggctaaagtctccgataacatgtcgcacctcatggtggattttgcacaggaacgccagatgctccaagcactgaagttcctgccagtgccctctgcacccgtgatcgacttagcagaatcactcgtggccgataactgcgtgacgcttgtctggcgaatgcctgacgaggactccaagatcgaccattatgttctggagtaccggcggacaaatttcgagggacctcctcgcctcaaggaggaccagccttggatggtgatcgagggcattcggcagaccgaatacaccctgactgggctcaagttcgacatgaaatacatgaacttcagagtgaaggcctgtaataaagccgtggcaggggaattttcagagcctgttactcttgagacaccagccttcatgttcagactggacgccagcactagccaccagaatttaagagtggacgatcttagcgtggaatgggacgcaatgggcggaaaagtccaggatatcaaggcaagggagaaagatggaaagggtcgcaccgctagcccgattaacagcccggcccgaggcacacccagccccaaacgcatgccgtctgggcgcggaggccgcgatagattcacagcagaaagctataccgtcctgggagatacacttatcgatggaggtgaacactactgggaagtccggtacgagcccgatagtaaagctttcggggtgggcgtagcataccgaagccttggaaggttcgagcaactcgggaagaccgctgccagctggtgcttacacgtgaataactggctacaggtgagtttcaccgctaaacatgccaacaaggtcaaggtgctcgatgcacctgtgcccgattgcctcggagtccattgtgatttccatcagggcttgttgtccttctataatgccagaacaaagcaagtgttacatacattcaaaacacgcttcacccagccgctcttaccagcattcacagtgtggtgcggatcattccaagtcacaacaggcctgcaagtgccatctgccgttagatgtctccaaaagcgtgggtcggccacctcaagctccaatacttctctgacatag

SEQ ID NO: 215184 - DNA, 1491 bp, Artificial Sequence
  derived and/or modified sequence
atggaggaacaaagggaggccctccgaaagataattaaaacactggcggttaagaatgaggagatccagagtttcatttatagccttaaacagatgctgctgaatgttgaagccaacagcgctaaggtgcaggaggatctcgaggccgaatttcaatctctgtttagccttttggaagaattaaaagaggggatgctgatgaaaatcaaacaggacagagccagcaggacctacgaactgcagaaccagttggctgcctgtactagagccctggaaagctcggaagaactcctagagaccgctaatcagacgcttcaagctatggatagcgaggacttcccacaggccgctaaacaaatcaaggatggagtgacaatggctcccgcattcaggcttagcttaaaagccaaagtgtctgataacatgtctcacctcatggtggatttcgcccaggagcggcaaatgctgcaggctttgaagttcctaccagttcctagcgctcccgtgatcgatctcgctgaatcgctagtggctgataattgcgtcacccttgtctggcgtatgcctgacgaggactctaagatcgaccactacgtcctagaatatcgccgtactaacttcgagggcccaccccgactcaaagaggaccagccatggatggtaattgaaggcatacggcaaacagagtacacgctcacaggcctgaagtttgatatgaaatatatgaacttccgagtcaaggcctgcaataaggcggtcgctggagaatttagcgagcctgtgaccctggagacccctgcctttatgttccggctagacgcatccacatcacaccagaatctgcgagtcgatgacctgtccgtggaatgggatgccatgggaggaaaagtacaggacatcaaggcgcgtgaaaaggacggaaaaggaagaactgcaagcccaatcaattcccctgccagaggaaccccatcacctaaaaggatgccctctgggagagggggaagggataggtttaccgccgagtcgtatacagtcctaggtgatactctaattgacgggggagaacattactgggaggtccggtatgaaccggactctaaagccttcggagtgggagtcgcctaccgtagtctcggtcggttcgaacagttgggcaagacggccgctagttggtgcctgcacgtgaataactggcttcaggtgtcattcacagccaagcacgcaaacaaggttaaagtgctcgatgctcctgtccccgactgtctcggggtacactgcgactttcatcaagggctcctgtccttctacaacgctcgcacaaagcaagtgcttcacacatttaagacccgcttcacgcaaccattgctgccagccttcactgtgtggtgcggcagcttccaggtgacaaccggactacaggtgccctcagccgtgcgatgcttgcaaaagcgcggtagcgcaacatcctctagcaacacatccctgacatag

SEQ ID NO: 215185 - DNA, 1491 bp, Artificial Sequence
  derived and/or modified sequence
atggaggagcagagagaggccctgagaaagatcatcaagaccctggccgtgaagaacgaggagatccagagcttcatctacagcctgaagcagatgctgctgaacgtggaggccaacagcgccaaggtgcaggaggacctggaggccgagttccagagcctgttcagcctgctggaggagctgaaggagggcatgctgatgaagatcaagcaggacagagccagcagaacctacgagctgcagaaccagctggccgcctgcaccagagccctggagagcagcgaggagctgctggagaccgccaaccagaccctgcaggccatggacagcgaggacttcccccaggccgccaagcagatcaaggacggcgtgaccatggcccccgccttcagactgagcctgaaggccaaggtgagcgacaacatgagccacctgatggtggacttcgcccaggagagacagatgctgcaggccctgaagttcctgcccgtgcccagcgcccccgtgatcgacctggccgagagcctggtggccgacaactgcgtgaccctggtgtggagaatgcccgacgaggacagcaagatcgaccactacgtgctggagtacagaagaaccaacttcgagggcccccccagactgaaggaggaccagccctggatggtgatcgagggcatcagacagaccgagtacaccctgaccggcctgaagttcgacatgaagtacatgaacttcagagtgaaggcctgcaacaaggccgtggccggcgagttcagcgagcccgtgaccctggagacccccgccttcatgttcagactggacgccagcaccagccaccagaacctgagagtggacgacctgagcgtggagtgggacgccatgggcggcaaggtgcaggacatcaaggccagagagaaggacggcaagggcagaaccgccagccccatcaacagccccgccagaggcacccccagccccaagagaatgcccagcggcagaggcggcagagacagattcaccgccgagagctacaccgtgctgggcgacaccctgatcgacggcggcgagcactactgggaggtgagatacgagcccgacagcaaggccttcggcgtgggcgtggcctacagaagcctgggcagattcgagcagctgggcaagaccgccgccagctggtgcctgcacgtgaacaactggctgcaggtgagcttcaccgccaagcacgccaacaaggtgaaggtgctggacgcccccgtgcccgactgcctgggcgtgcactgcgacttccaccagggcctgctgagcttctacaacgccagaaccaagcaggtgctgcacaccttcaagaccagattcacccagcccctgctgcccgccttcaccgtgtggtgcggcagcttccaggtgaccaccggcctgcaggtgcccagcgccgtgagatgcctgcagaagagaggcagcgccaccagcagcagcaacaccagcctgacctag

SEQ ID NO: 215186 - protein, 400 aa, Artificial Sequence
  derived and/or modified sequence
MAANYSSTSTRREHVKVKTSSQPGFLERLSETSGGMFVGLMAFLLSFYLIFTNEGRALKTATSLAEGLSLVVSPDSIHSVAPENEGRLVHIIGALRTSKLLSDPNYGVHLPAVKLRRHVEMYQWVETEESREYTEDGQVKKETRYSYNTEWRSEIINSKNFDREIGHKNPSAMAVESFMATAPFVQIGRFFLSSGLIDKVDNFKSLSLSKLEDPHVDIIRRGDFFYHSENPKYPEVGDLRVSFSYAGLSGDDPDLGPAHVVTVIARQRGDQLVPFSTKSGDTLLLLHHGDFSAEEVFHRELRSNSMKTWGLRAAGWMAMFMGLNLMTRILYTLVDWFPVFRDLVNIGLKAFAFCVATSLTLLTVAAGWLFYRPLWALLIAGLALVPILVARTRVPAKKLE

SEQ ID NO: 215187 - DNA, 1203 bp, Artificial Sequence
  derived and/or modified sequence
atggccgccaactacagcagcaccagcaccagaagagagcacgtgaaggtgaagaccagcagccagcccggcttcctggagagactgagcgagaccagcggcggcatgttcgtgggcctgatggccttcctgctgagcttctacctgatcttcaccaacgagggcagagccctgaagaccgccaccagcctggccgagggcctgagcctggtggtgagccccgacagcatccacagcgtggcccccgagaacgagggcagactggtgcacatcatcggcgccctgagaaccagcaagctgctgagcgaccccaactacggcgtgcacctgcccgccgtgaagctgagaagacacgtggagatgtaccagtgggtggagaccgaggagagcagagagtacaccgaggacggccaggtgaagaaggagaccagatacagctacaacaccgagtggagaagcgagatcatcaacagcaagaacttcgacagagagatcggccacaagaaccccagcgccatggccgtggagagcttcatggccaccgcccccttcgtgcagatcggcagattcttcctgagcagcggcctgatcgacaaggtggacaacttcaagagcctgagcctgagcaagctggaggacccccacgtggacatcatcagaagaggcgacttcttctaccacagcgagaaccccaagtaccccgaggtgggcgacctgagagtgagcttcagctacgccggcctgagcggcgacgaccccgacctgggccccgcccacgtggtgaccgtgatcgccagacagagaggcgaccagctggtgcccttcagcaccaagagcggcgacaccctgctgctgctgcaccacggcgacttcagcgccgaggaggtgttccacagagagctgagaagcaacagcatgaagacctggggcctgagagccgccggctggatggccatgttcatgggcctgaacctgatgaccagaatcctgtacaccctggtggactggttccccgtgttcagagacctggtgaacatcggcctgaaggccttcgccttctgcgtggccaccagcctgaccctgctgaccgtggccgccggctggctgttctacagacccctgtgggccctgctgatcgccggcctggccctggtgcccatcctggtggccagaaccagagtgcccgccaagaagctggagtag

SEQ ID NO: 215188 - DNA, 1203 bp, Artificial Sequence
  derived and/or modified sequence
atggccgctaactattcctcaacaagcaccagaagagagcacgttaaagtcaagacaagcagtcagcctggcttcctggaaagactgagtgagacaagcggaggaatgtttgttggtctcatggctttcctcttgtcattttacctcatcttcactaacgaaggacgggctctgaaaacagccacaagtctagcagagggactgagccttgtggtctctccagatagcatccatagtgtggccccagaaaatgagggcagactggtgcatataatcggggctctcagaacgagcaagctactgagcgatccaaactacggcgttcatctgccagccgtgaaactgagacgtcatgtggaaatgtatcagtgggtcgaaactgaggaaagtcgtgagtataccgaagatggccaggtgaagaaagaaacacggtattcttacaataccgagtggcgctctgagatcataaatagtaagaattttgacagagagatcgggcacaaaaaccccagtgcgatggccgtggaatcattcatggcgaccgcacccttcgtgcagatcggaaggtttttccttagttcagggctcatcgacaaggtagataacttcaaaagcctaagtctcagtaaattggaggatccgcacgtggacatcatccgtcgaggagacttcttttaccactcggagaatcctaagtatccggaggtcggcgatttaagagtctccttcagctacgcgggtctgtcgggggatgatcccgatctaggccctgcacacgtggtaacagtcatagctcgacaacggggggaccagctcgtgcctttctctaccaagtccggggacacgctcttactgctgcatcatggagatttctcggccgaagaggttttccatagagagcttagatccaactctatgaaaacctgggggcttagagcagcaggatggatggctatgttcatggggctgaacctgatgacacgcattctttataccctcgtggattggttcccagtctttcgcgatttagtgaatattgggttgaaggccttcgctttttgcgtggcaactagccttacacttcttacagtggcagctgggtggctattctataggcccctctgggctcttctgattgcagggctcgccctcgtgcccattctggtcgcaaggacccgggtccccgccaaaaagttggaatag

SEQ ID NO: 215189 - DNA, 1203 bp, Artificial Sequence
  derived and/or modified sequence
atggccgccaactacagcagcaccagcacccggcgggagcacgtgaaggtgaagaccagcagccagcccggcttcctggagcggctgtctgagaccagcggcggcatgtttgtgggcctgatggccttcctgctgtccttctacctgatcttcaccaatgaaggccgggccctgaagacagccaccagcctggccgagggcctgagcctggtggtgtccccagacagcatccacagcgtggccccagaaaatgaaggccgcctggtgcacatcatcggggccctgcggaccagcaagctgctgagtgaccccaactacggcgtgcacctgcctgctgtgaagctgcggcggcacgtggagatgtaccagtgggtggagacagaggagagccgggagtacacagaagatggccaggtgaagaaggagacccgctacagctacaacacagagtggaggtctgagatcatcaacagcaagaactttgaccgggagatcggccacaagaaccccagcgccatggctgtggagagcttcatggccacagccccctttgtgcagatcggccgcttcttcctgagcagcggcctgattgacaaggtggacaacttcaagagcctgagcctgagcaagctggaggacccccacgtggacatcatccggcggggggacttcttctaccacagcgagaaccccaagtacccagaggtgggggacctgcgggtgtccttctcctatgccggcctgtctggagatgatcctgacctgggccctgcccacgtggtgaccgtcatcgcccggcagagaggagaccagctggtgcccttcagcaccaagagcggggacaccctgctgctgctgcaccacggggacttctctgctgaggaggtgttccaccgggagctgcggagcaacagcatgaagacctggggcctgcgggccgccggctggatggccatgttcatgggcctgaacctgatgacccgcatcctgtacaccctggtggactggttccctgtgttccgggacctggtgaacatcggcctgaaggcctttgccttctgtgtggccaccagcctgaccctgctgactgtggccgccggctggctgttctaccggcccctgtgggccctgctgattgctggcctggccctggtgcccatcctggtggcccggaccagggtgcctgccaagaagctggagtag

SEQ ID NO: 215190 - DNA, 1203 bp, Artificial Sequence
  derived and/or modified sequence
atggccgccaactacagcagcaccagcacccggcgggagcacgtgaaggtcaagacctcttcacagccaggatttctggagcggctgagcgagacatcaggcggcatgtttgtgggtttgatggcctttttattgtcattttatttgattttcacaaatgaagggcgcgctctgaagacagcaacatcgctagccgaaggcctgagcttagtggtgtcacctgattctattcactccgtggctccagaaaatgaggggaggttagtgcatatcatcggggccctacggacatctaagctcctctcggatcctaactatggcgtacatttacctgcagtgaagctaagacgccacgtggaaatgtatcaatgggtggagacggaagagtctcgggagtatacagaagatggacaggttaaaaaggagacacgttattcctataacaccgaatggaggagcgaaatcatcaacagtaaaaactttgatagggaaataggtcacaaaaatcctagcgccatggcggtggaaagctttatggccaccgcgccatttgtgcagatagggagattctttctcagcagtgggttaatcgataaggtagacaactttaaaagcctgagcttgtcaaagctcgaagacccccacgtggacatcatccgacgcggtgactttttttaccattcagagaaccccaagtaccccgaggtcggggatcttcgggtgtccttttcatacgccggcctgagtggcgacgacccagacttgggacctgcccacgttgtcaccgtaatcgcccgtcagcggggagaccagctggtacctttcagtaccaagagtggtgatactctgttgttattacatcacggtgacttctccgctgaggaggtgttccacagagaattgcggagtaactccatgaagacttggggcctgcgcgctgccgggtggatggccatgtttatgggactgaatctcatgacacgtattctgtatacccttgtagactggttccccgtttttcgggacctggtgaatatagggctcaaggccttcgccttctgcgtcgcgacttcgctgactttactgactgtggccgctgggtggctgttttaccgccctctctgggccctactcatcgccgggctggctctagtgcccattctcgtagcaagaactcgagtacctgcgaagaaactcgagtag

SEQ ID NO: 215191 - DNA, 1203 bp, Artificial Sequence
  derived and/or modified sequence
atggccgctaattacagctcaaccagtaccaggagagaacatgtcaaggttaagacctcctctcagccagggtttctcgagcgcctctcagagaccagtgggggaatgtttgtggggttgatggccttccttctgtcattctacctgatattcactaacgaaggacgagccctgaagacagccacttccctagccgaggggctgtcactggtggtctccccagattctattcactcagtcgcccctgaaaacgagggcaggctcgtgcatattattggtgctcttcgcacaagcaagctgctctccgaccctaactatggcgtgcacctccccgctgtgaagctccgccgtcatgtggagatgtatcagtgggtcgaaacagaggagtctcgcgaatataccgaggatgggcaggtgaaaaaagaaactcggtacagctacaatacagagtggcgcagcgagattattaactccaaaaactttgacagagaaatcggacataaaaatccttcggccatggctgtggaaagtttcatggcgacagcccctttcgttcagatcggcaggttcttcctatcaagtggcttaatcgacaaggttgataacttcaaatctctctcgctttccaagcttgaggaccctcatgttgacattataagaagaggggacttcttctaccactccgagaatcccaagtacccagaggtgggggacctgcgggtgagctttagttacgctggattgtcaggggacgacccagacctgggacccgctcatgtagtcaccgtgattgcaaggcaacggggagatcaactcgtccccttctccacaaagtcaggggacaccttactgctgttacatcatggagacttttcagctgaagaggtttttcaccgcgaattgaggtctaattctatgaagacatggggtctcagggctgccggttggatggcaatgtttatgggattgaatctgatgacgagaattctgtacacgctggttgactggtttccggtctttagggatctggtaaatatcggactgaaggcattcgccttttgcgtggctaccagcctcactctgctgaccgtggccgctgggtggctgttctacagaccattatgggcactgttaatagccggattggctctggtacccatcctggtggctagaacccgtgtgcctgcaaagaagctcgagtag

SEQ ID NO: 215192 - DNA, 3341 bp, Artificial Sequence
  derived and/or modified sequence
tttgcagtgcgcaggcgcatcaatgaggtactgcaatgtcccggaccgtatagtttccaggacgtctcgccgcgcgcatgcgcagaaacactgggcacagggggaggtaactgcagtaagtcccgcttggccctggagtccacgcggattttcgaagctggggctggcaagaggccgctggacaccacgctccagtcgtcagcccacttcctagctgaacagcgcgaggcggcggcagcgagccgggtcccaccatggccgcgaattattccagtaccagtacccggagagaacatgtcaaagttaaaaccagctcccagccaggcttcctggaacggctgagcgagacctcgggtgggatgtttgtggggctcatggccttcctgctctccttctacctaattttcaccaatgagggccgcgcattgaagacggcaacctcattggctgaggggctctcgcttgtggtgtctcccgacagcatccacagtgtggctccggagaatgaaggaaggctggtgcacatcattggcgccttacggacatccaagcttttgtctgatccaaactatggggtccatcttccggctgtgaaactgcggaggcacgtggagatgtaccaatgggtagaaactgaggagtccagggagtacaccgaggatgggcaggtgaagaaggagacgaggtattcctacaacactgaatggaggtcagaaatcatcaacagcaaaaacttcgaccgagagattggccacaaaaaccccagtgccatggcagtggagtcattcatggcaacagccccctttgtccaaattggcaggtttttcctctcgtcaggcctcatcgacaaagtcgacaacttcaagtccctgagcctatccaagctggaggaccctcatgtggacatcattcgccgtggagactttttctaccacagcgaaaatcccaagtatccagaggtgggagacttgcgtgtctccttttcctatgctggactgagcggcgatgaccctgacctgggcccagctcacgtggtcactgtgattgcccggcagcggggtgaccagctagtcccattctccaccaagtctggggataccttactgctcctgcaccacggggacttctcagcagaggaggtgtttcatagagaactaaggagcaactccatgaagacctggggcctgcgggcagctggctggatggccatgttcatgggcctcaaccttatgacacggatcctctacaccttggtggactggtttcctgttttccgagacctggtcaacattggcctgaaagcctttgccttctgtgtggccacctcgctgaccctgctgaccgtggcggctggctggctcttctaccgacccctgtgggccctcctcattgccggcctggcccttgtgcccatccttgttgctcggacacgggtgccagccaaaaagttggagtgaaaagaccctggcacccgcccgacacctgcgtgagccctaggatccaggtcctctctcacctctgacccagctccatgccagagcaggagccccggtcaattttggactctgcactccctctcctcttcaggggccagacttggcagcatgtgcaccaggttggtgttcaccagctcatgtcttccccacatctcttcttgccagtaagcagctttggtgggcagcagcagctcatgaatggcaagctgacagcttctcctgctgtttccttcctctcttggactgagtgggtacggccagccactcagcccattggcagctgacaacgcagacacgctctacggaggcctgctgataaagggctcagccttgccgtgtgctgcttctcatcactgcacacaagtgccatgctttgccaccaccaccaagcacatctgtgatcctgaagggcggccgttagtcattactgctgagtcctgggtcaccagcagacacactgggcatggacccctcaaagcaggcacacccaaaacacaagtctgtggctagaacctgatgtggtgtttaaaagagaagaaacactgaagatgtcctgaggagaaaagctggacatatactgggcttcacacttatcttatggcttggcagaatctttgtagtgtgtgggatctctgaaggccctatttaagtttttcttcgttactttgctgcttcatgtgtactttcctaccccaagaggaagttttctgaaataagatttaaaaacaaaacaaaaaaaacacttaatatttcagactgttacaggaaacaccctttagtctgtcagttgaattcagagcactgaaaggtgttaaattggggtatgtggtttgattgataaaaagttacctctcagtattttgtgtcactgagaagctttacaatggatgcttttgaaacaagtatcagcaaaaggatttgttttcactctgggaggagagggtggagaaagcacttgctttcatcctctggcatcggaaactcccctatgcacttgaagatggtttaaaagattaaagaaacgattaagagaaaaggttggaagctttatactaaatgggctccttcatggtgacgccccgtcaaccacaatcaagaactgaggcctgaggctggttgtacaatgcccacgcctgcctggctgctttcacctgggagtgctttcgatgtgggcacctgggcttcctagggctgcttctgagtggttctttcacgtgttgtgtccatagctttagtcttcctaaataagatccacccacacctaagtcacagaatttctaagttccccaactactctcacacccttttaaagataaagtatgttgtaaccaggatgtcttaaatgattctttgtgtaccttttctgtcatattcagaaaccgttttgtgcctgctgggagtaattcctttagcaattaagtatttggtagctgaataaggggtcagaacttctgaaaccagagatctgtaatcatctctattggcctggggtgcctgtgctataaatgagtttcttcacatgaaaaacacagccagcccaagatgacttatctgggtttaggattcaatagtattcactaactgcttattacatgagcaatttcatcaaatctccaaactcttaaaggatgctttcggaaaacacgctgtatacctagatgatgactaaatgcaaaatccttgggctttggtttttttctagtaaggattttaaataactgccgacttcaaaagtgttcttaaaacgaaagataatgttaagaaaaatttgaaagctttggaaaaccaaatttgtaatatcattgtattttttattaaaagttttgtaataaatttctaaattat

SEQ ID NO: 215193 - protein, 501 aa, Artificial Sequence
  derived and/or modified sequence
MSFPQLGYQYIRPLYPSERPGAAGGSGGSAGARGGLGAGASELNASGSLSNVLSSVYGAPYAAAAAAAAAQGYGAFLPYAAELPIFPQLGAQYELKDSPGVQHPAAAAAFPHPHPAFYPYGQYQFGDPSRPKNATRESTSTLKAWLNEHRKNPYPTKGEKIMLAIITKMTLTQVSTWFANARRRLKKENKMTWAPRSRTDEEGNAYGSEREEEDEEEDEEDGKRELELEEEELGGEEEDTGGEGLADDDEDEEIDLENLDGAATEPELSLAGAARRDGDLGLGPISDSKNSDSEDSSEGLEDRPLPVLSLAPAPPPVAVASPSLPSPPVSLDPCAPAPAPASALQKPKIWSLAETATSPDNPRRSPPGAGGSPPGAAVAPSALQLSPAAAAAAAHRLVSAPLGKFPAWTNRPFPGPPPGPRLHPLSLLGSAPPHLLGLPGAAGHPAAAAAFARPAEPEGGTDRCSALEVEKKLLKTAFQPVPRRPQNHLDAALVLSALSSS

SEQ ID NO: 215194 - DNA, 259 bp, Artificial Sequence
  derived and/or modified sequence
cgcgcagtatgagctgaaggacagccccggggtgcagcatccggccgcggctgccgcgtttccgcacccgcaccccgccttctacccgtatggccagtaccagttcggagacccgtcccgtcccaagaacgccaccagggagagcaccagcacgctgaaggcctggctcaacgagcaccgcaagaacccctaccccaccaagggcgagaagatcatgctggccatcatcaccaagatgaccctcacccaggtgtccacc

SEQ ID NO: 215195 - DNA, 1506 bp, Artificial Sequence
  derived and/or modified sequence
atgtcgtttccccaactgggatatcagtatatccggcccctctatccatctgagaggcccggagctgcgggggggtccggcggttctgccggggccaggggagggctcggggccggagcaagcgagcttaacgcctccggcagcttaagcaatgtactgtctagcgtgtacggcgcaccttatgcagctgcggccgccgccgccgccgctcagggctatggtgcgtttttgccttatgccgctgaactacctatcttcccccaactgggcgctcagtacgaactgaaagatagccctggtgtccagcatccagcagcggctgccgcttttcctcacccccatcctgcattctatccctatgggcagtaccagttcggcgacccttctaggccaaagaatgcgacacgcgagtcaaccagcaccctgaaggcctggttaaacgaacacaggaaaaatccatacccaactaagggcgagaagattatgttggctataattacaaaaatgacactgacgcaggtatctacctggttcgccaacgctaggaggaggctgaagaaagagaacaagatgacttgggcccctcgaagtcgaacagacgaggaggggaacgcttatggttctgaacgggaggaagaagacgaagaggaggatgaggaagacggaaagcgagagctggagctggaagaggaggaactcggcggggaggaggaggacaccggcggcgagggactggccgacgacgacgaagacgaagagatcgatctggagaatttagatggagccgccacagagcccgagctatccctggctggagcagctaggagagatggcgatctgggtcttggtccaattagtgactctaaaaatagcgactcagaagactcaagcgaagggttggaggataggcctcttcctgtcctaagcctggccccagctcctccacccgttgcagtcgcctcaccttcccttccttctccgcccgtgtccctcgatccatgtgcccccgcacctgctccggcctctgccctgcaaaagccaaagatatggagtctcgcagagactgctactagccccgacaatcccaggagatctcccccaggcgcaggtggttcaccacctggcgccgccgtagcgccatctgcgctccaactgtccccggcagccgccgctgctgccgcacaccgccttgttagcgcccctctcggcaagtttccagcctggacaaataggccttttccaggccccccacccggcccacgcctgcatccgctttcactcctagggtctgcccctccccaccttcttgggctgccgggggcagccgggcaccccgccgcagctgctgctttcgctcgacccgctgaaccagagggaggcactgaccgatgctccgctctggaggtggaaaaaaaacttctgaaaactgctttccagccagtgcctcgaaggccacagaatcacctagacgcagccctggttctctcagctctttcaagtagctag

SEQ ID NO: 215196 - DNA, 2601 bp, Artificial Sequence
  derived and/or modified sequence
cgcgcggcaccctaagtgtccacaacttttggctgccttacttagcccagggcgcagaggctggaaaggtcgcggggagtatcgtgtgagtaaagagagagatttacaaaatagaagtagtgagaaaggaagaagtgaagggaacggaccggagagcaaaagccctcgtgagaaagggaaagagaaggggagaggagaaaggagagtttcatagcgtccagggcagtgcaggagcccgaagcagcggaagcgatcctggggggaagaggagtgcggagaggggaggggagaggaagggcgaggagggggagtgaaaactagaggagggcgaaggaagcgaggcgcgacactgctggggagaggagggcagtgaggagcgaggagcgggcagaggcagctccggcggccgagaggagggagcgcggcgcagagaggaggggcttgcgccccgtagaaatgtcaatcagagcccggagccccgggaatctccgccaatctgttcggacctgacctggctcctcgccgccgccctcgccgccgccgtcgccgccgcggagcagatcaataggcgaacgcggagcacagcgcagcgcgggcggcagcgcggccccaagcccggcccagcccccgatgcgcgccggagcccgcgggcggcgctgagctgggcggcccgggggtcggcccccctctccgtccgtgccccgcgggccaccatgtccttcccccagctgggataccaatacatccgcccgctttacccgtccgagcgcccgggggccgctggcggcagcggcggcagcgcgggggcccggggcggcctgggtgccggagcctcggagctgaacgcctcggggtccctgtccaacgtgctctcgtccgtgtacggggcgccctacgccgcggccgctgcggccgccgccgcccaaggctacggcgccttcctgccctacgccgcggagctgcccatcttcccgcagctgggcgcgcagtatgagctgaaggacagccccggggtgcagcatccggccgcggctgccgcgtttccgcacccgcaccccgccttctacccgtatggccagtaccagttcggggacccgtcccgtcccaagaacgccaccagggagagcaccagcacgctgaaggcctggctcaacgagcaccgcaagaacccctaccccaccaagggcgagaagatcatgctggccatcatcaccaagatgaccctcacccaggtgtccacctggttcgccaacgcgcgccggcgcctcaagaaggagaataagatgacttgggcgcctcgcagccgcactgacgaggagggaaacgcttatgggagcgagcgcgaggaggaagacgaagaggaggacgaggaggacggcaaacgcgagctagagctggaggaggaggagctcgggggggaggaggaggacacggggggcgagggcctggctgacgacgacgaggacgaggagatcgatttggagaacttagacggcgcggccaccgagcctgagctgtccctggctggggcggcgcgcagggatggcgacctaggcctgggacccatttcggactccaaaaatagcgactcggaagatagctctgagggcttagaggaccggccactaccggtcctgagtctggctccagcgccaccaccagtggccgtggcctcgccgtctctgccgtcgccccccgtgagcctggacccctgcgctcccgcaccagcccccgcctccgccctgcagaagcccaagatctggtccctcgcggagactgccacaagcccggacaacccgcgccgctcgcctcccggcgcgggggggtctccaccgggggcagcggtcgcgccttccgccctgcagctctctccggccgccgccgccgccgccgctcacagactggtctcagcgccgctgggcaagttcccggcttggaccaaccggccgtttccaggcccaccgcccggcccccgcctgcacccgctctccctgctgggctctgcccctccgcacctgctgggacttcccggagccgcgggccacccggctgccgccgccgccttcgctcggccagcggagcccgaaggcggaacagatcgctgtagtgccttggaagtggagaaaaagttactcaagacagctttccagcccgtgcccaggcggccccagaaccatctggacgccgccctggtcttatcggctctctcctcatcctagttctttaaaaaaaacaaaaaaacaaaaaaaactttttttaatcgttgtaataattgtataaaaaaaatcgctctgtatagttacaacttgtaagcatgtccgtgtataaatacctaaaagcaaaactaaacaaagaaagtaagaaaaagaaataaaaccagtcctcctcagccctccccaagtcgcttctgtggcaccccgcattcgctgtgaggtttgtttgtccggttgattttggggggtggagtttcagtgagaataaacgtgtctgcctttgtgtgtgtgtatatatacagagaaatgtacatatgtgtgaaccaaattgtacgagaaagtatctatttttggctaaataaatgagctgctgccactttgactataa

SEQ ID NO: 215197 - DNA, 1506 bp, Artificial Sequence
  derived and/or modified sequence
atgtccttcccccagctgggctaccagtacatccggcccctgtaccccagcgagaggcctggagctgctgggggcagcggcggcagcgctggggcccggggcggcctgggcgctggggccagcgagctgaatgccagcggcagcctgagcaatgtgctgagctctgtgtatggagccccctatgctgctgctgctgctgctgctgctgcccagggctatggagccttcctgccctatgctgctgagctgcccatcttcccccagctgggcgcccagtatgagctgaaggacagccctggggtgcagcaccctgctgctgctgctgccttcccccacccccacccagccttctacccctacggccagtaccagtttggagaccccagccggcccaagaatgccacccgggagagcaccagcaccctgaaggcctggctgaatgagcacaggaagaacccctaccccaccaagggggagaagatcatgctggccatcatcaccaagatgaccctgacccaggtgtccacctggtttgccaatgcccggcggcggctgaagaaggagaacaagatgacctgggcccccaggagcaggacagatgaggagggcaatgcctacggcagcgagcgggaggaggaggatgaggaggaggatgaggaggatggcaagcgggagctggagctggaggaggaggagctgggcggggaggaggaggacaccggcggggagggcctggctgatgatgatgaagatgaggagattgacctggagaacctggatggagctgccacagagcctgagctgagcctggccggggccgccaggagagatggagacctgggcctgggccccatcagtgacagcaagaacagcgacagcgaggacagcagcgagggcctggaggaccggcccctgcctgtgctgagcctggccccagcccctcctcctgtggccgtggccagccccagcctgcccagcccccctgtgtccctggacccctgtgccccagccccagccccagccagcgccctgcagaagcccaagatctggagcctggccgagacagccaccagcccagacaaccccaggaggagccccccaggagctgggggcagccccccaggagctgctgtggcccccagcgccctgcagctgagccctgctgctgctgctgctgctgcccaccggctggtgtctgcccccctgggcaagtttcctgcctggaccaaccggcccttccctggccccccacctggcccccggctgcaccccctgagcctgctgggcagcgccccaccccacctgctgggcctgcctggagctgctggccaccctgctgctgctgctgcctttgcccggcctgctgagcctgagggcggcacagaccgctgcagcgccctggaggtggagaagaagctgctgaagacagccttccagcctgtgccccggcggccccagaaccacctggatgctgccctggtgctgagcgccctgagcagcagctag

SEQ ID NO: 215198 - DNA, 1506 bp, Artificial Sequence
  derived and/or modified sequence
atgagcttcccccagctgggctaccagtacatccggcccctgtaccccagtgaacgccccggtgccgctgggggctccggcggctcagccggcgccagagggggcctgggcgcaggggcatccgagctgaacgcctctggatctctgagtaacgtcttgagcagcgtgtacggtgcgccctatgcagccgcggccgctgcagcagcagctcagggatacggggccttccttccttatgcggccgagcttcccatctttccccagttaggggcacaatacgagctcaaggactctcccggggtgcagcatcccgctgcggccgcggcttttccacatccacaccctgccttttatccctacgggcaataccagttcggtgacccatcccggccaaagaacgccacccgcgagtcaacttctacgctgaaagcttggttgaatgagcatcgcaaaaacccttacccaaccaagggtgaaaaaatcatgcttgccattattacaaagatgacactgacccaggtttccacctggtttgctaatgccagacggcgcctgaagaaggaaaacaaaatgacctgggctccacggagccggacagacgaagaaggtaatgcctatggcagcgaacgggaggaagaggacgaggaggaagacgaagaagatggcaaacgggaattggagctagaggaggaagaacttggaggagaagaagaagacacaggaggggaaggtctcgcagacgacgacgaagacgaagagatcgaccttgaaaatctggatggagcagccacggagccagagctcagtctggcaggggctgctcggcgggacggagatctgggcctgggccccatctccgactctaagaactcagactctgaagacagttctgaaggattggaggatcggcctctcccagttctatcgctcgctcctgcacctccacccgttgctgttgcatcacctagcttaccgtcgccgccggtctcactagacccatgcgctccggcacccgccccagcctctgccttacagaagcccaaaatttggtccttggcagaaactgctacgtcccccgataaccccagaaggtcccctccaggcgctgggggcagccccccaggtgcggcagtagctccatccgcactccagctttccccagctgcagcagcagcagccgctcaccgcctggtgtctgcacctctcggcaaattccctgcttggaccaacaggccattccccggacctcccccgggccccaggcttcacccactctccctccttggatcggccccaccccacctgctggggctgcctggggccgcaggacatccagccgcggccgccgcattcgcaagacccgctgagcccgaaggggggacagacagatgctctgccctggaagtggagaagaagctgctaaagaccgcttttcaacctgtgccaaggcgacctcagaaccacctggacgctgcactggtcctatccgcgctgagcagttcatag

SEQ ID NO: 215199 - DNA, 1506 bp, Artificial Sequence
  derived and/or modified sequence
atgagtttccctcagctgggttaccagtacatccggccactctacccaagcgagcggcctggcgcagcaggcggatcaggtggctccgccggagcgagaggaggcctgggagcaggggcttccgagctcaatgcctcagggtccctgtctaatgttctgagttcagtctatggcgcaccttatgcggcagcggctgcagccgcagccgctcagggatacggcgcatttctcccctacgccgcagagctacccattttcccgcagctcggcgctcagtacgagctcaaggattctcccggtgtgcagcaccccgcagctgctgctgcattcccacatcctcacccggcattttacccatacgggcagtaccagtttggcgatccctccagacctaagaatgctaccagggaaagtactagcaccctgaaggcatggctgaatgaacaccgaaaaaatccctacccaactaagggcgagaagatcatgctcgccatcattaccaagatgacgctcacccaggtctccacatggttcgctaacgctagacggagattgaagaaagagaacaaaatgacatgggcccctcggtctagaaccgatgaggaggggaatgcttatggctccgaaagggaggaggaagacgaagaagaggatgaggaggacgggaagagagagctggagttggaggaagaggagcttgggggagaggaggaagataccggaggtgaaggactggctgacgatgacgaagacgaagaaatcgacctggagaatttagacggcgctgccacagaaccagagctttctttagcaggggcagcccgtcgggatggagacctggggttgggcccaatcagcgactctaagaacagtgactcagaagactcctcggagggcctggaagataggcctctacccgttctctcactggcccctgcccctcctccggtggcggtggctagtccctctctgccctctccccctgtgtccctagatccctgcgcgccagctcccgcaccggcatcagccctgcagaagccaaagatttggagtctagctgagactgccacctcaccagataatccaagaagatccccgccaggagccggagggagtccgccaggagcggctgtggccccatccgctcttcagttgagtccagcggcagctgctgcagcggctcatcggttggttagcgcacctctcggaaagtttccagcatggaccaatcgaccatttccaggacctcctcccggaccacggctgcaccccctttccctgctagggagcgcgccaccccacctgctcggcctgccaggtgcagccggtcacccagccgctgctgccgcattcgcacgccctgccgaaccggaaggaggaaccgaccgctgcagcgctctggaggtcgagaagaaactcctgaagaccgccttccagccagtcccaaggcgaccacagaatcacctagatgctgcactggtccttagtgcactgagttcatcatag

SEQ ID NO: 215200 - DNA, 1506 bp, Artificial Sequence
  derived and/or modified sequence
atgagcttcccccagctgggctaccagtacatcagacccctgtaccccagcgagagacccggcgccgccggcggcagcggcggcagcgccggcgccagaggcggcctgggcgccggcgccagcgagctgaacgccagcggcagcctgagcaacgtgctgagcagcgtgtacggcgccccctacgccgccgccgccgccgccgccgccgcccagggctacggcgccttcctgccctacgccgccgagctgcccatcttcccccagctgggcgcccagtacgagctgaaggacagccccggcgtgcagcaccccgccgccgccgccgccttcccccacccccaccccgccttctacccctacggccagtaccagttcggcgaccccagcagacccaagaacgccaccagagagagcaccagcaccctgaaggcctggctgaacgagcacagaaagaacccctaccccaccaagggcgagaagatcatgctggccatcatcaccaagatgaccctgacccaggtgagcacctggttcgccaacgccagaagaagactgaagaaggagaacaagatgacctgggcccccagaagcagaaccgacgaggagggcaacgcctacggcagcgagagagaggaggaggacgaggaggaggacgaggaggacggcaagagagagctggagctggaggaggaggagctgggcggcgaggaggaggacaccggcggcgagggcctggccgacgacgacgaggacgaggagatcgacctggagaacctggacggcgccgccaccgagcccgagctgagcctggccggcgccgccagaagagacggcgacctgggcctgggccccatcagcgacagcaagaacagcgacagcgaggacagcagcgagggcctggaggacagacccctgcccgtgctgagcctggcccccgcccccccccccgtggccgtggccagccccagcctgcccagcccccccgtgagcctggacccctgcgcccccgcccccgcccccgccagcgccctgcagaagcccaagatctggagcctggccgagaccgccaccagccccgacaaccccagaagaagcccccccggcgccggcggcagcccccccggcgccgccgtggcccccagcgccctgcagctgagccccgccgccgccgccgccgccgcccacagactggtgagcgcccccctgggcaagttccccgcctggaccaacagacccttccccggccccccccccggccccagactgcaccccctgagcctgctgggcagcgcccccccccacctgctgggcctgcccggcgccgccggccaccccgccgccgccgccgccttcgccagacccgccgagcccgagggcggcaccgacagatgcagcgccctggaggtggagaagaagctgctgaagaccgccttccagcccgtgcccagaagaccccagaaccacctggacgccgccctggtgctgagcgccctgagcagcagctag

SEQ ID NO: 215201 - protein, 480 aa, Artificial Sequence
  derived and/or modified sequence
MSFPQLGYPQYLSAAGPGAYGGERPGVLAAAAAAAAAASSGRPGAAELGGGAGAAAVTSVLGMYAAAGPYAGAPNYSAFLPYAADLSLFSQMGSQYELKDNPGVHPATFAAHTAPAYYPYGQFQYGDPGRPKNATRESTSTLKAWLNEHRKNPYPTKGEKIMLAIITKMTLTQVSTWFANARRRLKKENKVTWGARSKDQEDGALFGSDTEGDPEKAEDDEEIDLESIDIDKIDEHDGDQSNEDDEDKAEAPHAPAAPSALARDQGSPLAAADVLKPQDSPLGLAKEAPEPGSTRLLSPGAAAGGLQGAPHGKPKIWSLAETATSPDGAPKASPPPPAGHPGAHGPSAGAPLQHPAFLPSHGLYTCHIGKFSNWTNSAFLAQGSLLNMRSFLGVGAPHAAPHGPHLPAPPPPQPPVAIAPGALNGDKASVRSSPTLPERDLVPRPDSPAQQLKSPFQPVRDNSLAPQEGTPRILAALPSA

SEQ ID NO: 215202 - DNA, 280 bp, Artificial Sequence
  derived and/or modified sequence
cgcggatctcagcctcttctcgcagatgggctcgcagtatgaactgaaggacaaccctggggtgcaccccgccaccttcgcagcccacacggcgccggcttattacccctacggccagttccaatacggggaccccgggcggcccaagaacgccacccgcgagaacaccagcacgctcaaggcctggctcaacgagcaccgcaagaatccctaccccaccaagggcgagaagatcatgctggccatcatcaccaagatgaccctcacgcaggtctccacc

SEQ ID NO: 215203 - DNA, 1443 bp, Artificial Sequence
  derived and/or modified sequence
atgtccttcccacaattgggataccctcagtacctgtccgccgccggccccggcgcctacgggggggagaggccaggtgtgctagccgctgcggccgcagccgctgccgccgctagcagtggccgcccaggcgccgctgagctcggcggcggcgctggcgccgccgccgttacatcagttctcggtatgtatgccgcggcagggccttacgccggggctccgaactactctgcctttttaccttatgccgcagatctgtctctgttctcacagatgggttcgcaatacgaactcaaggacaatcccggcgtgcatcctgccacattcgcggcccacacagcaccggcttattatccctatggacagtttcagtacggcgacccgggcaggcccaagaacgctactagggaatccacctctactttaaaggcttggctcaatgagcacagaaaaaatccgtatcctacgaagggagaaaaaataatgctggcgattatcacaaaaatgacacttacacaagtgtccacgtggttcgcaaatgccagaagacgcctgaaaaaagagaacaaagtgacctggggcgctaggtcaaaggatcaggaagacggggccctgtttggaagtgataccgaaggagaccccgaaaaggccgaagacgatgaagaaatcgacttggaaagtattgatatagacaagatagacgaacatgatggggatcaaagcaacgaagacgatgaggataaagcagaggctccccacgcaccagctgctccctccgccctggcccgcgatcaaggctcccccctggcagccgctgatgtcctcaaaccacaggattctccacttggcttagccaaagaggctcccgaaccggggagcaccagactgcttagtccgggagcagctgccggggggctacagggggcacctcacggcaaacccaagatctggtcgctggctgagaccgcaaccagtcctgacggcgctccaaaggcttcaccaccaccgcctgctggccacccgggtgcccacggaccatccgctggtgccccattgcaacatccagcattcctccccagccacggactgtatacctgtcacatcggaaaattttctaattggacaaatagcgcattcctggcacagggttccctgttaaacatgaggagctttcttggcgtaggcgccccacacgcagccccccatggcccacatcttccagcccccccccccccccagccgccagtggcaattgcacctggggccctgaacggggacaaggcgagtgtgaggagttcccctaccttacccgagagagacttggtgcctcggcccgattcccctgcgcagcaattaaaaagtccgtttcaacctgttagggacaacagtcttgccccgcaagaagggacacccaggatcctcgccgccctccccagtgcttag

SEQ ID NO: 215204 - DNA, 1858 bp, Artificial Sequence
  derived and/or modified sequence
ctccccgcgcctttaatactcgcccgctgcggcggtcgccgagtccgcggacatgtccttcccgcagctgggctacccgcagtacctgagcgccgcggggccgggcgcctacggcggcgagcgcccgggggtgctggccgcggccgctgcggcggctgccgccgcctcgtcgggccgaccgggggccgcggagctgggcggcggggcaggcgcggctgcagtcacctcggtgctgggcatgtacgcggcggcggggccgtacgcgggcgcgcccaactacagcgccttcctgccctacgccgcggatctcagcctcttctcgcagatgggctcgcagtatgaactgaaggacaaccctggggtgcaccccgccaccttcgcagcccacacggcgccggcttattacccctacggccagttccaatacggggaccccgggcggcccaagaacgccacccgcgagagcaccagcacgctcaaggcctggctcaacgagcaccgcaagaatccctaccccaccaagggcgagaagatcatgctggccatcatcaccaagatgaccctcacgcaggtctccacctggttcgccaacgcgcgccggcgcctcaagaaggagaacaaggtgacatggggagcgcgcagcaaggaccaggaagatggagcgctcttcggcagcgacaccgagggcgacccggagaaggccgaggacgacgaggagatcgacctggaaagcatcgacattgacaagatcgacgagcacgatggcgaccagagcaacgaggatgacgaggacaaggccgaggctccgcacgcgcccgcagccccttctgctcttgcccgggaccaaggctcgccgctggcagcagccgacgttctcaagccccaggactcgcccttgggcctggcaaaggaggccccagagccgggcagcacgcgcctgctgagccccggcgctgcagcgggcggcctgcagggtgcgccgcacggcaagcccaagatctggtcgctggcggagacagccacgagccccgacggtgcgcccaaggcttcgccaccaccacccgcgggccaccccggcgcgcacgggccctccgccggggcgccgctgcaacaccccgccttcctgcctagccacggactgtacacctgccacatcggcaagttctccaactggaccaacagcgcattcctcgcacagggctccctgctcaacatgcgctccttcctgggcgttggcgctccccacgccgcgccccatggccctcaccttcctgcacctccaccaccgcagccgccggtcgctattgccccgggggcactcaatggagacaaggcctcggtccgcagcagccccacgctcccagagagagacctcgtccccaggccagattcgccggcacagcagttaaagtcgcccttccagccggtacgcgacaactctctggccccgcaggagggaacgccgcggatcctagcagccctcccgtccgcctgattaagggtcttcttttacttttgcgggggggaggggggaggagttggggagggagggaatgtgggaggaattaagacaaatatttcagactggtgtaaaggacaaatatgacaacgacgtcaaggactcgcatccgtcgctttctgcagaaaggggcttcttcggtcccgagctcgcgtccaggtggccaggcctctgccggcggctccagtggctgcgattatcgggttcggtaaatgcccccacgtgcttgtgtctctttccccccttttctgtatatagagtggtttcagattgtaaatagcgcgtcagcgaacttgtctaaatcatatatttttgtctaataaactaaatgaaatgaca

SEQ ID NO: 215205 - DNA, 1443 bp, Artificial Sequence
  derived and/or modified sequence
atgtccttcccccagctgggctacccccagtacctgtctgctgctggccctggggcctacggcggggagaggcctggggtgctggccgctgctgctgctgctgctgctgctgccagcagcggccggcctggagctgctgagctgggcggcggggccggggctgctgctgtgacctctgtgctgggcatgtatgctgctgctggcccctatgctggggcccccaactacagcgccttcctgccctatgctgctgacctgagcctcttcagccagatgggcagccagtatgagctgaaggacaaccctggggtgcacccagccacctttgctgcccacacagccccagcctactacccctacggccagttccagtatggagaccccggccggcccaagaatgccacccgggagagcaccagcaccctgaaggcctggctgaatgagcacaggaagaacccctaccccaccaagggggagaagatcatgctggccatcatcaccaagatgaccctgacccaggtgtccacctggtttgccaatgcccggcggcggctgaagaaggagaacaaggtgacctggggcgcccggagcaaggaccaggaggatggagccctgtttggaagtgacacagaaggagaccctgagaaggccgaggatgatgaggagattgacctggagagcattgacatcgacaagattgatgaacatgatggagaccagagcaatgaagatgatgaggacaaggccgaggcccctcatgccccagctgcccccagcgccctggcccgggaccagggcagccccctggccgctgctgatgtgctgaagccccaggacagccccctgggcctggccaaggaggcccctgagcccggcagcacccggctgctgagccctggagctgctgctgggggcctgcagggcgcccctcatggcaagcccaagatctggagcctggccgagacagccaccagcccagatggagcccccaaggccagccccccacctcctgctggccaccctggggcccacggccccagcgctggggcccccctgcagcacccagccttcctgcccagccacggcctgtacacctgccacatcggcaagttcagcaactggaccaacagcgccttcctggcccagggcagcctgctgaacatgaggagcttcctgggcgtgggcgcccctcatgctgccccccacggcccccacctgcctgcccctcctccaccccagccccctgtggccatcgcccctggggccctgaatggagacaaggcctctgtgcgcagcagccccaccctgcctgagcgggacctggtgcccaggccagacagccctgcccagcagctgaagagccccttccagcctgtgcgggacaacagcctggccccccaggagggcaccccccgcatcctggccgccctgcccagcgcctag

SEQ ID NO: 215206 - DNA, 1443 bp, Artificial Sequence
  derived and/or modified sequence
atgagcttcccccagctgggctacccccagtacctgagcgccgccggacctggagcctacggcggtgaaagaccgggcgtgctagcagctgcggctgcagccgccgcagcagcatcttcgggacgacctggtgcagcagaattgggcgggggggccggagctgcagccgtgactagtgtgcttggtatgtatgccgccgcagggccttacgctggggcacccaattattcggcctttcttccgtacgccgctgatttgagcctgttttctcagatgggaagccagtacgaactcaaagacaaccccggtgtccatccagccaccttcgcagcacacactgctccggcctattacccctatggccagttccagtatggagaccccggcaggccgaaaaatgcaacacgggagagcacatcgacactgaaggcttggctaaatgagcaccgcaagaatccttaccccacaaaaggagagaaaataatgctcgcgatcataacgaaaatgacgctgactcaggtgtctacttggtttgcgaacgccaggagacgtctgaaaaaagagaacaaggtgacatggggggcacgtagcaaagaccaggaagatggggctctattcgggtctgataccgaaggagacccagagaaagccgaagatgacgaagagatcgacctcgagagcatcgatattgataagatagatgagcacgacggcgaccagtctaacgaggacgacgaagataaggccgaggcccctcatgctcctgccgccccgagcgctcttgcccgggatcagggaagccccttagccgccgccgatgtgttgaaacctcaggattcaccattgggtctcgcaaaggaagcaccggaaccaggcagtacaagactgttgagccccggtgctgctgctggtgggctacaaggggccccacacggaaagcctaagatttggagcttggcagaaacagctacgtctcctgatggggccccaaaagccagtccaccaccgcctgccggacatcccggtgcacatgggccctctgcgggcgcccctttgcagcacccagcattcctgcctagccacggtttgtatacctgccatatcggcaagttctcaaattggacgaattcggctttcctggcacaagggagtctgctgaacatgcgctccttcctcggcgtcggcgccccccacgccgctcctcacggacctcatcttcccgctccccctcccccccaaccacctgtggccatcgcgcccggagctctcaatggcgacaaggctagtgtgcgatccagccctactctccccgagcgcgacctggtgcccaggcctgactctcccgcccagcagttgaaaagtccttttcagcccgttagagacaactcactggcaccgcaggagggaactccaaggattctcgccgcgctaccctcagcttag

SEQ ID NO: 215207 - DNA, 1443 bp, Artificial Sequence
  derived and/or modified sequence
atgagcttcccacaattaggatatcctcagtatctttcagcagccggtcctggtgcatatggtggtgaacgtccaggcgtattggccgctgctgcagcggctgccgctgcagcctctagcgggcgaccgggtgccgctgagctgggcggaggggctggggcagctgccgtaacgtcagtgctgggaatgtacgccgctgccggaccttatgctggcgcaccaaattacagcgccttcctcccgtacgcagcagacctcagcctgtttagccaaatgggtagccagtatgaattgaaagataaccctggggttcacccagcaactttcgccgcacacacagcgccagcgtactatccatatggacagtttcaatatggggaccctgggaggccaaagaacgcaacgagagagagtactagtactctcaaagcctggctgaatgaacatcggaagaatccctatcccacaaagggcgaaaagatcatgcttgcgatcattactaaaatgacactaacgcaagtgagcacctggttcgcaaacgcacggagaagactgaaaaaagaaaacaaggttacctggggcgcacggtccaaggaccaggaagacggtgctttatttggcagcgacactgaaggcgatcctgagaaggccgaggacgacgaagagattgacctcgaatccatagatattgacaaaatcgatgagcacgatggggaccagtccaacgaggatgacgaagacaaggccgaggcgcctcatgcaccagctgctccctcagccctggcaagagaccaggggtcccccctagccgctgccgatgtactgaaaccccaggactcacctctgggcctcgcgaaagaggcacctgagccaggcagcactagactcctttcacccggtgctgccgctggcggtctgcagggcgctccgcacggcaaaccaaaaatttggtccctggccgaaactgctacttctcctgatggtgcaccaaaggcctcaccaccccctccagctgggcaccctggcgctcacgggccaagtgcaggtgccccactccagcaccccgcattcttaccctcccacggcctgtacacctgtcacatcggtaagttctctaactggactaacagtgcatttctcgctcagggttctctgctgaacatgagaagcttcctcggggtgggagcacctcacgccgctccccatggccctcacttgcccgcaccaccgccacctcagccacccgttgctattgctcccggagctctgaacggagataaggcatctgttaggtcctcacccactcttcctgaacgagatttagtacccagacccgattcccccgcacagcagctgaagtccccatttcagcccgtgcgggataattcacttgctccccaagagggtacacccaggatattagcggcattgcctagcgcttag

SEQ ID NO: 215208 - DNA, 1443 bp, Artificial Sequence
  derived and/or modified sequence
atgagcttcccccagctgggctacccccagtacctgagcgccgccggccccggcgcctacggcggcgagagacccggcgtgctggccgccgccgccgccgccgccgccgccgccagcagcggcagacccggcgccgccgagctgggcggcggcgccggcgccgccgccgtgaccagcgtgctgggcatgtacgccgccgccggcccctacgccggcgcccccaactacagcgccttcctgccctacgccgccgacctgagcctgttcagccagatgggcagccagtacgagctgaaggacaaccccggcgtgcaccccgccaccttcgccgcccacaccgcccccgcctactacccctacggccagttccagtacggcgaccccggcagacccaagaacgccaccagagagagcaccagcaccctgaaggcctggctgaacgagcacagaaagaacccctaccccaccaagggcgagaagatcatgctggccatcatcaccaagatgaccctgacccaggtgagcacctggttcgccaacgccagaagaagactgaagaaggagaacaaggtgacctggggcgccagaagcaaggaccaggaggacggcgccctgttcggcagcgacaccgagggcgaccccgagaaggccgaggacgacgaggagatcgacctggagagcatcgacatcgacaagatcgacgagcacgacggcgaccagagcaacgaggacgacgaggacaaggccgaggccccccacgcccccgccgcccccagcgccctggccagagaccagggcagccccctggccgccgccgacgtgctgaagccccaggacagccccctgggcctggccaaggaggcccccgagcccggcagcaccagactgctgagccccggcgccgccgccggcggcctgcagggcgccccccacggcaagcccaagatctggagcctggccgagaccgccaccagccccgacggcgcccccaaggccagcccccccccccccgccggccaccccggcgcccacggccccagcgccggcgcccccctgcagcaccccgccttcctgcccagccacggcctgtacacctgccacatcggcaagttcagcaactggaccaacagcgccttcctggcccagggcagcctgctgaacatgagaagcttcctgggcgtgggcgccccccacgccgccccccacggcccccacctgcccgcccccccccccccccagccccccgtggccatcgcccccggcgccctgaacggcgacaaggccagcgtgagaagcagccccaccctgcccgagagagacctggtgcccagacccgacagccccgcccagcagctgaagagccccttccagcccgtgagagacaacagcctggccccccaggagggcacccccagaatcctggccgccctgcccagcgcctag

SEQ ID NO: 215209 - protein, 341 aa, Artificial Sequence
  derived and/or modified sequence
MERAVPLAVPLGQTEVFQALQRLHMTIFSQSVSPCGKFLAAGNNYGQIAIFSLSSALSSEAKEESKKPVVTFQAHDGPVYSMVSTDRHLLSAGDGEVKAWLWAEMLKKGCKELWRRQPPYRTSLEVPEINALLLVPKENSLILAGGDCQLHTMDLETGTFTRVLRGHTDYIHCLALRERSPEVLSGGEDGAVRLWDLRTAKEVQTIEVYKHEECSRPHNGRWIGCLATDSDWMVCGGGPALTLWHLRSSTPTTIFPIRAPQKHVTFYQDLILSAGQGRCVNQWQLSGELKAQVPGSSPGLLSLSLNQQPAAPECKVLTAAGNSCRVDVFTNLGYRAFSLSF

SEQ ID NO: 215210 - DNA, 1026 bp, Artificial Sequence
  derived and/or modified sequence
atggagcgggctgtgcccctcgctgtgcctctggggcaaaccgaagtgttccaggctctgcagcgattgcatatgactattttcagccagtccgtcagtccctgtggcaagttcctggccgctggaaataactatggacaaatcgctatattctccctgagtagtgctcttagctccgaggccaaagaagaaagcaagaaacccgtggttacgttccaggcgcacgatggccctgtctactccatggtcagtaccgaccgccacctgctgagtgctggtgacggcgaagtaaaagcttggctttgggccgagatgcttaagaaaggctgtaaggagctttggaggagacaacccccctacagaacttccctcgaggtaccggagattaacgctctgctcctggtgcccaaagagaattcattgatcttggccggaggggactgtcaactgcacaccatggacctggagaccggcaccttcactagggtgctgcgtggacatacagattacatacactgccttgcattgagagaacgaagcccagaggtgctgtctggcggagaggatggggcagttcgcctctgggacctgcggaccgcaaaggaggtgcaaacgatcgaagtttataagcatgaggagtgtagccggcctcacaatggccgctggattggatgcctggcaacagattccgattggatggtctgtggcgggggccctgccctcaccctgtggcacctgagatcatcaactcccacaaccatattccccatacgcgcccctcagaagcatgtcacgttctatcaagacctgattctaagcgccggccaggggcgctgcgtgaaccaatggcaactgagcggagagctgaaagcccaagtccccggcagcagtcccggactgttgtccctctctttgaatcaacagcccgctgcgcccgaatgcaaggttttaactgccgctggaaactcctgcagggtagacgtgtttaccaacctgggataccgggctttttccttgtctttttag

SEQ ID NO: 215211 - DNA, 1026 bp, Artificial Sequence
  derived and/or modified sequence
atggagagagctgtgcccctggccgtgcccctgggccagacagaggtgttccaggccctgcagaggctgcacatgaccatcttcagccagagcgtgagcccctgtgggaagttcctggccgccggcaacaactacggccagatcgccatcttcagcctgagcagcgccctgagcagcgaggccaaggaggagagcaagaagcctgtggtgaccttccaggcccatgatggccctgtgtacagcatggtgtccacagacagacacctgctgtctgctggagatggagaggtgaaggcctggctgtgggccgagatgctgaagaagggctgcaaggagctgtggaggcggcagcccccctaccgcaccagcctggaggtgcctgagatcaatgccctgctgctggtgcccaaggagaacagcctcatcctggccggcggggactgccagctgcacaccatggacctggagaccggcaccttcaccagggtgctgcggggccacacagactacatccactgcctggccctgcgggagaggagccctgaggtgctgtctggaggagaagatggagctgtgcggctgtgggacctgaggacagccaaggaggtgcagaccatcgaggtgtacaagcatgaagaatgttcccggccccacaacggccgctggattggctgcctggccacagacagcgactggatggtgtgtggcggcggccctgccctgaccctgtggcacctgcggagcagcacccccaccaccatcttccccatccgggccccccagaagcacgtgaccttctaccaggacctgatcctgtctgctggccagggccgctgtgtgaaccagtggcagctgagcggggagctgaaggcccaggtgcccggcagcagccctggcctgctgagcctgagcctgaaccagcagcctgctgcccctgagtgcaaggtgctgacagctgctggcaacagctgccgggtggatgtgttcaccaacctgggctaccgggccttcagcctgtccttctag

SEQ ID NO: 215212 - DNA, 1026 bp, Artificial Sequence
  derived and/or modified sequence
atggagcgggccgtgcccctggccgtgcccctgggccagaccgaggtctttcaagctttgcaacggttacatatgacaatattcagccagtccgtatcaccttgcggtaaatttcttgcagccgggaataactatggtcagatcgccattttttcattatccagcgcactctcatccgaggccaaggaagaaagcaagaagccggtcgtcactttccaagctcacgacggaccggtatattccatggtgtccaccgaccggcacctgctgtccgccggagacggggaggtgaaggcttggttatgggccgaaatgcttaagaaggggtgcaaagaactctggcgacgccagcctccatatcgaactagccttgaagtacctgagattaatgcacttctgctggtgcccaaagagaatagccttatcctggcaggcggcgattgtcaactccacacgatggatctagagaccggcacatttacgagggtgttaagaggacacacagactatatccattgcttagctctcagagagcgctcgccggaagtgctctccggcggggaagatggcgcagtgagactgtgggacctgaggaccgccaaagaggtccagaccatcgaggtatataagcacgaagagtgtagcagaccccataatggacggtggattgggtgcctcgctacagatagcgattggatggtctgcggagggggtcccgctctgacattatggcatcttaggagttcaacgcctactacaatatttccaattagagcgccccagaagcacgttaccttttaccaggatctaatcctatctgcaggacaaggccggtgcgttaaccagtggcagctaagtggggagctaaaggctcaggtgcctggcagcagccctgggttgctctccctttctttgaaccagcagcccgcagctcccgagtgcaaagttctgactgccgctggcaacagctgtagggtggacgtctttacaaacctggggtatcgggccttctctctctcattttag

SEQ ID NO: 215213 - DNA, 1420 bp, Artificial Sequence
  derived and/or modified sequence
gggcacagccgcgaggttctgcgcgggcgcggaagacgggcggcgcgtggcggaaggcaggcttgctcctcggggtgggggagggtatccggcttaagggggctgcggtggacaccacttcttaatgtcgggggtcttcgcggcgctcacctcggctcctagggttcgggacggtacgcaccagccaccttcgcgccgaaggcggtagggcgccacggagaggaaccgctctaggcacgtaaggcctcgtgaggttgcgtcgcgcgcggagcactctgggacttgtagttctggagatggagcgagctgtgccgctcgcggtgcctctgggtcagacagaggtgttccaggccttgcagcggctccatatgaccatcttctcccagagcgtctcaccatgtgggaagtttctggcggctggcaacaattacgggcagattgccatcttcagcttgtcctctgctttgagctcagaagccaaagaggaaagtaagaagccggtggtgactttccaagcccatgatgggcccgtctatagcatggtttccaccgatcgacatctgcttagtgctggggatggggaggtgaaggcctggctttgggcggagatgctcaagaagggctgtaaggagctgtggcgtcgtcagcctccatacaggaccagcctggaagtgcctgagatcaacgctttgctgctggtccccaaggagaattccctcatcctggctgggggagactgtcagttgcacactatggaccttgaaactgggactttcacgagggtcctccggggccacacagactacatccactgcctggcactgcgggaaaggagcccagaggtgctgtcaggtggcgaggatggagctgttcgactttgggacctgcgcacagccaaggaggtccagacgatcgaggtctataagcacgaggagtgctcgaggccccacaatgggcgctggattggatgtttggcaactgattccgactggatggtctgtggagggggcccagccctcaccctctggcacctccgatcctccacacccaccaccatcttccccatccgggcgccacagaagcacgtcaccttctaccaggacctgattctgtcagctggccagggccgctgcgtcaaccagtggcagctgagcggggagctgaaggcccaggtgcctggctcctccccagggctgctcagcctcagcctcaaccagcagcctgccgcgcctgagtgcaaggtcctgacagctgcaggcaacagctgccgggtggatgtcttcaccaacctgggttaccgagccttctccctgtccttctgatctctgacgacacccccagccagctcagggttttagagtgtttttcattttctttttttttttttttttacaataaagtttcaggcttttttaccatg

SEQ ID NO: 215214 - DNA, 1026 bp, Artificial Sequence
  derived and/or modified sequence
atggaaagagctgtaccgctggctgtccctctgggtcagactgaagtttttcaggctctccagagactccatatgaccatcttttcacaatctgtctctccatgcggtaagttcctggctgccggaaacaattatggccagatagccattttcagtctcagttctgctctgagctcggaagctaaggaagagtcaaagaagccagtcgtcacgtttcaggctcacgacggccctgtgtacagtatggtctccacagaccggcatctgttgtcagccggtgacggcgaggtgaaggcctggctgtgggcggagatgctgaagaagggctgtaaggagctttggcgaagacaacccccttacaggacaagcctggaagttcccgaaattaacgctctgttactggtgccaaaagagaactcactgatcctagcgggaggcgactgccaactccacactatggacctcgagaccggtacgttcaccagagtgcttcgcggtcacactgactacattcattgtctagccttacgggagcgcagtcctgaggtactgagtggcggagaagacggggcagtgcggctctgggatttgagaaccgccaaggaggtacaaactatagaggtgtataaacatgaggaatgctccaggccccacaatggacgatggatagggtgtctggctacagatagcgactggatggtgtgcggaggcggtccagcccttaccctttggcacttacgtagtagcacccctacgactatttttcccatccgcgctccacagaaacatgtcacgttctaccaggaccttattctaagtgcaggccaagggcgatgtgtcaatcaatggcagctgagtggcgaactgaaggctcaggttccgggttctagccccggtttgttatctctgtccctgaatcagcagccggctgccccagagtgcaaggtactgaccgctgcaggcaactcctgtagggtggatgtgttcaccaacctgggatatcgtgcattttcactgagcttctag

SEQ ID NO: 215215 - DNA, 1026 bp, Artificial Sequence
  derived and/or modified sequence
atggagagagccgtgcccctggccgtgcccctgggccagaccgaggtgttccaggccctgcagagactgcacatgaccatcttcagccagagcgtgagcccctgcggcaagttcctggccgccggcaacaactacggccagatcgccatcttcagcctgagcagcgccctgagcagcgaggccaaggaggagagcaagaagcccgtggtgaccttccaggcccacgacggccccgtgtacagcatggtgagcaccgacagacacctgctgagcgccggcgacggcgaggtgaaggcctggctgtgggccgagatgctgaagaagggctgcaaggagctgtggagaagacagcccccctacagaaccagcctggaggtgcccgagatcaacgccctgctgctggtgcccaaggagaacagcctgatcctggccggcggcgactgccagctgcacaccatggacctggagaccggcaccttcaccagagtgctgagaggccacaccgactacatccactgcctggccctgagagagagaagccccgaggtgctgagcggcggcgaggacggcgccgtgagactgtgggacctgagaaccgccaaggaggtgcagaccatcgaggtgtacaagcacgaggagtgcagcagaccccacaacggcagatggatcggctgcctggccaccgacagcgactggatggtgtgcggcggcggccccgccctgaccctgtggcacctgagaagcagcacccccaccaccatcttccccatcagagccccccagaagcacgtgaccttctaccaggacctgatcctgagcgccggccagggcagatgcgtgaaccagtggcagctgagcggcgagctgaaggcccaggtgcccggcagcagccccggcctgctgagcctgagcctgaaccagcagcccgccgcccccgagtgcaaggtgctgaccgccgccggcaacagctgcagagtggacgtgttcaccaacctgggctacagagccttcagcctgagcttctag

SEQ ID NO: 215216 - protein, 815 aa, Artificial Sequence
  derived and/or modified sequence
MPTVISASVAPRTAAEPRSPGPVPHPAQSKATEAGGGNPSGIYSAIISRNFPIIGVKEKTFEQLHKKCLEKKVLYVDPEFPPDETSLFYSQKFPIQFVWKRPPEICENPRFIIDGANRTDICQGELGDCWFLAAIACLTLNQHLLFRVIPHDQSFIENYAGIFHFQFWRYGEWVDVVIDDCLPTYNNQLVFTKSNHRNEFWSALLEKAYAKLHGSYEALKGGNTTEAMEDFTGGVAEFFEIRDAPSDMYKIMKKAIERGSLMGCSIDDGTNMTYGTSPSGLNMGELIARMVRNMDNSLLQDSDLDPRGSDERPTRTIIPVQYETRMACGLVRGHAYSVTGLDEVPFKGEKVKLVRLRNPWGQVEWNGSWSDRWKDWSFVDKDEKARLQHQVTEDGEFWMSYEDFIYHFTKLEICNLTADALQSDKLQTWTVSVNEGRWVRGCSAGGCRNFPDTFWTNPQYRLKLLEEDDDPDDSEVICSFLVALMQKNRRKDRKLGASLFTIGFAIYEVPHQMHGNKQHLQKDFFLYNASKARSKTYINMREVSQRFRLPPSEYVIVPSTYEPHQEGEFILRVFSEKRNLSEEVENTISVDRPVPIIFVSDRANSNKELGVDQESEEGKGKTSPDKQKQSPQPQPGSSDQESEEQQQFRNIFKQIAGDDMEICADELKKVLNTVVNKHKDLKTHGFTLESCRSMIALMDTDGSGKLNLQEFHHLWNKIKAWQKIFKHYDTDQSGTINSYEMRNAVNDAGFHLNNQLYDIITMRYADKHMNIDFDSFICCFVRLEGMFRAFHAFDKDGDGIIKLNVLEWLQLTMYA

SEQ ID NO: 215217 - protein, 156 aa, Artificial Sequence
  derived and/or modified sequence
MEICADELKKVLNTVVNKHKDLKTHGFTLESCRSMIALMDTDGSGKLNLQEFHHLWNKIKAWQKIFKHYDTDQSGTINSYEMRNAVNDAGFHLNNQLYDIITMRYADKHMNIDFDSFICCFVRLEGMFRAFHAFDKDGDGIIKLNVLEWLQLTMYA

SEQ ID NO: 215218 - protein, 728 aa, Artificial Sequence
  derived and/or modified sequence
MSWQISLKTQTTQQKNEICENPRFIIDGANRTDICQGELGDCWFLAAIACLTLNQHLLFRVIPHDQSFIENYAGIFHFQFWRYGEWVDVVIDDCLPTYNNQLVFTKSNHRNEFWSALLEKAYAKLHGSYEALKGGNTTEAMEDFTGGVAEFFEIRDAPSDMYKIMKKAIERGSLMGCSIDDGTNMTYGTSPSGLNMGELIARMVRNMDNSLLQDSDLDPRGSDERPTRTIIPVQYETRMACGLVRGHAYSVTGLDEVPFKGEKVKLVRLRNPWGQVEWNGSWSDRWKDWSFVDKDEKARLQHQVTEDGEFWMSYEDFIYHFTKLEICNLTADALQSDKLQTWTVSVNEGRWVRGCSAGGCRNFPDTFWTNPQYRLKLLEEDDDPDDSEVICSFLVALMQKNRRKDRKLGASLFTIGFAIYEVPKEMHGNKQHLQKDFFLYNASKARSKTYINMREVSQRFRLPPSEYVIVPSTYEPHQEGEFILRVFSEKRNLSEEVENTISVDRPVPIIFVSDRANSNKELGVDQESEEGKGKTSPDKQKQSPQPQPGSSDQESEEQQQFRNIFKQIAGDDMEICADELKKVLNTVVNKHKDLKTHGFTLESCRSMIALMDTDGSGKLNLQEFHHLWNKIKAWQKIFKHYDTDQSGTINSYEMRNAVNDAGFHLNNQLYDIITMRYADKHMNIDFDSFICCFVRLEGMFRAFHAFDKDGDGIIKLNVLEWLQLTMYA

SEQ ID NO: 215219 - protein, 815 aa, Artificial Sequence
  derived and/or modified sequence
MPTVISASVAPRTAAEPRSPGPVPHPAQSKATEAGGGNPSGIYSAIISRNFPIIGVKEKTFEQLHKKCLEKKVLYVDPEFPPDETSLFYSQKFPIQFVWKRPPEICENPRFIIDGANRTDICQGELGDCWFLAAIACLTLNQHLLFRVIPHDQSFIENYAGIFHFQFWRYGEWVDVVIDDCLPTYNNQLVFTKSNHRNEFWSALLEKAYAKLHGSYEALKGGNTTEAMEDFTGGVAEFFEIRDAPSDMYKIMKKAIERGSLMGCSIDDGTNMTYGTSPSGLNMGELIARMVRNMDNSLLQDSDLDPRGSDERPTRTIIPVQYETRMACGLVRGHAYSVTGLDEVPFKGEKVKLVRLRNPWGQVEWNGSWSDRWKDWSFVDKDEKARLQHQVTEDGEFWMSYEDFIYHFTKLEICNLTADALQSDKLQTWTVSVNEGRWVRGCSAGGCRNFPDTFWTNPQYRLKLLEEDDDPDDSEVICSFLVALMQKNRRKDRKLGASLFTIGFAIYEVPKEMHGNKQHLQKDFFLYNASKARSKTYINMREVSQRFRLPPSEYVIVPSTYEPHQEGEFILRVFSEKRNLSEEVENTISVDRPVPIIFVSDRANSNKELGVDQESEEGKGKTSPDKQKQSPQPQPGSSDQESEEQQQFRNIFKQIAGDDMEICADELKKVLNTVVNKHKDLKTHGFTLESCRSMIALMDTDGSGKLNLQEFHHLWNKIKAWQKIFKHYDTDQSGTINSYEMRNAVNDAGFHLNNQLYDIITMRYADKHMNIDFDSFICCFVRLEGMFRAFHAFDKDGDGIIKLNVLEWLQLTMYA

SEQ ID NO: 215220 - DNA, 2448 bp, Artificial Sequence
  derived and/or modified sequence
atgcccaccgtaatctccgcgtccgtggctccacgaactgccgccgagccaagatccccagggcctgtccctcatccagctcagagcaaggccactgaggccgggggagggaatcctagtggtatctacagtgcaatcatatctagaaatttcccaataatcggcgtgaaggagaagacgtttgagcagttacacaagaaatgtctggagaagaaagtgctgtacgtggatcccgagttcccaccagatgagacgtccctgttctattctcagaagttccctatccaattcgtttggaaaaggccaccggagatctgtgaaaatccccgcttcattatcgacggagctaacaggacggacatctgccagggggaacttggtgactgttggttcctggccgccatagcatgtctgacgctgaatcagcacctcctgtttcgtgtcatacctcacgatcaatccttcattgaaaactacgcaggcatttttcacttccaattttggcgttacggggagtgggttgacgtcgtgatcgacgactgcctccccacttacaacaatcagctcgtctttaccaaatcaaaccatagaaacgagttttggtccgcgctgctcgaaaaggcttatgccaagctccatggtagctatgaagccttgaaggggggaaatacaactgaggccatggaagattttaccggcggcgttgcagagttttttgagattcgtgatgcaccgtcagacatgtacaaaataatgaagaaagctattgagcggggaagccttatggggtgctccattgatgacggaactaatatgacctacggaacatctccatccgggctgaatatgggcgaattaatcgcacggatggtgaggaacatggataactccctgctccaggatagtgatctggacccccggggcagtgatgaacgcccgactcgcacgatcattccggtgcagtacgagacccggatggcctgtggattggtgagggggcatgcgtatagtgtcaccggactggatgaggtccctttcaaaggtgaaaaggtcaaactcgtcaggttgcgtaatccatgggggcaggtggaatggaacggatcatggagtgataggtggaaagattggagttttgtggacaaggatgagaaggccagacttcagcaccaggtgacggaggacggcgaattctggatgtcttatgaagacttcatataccacttcacgaaattggagatctgtaatctgacagccgatgccctgcagagcgataagcttcagacgtggacagtctcagtaaatgagggcagatgggtgcgcgggtgttcggctggggggtgtcggaatttccccgacacattctggaccaaccctcaatataggctgaaactgctggaggaagacgatgaccctgatgattccgaggtaatctgcagctttcttgtcgctctgatgcagaagaaccggcgtaaggatcggaagctgggagcctccctcttcaccattgggttcgcgatctacgaggttccccaccagatgcacggcaataaacaacacctccagaaggactttttcttgtacaatgcaagcaaggcacggtctaaaacgtacattaacatgcgggaagtatctcagcgtttcaggctgccccctagcgagtacgtgattgtgccctctacttacgagcctcatcaggaaggcgagtttattctgagggtcttttccgagaagcgaaacctgtctgaggaagtggaaaataccatctccgtggatcgccctgtaccgatcatcttcgtgtcagatagggccaactccaataaggagcttggtgtggatcaggagtctgaggaggggaagggtaagacttcccccgacaagcagaagcaaagcccccagcctcagcctggctcctctgaccaggagagtgaggaacagcagcagttcagaaacatttttaagcaaatcgccggagatgacatggagatttgtgcagacgagcttaaaaaggttttgaacactgtcgttaataagcacaaggacctgaaaacccacggatttacactggagtcatgccgcagtatgatcgccctcatggatacggacggctccgggaaactgaacctacaggagttccatcacctgtggaacaagattaaggcctggcaaaaaatctttaagcactatgatactgatcaaagtggcaccatcaattcctacgaaatgaggaacgctgtgaacgatgcagggttccatcttaataaccagctgtacgatatcatcacgatgagatatgctgacaaacatatgaacatagattttgactcattcatatgctgcttcgtccggctggaggggatgtttagggcgtttcatgccttcgataaggacggcgatgggatcatcaagctaaatgtgcttgaatggctgcagcttacgatgtacgcatag

SEQ ID NO: 215221 - DNA, 2187 bp, Artificial Sequence
  derived and/or modified sequence
atgtcctggcaaatatcactgaagacgcagactacacaacagaaaaatgaaatttgcgaaaacccaaggttcatcattgatggggcaaatcgaactgacatttgtcagggagagttaggtgactgctggtttcttgcagccattgcctgcctaacacttaaccagcatctgctgttcagagtgattccgcacgaccaaagctttatagaaaactatgcgggcatttttcatttccagttctggagatatggcgagtgggtggacgtagtgattgatgattgcctgcctacatacaacaatcagctggttttcactaagagcaaccaccgaaacgaattttggtcagcgcttcttgaaaaggcgtatgccaagctgcatggctcttacgaagcgctcaaaggaggcaacacaacagaagcaatggaagattttaccggtggtgtcgccgaattcttcgagattcgcgatgctccctccgacatgtacaaaataatgaagaaggccatcgagaggggatccctgatggggtgctcaattgatgacggaactaacatgacgtatggtacaagcccctccggcttgaatatgggcgagctgatcgcccggatggttcgcaatatggataacagtctgcttcaggacagcgacctagacccccggggcagtgacgagcggccaacaagaactattatccctgtgcaatacgagacgagaatggcatgcggattagtccgggggcacgcctactccgtcaccgggctggacgaggttccgttcaaaggcgaaaaggtaaaactggtcagactcagaaatccttgggggcaggtggagtggaatggcagctggtcggaccgatggaaggactggtctttcgtggataaggatgagaaagcccgtctacagcaccaggtgacggaggatggcgagttttggatgtcctatgaggatttcatatatcactttacaaagttggagatctgcaacttaacagctgacgctttgcagtctgacaagcttcagacgtggaccgtgtccgtgaatgagggtagatgggttcgtggctgctcagcaggagggtgtaggaacttccccgatacattctggacaaacccacagtacagactgaagttactcgaggaggacgacgaccccgatgattccgaggtcatatgcagcttcttagtggccctcatgcaaaagaacaggcggaaagaccgcaagctcggagccagcctgttcacaattggattcgccatttacgaggtacccaaagaaatgcatgggaataagcagcatctacagaaggatttttttctgtacaacgcctcgaaggcgcggagcaagacctatattaatatgagggaggtgagtcagagattcaggctgcctccatcagagtacgtcattgttccttcaacatacgagccacatcaggaaggagaattcatcctgcgagttttttctgaaaagcgcaacctttccgaggaagtggagaacactatctccgtggatcggcccgtccctattatctttgtctctgatagagcgaactctaacaaggagctcggcgtggatcaagagagcgaggagggtaagggaaagacatctccagataagcagaaacagtccccacagcctcagccaggaagctccgaccaggaaagcgaagagcagcaacagttccgcaacatatttaaacagatagctggcgatgacatggaaatttgcgctgatgagctgaagaaagtcctaaacaccgttgtaaacaaacacaaggatctaaagacgcacggcttcaccctggaaagctgtagaagtatgatcgctttgatggatacagacggttcagggaaactgaaccttcaggagttccaccacctgtggaataagataaaagcttggcagaagatctttaagcactacgacactgatcaatctgggacaataaatagctacgaaatgaggaatgctgtgaacgacgcaggatttcacttgaacaaccaactctacgacattattactatgcggtatgctgataagcacatgaatattgattttgacagcttcatctgttgcttcgtccggctcgaaggtatgtttcgggctttccatgcattcgataaagacggcgacgggattataaaactcaacgtgcttgaatggctgcaactgaccatgtatgcttag

SEQ ID NO: 215222 - DNA, 2448 bp, Artificial Sequence
  derived and/or modified sequence
atgccaactgtaatcagcgcaagcgtggcccctagaacagctgccgaacccaggagtcctggtccagtaccccacccagcccagagcaaagccactgaggcgggcggtggcaatcctagcgggatttacagtgctataatatctcgcaatttcccaatcatcggagtgaaggagaagacatttgagcaactccataaaaagtgccttgagaaaaaagtgctttatgttgaccccgaattccctccagacgagacgtcactgttttactcccagaaattccctatccagttcgtctggaagcgacctcccgagatctgcgagaaccctcgatttatcatcgacggcgccaacagaactgatatttgtcagggagaactgggagactgttggtttttggccgccattgcttgcctcacattaaatcagcacttattgttcagggtgatccctcatgaccagtcgttcattgagaattacgcagggatctttcattttcagttttggaggtatggagaatgggtcgatgttgtgatagatgattgtcttccaacatataacaaccagttggtctttacaaagtctaaccatcggaatgaattctggagcgctctcctagaaaaagcatatgccaagcttcatggctcgtatgaagctttaaaggggggcaatacaactgaggccatggaggactttaccggcggtgtggcagaattcttcgaaattcgagatgcaccttccgacatgtataagataatgaagaaggcgattgaacgtggctctctgatgggatgtagcatcgacgacggaaccaacatgacgtatgggacatctccgagcggactcaatatgggagaacttattgcccggatggttcgaaatatggacaatagcctgctccaggacagcgacctcgacccaaggggtagcgacgaacggccaactcggactatcatacccgtgcaatatgagacacggatggcttgtgggcttgtgcgtgggcacgcctactctgtaacaggcctggatgaagttccattcaaaggcgaaaaggtcaagcttgtgcggctcagaaacccttggggtcaagttgaatggaacggctcttggagtgacaggtggaaagactggtcattcgtggataaagacgaaaaggccaggctgcagcaccaagtgactgaagatggtgaattctggatgagctatgaggattttatttaccattttaccaaactcgaaatctgtaacttaactgcagacgcgcttcagtccgacaagctgcagacctggacagtttccgttaacgaaggccggtgggtgcgtgggtgttctgccggtggttgcagaaacttcccagacactttctggaccaaccctcaataccgcctgaagttgttggaggaggacgatgacccagatgactctgaagtgatttgttcattcctggtggcattaatgcaaaaaaatagaagaaaggatcgaaaactcggagcttccctgtttaccataggattcgccatttatgaagtcccgaaggagatgcatggcaataagcagcatttacagaaagatttttttttatacaatgcgtccaaggcccggtccaaaacgtacattaatatgcgcgaggtcagccagaggttccgactaccaccttctgagtacgtaatagtgccctcaacttacgagccacaccaggagggtgaattcatcctgagggtcttcagcgagaaaagaaaccttagtgaggaagtggagaacaccataagcgtggatcgacctgtaccaattatctttgtgagtgatcgcgccaacagcaacaaagaactcggcgtggaccaggagtccgaagagggcaaagggaagacaagccccgacaagcaaaaacagtccccccagccacaacctgggagttctgaccaggagtctgaggaacagcagcagtttcggaacatatttaagcagatcgcaggagacgatatggagatctgcgctgacgagcttaagaaggtcctcaacaccgtggtaaacaaacacaaggacttaaagactcacggatttactctcgaaagctgtagatccatgatcgcactgatggacaccgatgggtccgggaaactgaacttgcaggagtttcatcacctgtggaataaaatcaaagcatggcagaaaatctttaaacattacgacactgatcagagtgggacgattaattcctacgagatgaggaacgccgttaacgatgccgggtttcacttgaataaccagctgtacgacataatcactatgcgatatgctgataaacatatgaacattgatttcgattcctttatatgctgctttgttcggttagaaggtatgtttcgcgcctttcatgctttcgacaaggatggcgacggaatcatcaaactgaacgttctcgagtggctccagctcacaatgtacgcctag

SEQ ID NO: 215223 - DNA, 2448 bp, Artificial Sequence
  derived and/or modified sequence
atgcccaccgtcatcagcgcctctgtggcccccaggacagctgctgagcccaggagccctggccctgtgccccacccagcccagagcaaggccacagaggccggcggcggcaaccccagcggcatctacagcgccatcatcagcaggaacttccccatcatcggcgtgaaggagaagacctttgagcagctgcacaagaagtgcctggagaagaaggtgctgtatgtggaccctgagttccccccagatgagaccagcctcttctacagccagaagttccccatccagtttgtgtggaagaggcctcctgagatctgtgagaacccccgcttcatcattgatggagccaacagaacagacatctgccagggcgagctgggggactgctggttcctggccgccatcgcctgcctgaccctgaaccagcacctgctcttccgggtcatcccccatgaccagagcttcattgaaaattatgccggcatcttccacttccagttctggaggtatggagagtgggtggatgtggtgattgatgactgcctgcccacctacaacaaccagctggtgttcaccaagagcaaccacagaaatgagttctggagcgccctgctggagaaggcctatgccaagctgcacggcagctatgaggccctgaagggcggcaacaccacagaggccatggaggacttcaccggcggcgtggccgagttctttgagatcagagatgcccccagcgacatgtacaagatcatgaagaaggccatcgagcggggcagcctgatgggctgcagcattgatgatggcaccaacatgacctacggcaccagccccagcggcctgaacatgggagagctgattgccaggatggtgaggaacatggacaacagcctgctgcaggacagcgacctggacccccggggcagtgatgagcggcccaccaggaccatcatccctgtgcagtatgagaccaggatggcctgtggcctggtgcggggccacgcctacagcgtgacaggcctggatgaggtgcccttcaagggggagaaggtgaagctggtgcggctgaggaacccctggggccaggtggagtggaatggctcctggagcgaccgctggaaggactggagctttgtggacaaggatgagaaggcccggctgcagcaccaggtgacagaagatggagagttctggatgtcctatgaggacttcatctaccacttcaccaagctggagatctgcaacctgacagcagatgccctgcagagcgacaagctgcagacctggacagtgtctgtgaatgaaggccgctgggtgcggggctgcagcgctgggggctgcaggaacttcccagacaccttctggaccaacccccagtaccgcctgaagctgctggaggaggatgatgatcctgatgacagcgaggtgatctgcagcttcctggtggccctgatgcagaagaacagaaggaaggacaggaagctgggcgccagcctcttcaccatcggctttgccatctatgaggtgccccaccagatgcacggcaacaagcagcacctgcagaaggacttcttcctgtacaatgccagcaaggcccggagcaagacctacatcaacatgagggaggtgtcccagcgcttccggctgcccccatctgaatatgtgattgtgcccagcacctatgagccccaccaggagggggagttcatcctgcgggtcttcagcgagaagaggaacctgtctgaggaggtggagaacaccatctctgtggacaggcctgtgcccatcatctttgtgtctgaccgggccaacagcaacaaggagctgggcgtggaccaggagagcgaggagggcaagggcaagaccagcccagacaagcagaagcagagcccccagccccagcccggcagcagtgaccaggagagcgaggagcagcagcagttcaggaacatcttcaagcagattgctggagatgacatggagatctgtgctgatgagctgaagaaggtgctgaacacagtggtgaacaagcacaaggacctgaagacccacggcttcaccctggagagctgccgctccatgattgccctgatggacacagatggcagcggcaagctgaacctgcaggagttccaccacctgtggaacaagatcaaggcctggcagaagatcttcaagcactatgacacagaccagagcggcaccatcaacagctatgagatgagaaatgctgtgaatgatgctggcttccacctgaacaaccagctgtatgacatcatcaccatgagatatgctgacaagcacatgaacatcgactttgacagcttcatctgctgctttgtgcggctggagggcatgttccgggccttccacgcctttgacaaggatggagatggcatcatcaagctgaatgtgctggagtggctgcagctgaccatgtatgcctag

SEQ ID NO: 215224 - DNA, 2187 bp, Artificial Sequence
  derived and/or modified sequence
atgtcctggcagatcagcctgaagacccagaccacccagcagaagaatgagatctgtgagaacccccgcttcatcattgatggagccaacagaacagacatctgccagggcgagctgggggactgctggttcctggccgccatcgcctgcctgaccctgaaccagcacctgctcttccgggtcatcccccatgaccagagcttcatcgagaactatgccggcatcttccacttccagttctggaggtatggagagtgggtggatgtggtgattgatgactgcctgcccacctacaacaaccagctggtgttcaccaagagcaaccacagaaatgagttctggagcgccctgctggagaaggcctatgccaagctgcacggcagctatgaggccctgaagggcggcaacaccacagaggccatggaggacttcaccggaggagtggccgagttctttgagatcagagatgcccccagcgacatgtacaagatcatgaagaaggccatcgagcggggcagcctgatgggctgcagcattgatgatggcaccaacatgacctacggcaccagccccagcggcctgaacatgggagagctgattgccaggatggtgaggaacatggacaacagcctgctgcaggacagcgacctggacccccggggcagtgatgagcggcccaccaggaccatcatccctgtgcagtatgagaccaggatggcctgtggcctggtgcggggccacgcctacagcgtgacaggcctggatgaggtgcccttcaagggggagaaggtgaagctggtgcggctgaggaacccctggggccaggtggagtggaatggctcctggagcgaccgctggaaggactggagctttgtggacaaggatgagaaggcccggctgcagcaccaggtgacagaagatggagagttctggatgtcctatgaggacttcatctaccacttcaccaagctggagatctgcaacctgacagcagatgccctgcagagcgacaagctgcagacctggacagtgtctgtgaatgaaggccgctgggtgcggggctgcagcgctgggggctgcaggaacttcccagacaccttctggaccaacccccagtaccgcctgaagctgctggaggaggatgatgatcctgatgattctgaggtgatctgcagcttcctggtggccctgatgcagaagaacagaaggaaggacaggaagctgggcgccagcctcttcaccatcggctttgccatctatgaggtgcccaaggagatgcacggcaacaagcagcacctgcagaaggacttcttcctgtacaatgccagcaaggcccggagcaagacctacatcaacatgagggaggtgtcccagcgcttccggctgcccccatctgaatatgtgattgtgcccagcacctatgagccccaccaggagggggagttcatcctgcgggtcttcagcgagaagaggaacctgtctgaggaggtggagaacaccatctctgtggacaggcctgtgcccatcatctttgtgtctgaccgggccaacagcaacaaggagctgggcgtggaccaggagagcgaggagggcaagggcaagaccagcccagacaagcagaagcagagcccccagccccagcccggcagcagtgaccaggagagcgaggagcagcagcagttcaggaacatcttcaagcagattgctggagatgacatggagatctgtgctgatgagctgaagaaggtgctgaacacagtggtgaacaagcacaaggacctgaagacccacggcttcaccctggagagctgccgctccatgattgccctgatggacacagatggcagcggcaagctgaacctgcaggagttccaccacctgtggaacaagatcaaggcctggcagaagatcttcaagcactatgacacagaccagagcggcaccatcaacagctatgagatgagaaatgctgtgaatgatgctggcttccacctgaacaaccagctgtatgacatcatcaccatgagatatgctgacaagcacatgaacatcgactttgacagcttcatctgctgctttgtgcggctggagggcatgttccgggccttccacgcctttgacaaggatggagatggcatcatcaagctgaatgtgctggagtggctgcagctgaccatgtatgcctag

SEQ ID NO: 215225 - DNA, 2448 bp, Artificial Sequence
  derived and/or modified sequence
atgcccaccgtcatcagcgcctctgtggcccccaggacagctgctgagcccaggagccctggccctgtgccccacccagcccagagcaaggccacagaggccggcggcggcaaccccagcggcatctacagcgccatcatcagcaggaacttccccatcatcggcgtgaaggagaagacctttgagcagctgcacaagaagtgcctggagaagaaggtgctgtatgtggaccctgagttccccccagatgagaccagcctcttctacagccagaagttccccatccagtttgtgtggaagaggcctcctgagatctgtgagaacccccgcttcatcattgatggagccaacagaacagacatctgccagggcgagctgggggactgctggttcctggccgccatcgcctgcctgaccctgaaccagcacctgctcttccgggtcatcccccatgaccagagcttcattgaaaattatgccggcatcttccacttccagttctggaggtatggagagtgggtggatgtggtgattgatgactgcctgcccacctacaacaaccagctggtgttcaccaagagcaaccacagaaatgagttctggagcgccctgctggagaaggcctatgccaagctgcacggcagctatgaggccctgaagggcggcaacaccacagaggccatggaggacttcaccggcggcgtggccgagttctttgagatcagagatgcccccagcgacatgtacaagatcatgaagaaggccatcgagcggggcagcctgatgggctgcagcattgatgatggcaccaacatgacctacggcaccagccccagcggcctgaacatgggagagctgattgccaggatggtgaggaacatggacaacagcctgctgcaggacagcgacctggacccccggggcagtgatgagcggcccaccaggaccatcatccctgtgcagtatgagaccaggatggcctgtggcctggtgcggggccacgcctacagcgtgacaggcctggatgaggtgcccttcaagggggagaaggtgaagctggtgcggctgaggaacccctggggccaggtggagtggaatggctcctggagcgaccgctggaaggactggagctttgtggacaaggatgagaaggcccggctgcagcaccaggtgacagaagatggagagttctggatgtcctatgaggacttcatctaccacttcaccaagctggagatctgcaacctgacagcagatgccctgcagagcgacaagctgcagacctggacagtgtctgtgaatgaaggccgctgggtgcggggctgcagcgctgggggctgcaggaacttcccagacaccttctggaccaacccccagtaccgcctgaagctgctggaggaggatgatgatcctgatgacagcgaggtgatctgcagcttcctggtggccctgatgcagaagaacagaaggaaggacaggaagctgggcgccagcctcttcaccatcggctttgccatctatgaggtgcccaaggagatgcacggcaacaagcagcacctgcagaaggacttcttcctgtacaatgccagcaaggcccggagcaagacctacatcaacatgagggaggtgtcccagcgcttccggctgcccccatctgaatatgtgattgtgcccagcacctatgagccccaccaggagggggagttcatcctgcgggtcttcagcgagaagaggaacctgtctgaggaggtggagaacaccatctctgtggacaggcctgtgcccatcatctttgtgtctgaccgggccaacagcaacaaggagctgggcgtggaccaggagagcgaggagggcaagggcaagaccagcccagacaagcagaagcagagcccccagccccagcccggcagcagtgaccaggagagcgaggagcagcagcagttcaggaacatcttcaagcagattgctggagatgacatggagatctgtgctgatgagctgaagaaggtgctgaacacagtggtgaacaagcacaaggacctgaagacccacggcttcaccctggagagctgccgctccatgattgccctgatggacacagatggcagcggcaagctgaacctgcaggagttccaccacctgtggaacaagatcaaggcctggcagaagatcttcaagcactatgacacagaccagagcggcaccatcaacagctatgagatgagaaatgctgtgaatgatgctggcttccacctgaacaaccagctgtatgacatcatcaccatgagatatgctgacaagcacatgaacatcgactttgacagcttcatctgctgctttgtgcggctggagggcatgttccgggccttccacgcctttgacaaggatggagatggcatcatcaagctgaatgtgctggagtggctgcagctgaccatgtatgcctag

SEQ ID NO: 215226 - DNA, 2448 bp, Artificial Sequence
  derived and/or modified sequence
atgcccaccgtgatcagcgccagcgtggccccccggaccgccgccgaaccgcgttcccccggaccagtgccgcatcctgcccagtcaaaagctacagaagccgggggcggaaacccgagcggcatctacagcgcaatcatctctcgaaattttcctatcatcggagtgaaggagaaaacgtttgagcagcttcataaaaagtgtctggagaaaaaagtactttacgttgatcccgagttcccacccgatgaaacttcattgttttactctcaaaagtttccaattcaatttgtgtggaagcggcccccagagatctgtgaaaatccccggtttattatagacggtgccaatcgcactgacatatgtcaaggggagctaggcgattgttggtttctggctgctattgcctgtttgactctcaatcaacacctgctcttcagggtcatcccacacgaccagtccttcattgagaattatgccgggatttttcacttccagttttggcggtatggggagtgggtggatgtggtgattgatgactgcctcccaacctataataaccagctagtgttcaccaaatccaatcaccgcaacgagttttggagtgctttacttgaaaaagcttatgctaagctccacggcagctatgaggccctgaagggaggcaacacaactgaggccatggaggactttaccggtggtgttgcagaattcttcgaaatcagggacgccccttccgacatgtacaaaataatgaaaaaggccattgagcggggttccctgatgggatgtagcatcgacgatggtacgaatatgacttatggaacgtctccaagtgggctgaatatgggtgagctcatcgccagaatggtgcgcaacatggataattctcttctacaagactcagacctggatccgcgggggtctgacgagcgccctacccggactattatcccagtccaatatgaaacgcggatggcctgcggtctcgtgcgaggccatgcctactctgtcaccggactggacgaagttccctttaagggagagaaagtcaagctcgtgcgcctgagaaatccatgggggcaggtggaatggaacgggtcctggtccgatcgatggaaggattggtctttcgtcgacaaggacgaaaaggcacgactgcaacaccaggtgaccgaggacggggaattctggatgtcctatgaagactttatctaccactttactaagctggagatctgcaatttaaccgccgatgctctgcaaagcgacaaactgcaaacgtggacagtcagcgttaacgaggggagatgggtcaggggttgttccgccggcggatgtcgaaacttccccgacacattttggaccaatccccagtaccgccttaaactgctggaggaggacgacgatccagacgattcagaagtgatatgttctttccttgttgcactgatgcaaaagaataggagaaaggatcggaaactgggcgccagcctcttcacaatcggattcgccatctacgaagtgccccaccaaatgcacggcaacaagcagcacctgcaaaaagatttctttctgtacaatgcctctaaggcccgttcaaagacctacatcaatatgcgggaggtgagccagcggttccggctgcccccgtcagagtacgtgatcgtaccctccacgtatgaaccgcaccaagagggtgagtttatactgcgagtgttctccgagaagaggaatctttctgaagaggtagaaaacaccatctctgttgaccgcccagttccaatcatcttcgtctcggatagggcgaatagtaataaggagctaggggtggaccaggagtcagaagagggaaagggtaaaacgagtccggataaacagaagcaatcccctcagccacagccaggctcaagcgaccaggaatcggaagaacaacaacaatttcgcaacatctttaagcagatcgctggggacgacatggagatttgtgctgatgagctcaaaaaggtgctgaatacagtggtgaataaacacaaagacctgaagacccacgggtttactttggaatcctgccggagcatgattgcattaatggacaccgacgggtctggaaagctcaatctccaagagtttcaccatctttggaataaaatcaaagcttggcagaagatctttaaacattatgatactgaccagagcggaaccatcaattcctacgaaatgcgcaatgctgttaacgacgccggattccatctcaacaaccaactttacgatatcataactatgcggtatgcagacaaacatatgaatatagatttcgactctttcatatgctgcttcgtgagactcgagggcatgttccgggcattccacgccttcgacaaggacggcgatggaatcattaagctgaatgtgcttgagtggttgcaactgaccatgtacgcctag

SEQ ID NO: 215227 - DNA, 2187 bp, Artificial Sequence
  derived and/or modified sequence
atgagctggcagatcagcctgaagacccagaccacccagcagaagaacgaaatctgcgagaatccgcgatttataatcgacggagccaatcgcaccgacatttgccagggggaactgggagactgttggttccttgccgctatcgcctgcctgactctgaatcagcacctcctcttccgggtgatcccgcacgaccagtcattcatcgagaactacgccggcatcttccacttccagttttggagatacggcgagtgggtcgatgtggttattgacgactgcttaccaacctacaacaaccagctggttttcacgaagagcaaccacagaaatgagttttggtcggccctgctcgagaaagcctacgccaagctgcacggcagctatgaggccctcaaaggggggaatacaaccgaggcaatggaggattttactgggggggtggcagaattctttgagattcgcgacgcaccatccgacatgtacaagattatgaaaaaagccattgaacgaggatctctgatgggatgcagcatcgacgacggaaccaatatgacctatgggactagccccagcggcctgaacatgggcgaactcattgcacgtatggtgcgcaacatggataactccctcctgcaggatagcgatctcgatcctcgcgggtccgatgaaagacctacgagaacaatcatacctgtgcaatacgaaacccgaatggcatgtggtctggtcagaggacacgcttactcagttaccgggctcgatgaagtgcccttcaaaggtgaaaaagtcaagctcgtgcggctgagaaacccctggggccaggtagaatggaacggcagctggtccgatcggtggaaggattggtcatttgtagataaggacgagaaagctaggctccagcaccaggtgaccgaggacggcgaattttggatgagttatgaagatttcatctaccatttcaccaagctcgaaatctgtaatctgactgcagacgcactgcaatcggataagctgcagacttggacggtatccgttaatgaggggagatgggttagaggctgcagcgcagggggctgtagaaacttcccagacaccttctggacaaaccctcaatacaggttaaagcttcttgaggaggacgatgaccccgatgatagcgaagtgatctgtagtttcctggtcgctctcatgcagaaaaaccggcgcaaggatagaaaactgggagcgagcctgtttactattgggtttgccatttacgaggtccctaaggagatgcacggaaacaaacagcacctgcagaaggatttctttctgtacaatgcctctaaggcccgatccaagacatatattaatatgcgagaggtgagccagcgctttcgtctaccaccttcagaatacgtgatcgttccatccacttacgagccccaccaagagggggaatttatcttaagggtatttagcgagaagcgtaacctttcggaggaagtggagaataccatcagcgtcgacagacccgtgccaataattttcgtcagtgatcgggcaaacagcaacaaggagctgggcgtagatcaggagtctgaggaaggtaaaggcaaaacctctcccgacaagcagaaacagagcccccagccccagcccggaagtagtgatcaggagtcagaggagcaacagcaattccggaacattttcaagcaaatcgctggggatgatatggagatctgtgccgacgagctgaagaaagtcctgaatactgtggtcaataagcataaggacctcaagactcatggctttaccctcgagtcttgccgttctatgattgcactcatggatactgatgggtcagggaagctcaacctgcaagaattccatcatctgtggaacaaaatcaaggcttggcaaaaaatcttcaagcattacgacactgaccagtccgggactattaacagctacgaaatgaggaacgcagttaacgacgccggcttccatcttaacaatcagctgtacgatattatcacgatgagatatgctgacaagcacatgaacattgattttgactcattcatttgctgttttgtgagactcgagggcatgttcagggcgtttcacgcctttgacaaggacggtgacggaattatcaaacttaatgttctcgaatggttgcagctgaccatgtacgcatag

SEQ ID NO: 215228 - DNA, 2448 bp, Artificial Sequence
  derived and/or modified sequence
atgcccaccgtgatcagcgccagcgtggccccccggaccgccgccgaaccaagaagccccggccccgtaccccacccggcccagagtaaggctacagaggctgggggggggaacccatccggcatctattccgcgatcataagtcgaaacttccctattatcggagtgaaggagaaaacgtttgagcaactacataagaaatgtttggagaagaaagtgctctatgtcgaccctgaatttccccctgacgaaacctctctcttttattctcagaaattccccatccagttcgtttggaagagaccccctgaaatttgtgaaaatccacgcttcatcatcgatggggccaatagaactgatatatgccagggagaactgggggattgctggtttcttgctgccatcgcttgcctgacactgaatcaacatctgctgtttagggtaatcccccatgaccagtcctttattgagaattacgccggaatattccattttcagttttggcggtatggtgaatgggtagatgtggtgattgatgattgtctccctacatataataatcagctcgtattcaccaaaagtaaccaccgcaatgagttctggagcgccctgctggaaaaggcgtatgccaagctccacggcagttatgaggccctgaagggcggaaacacaaccgaggccatggaagattttactggtggggttgccgagttttttgagattcgggatgctccttccgatatgtataaaatcatgaagaaggccatagagcgcgggagcctaatgggatgtagcatagacgatggcaccaatatgacatacgggacatcaccaagcggtctgaacatgggtgaactaatcgctagaatggtgcggaacatggacaactcactcctgcaggactcagacctcgacccaagaggctccgacgagaggcccactagaactatcatccccgtacaatacgagaccaggatggcctgcgggctcgtcaggggtcacgcatattccgttacaggattagacgaggttccatttaaaggcgaaaaggtaaaactggtgagattgcgaaacccttggggtcaggtagagtggaatggcagctggagcgatcggtggaaggattggagtttcgtggataaggacgagaaagcccgcttgcaacaccaggttacagaggacggggagttctggatgagctatgaggatttcatctatcacttcaccaagctggaaatttgtaacctcaccgctgacgccctgcagtctgataagctccagacctggaccgttagcgttaacgaaggtcgctgggtgcggggttgtagtgccggtggctgtagaaatttcccagacacattctggactaacccacaatatcgcctcaaattgcttgaagaggatgatgatcccgacgactcagaagttatttgcagctttctggtcgcactgatgcaaaaaaaccgcagaaaggatagaaaactgggggctagcctgtttactataggattcgctatttacgaggttcccaaagagatgcatggcaataaacagcaccttcagaaagatttctttctgtacaacgccagcaaagctcgctcaaagacttacataaacatgcgcgaagtgtcacagagatttagattgccaccatctgagtacgtgattgtgccatctacctacgagccacaccaggaaggcgaatttatccttcgtgtatttagcgaaaaacggaatcttagcgaggaggtcgagaatacaatctccgtcgatagacctgtgccgatcattttcgtgagtgaccgcgcaaacagcaacaaggaactcggcgtggatcaagagtccgaggaaggcaagggcaagactagccccgacaagcagaagcagtccccacagccacagcccggaagcagcgatcaggaaagcgaagagcaacaacagtttcgcaacatattcaagcagatagcgggcgacgatatggaaatatgcgcggacgagctgaaaaaagttttaaatactgtggtcaataaacataaggacctgaaaacccacgggttcacactcgagtcatgccgctcaatgattgccttaatggatacggatggctccggcaagttgaatctgcaagaattccaccacctgtggaataaaattaaggcttggcaaaagatatttaaacactacgacacagaccagtcgggcacaattaattcctatgagatgcgcaacgctgttaacgacgctgggtttcacctgaataatcagctgtacgatatcataaccatgcgctacgctgacaaacatatgaacattgattttgatagcttcatttgttgcttcgttcgcctagaaggcatgttccgagctttccatgcgttcgacaaggacggcgacgggatcattaaactcaacgtcttggagtggctgcaattaaccatgtacgcatag

SEQ ID NO: 215229 - DNA, 2448 bp, Artificial Sequence
  derived and/or modified sequence
atgcccaccgttattagcgcctccgttgctcctaggacagctgccgagccccgatctcccggtcctgtacctcaccctgcacaaagtaaggctaccgaagccggaggcggaaatcctagcggcatatactccgccataatctccagaaacttccccatcatcggggtgaaggagaaaaccttcgagcagctccacaagaagtgtctggagaagaaggtgctttatgtggaccctgaatttccccctgacgagacatccctgttctacagtcaaaagttccctatccagtttgtgtggaagcgccctcctgaaatttgcgagaaccctcgattcatcattgacggagctaaccggactgacatttgccagggcgaactgggcgactgctggtttttggccgcaattgcatgccttacactcaatcaacatctgctcttcagggtaatcccccacgaccaatcctttatcgaaaactacgctggtatcttccatttccagttttggaggtacggcgagtgggtcgacgttgtgattgacgattgtctacccacatataataatcagttagtcttcaccaagagcaaccatcggaatgagttctggagcgcactgctggagaaggcttacgccaaactccatggatcatatgaggcactcaagggtggtaatacaactgaggcaatggaagactttacagggggtgttgcagaatttttcgagattcgggatgctccgtcggatatgtataagatcatgaagaaggccattgagcgcggatcacttatgggttgcagcatcgacgatggcaccaatatgacctatggaacctcgccatctggattgaatatgggcgagctgattgctaggatggttcgcaacatggacaactcactgctccaggactccgacttagatcctagagggtccgacgaaaggccaacccgcaccatcattcccgtgcagtatgaaacgaggatggcttgtggcctggtcagaggccatgcatacagcgtgaccgggcttgatgaggttccatttaaaggcgagaaagtgaagctggtcagactgcgaaatccttggggacaagttgaatggaacggctcttggagcgacaggtggaaggactggagttttgttgacaaggacgaaaaagccagactgcagcaccaggtaaccgaggatggtgaattctggatgagctacgaggatttcatatatcactttaccaagctagagatatgtaatttgacggccgatgccttgcagtccgataaactgcagacttggacggtgtccgtgaatgaaggaaggtgggtccgcggatgtagcgccggagggtgtcgcaacttcccagatacgttttggacgaacccacagtatcggttaaaactgctggaggaggacgacgatcctgatgacagtgaggtaatttgttccttcttagtagccttgatgcagaaaaaccggagaaaggacagaaagctgggagcgtccttgttcaccattggcttcgccatctatgaggttccccaccagatgcatggcaacaagcagcatctgcagaaggactttttcctctataatgcctctaaggcgaggtccaaaacctatatcaatatgcgagaagtgtcccagcgttttcggctgcccccttcggagtatgtgatcgtgccttccacttacgaaccacaccaggagggtgaatttatattgcgggtgttctccgagaagcggaatctctctgaggaggtggagaacactatcagcgtcgaccggcctgttcctattatttttgttagcgatcgtgccaattccaataaggagctcggcgtggaccaggagagtgaagaaggcaagggcaagacctctcctgataagcaaaaacagtccccacaaccacagccaggctcttccgatcaggagtctgaagaacagcagcagtttcgcaatatcttcaagcagatcgctggtgacgacatggagatctgtgccgacgagctgaagaaggtgctcaacacagtggtgaataagcacaaagacctaaagacccacgggttcactttagagagctgtagatcgatgatagcattaatggacactgatggctccggcaaactgaatcttcaggaattccaccatctgtggaacaaaatcaaagcttggcaaaagatttttaagcactacgacactgatcagtctggaacaattaactcttacgaaatgcgcaatgccgtgaacgacgctggattccacctcaataatcagctctacgatatcatcaccatgaggtacgccgataaacatatgaacattgatttcgatagtttcatttgctgttttgtgagactggaggggatgttccgtgcatttcacgcttttgataaggacggtgacggtattatcaaactcaacgtgctcgagtggttgcagctgaccatgtatgcttag

SEQ ID NO: 215230 - DNA, 2187 bp, Artificial Sequence
  derived and/or modified sequence
atgtcttggcagatctccctaaagacccagaccacacagcagaaaaacgagatatgtgagaacccacggttcatcatagacggagcaaatcgaacggatatttgccagggcgagttaggagattgctggtttctggctgccattgcgtgtctgaccctgaatcaacacctcttgttcagagtcattccacacgaccagagttttatagagaactacgcagggattttccactttcagttctggagatacggcgagtgggtcgatgtggttatcgacgactgtctcccaacttacaacaaccagctggtgtttacaaagagcaatcataggaacgaattctggagcgccctactcgagaaggcatacgcgaagctgcatgggtcttatgaagctctgaagggtggcaacactactgaagccatggaagactttacaggcggtgttgctgaattctttgagatccgcgacgccccaagcgacatgtacaaaatcatgaagaaagcaattgagcggggttctctgatgggctgctccatagatgacgggactaatatgacatacgggacaagcccctcaggcctgaacatgggagaattgattgcgcgaatggtccgcaacatggacaactcactgctccaggacagcgatctggatccgaggggatcagacgaacgacctacacgaactatcatccctgtgcaatatgaaacacgtatggcttgcggactggtccgcggtcatgcttattccgtgaccggactggatgaggtaccctttaagggcgaaaaggtcaaattagtgaggctgcggaatccatgggggcaggtagagtggaatgggtcctggtctgacagatggaaggactggtcgtttgtggacaaggatgagaaggccaggctgcagcaccaggtgactgaggatggggagttttggatgtcctatgaagactttatctatcattttactaagctcgagatctgcaacctgacggccgatgcacttcagtccgataaactccagacttggaccgtttccgttaatgagggaagatgggttagaggttgctctgcagggggatgtcggaacttccccgacactttttggacaaacccccagtaccgcctgaagctgcttgaagaagatgacgacccggatgattcagaagtgatatgttctttcctggttgctctgatgcagaaaaatcgcagaaaagacaggaagcttggggcaagtctgtttactatcggctttgctatctatgaggtgcccaaggaaatgcatggaaacaagcagcacctacagaaggacttcttcttgtacaacgctagcaaggccagaagcaagacttacattaatatgcgggaagtgagccaacggtttagactgccaccatctgagtatgtgatcgttccctctacatacgagccacatcaggaaggcgagtttatacttagagtgttcagcgagaagaggaatctctctgaggaagtagaaaatacgatcagtgtggaccgccctgtgccgatcattttcgtgtcagaccgagctaacagcaacaaggagcttggcgtggatcaggagtccgaagagggcaaggggaaaacgtcccccgataaacaaaagcagagtcctcaaccccagcccggttcctccgaccaggagtcagaagagcagcagcagtttcgcaatatctttaaacagattgccggagatgacatggaaatatgcgcggatgaattgaaaaaggtccttaataccgttgtcaacaagcacaaggacctaaaaacccatgggttcactctcgagtcctgcaggagcatgatcgcccttatggatacagatggcagcggcaagctgaacctccaggaatttcatcacctgtggaacaagatcaaagcatggcaaaagatctttaaacattacgatacagaccagagtgggaccattaactcctacgaaatgcgcaacgccgtaaacgacgcaggctttcacttaaataaccagctttatgacattatcaccatgaggtatgctgataaacacatgaatatcgattttgatagcttcatttgctgctttgtgcggctagaaggaatgttcagagcttttcacgcattcgacaaagacggggatggcatcatcaagctgaatgtactcgagtggctgcaacttacgatgtacgcctag

SEQ ID NO: 215231 - DNA, 2448 bp, Artificial Sequence
  derived and/or modified sequence
atgccaacagttatctctgctagcgtggctccaaggacagcggcagaaccaagatcaccaggtcctgtgccacaccccgctcagagcaaagctactgaagccggagggggtaacccgtcaggaatatatagtgcaattatatcccggaatttcccaatcatcggtgtgaaggagaagacattcgaacagctgcacaagaagtgccttgaaaagaaagttctgtatgtggacccggagtttccgccagatgagacttctctgttctattcgcagaaatttcccattcagttcgtgtggaagcgacccccagagatttgtgagaacccaagattcattatcgatggagctaacagaacagacatttgtcaaggtgagttgggagactgttggttcctggccgctatagcatgtttgaccctgaatcagcacctcttgttccgagttattcctcatgatcagagtttcatcgagaactatgcaggcattttccactttcagttttggcgctatggcgaatgggtggacgtggtgattgatgactgtttgcccacctataataaccagctcgtctttacgaagagtaaccataggaacgaattctggtctgccctgttggagaaggcatatgccaagctgcacggaagctacgaggcgcttaaaggaggtaatacaaccgaggcaatggaggactttactgggggagtagcggaattttttgagataagggatgctccgtcagacatgtacaagattatgaagaaggcaatagaacggggatcgctcatgggatgcagcatcgatgacggcacaaacatgacatacggaacatctcctagcgggttaaacatgggagagttaatagctcggatggttcgaaacatggacaacagcctgctgcaggacagcgacttagacccaagaggtagcgacgagaggccaacccgcacaattattcccgtgcagtatgagacaagaatggcttgtggactcgttaggggacacgcctactccgttaccgggctcgacgaagtccccttcaaaggagagaaggtaaaactagtgagactgcgcaatccatggggacaggtagagtggaatggaagctggtcagaccgatggaaggactggtcttttgttgataaagacgagaaggcacggctgcaacaccaagtgacagaggacggcgaattctggatgtcttatgaggattttatctaccattttacaaaactagagatctgcaatctgacggcggacgccctgcagagtgataagcttcagacttggactgtgagcgttaatgagggcagatgggtccgcggatgttcagccggtggttgcaggaactttccagacaccttttggaccaatccccaatacagactcaagctgcttgaggaagacgatgaccccgacgactctgaggtgatctgttcctttttagtcgctcttatgcaaaaaaacagaaggaaggacagaaagctaggtgccagcctgttcactattgggtttgcaatttacgaagtacccaaagagatgcatgggaacaaacagcacctgcagaaggatttctttttatataatgcctctaaagccaggtccaaaacgtatataaatatgcgcgaagtgtcccagcggttccgtctgccgccaagtgagtatgtgatcgtgcccagtacctacgaaccccaccaggagggagagttcattctccgggttttctctgaaaagcgcaaccttagtgaggaggttgagaacaccatctcagttgatcggcctgtcccaatcatattcgtttctgatagggccaacagcaataaagagctcggtgtcgatcaggagtcagaagaaggaaagggaaagacctctcctgataaacagaagcaatcaccacagccacagcctggcagtagtgatcaggaaagcgaggagcagcaacagttcaggaacatcttcaaacagatcgcaggcgacgatatggagatttgcgccgatgaactgaaaaaggtactgaacactgttgttaataagcataaggacctcaaaactcacggctttaccctggagagttgccgcagtatgattgctctaatggataccgatggcagtggtaagctgaatcttcaggagtttcatcacctttggaacaaaatcaaagcatggcaaaagattttcaaacactacgatacagaccaatccggcaccatcaattcctacgagatgcgtaatgccgtcaacgacgccggttttcacctgaataaccaactgtacgacattataacaatgagatatgcagataaacacatgaatatagattttgacagttttatctgttgttttgtgcgtttagaaggaatgtttcgggctttccacgcatttgacaaggatggagatggaatcatcaagttgaacgtactggagtggctacagctgactatgtacgcttag

SEQ ID NO: 215232 - DNA, 2445 bp, Artificial Sequence
  derived and/or modified sequence
atgcccaccgtgatcagcgccagcgtggccccccgcaccgccgccgagccccgcagccccggccccgtgccccaccccgcccagagcaaggccaccgaggccggcggcggcaaccccagcggcatctacagcgccatcatcagccgcaacttccccatcatcggcgtgaaggagaagaccttcgagcagctgcacaagaagtgcctggagaagaaggtgctgtacgtggaccccgagttcccccccgacgagaccagcctgttctacagccagaagttccccatccagttcgtgtggaagcgcccccccgagatctgcgagaacccccgcttcatcatcgacggcgccaaccgcaccgacatctgccagggcgagctgggcgactgctggttcctggccgccatcgcctgcctgaccctgaaccagcacctgctgttccgcgtgatcccccacgaccagagcttcatcgagaactacgccggcatcttccacttccagttctggcgctacggcgagtgggtggacgtggtgatcgacgactgcctgcccacctacaacaaccagctggtgttcaccaagagcaaccaccgcaacgagttctggagcgccctgctggagaaggcctacgccaagctgcacggcagctacgaggccctgaagggcggcaacaccaccgaggccatggaggacttcaccggcggcgtggccgagttcttcgagatccgcgacgcccccagcgacatgtacaagatcatgaagaaggccatcgagcgcggcagcctgatgggctgcagcatcgacgacggcaccaacatgacctacggcaccagccccagcggcctgaacatgggcgagctgatcgcccgcatggtgcgcaacatggacaacagcctgctgcaggacagcgacctggacccccgcggcagcgacgagcgccccacccgcaccatcatccccgtgcagtacgagacccgcatggcctgcggcctggtgcgcggccacgcctacagcgtgaccggcctggacgaggtgcccttcaagggcgagaaggtgaagctggtgcgcctgcgcaacccctggggccaggtggagtggaacggcagctggagcgaccgctggaaggactggagcttcgtggacaaggacgagaaggcccgcctgcagcaccaggtgaccgaggacggcgagttctggatgagctacgaggacttcatctaccacttcaccaagctggagatctgcaacctgaccgccgacgccctgcagagcgacaagctgcagacctggaccgtgagcgtgaacgagggccgctgggtgcgcggctgcagcgccggcggctgccgcaacttccccgacaccttctggaccaacccccagtaccgcctgaagctgctggaggaggacgacgaccccgacgacagcgaggtgatctgcagcttcctggtggccctgatgcagaagaaccgccgcaaggaccgcaagctgggcgccagcctgttcaccatcggcttcgccatctacgaggtgccccaccagatgcacggcaacaagcagcacctgcagaaggacttcttcctgtacaacgccagcaaggcccgcagcaagacctacatcaacatgcgcgaggtgagccagcgcttccgcctgccccccagcgagtacgtgatcgtgcccagcacctacgagccccaccaggagggcgagttcatcctgcgcgtgttcagcgagaagcgcaacctgagcgaggaggtggagaacaccatcagcgtggaccgccccgtgcccatcatcttcgtgagcgaccgcgccaacagcaacaaggagctgggcgtggaccaggagagcgaggagggcaagggcaagaccagccccgacaagcagaagcagagcccccagccccagcccggcagcagcgaccaggagagcgaggagcagcagcagttccgcaacatcttcaagcagatcgccggcgacgacatggagatctgcgccgacgagctgaagaaggtgctgaacaccgtggtgaacaagcacaaggacctgaagacccacggcttcaccctggagagctgccgcagcatgatcgccctgatggacaccgacggcagcggcaagctgaacctgcaggagttccaccacctgtggaacaagatcaaggcctggcagaagatcttcaagcactacgacaccgaccagagcggcaccatcaacagctacgagatgcgcaacgccgtgaacgacgccggcttccacctgaacaaccagctgtacgacatcatcaccatgcgctacgccgacaagcacatgaacatcgacttcgacagcttcatctgctgcttcgtgcgcctggagggcatgttccgcgccttccacgccttcgacaaggacggcgacggcatcatcaagctgaacgtgctggagtggctgcagctgaccatgtacgcc

SEQ ID NO: 215233 - DNA, 2184 bp, Artificial Sequence
  derived and/or modified sequence
atgagctggcagatcagcctgaagacccagaccacccagcagaagaacgagatctgcgagaacccccgcttcatcatcgacggcgccaaccgcaccgacatctgccagggcgagctgggcgactgctggttcctggccgccatcgcctgcctgaccctgaaccagcacctgctgttccgcgtgatcccccacgaccagagcttcatcgagaactacgccggcatcttccacttccagttctggcgctacggcgagtgggtggacgtggtgatcgacgactgcctgcccacctacaacaaccagctggtgttcaccaagagcaaccaccgcaacgagttctggagcgccctgctggagaaggcctacgccaagctgcacggcagctacgaggccctgaagggcggcaacaccaccgaggccatggaggacttcaccggcggcgtggccgagttcttcgagatccgcgacgcccccagcgacatgtacaagatcatgaagaaggccatcgagcgcggcagcctgatgggctgcagcatcgacgacggcaccaacatgacctacggcaccagccccagcggcctgaacatgggcgagctgatcgcccgcatggtgcgcaacatggacaacagcctgctgcaggacagcgacctggacccccgcggcagcgacgagcgccccacccgcaccatcatccccgtgcagtacgagacccgcatggcctgcggcctggtgcgcggccacgcctacagcgtgaccggcctggacgaggtgcccttcaagggcgagaaggtgaagctggtgcgcctgcgcaacccctggggccaggtggagtggaacggcagctggagcgaccgctggaaggactggagcttcgtggacaaggacgagaaggcccgcctgcagcaccaggtgaccgaggacggcgagttctggatgagctacgaggacttcatctaccacttcaccaagctggagatctgcaacctgaccgccgacgccctgcagagcgacaagctgcagacctggaccgtgagcgtgaacgagggccgctgggtgcgcggctgcagcgccggcggctgccgcaacttccccgacaccttctggaccaacccccagtaccgcctgaagctgctggaggaggacgacgaccccgacgacagcgaggtgatctgcagcttcctggtggccctgatgcagaagaaccgccgcaaggaccgcaagctgggcgccagcctgttcaccatcggcttcgccatctacgaggtgcccaaggagatgcacggcaacaagcagcacctgcagaaggacttcttcctgtacaacgccagcaaggcccgcagcaagacctacatcaacatgcgcgaggtgagccagcgcttccgcctgccccccagcgagtacgtgatcgtgcccagcacctacgagccccaccaggagggcgagttcatcctgcgcgtgttcagcgagaagcgcaacctgagcgaggaggtggagaacaccatcagcgtggaccgccccgtgcccatcatcttcgtgagcgaccgcgccaacagcaacaaggagctgggcgtggaccaggagagcgaggagggcaagggcaagaccagccccgacaagcagaagcagagcccccagccccagcccggcagcagcgaccaggagagcgaggagcagcagcagttccgcaacatcttcaagcagatcgccggcgacgacatggagatctgcgccgacgagctgaagaaggtgctgaacaccgtggtgaacaagcacaaggacctgaagacccacggcttcaccctggagagctgccgcagcatgatcgccctgatggacaccgacggcagcggcaagctgaacctgcaggagttccaccacctgtggaacaagatcaaggcctggcagaagatcttcaagcactacgacaccgaccagagcggcaccatcaacagctacgagatgcgcaacgccgtgaacgacgccggcttccacctgaacaaccagctgtacgacatcatcaccatgcgctacgccgacaagcacatgaacatcgacttcgacagcttcatctgctgcttcgtgcgcctggagggcatgttccgcgccttccacgccttcgacaaggacggcgacggcatcatcaagctgaacgtgctggagtggctgcagctgaccatgtacgcc

SEQ ID NO: 215234 - DNA, 2445 bp, Artificial Sequence
  derived and/or modified sequence
atgcccaccgtgatcagcgccagcgtggccccccgcaccgccgccgagccccgcagccccggccccgtgccccaccccgcccagagcaaggccaccgaggccggcggcggcaaccccagcggcatctacagcgccatcatcagccgcaacttccccatcatcggcgtgaaggagaagaccttcgagcagctgcacaagaagtgcctggagaagaaggtgctgtacgtggaccccgagttcccccccgacgagaccagcctgttctacagccagaagttccccatccagttcgtgtggaagcgcccccccgagatctgcgagaacccccgcttcatcatcgacggcgccaaccgcaccgacatctgccagggcgagctgggcgactgctggttcctggccgccatcgcctgcctgaccctgaaccagcacctgctgttccgcgtgatcccccacgaccagagcttcatcgagaactacgccggcatcttccacttccagttctggcgctacggcgagtgggtggacgtggtgatcgacgactgcctgcccacctacaacaaccagctggtgttcaccaagagcaaccaccgcaacgagttctggagcgccctgctggagaaggcctacgccaagctgcacggcagctacgaggccctgaagggcggcaacaccaccgaggccatggaggacttcaccggcggcgtggccgagttcttcgagatccgcgacgcccccagcgacatgtacaagatcatgaagaaggccatcgagcgcggcagcctgatgggctgcagcatcgacgacggcaccaacatgacctacggcaccagccccagcggcctgaacatgggcgagctgatcgcccgcatggtgcgcaacatggacaacagcctgctgcaggacagcgacctggacccccgcggcagcgacgagcgccccacccgcaccatcatccccgtgcagtacgagacccgcatggcctgcggcctggtgcgcggccacgcctacagcgtgaccggcctggacgaggtgcccttcaagggcgagaaggtgaagctggtgcgcctgcgcaacccctggggccaggtggagtggaacggcagctggagcgaccgctggaaggactggagcttcgtggacaaggacgagaaggcccgcctgcagcaccaggtgaccgaggacggcgagttctggatgagctacgaggacttcatctaccacttcaccaagctggagatctgcaacctgaccgccgacgccctgcagagcgacaagctgcagacctggaccgtgagcgtgaacgagggccgctgggtgcgcggctgcagcgccggcggctgccgcaacttccccgacaccttctggaccaacccccagtaccgcctgaagctgctggaggaggacgacgaccccgacgacagcgaggtgatctgcagcttcctggtggccctgatgcagaagaaccgccgcaaggaccgcaagctgggcgccagcctgttcaccatcggcttcgccatctacgaggtgcccaaggagatgcacggcaacaagcagcacctgcagaaggacttcttcctgtacaacgccagcaaggcccgcagcaagacctacatcaacatgcgcgaggtgagccagcgcttccgcctgccccccagcgagtacgtgatcgtgcccagcacctacgagccccaccaggagggcgagttcatcctgcgcgtgttcagcgagaagcgcaacctgagcgaggaggtggagaacaccatcagcgtggaccgccccgtgcccatcatcttcgtgagcgaccgcgccaacagcaacaaggagctgggcgtggaccaggagagcgaggagggcaagggcaagaccagccccgacaagcagaagcagagcccccagccccagcccggcagcagcgaccaggagagcgaggagcagcagcagttccgcaacatcttcaagcagatcgccggcgacgacatggagatctgcgccgacgagctgaagaaggtgctgaacaccgtggtgaacaagcacaaggacctgaagacccacggcttcaccctggagagctgccgcagcatgatcgccctgatggacaccgacggcagcggcaagctgaacctgcaggagttccaccacctgtggaacaagatcaaggcctggcagaagatcttcaagcactacgacaccgaccagagcggcaccatcaacagctacgagatgcgcaacgccgtgaacgacgccggcttccacctgaacaaccagctgtacgacatcatcaccatgcgctacgccgacaagcacatgaacatcgacttcgacagcttcatctgctgcttcgtgcgcctggagggcatgttccgcgccttccacgccttcgacaaggacggcgacggcatcatcaagctgaacgtgctggagtggctgcagctgaccatgtacgcc

SEQ ID NO: 215235 - DNA, 2669 bp, Artificial Sequence
  derived and/or modified sequence
atttctcaggagaacttatggcttcagaatcacagctcggtttttaagatggacataacctgtacgaccttctgatgggctttcaactttgaactggatgtggacacttttctctcagatgacagaattactccaacttcccctttgcagttgcttcctttccttgaaggtagctgtatcttattttctttaaaaagctttttcttccaaagccacttgccatgccgaccgtcattagcgcatctgtggctccaaggacagcggctgagccccggtccccagggccagttcctcacccggcccagagcaaggccactgaggctgggggtggaaacccaagtggcatctattcagccatcatcagccgcaattttcctattatcggagtgaaagagaagacattcgagcaacttcacaagaaatgtctagaaaagaaagttctttatgtggaccctgagttcccaccggatgagacctctctcttttatagccagaagttccccatccagttcgtctggaagagacctccggaaatttgcgagaatccccgatttatcattgatggagccaacagaactgacatctgtcaaggagagctaggggactgctggtttctcgcagccattgcctgcctgaccctgaaccagcaccttcttttccgagtcataccccatgatcaaagtttcatcgaaaactacgcagggatcttccacttccagttctggcgctatggagagtgggtggacgtggttatagatgactgcctgccaacgtacaacaatcaactggttttcaccaagtccaaccaccgcaatgagttctggagtgctctgctggagaaggcttatgctaagctccatggttcctacgaagctctgaaaggtgggaacaccacagaggccatggaggacttcacaggaggggtggcagagttttttgagatcagggatgctcctagtgacatgtacaagatcatgaagaaagccatcgagagaggctccctcatgggctgctccattgatgatggcacgaacatgacctatggaacctctccttctggtctgaacatgggggagttgattgcacggatggtaaggaatatggataactcactgctccaggactcagacctcgaccccagaggctcagatgaaagaccgacccggacaatcattccggttcagtatgagacaagaatggcctgcgggctggtcagaggtcacgcctactctgtcacggggctggatgaggtcccgttcaaaggtgagaaagtgaagctggtgcggctgcggaatccgtggggccaggtggagtggaacggttcttggagtgatagatggaaggactggagctttgtggacaaagatgagaaggcccgtctgcagcaccaggtcactgaggatggagagttctggatgtcctatgaggatttcatctaccatttcacaaagttggagatctgcaacctcacggccgatgctctgcagtctgacaagcttcagacctggacagtgtctgtgaacgagggccgctgggtacggggttgctctgccggaggctgccgcaacttcccagatactttctggaccaaccctcagtaccgtctgaagctcctggaggaggacgatgaccctgatgactcggaggtgatttgcagcttcctggtggccctgatgcagaagaaccggcggaaggaccggaagctaggggccagtctcttcaccattggcttcgccatctacgaggttccccatcagatgcacgggaacaagcagcacctgcagaaggacttcttcctgtacaacgcctccaaggccaggagcaaaacctacatcaacatgcgggaggtgtcccagcgcttccgcctgcctcccagcgagtacgtcatcgtgccctccacctacgagccccaccaggagggggaattcatcctccgggtcttctctgaaaagaggaacctctctgaggaagttgaaaataccatctccgtggatcggccagtgcccatcatcttcgtttcggacagagcaaacagcaacaaggagctgggtgtggaccaggagtcagaggagggcaaaggcaaaacaagccctgataagcaaaagcagtccccacagccacagcctggcagctctgatcaggaaagtgaggaacagcaacaattccggaacattttcaagcagatagcaggagatgacatggagatctgtgcagatgagctcaagaaggtccttaacacagtcgtgaacaaacacaaggacctgaagacacacgggttcacactggagtcctgccgtagcatgattgcgctcatggatacagatggctctggaaagctcaacctgcaggagttccaccacctctggaacaagattaaggcctggcagaaaattttcaaacactatgacacagaccagtccggcaccatcaacagctacgagatgcgaaatgcagtcaacgacgcaggattccacctcaacaaccagctctatgacatcattaccatgcggtacgcagacaaacacatgaacatcgactttgacagtttcatctgctgcttcgttaggctggagggcatgttcagagcttttcatgcatttgacaaggatggagatggtatcatcaagctcaacgttctggagtggctgcagctcaccatgtatgcctga

SEQ ID NO: 215236 - DNA, 3223 bp, Artificial Sequence
  derived and/or modified sequence
attccagtgtttcagcgaggtggaagtgtgataccaataaagacaactgtaggaaaatccacaggctggatgactgaatcctcctatggactccgggttgctctaagcactaagggttcttcagtgggtgagttatatcttgatgatggccattcattccaatacctccaccagaagcaatttttgcacaggaagttttcattctgttccagtgttctgatcaatagttttgctgaccagaggggtcattatcccagcaagtgtgtggtggagaagatcttggtcttaggcttcaggaaggagccatcttctgtgactacccactcatctgatggtaaagatcagcctgtggcttttacgtattgtgccaaaacatccatcctgagcctggagaagctctcactcaacattgccactgactgggagggttcctaaaaaagctctaaaatgaatgcatagtgtgtctttccttcaagatgtaaatgtcaaggaatgagttggcaaatcagtttaaaaacacaaactacccaacagaaaaatgaaatttgcgagaatccccgatttatcattgatggagccaacagaactgacatctgtcaaggagagctaggggactgctggtttctcgcagccattgcctgcctgaccctgaaccagcaccttcttttccgagtcataccccatgatcaaagtttcatcgaaaactacgcagggatcttccacttccagttctggcgctatggagagtgggtggacgtggttatagatgactgcctgccaacgtacaacaatcaactggttttcaccaagtccaaccaccgcaatgagttctggagtgctctgctggagaaggcttatgctaagctccatggttcctacgaagctctgaaaggtgggaacaccacagaggccatggaggacttcacaggaggggtggcagagttttttgagatcagggatgctcctagtgacatgtacaagatcatgaagaaagccatcgagagaggctccctcatgggctgctccattgatgatggcacgaacatgacctatggaacctctccttctggtctgaacatgggggagttgattgcacggatggtaaggaatatggataactcactgctccaggactcagacctcgaccccagaggctcagatgaaagaccgacccggacaatcattccggttcagtatgagacaagaatggcctgcgggctggtcagaggtcacgcctactctgtcacggggctggatgaggtcccgttcaaaggtgagaaagtgaagctggtgcggctgcggaatccgtggggccaggtggagtggaacggttcttggagtgatagatggaaggactggagctttgtggacaaagatgagaaggcccgtctgcagcaccaggtcactgaggatggagagttctggatgtcctatgaggatttcatctaccatttcacaaagttggagatctgcaacctcacggccgatgctctgcagtctgacaagcttcagacctggacagtgtctgtgaacgagggccgctgggtacggggttgctctgccggaggctgccgcaacttcccagatactttctggaccaaccctcagtaccgtctgaagctcctggaggaggacgatgaccctgatgactcggaggtgatttgcagcttcctggtggccctgatgcagaagaaccggcggaaggaccggaagctaggggccagtctcttcaccattggcttcgccatctacgaggttcccaaagagatgcacgggaacaagcagcacctgcagaaggacttcttcctgtacaacgcctccaaggccaggagcaaaacctacatcaacatgcgggaggtgtcccagcgcttccgcctgcctcccagcgagtacgtcatcgtgccctccacctacgagccccaccaggagggggaattcatcctccgggtcttctctgaaaagaggaacctctctgaggaagttgaaaataccatctccgtggatcggccagtgcccatcatcttcgtttcggacagagcaaacagcaacaaggagctgggtgtggaccaggagtcagaggagggcaaaggcaaaacaagccctgataagcaaaagcagtccccacagccacagcctggcagctctgatcaggaaagtgaggaacagcaacaattccggaacattttcaagcagatagcaggagatgacatggagatctgtgcagatgagctcaagaaggtccttaacacagtcgtgaacaaacacaaggacctgaagacacacgggttcacactggagtcctgccgtagcatgattgcgctcatggatacagatggctctggaaagctcaacctgcaggagttccaccacctctggaacaagattaaggcctggcagaaaattttcaaacactatgacacagaccagtccggcaccatcaacagctacgagatgcgaaatgcagtcaacgacgcaggattccacctcaacaaccagctctatgacatcattaccatgcggtacgcagacaaacacatgaacatcgactttgacagtttcatctgctgcttcgttaggctggagggcatgttcagagcttttcatgcatttgacaaggatggagatggtatcatcaagctcaacgttctggagtggctgcagctcaccatgtatgcctgaaccaggctggcctcatccaaagccatgcaggatcactcaggatttcagtttcaccctctatttccaaagccatttacctcaaaggacccagcagctacacccctacaggcttccaggcacctcatcagtcatgctcctcctccattttaccccctacccatccttgatcggtcatgcctagcctgaccctttagtaaagcaatgaggtaggaagaacaaacccttgtccctttgccatgtggaggaaagtgcctgcctctggtccgagccgcctcggttctgaagcgagtgctcctgcttaccttgctctaggctgtctgcagaagcacctgccggtggcactcagcacctccttgtgctagagccctccatcaccttcacgctgtcccaccatgggccaggaaccaaaccagcactgggttctactgctgtggggtaaactaactcagtggaatagggctggttactttgggctgtccaactcataagtttggctgcattttgaaaaaagctgatctaaataaaggcatgtgtatggctggtc

SEQ ID NO: 215237 - DNA, 3298 bp, Artificial Sequence
  derived and/or modified sequence
cactctctttctctctccctctggcatgcatgctgctggtaggagacccccaagtcaacattgcttcagaaatcctttagcactcatttctcaggagaacttatggcttcagaatcacagctcggtttttaagatggacataacctgtacgaccttctgatgggctttcaactttgaactggatgtggacacttttctctcagatgacagaattactccaacttcccctttgcagttgcttcctttccttgaaggtagctgtatcttattttctttaaaaagctttttcttccaaagccacttgccatgccgaccgtcattagcgcatctgtggctccaaggacagcggctgagccccggtccccagggccagttcctcacccggcccagagcaaggccactgaggctgggggtggaaacccaagtggcatctattcagccatcatcagccgcaattttcctattatcggagtgaaagagaagacattcgagcaacttcacaagaaatgtctagaaaagaaagttctttatgtggaccctgagttcccaccggatgagacctctctcttttatagccagaagttccccatccagttcgtctggaagagacctccggaaatttgcgagaatccccgatttatcattgatggagccaacagaactgacatctgtcaaggagagctaggggactgctggtttctcgcagccattgcctgcctgaccctgaaccagcaccttcttttccgagtcataccccatgatcaaagtttcatcgaaaactacgcagggatcttccacttccagttctggcgctatggagagtgggtggacgtggttatagatgactgcctgccaacgtacaacaatcaactggttttcaccaagtccaaccaccgcaatgagttctggagtgctctgctggagaaggcttatgctaagctccatggttcctacgaagctctgaaaggtgggaacaccacagaggccatggaggacttcacaggaggggtggcagagttttttgagatcagggatgctcctagtgacatgtacaagatcatgaagaaagccatcgagagaggctccctcatgggctgctccattgatgatggcacgaacatgacctatggaacctctccttctggtctgaacatgggggagttgattgcacggatggtaaggaatatggataactcactgctccaggactcagacctcgaccccagaggctcagatgaaagaccgacccggacaatcattccggttcagtatgagacaagaatggcctgcgggctggtcagaggtcacgcctactctgtcacggggctggatgaggtcccgttcaaaggtgagaaagtgaagctggtgcggctgcggaatccgtggggccaggtggagtggaacggttcttggagtgatagatggaaggactggagctttgtggacaaagatgagaaggcccgtctgcagcaccaggtcactgaggatggagagttctggatgtcctatgaggatttcatctaccatttcacaaagttggagatctgcaacctcacggccgatgctctgcagtctgacaagcttcagacctggacagtgtctgtgaacgagggccgctgggtacggggttgctctgccggaggctgccgcaacttcccagatactttctggaccaaccctcagtaccgtctgaagctcctggaggaggacgatgaccctgatgactcggaggtgatttgcagcttcctggtggccctgatgcagaagaaccggcggaaggaccggaagctaggggccagtctcttcaccattggcttcgccatctacgaggttcccaaagagatgcacgggaacaagcagcacctgcagaaggacttcttcctgtacaacgcctccaaggccaggagcaaaacctacatcaacatgcgggaggtgtcccagcgcttccgcctgcctcccagcgagtacgtcatcgtgccctccacctacgagccccaccaggagggggaattcatcctccgggtcttctctgaaaagaggaacctctctgaggaagttgaaaataccatctccgtggatcggccagtgcccatcatcttcgtttcggacagagcaaacagcaacaaggagctgggtgtggaccaggagtcagaggagggcaaaggcaaaacaagccctgataagcaaaagcagtccccacagccacagcctggcagctctgatcaggaaagtgaggaacagcaacaattccggaacattttcaagcagatagcaggagatgacatggagatctgtgcagatgagctcaagaaggtccttaacacagtcgtgaacaaacacaaggacctgaagacacacgggttcacactggagtcctgccgtagcatgattgcgctcatggatacagatggctctggaaagctcaacctgcaggagttccaccacctctggaacaagattaaggcctggcagaaaattttcaaacactatgacacagaccagtccggcaccatcaacagctacgagatgcgaaatgcagtcaacgacgcaggattccacctcaacaaccagctctatgacatcattaccatgcggtacgcagacaaacacatgaacatcgactttgacagtttcatctgctgcttcgttaggctggagggcatgttcagagcttttcatgcatttgacaaggatggagatggtatcatcaagctcaacgttctggagtggctgcagctcaccatgtatgcctgaaccaggctggcctcatccaaagccatgcaggatcactcaggatttcagtttcaccctctatttccaaagccatttacctcaaaggacccagcagctacacccctacaggcttccaggcacctcatcagtcatgctcctcctccattttaccccctacccatccttgatcggtcatgcctagcctgaccctttagtaaagcaatgaggtaggaagaacaaacccttgtccctttgccatgtggaggaaagtgcctgcctctggtccgagccgcctcggttctgaagcgagtgctcctgcttaccttgctctaggctgtctgcagaagcacctgccggtggcactcagcacctccttgtgctagagccctccatcaccttcacgctgtcccaccatgggccaggaaccaaaccagcactgggttctactgctgtggggtaaactaactcagtggaatagggctggttactttgggctgtccaactcataagtttggctgcattttgaaaaaagctgatctaaataaaggcatgtgtatggctggtc

SEQ ID NO: 215238 - DNA, 2448 bp, Artificial Sequence
  derived and/or modified sequence
atgcccaccgtgatcagcgccagcgtggcccccagaaccgccgccgagcccagaagccccggccccgtgccccaccccgcccagagcaaggccaccgaggccggcggcggcaaccccagcggcatctacagcgccatcatcagcagaaacttccccatcatcggcgtgaaggagaagaccttcgagcagctgcacaagaagtgcctggagaagaaggtgctgtacgtggaccccgagttcccccccgacgagaccagcctgttctacagccagaagttccccatccagttcgtgtggaagagaccccccgagatctgcgagaaccccagattcatcatcgacggcgccaacagaaccgacatctgccagggcgagctgggcgactgctggttcctggccgccatcgcctgcctgaccctgaaccagcacctgctgttcagagtgatcccccacgaccagagcttcatcgagaactacgccggcatcttccacttccagttctggagatacggcgagtgggtggacgtggtgatcgacgactgcctgcccacctacaacaaccagctggtgttcaccaagagcaaccacagaaacgagttctggagcgccctgctggagaaggcctacgccaagctgcacggcagctacgaggccctgaagggcggcaacaccaccgaggccatggaggacttcaccggcggcgtggccgagttcttcgagatcagagacgcccccagcgacatgtacaagatcatgaagaaggccatcgagagaggcagcctgatgggctgcagcatcgacgacggcaccaacatgacctacggcaccagccccagcggcctgaacatgggcgagctgatcgccagaatggtgagaaacatggacaacagcctgctgcaggacagcgacctggaccccagaggcagcgacgagagacccaccagaaccatcatccccgtgcagtacgagaccagaatggcctgcggcctggtgagaggccacgcctacagcgtgaccggcctggacgaggtgcccttcaagggcgagaaggtgaagctggtgagactgagaaacccctggggccaggtggagtggaacggcagctggagcgacagatggaaggactggagcttcgtggacaaggacgagaaggccagactgcagcaccaggtgaccgaggacggcgagttctggatgagctacgaggacttcatctaccacttcaccaagctggagatctgcaacctgaccgccgacgccctgcagagcgacaagctgcagacctggaccgtgagcgtgaacgagggcagatgggtgagaggctgcagcgccggcggctgcagaaacttccccgacaccttctggaccaacccccagtacagactgaagctgctggaggaggacgacgaccccgacgacagcgaggtgatctgcagcttcctggtggccctgatgcagaagaacagaagaaaggacagaaagctgggcgccagcctgttcaccatcggcttcgccatctacgaggtgccccaccagatgcacggcaacaagcagcacctgcagaaggacttcttcctgtacaacgccagcaaggccagaagcaagacctacatcaacatgagagaggtgagccagagattcagactgccccccagcgagtacgtgatcgtgcccagcacctacgagccccaccaggagggcgagttcatcctgagagtgttcagcgagaagagaaacctgagcgaggaggtggagaacaccatcagcgtggacagacccgtgcccatcatcttcgtgagcgacagagccaacagcaacaaggagctgggcgtggaccaggagagcgaggagggcaagggcaagaccagccccgacaagcagaagcagagcccccagccccagcccggcagcagcgaccaggagagcgaggagcagcagcagttcagaaacatcttcaagcagatcgccggcgacgacatggagatctgcgccgacgagctgaagaaggtgctgaacaccgtggtgaacaagcacaaggacctgaagacccacggcttcaccctggagagctgcagaagcatgatcgccctgatggacaccgacggcagcggcaagctgaacctgcaggagttccaccacctgtggaacaagatcaaggcctggcagaagatcttcaagcactacgacaccgaccagagcggcaccatcaacagctacgagatgagaaacgccgtgaacgacgccggcttccacctgaacaaccagctgtacgacatcatcaccatgagatacgccgacaagcacatgaacatcgacttcgacagcttcatctgctgcttcgtgagactggagggcatgttcagagccttccacgccttcgacaaggacggcgacggcatcatcaagctgaacgtgctggagtggctgcagctgaccatgtacgcctag

SEQ ID NO: 215239 - DNA, 2187 bp, Artificial Sequence
  derived and/or modified sequence
atgagctggcagatcagcctgaagacccagaccacccagcagaagaacgagatctgcgagaaccccagattcatcatcgacggcgccaacagaaccgacatctgccagggcgagctgggcgactgctggttcctggccgccatcgcctgcctgaccctgaaccagcacctgctgttcagagtgatcccccacgaccagagcttcatcgagaactacgccggcatcttccacttccagttctggagatacggcgagtgggtggacgtggtgatcgacgactgcctgcccacctacaacaaccagctggtgttcaccaagagcaaccacagaaacgagttctggagcgccctgctggagaaggcctacgccaagctgcacggcagctacgaggccctgaagggcggcaacaccaccgaggccatggaggacttcaccggcggcgtggccgagttcttcgagatcagagacgcccccagcgacatgtacaagatcatgaagaaggccatcgagagaggcagcctgatgggctgcagcatcgacgacggcaccaacatgacctacggcaccagccccagcggcctgaacatgggcgagctgatcgccagaatggtgagaaacatggacaacagcctgctgcaggacagcgacctggaccccagaggcagcgacgagagacccaccagaaccatcatccccgtgcagtacgagaccagaatggcctgcggcctggtgagaggccacgcctacagcgtgaccggcctggacgaggtgcccttcaagggcgagaaggtgaagctggtgagactgagaaacccctggggccaggtggagtggaacggcagctggagcgacagatggaaggactggagcttcgtggacaaggacgagaaggccagactgcagcaccaggtgaccgaggacggcgagttctggatgagctacgaggacttcatctaccacttcaccaagctggagatctgcaacctgaccgccgacgccctgcagagcgacaagctgcagacctggaccgtgagcgtgaacgagggcagatgggtgagaggctgcagcgccggcggctgcagaaacttccccgacaccttctggaccaacccccagtacagactgaagctgctggaggaggacgacgaccccgacgacagcgaggtgatctgcagcttcctggtggccctgatgcagaagaacagaagaaaggacagaaagctgggcgccagcctgttcaccatcggcttcgccatctacgaggtgcccaaggagatgcacggcaacaagcagcacctgcagaaggacttcttcctgtacaacgccagcaaggccagaagcaagacctacatcaacatgagagaggtgagccagagattcagactgccccccagcgagtacgtgatcgtgcccagcacctacgagccccaccaggagggcgagttcatcctgagagtgttcagcgagaagagaaacctgagcgaggaggtggagaacaccatcagcgtggacagacccgtgcccatcatcttcgtgagcgacagagccaacagcaacaaggagctgggcgtggaccaggagagcgaggagggcaagggcaagaccagccccgacaagcagaagcagagcccccagccccagcccggcagcagcgaccaggagagcgaggagcagcagcagttcagaaacatcttcaagcagatcgccggcgacgacatggagatctgcgccgacgagctgaagaaggtgctgaacaccgtggtgaacaagcacaaggacctgaagacccacggcttcaccctggagagctgcagaagcatgatcgccctgatggacaccgacggcagcggcaagctgaacctgcaggagttccaccacctgtggaacaagatcaaggcctggcagaagatcttcaagcactacgacaccgaccagagcggcaccatcaacagctacgagatgagaaacgccgtgaacgacgccggcttccacctgaacaaccagctgtacgacatcatcaccatgagatacgccgacaagcacatgaacatcgacttcgacagcttcatctgctgcttcgtgagactggagggcatgttcagagccttccacgccttcgacaaggacggcgacggcatcatcaagctgaacgtgctggagtggctgcagctgaccatgtacgcctag

SEQ ID NO: 215240 - DNA, 2448 bp, Artificial Sequence
  derived and/or modified sequence
atgcccaccgtgatcagcgccagcgtggcccccagaaccgccgccgagcccagaagccccggccccgtgccccaccccgcccagagcaaggccaccgaggccggcggcggcaaccccagcggcatctacagcgccatcatcagcagaaacttccccatcatcggcgtgaaggagaagaccttcgagcagctgcacaagaagtgcctggagaagaaggtgctgtacgtggaccccgagttcccccccgacgagaccagcctgttctacagccagaagttccccatccagttcgtgtggaagagaccccccgagatctgcgagaaccccagattcatcatcgacggcgccaacagaaccgacatctgccagggcgagctgggcgactgctggttcctggccgccatcgcctgcctgaccctgaaccagcacctgctgttcagagtgatcccccacgaccagagcttcatcgagaactacgccggcatcttccacttccagttctggagatacggcgagtgggtggacgtggtgatcgacgactgcctgcccacctacaacaaccagctggtgttcaccaagagcaaccacagaaacgagttctggagcgccctgctggagaaggcctacgccaagctgcacggcagctacgaggccctgaagggcggcaacaccaccgaggccatggaggacttcaccggcggcgtggccgagttcttcgagatcagagacgcccccagcgacatgtacaagatcatgaagaaggccatcgagagaggcagcctgatgggctgcagcatcgacgacggcaccaacatgacctacggcaccagccccagcggcctgaacatgggcgagctgatcgccagaatggtgagaaacatggacaacagcctgctgcaggacagcgacctggaccccagaggcagcgacgagagacccaccagaaccatcatccccgtgcagtacgagaccagaatggcctgcggcctggtgagaggccacgcctacagcgtgaccggcctggacgaggtgcccttcaagggcgagaaggtgaagctggtgagactgagaaacccctggggccaggtggagtggaacggcagctggagcgacagatggaaggactggagcttcgtggacaaggacgagaaggccagactgcagcaccaggtgaccgaggacggcgagttctggatgagctacgaggacttcatctaccacttcaccaagctggagatctgcaacctgaccgccgacgccctgcagagcgacaagctgcagacctggaccgtgagcgtgaacgagggcagatgggtgagaggctgcagcgccggcggctgcagaaacttccccgacaccttctggaccaacccccagtacagactgaagctgctggaggaggacgacgaccccgacgacagcgaggtgatctgcagcttcctggtggccctgatgcagaagaacagaagaaaggacagaaagctgggcgccagcctgttcaccatcggcttcgccatctacgaggtgcccaaggagatgcacggcaacaagcagcacctgcagaaggacttcttcctgtacaacgccagcaaggccagaagcaagacctacatcaacatgagagaggtgagccagagattcagactgccccccagcgagtacgtgatcgtgcccagcacctacgagccccaccaggagggcgagttcatcctgagagtgttcagcgagaagagaaacctgagcgaggaggtggagaacaccatcagcgtggacagacccgtgcccatcatcttcgtgagcgacagagccaacagcaacaaggagctgggcgtggaccaggagagcgaggagggcaagggcaagaccagccccgacaagcagaagcagagcccccagccccagcccggcagcagcgaccaggagagcgaggagcagcagcagttcagaaacatcttcaagcagatcgccggcgacgacatggagatctgcgccgacgagctgaagaaggtgctgaacaccgtggtgaacaagcacaaggacctgaagacccacggcttcaccctggagagctgcagaagcatgatcgccctgatggacaccgacggcagcggcaagctgaacctgcaggagttccaccacctgtggaacaagatcaaggcctggcagaagatcttcaagcactacgacaccgaccagagcggcaccatcaacagctacgagatgagaaacgccgtgaacgacgccggcttccacctgaacaaccagctgtacgacatcatcaccatgagatacgccgacaagcacatgaacatcgacttcgacagcttcatctgctgcttcgtgagactggagggcatgttcagagccttccacgccttcgacaaggacggcgacggcatcatcaagctgaacgtgctggagtggctgcagctgaccatgtacgcctag

SEQ ID NO: 215241 - protein, 176 aa, Artificial Sequence
  derived and/or modified sequence
MAGLTDLQRLQARVEELERWVYGPGGARGSRKVADGLVKVQVALGNISSKRERVKILYKKIEDLIKYLDPEYIDRIAIPDASKLQFILAEEQFILSQVALLEQVNALVPMLDSAHIKAVPEHAARLQRLAQIHIQQQAPWGVGVRDEAGSLVEDVGFAQFLSVLHFGPTGPVCGNH

SEQ ID NO: 215242 - DNA, 531 bp, Artificial Sequence
  derived and/or modified sequence
atggctggcctgacagacttgcagaggctgcaggcacgagttgaggaactcgagagatgggtgtacggccccggtggcgccagggggtcgaggaaagtggcagacggcctggtaaaggtccaggtggctctaggtaatatatcatctaaacgcgagcgagtgaagatcctctacaaaaaaatcgaagatctcatcaagtacctggatccggagtacattgacaggatcgctatcccggatgctagtaagctgcaattcattctggcagaggagcagtttattctgtcccaggttgccttgttggaacaagttaatgcattggtacccatgctcgactccgctcacattaaggccgttcccgaacatgctgcaagattgcagcggctggcgcagatacacatccagcagcaggcgccatggggcgtgggagtacgagacgaagccggcagcctggtggaagacgtgggtttcgcccagtttctgtcagtactgcactttgggcccacaggccctgtctgtggcaatcactag

SEQ ID NO: 215243 - DNA, 531 bp, Artificial Sequence
  derived and/or modified sequence
atggccggcctgacagacctgcagaggctgcaggcccgggtggaggagctggagcgctgggtgtatggccctgggggcgcccggggcagcaggaaggtggctgatggcctggtgaaggtgcaggtggccctgggcaacatcagcagcaagcgggagcgggtgaagatcctgtacaagaagattgaggacctgatcaagtacctggaccctgagtacatcgaccgcatcgccatcccagatgccagcaagctgcagttcatcctggccgaggagcagttcatcctgagccaggtggccctgctggagcaggtgaatgccctggtgcccatgctggacagcgcccacatcaaggctgtgcctgagcacgccgcccggctgcagaggctggcccagatccacatccagcagcaggccccctggggcgtgggcgtgagagatgaggccggcagcctggtggaggatgtgggctttgcccagttcctgtctgtgctgcacttcggccccactggacctgtgtgtggcaaccactag

SEQ ID NO: 215244 - DNA, 531 bp, Artificial Sequence
  derived and/or modified sequence
atggccggcctgaccgacctgcagcggctgcaggcccgggtggaggaactcgagaggtgggtatacggacctgggggagcacgaggctcccggaaggtagccgacgggctagtgaaggtgcaagtggctttgggcaacattagtagcaaaagggaacgcgtgaaaatcctgtacaagaagatcgaggatctgattaaatacttagacccagagtacattgatcgaatcgccataccagatgcgtccaagttacagttcatcctggcagaagagcagttcatcctgagtcaggtggctctgctggaacaggtaaacgcactagtgcccatgctggactctgcccacatcaaagccgtcccagagcacgccgcccgcctacaacgactagcacagatccatattcagcaacaggcaccttggggtgtaggagttagagacgaggctgggtcgctcgtggaggacgttggattcgcccagtttctatctgtcttacactttggccccacaggcccggtctgtggcaaccactag

SEQ ID NO: 215245 - DNA, 531 bp, Artificial Sequence
  derived and/or modified sequence
atggccggactgactgatctgcagcggctccaggcacgggtggaggagctcgagcggtgggtttacggacctggaggcgctcgagggtcgagaaaagtggctgacggcctggtgaaagtgcaggtggctttgggtaacatttcatccaagcgggagagagtgaaaatactgtataaaaagattgaagatttaattaaatatctcgatcctgagtacattgacaggatagccatccccgatgcctcaaagcttcaattcattctggcggaggaacagtttattctctctcaggtggccctcctagagcaagtcaacgccctggtgccaatgctggatagcgctcatattaaggccgtgccagaacacgcagctagactccagcgactcgcccaaattcatattcaacagcaggcaccgtggggcgtcggagtgcgagacgaagctggaagcctggtggaagatgtcggcttcgcacagtttctgagtgtcctgcattttggccctaccggtcctgtgtgcggcaaccattag

SEQ ID NO: 215246 - DNA, 531 bp, Artificial Sequence
  derived and/or modified sequence
atggccggcctgaccgacctgcagagactgcaggccagagtggaggagctggagagatgggtgtacggccccggcggcgccagaggcagcagaaaggtggccgacggcctggtgaaggtgcaggtggccctgggcaacatcagcagcaagagagagagagtgaagatcctgtacaagaagatcgaggacctgatcaagtacctggaccccgagtacatcgacagaatcgccatccccgacgccagcaagctgcagttcatcctggccgaggagcagttcatcctgagccaggtggccctgctggagcaggtgaacgccctggtgcccatgctggacagcgcccacatcaaggccgtgcccgagcacgccgccagactgcagagactggcccagatccacatccagcagcaggccccctggggcgtgggcgtgagagacgaggccggcagcctggtggaggacgtgggcttcgcccagttcctgagcgtgctgcacttcggccccaccggccccgtgtgcggcaaccactag

SEQ ID NO: 215247 - DNA, 899 bp, Artificial Sequence
  derived and/or modified sequence
ggtagtagcgatggcgggtctgactgacttgcagcggctacaggcccgagtggaagagctggagcgctgggtgtacgggccgggcggggcgcgcggctcacggaaggtggctgacggcctggtcaaggtgcaggtggctttggggaacatttccagcaagagggagagggtgaagattctctacaaaaagattgaagatctgatcaagtacctggatcctgagtacatcgaccgcattgccatacctgatgcctctaagctgcaattcatcctagcagaggagcagtttatcctttcccaggttgcactcctggagcaggtgaatgccttggtgcccatgctggacagtgctcacatcaaagccgttcctgagcatgctgcccgcctgcagcgcttggcccagatccacattcagcagcaggctccatggggagtgggagtccgtgatgaggcaggaagtttagtggaagatgtgggctttgcccagttcctttctgtgctacactttggccctacaggaccagtgtgtggaaatcactgaggagtccaaggctctcctggaggaatacaacaagactacaatgcttctctccaagcaattcgtgcagtgggatgagctactttgccagctagaggccgccacgcaagtgaagccagcagaggagtgatagctgctccccatcccaaagtgggcctgggcagtcaggctccagggccctatgccaacctgcctttgttacaaggcagaggaagctttgtatttattggcttcaaggcccacctctctgtactctgggctctaaagttggaggtcaggttacctgaggtttgcaatttgcaacacccaccctccccccaatcagtgttcttatttcagtgacaataaaccatagagatga

SEQ ID NO: 215248 - protein, 213 aa, Artificial Sequence
  derived and/or modified sequence
MAVLSAPGLRGFRILGLRSSVGPAVQARGVHQSVATDGPSSTQPALPKARAVAPKPSSRGEYVVAKLDDLVNWARRSSLWPMTFGLACCAVEMMHMAAPRYDMDRFGVVFRASPRQSDVMIVAGTLTNKMAPALRKVYDQMPEPRYVVSMGSCANGGGYYHYSYSVVRGCDRIVPVDIYIPGCPPTAEALLYGILQLQRKIKRERRLQIWYRR

SEQ ID NO: 215249 - protein, 206 aa, Artificial Sequence
  derived and/or modified sequence
MAVLSAPGLRGFRILGLRSSVGPAVQARGVHQSVATDGPSSTQPALPKARAVAPKPSSRGEYVVAKLDDLVNWARRSSLWPMTFGLACCAVEMMHMAAPRYDMDRFGVVFRASPRQSDVMIVAGTLTNKMAPALRKVYDQMPEPRYVVSMGSCANGGGYYHYSYSVVRGCDRIVPVDIYIPGRAGTAPPTRELETGPAPHGARRPL

SEQ ID NO: 215250 - protein, 214 aa, Artificial Sequence
  derived and/or modified sequence
MAVLSAPGLRGFRILGLRSSVGPAVQARGVHQSVATDGPSSTQPALPKARAVAPKPSSRGEYVVAKLDDLVNWARRSSLWPMTFGLACCAVEMMHMAAPRYDMDRFGVVFRASPRQSDVMIVAGTLTNKMAPALRKSSLRPDAGAALRGLHGELRQRRRLLPLFLLGGEGLRPHRARGHLHPRLPTTAEALLYGILQLQRKIKRERRLQIWYRR

SEQ ID NO: 215251 - DNA, 642 bp, Artificial Sequence
  derived and/or modified sequence
atggctgtgttgtccgccccgggtctgcgcggatttagaattcttggtctgaggtcatctgtcggccctgctgtccaggcccgcggggtacaccagagcgtcgccacggacgggccttcatccacacagcctgctctccccaaagcgcgagccgttgccccaaagccaagctcccggggcgagtacgtcgttgctaagttagatgatcttgttaactgggcacgtcgatcctcactatggccaatgacgttcgggctagcttgctgtgcggtagaaatgatgcacatggccgcgccgaggtatgacatggaccggtttggagtggtcttcagggcctccccaagacagagtgacgtcatgatcgtggcagggacactgactaacaaaatggctccagctctccggaaagtgtatgatcagatgccagaaccgcgatacgtggtttctatggggtcttgtgccaacggaggcggctattatcactactcgtactctgtagtaagagggtgcgaccgaatagtgcccgtggacatctacattcctggatgtcccccgaccgctgaggcgttgctgtatggaatcctgcagctgcaacggaaaataaaacgagaaagacggttgcagatctggtaccggagatag

SEQ ID NO: 215252 - DNA, 642 bp, Artificial Sequence
  derived and/or modified sequence
atggctgtgctgagcgcccctggcctgcggggcttccgcatcctgggcctgcggagctctgtgggccctgctgtgcaggcccggggcgtgcaccagagcgtggccacagatggccccagcagcacccagcctgccctgcccaaggcccgggctgtggcccccaagcccagcagcagaggagaatatgtggtggccaagctggatgacctggtgaactgggcccggcgcagcagcctgtggcccatgaccttcggcctggcctgctgtgctgtggagatgatgcacatggccgcccccaggtatgacatggaccgcttcggcgtggtgttccgggccagcccccggcagagtgatgtgatgattgtggccggcaccctgaccaacaagatggccccagccctgaggaaggtgtatgaccagatgcctgagccccgctacgtggtgtccatgggcagctgtgccaatggaggcggctactaccactacagctacagcgtggtgcggggctgtgacagaattgtgcctgtggacatctacatccctggctgccccccaacagctgaggccctgctgtatggcatcctgcagctgcagaggaagatcaagcgggagcggcggctgcagatctggtacagaagatag

SEQ ID NO: 215253 - DNA, 642 bp, Artificial Sequence
  derived and/or modified sequence
atggccgtgctgagcgcccccggcctgcggggcttccggatcctgggactacggtcttcagtcggtccagctgtacaggcaaggggagtgcaccagagcgtcgctaccgacggaccatctagtacccagcctgccctgcctaaagcccgggccgtggccccaaagcccagtagccggggagaatatgtcgtggccaaacttgacgatctagttaattgggcaagaagatcttcactgtggcccatgactttcggtctggcctgctgcgctgttgagatgatgcacatggccgccccaagatacgacatggacaggtttggcgtcgtattccgggcttcacctagacaaagcgatgtgatgatcgtagctggaaccctgacgaacaagatggcgcctgccctgcgcaaagtttatgaccaaatgcctgagccccgttatgtcgtctcaatggggtcatgtgctaatggtggggggtactaccactactcctacagtgtcgtccggggctgcgacaggatcgtacctgtggacatctacatccccggttgcccacccactgccgaagccctgctgtatggcatccttcagcttcagcgtaagatcaagcgggaaaggagattgcagatttggtaccggcggtag

SEQ ID NO: 215254 - DNA, 642 bp, Artificial Sequence
  derived and/or modified sequence
atggcagtcttatccgcccctggactgagaggctttcggatcctggggttgagaagctccgtgggaccagcggtccaggctcggggtgtacatcagtctgtggcaaccgacggcccttcttcaacacagccagcgctgccaaaggcaagagccgtggcgcctaagccttcgtccagaggcgaatacgttgtggcgaagctcgacgacctagtcaactgggcacggaggagctcactgtggcctatgacctttggccttgcctgctgcgctgtggagatgatgcacatggccgctccgagatacgatatggacagatttggagtagtattccgcgcatcacctcgtcagtcagatgtgatgatcgtggccggaactttaaccaataaaatggcccctgctctccggaaggtgtacgaccaaatgcccgaacctcggtacgttgtgtcgatgggatcttgtgccaacgggggaggctattatcattactcgtattctgtcgttagaggctgcgaccggattgttccagtcgacatatacatccccggttgccccccaactgcagaggctctcctctatggcattctgcaattgcagaggaagattaagagagaacgtaggctgcagatctggtataggcggtag

SEQ ID NO: 215255 - DNA, 642 bp, Artificial Sequence
  derived and/or modified sequence
atggccgtgctgagcgcccccggcctgagaggcttcagaatcctgggcctgagaagcagcgtgggccccgccgtgcaggccagaggcgtgcaccagagcgtggccaccgacggccccagcagcacccagcccgccctgcccaaggccagagccgtggcccccaagcccagcagcagaggcgagtacgtggtggccaagctggacgacctggtgaactgggccagaagaagcagcctgtggcccatgaccttcggcctggcctgctgcgccgtggagatgatgcacatggccgcccccagatacgacatggacagattcggcgtggtgttcagagccagccccagacagagcgacgtgatgatcgtggccggcaccctgaccaacaagatggcccccgccctgagaaaggtgtacgaccagatgcccgagcccagatacgtggtgagcatgggcagctgcgccaacggcggcggctactaccactacagctacagcgtggtgagaggctgcgacagaatcgtgcccgtggacatctacatccccggctgcccccccaccgccgaggccctgctgtacggcatcctgcagctgcagagaaagatcaagagagagagaagactgcagatctggtacagaagatag

SEQ ID NO: 215256 - DNA, 621 bp, Artificial Sequence
  derived and/or modified sequence
atggcagtgctgagtgcacctggcctaaggggctttcgaattctggggctgcggtccagtgtgggccctgcagtccaggcaagaggagtgcaccagtcagtagccactgacggcccatcctctacacagcccgctctgcccaaagcccgagccgtagcacccaagccctcatctagaggggagtacgtcgtggctaagctcgatgacctggtcaactgggcgaggcggtcttccctgtggccaatgaccttcgggcttgcttgttgcgctgtagagatgatgcacatggcggcacctaggtacgatatggatcggtttggggtggttttccgcgcttccccgcgtcagtcggacgtgatgatcgtggcaggtacactaacaaataagatggcccccgctttacggaaagtgtatgaccaaatgccagaaccacgttacgtggtttcaatgggtagttgcgccaacggtggcgggtactaccattattcttactcggtggtcaggggctgcgaccggatagtgccggttgacatttacatccctggaagagctgggaccgccccccccacacgtgagcttgagaccgggccagcacctcacggagctcggcgcccactgtag

SEQ ID NO: 215257 - DNA, 645 bp, Artificial Sequence
  derived and/or modified sequence
atggccgtattgagtgcccccggactgcgagggttcagaatccttggcctcagatccagcgttgggcccgctgtgcaggctagaggcgtgcatcaatccgtcgccactgacggccccagcagcacgcagcctgcgttacccaaggcccgtgccgtggcccctaaacctagtagccgaggcgaatacgtggtcgcgaagttggacgacttggtcaactgggcccggagatcttctttgtggcctatgactttcggcctggcttgctgcgctgtcgaaatgatgcatatggccgctcctcgctacgacatggatagattcggggtagtcttccgagctagcccccgccagagcgacgtgatgatcgttgctggcacactgaccaataaaatggctcctgcacttcgcaaaagcagcctgcgccctgacgccggggcggcactgcggggactgcacggagagcttaggcagcgaaggagattgctccctttgttcctattagggggagagggattgcggcctcaccgggcccgggggcatctacacccgcggttaccaactaccgccgaagcactactctacggaattctgcaacttcagcgtaaaatcaaaagggaacgacggctgcaaatctggtatagacgctag

SEQ ID NO: 215258 - DNA, 621 bp, Artificial Sequence
  derived and/or modified sequence
atggcggtcctgtccgcccccggattaagagggtttcggatactgggactgaggtcctctgtgggccctgccgtgcaagcgcggggcgtacaccaatcagttgccaccgatggcccgtcatccactcagccagccttaccaaaagcgcgggccgtggctcccaaaccctctagcagaggtgaatatgtcgttgcaaaactggatgatctggtgaactgggctcgccgatcgtcactgtggccgatgaccttcggactagcatgttgcgccgtggaaatgatgcacatggccgccccccgctacgatatggatcggtttggtgttgtgtttcgcgcctccccgagacagtccgatgttatgatcgtcgccgggacccttaccaacaagatggcgccagctctgaggaaagtgtacgaccagatgccagagccccgttatgtggtgtccatgggaagttgtgcaaatggaggcggatactatcattattcctattccgttgtgagaggctgtgataggattgtgcctgtcgacatctacatacccggtagggccgggacggcaccaccgacaagagaactggagactgggcccgctcctcacggcgccaggaggccactctag

SEQ ID NO: 215259 - DNA, 621 bp, Artificial Sequence
  derived and/or modified sequence
atggctgtgctgagcgcccctggcctgcggggcttccgcatcctgggcctgcggagctctgtgggccctgctgtgcaggcccggggcgtgcaccagagcgtggccacagatggccccagcagcacccagcctgccctgcccaaggcccgggctgtggcccccaagcccagcagcagaggagaatatgtggtggccaagctggatgacctggtgaactgggcccggcgcagcagcctgtggcccatgaccttcggcctggcctgctgtgctgtggagatgatgcacatggccgcccccaggtatgacatggaccgcttcggcgtggtgttccgggccagcccccggcagagtgatgtgatgattgtggccggcaccctgaccaacaagatggccccagccctgaggaaggtgtatgaccagatgcctgagccccgctacgtggtgtccatgggcagctgtgccaatggaggcggctactaccactacagctacagcgtggtgcggggctgtgacagaattgtgcctgtggacatctacatccctggccgggccggcacagccccacccacccgggagctggagactggacctgccccccacggggcccggcggcccctgtag

SEQ ID NO: 215260 - DNA, 645 bp, Artificial Sequence
  derived and/or modified sequence
atggctgtgctgagcgcccctggcctgcggggcttccgcatcctgggcctgcggagctctgtgggccctgctgtgcaggcccggggcgtgcaccagagcgtggccacagatggccccagcagcacccagcctgccctgcccaaggcccgggctgtggcccccaagcccagcagcagaggagaatatgtggtggccaagctggatgacctggtgaactgggcccggcgcagcagcctgtggcccatgaccttcggcctggcctgctgtgctgtggagatgatgcacatggccgcccccaggtatgacatggaccgcttcggcgtggtgttccgggccagcccccggcagagtgatgtgatgattgtggccggcaccctgaccaacaagatggccccagccctgaggaagagcagcctgcggccagatgctggagctgccctgcggggcctgcatggagagctgcggcagaggcggcggctgctgcccctcttcctgctgggcggggagggcctgcggccccaccgggcccggggccacctgcacccccggctgcccaccacagctgaggccctgctgtatggcatcctgcagctgcagaggaagatcaagcgggagcggcggctgcagatctggtacagaagatag

SEQ ID NO: 215261 - DNA, 1034 bp, Artificial Sequence
  derived and/or modified sequence
gggacgcgtggtgacttttgccctcctggaataacaagaaaatgagtgtcgcctctgtttttgtcggtccgccgcagacccgcggcccccacgtgcgcactccgatgacctttccgcctcgggtgatctgggggtgcacggcgcaacacgaccacggaggccgaaagcgcagcggaacctcccggctccaggttccggtttccgcatgcgctccgagccgctttgggcggcggccccgggaacccggagcgctaaggagaacggacctcagaggttgtctgaaggccgaggccaagatggcggtgctgtcagctcctggcctgcgcggcttccggatccttggtctgcgctccagcgtgggcccggctgtgcaggcacgaggtgtccatcagagcgtggccaccgatggcccaagcagcacccagcctgccctgccaaaggccagagccgtggctcccaaacccagcagccggggcgagtatgtggtggccaagctggatgacctcgtcaactgggcccgccggagttctctgtggcccatgaccttcggcctggcctgctgcgccgtggagatgatgcacatggcagcaccccgctacgacatggaccgctttggcgtggtcttccgcgccagcccgcgccagtccgacgtcatgatcgtggccggcacactcaccaacaagatggccccagcgcttcgcaaggtctacgaccagatgccggagccgcgctacgtggtctccatggggagctgcgccaacggaggaggctactaccactattcctactcggtggtgaggggctgcgaccgcatcgtgcccgtggacatctacatcccaggctgcccacctacggccgaggccctgctctacggcatcctgcagctgcagaggaagatcaagcgggagcggaggctgcagatctggtaccgcaggtagcgccgccgccgccgccgccggagcctgtcgccgtcctgtccccagcctgcttgtgtcccgtgaggttgtcaataaacctgccctcgggctgccgcc

SEQ ID NO: 215262 - DNA, 2818 bp, Artificial Sequence
  derived and/or modified sequence
gttgtctgaaggccgaggccaagatggcggtgctgtcagctcctggcctgcgcggcttccggatccttggtctgcgctccagcgtgggcccggctgtgcaggcacgaggtgtccatcagagcgtggccaccgatggcccaagcagcacccagcctgccctgccaaaggccagagccgtggctcccaaacccagcagccggggcgagtatgtggtggccaagctggatgacctcgtcaactgggcccgccggagttctctgtggcccatgaccttcggcctggcctgctgcgccgtggagatgatgcacatggcagcaccccgctacgacatggaccgctttggcgtggtcttccgcgccagcccgcgccagtccgacgtcatgatcgtggccggcacactcaccaacaagatggccccagcgcttcgcaaggtctacgaccagatgccggagccgcgctacgtggtctccatggggagctgcgccaacggaggaggctactaccactattcctactcggtggtgaggggctgcgaccgcatcgtgcccgtggacatctacatcccaggtagggccgggaccgcaccgcccacgagggagctggagacagggccagcgccacacggagcccggcggcccctgtgagggagtcccacacccccagcagacggcgggctcccccatcctatggatgggccgactcggagcgctgcctcttagtggagcctgtcccctgtgagaagtcggcgatgtattcaggcatcagagggatcagagggagcaggggaagctgagtggaattcctgacacacgcctggtttacagcagtttcatatggtcctacctggcacaaaccaaagacctgcagttagaaataccaagcgagaaggttcctgggggccaaggacactgtcccgcgccctcagccttacagaagggcacgcaggactccctgggacccggggtggccggatttggcaaatgaaaacgtgggaggcttagtttgactgtgaggttagggtgaatttgaccatcaggaaaactgttagtagtaattgtttagtacgagtatatcccaacaatatttgggctatactgacactaaaaagagcattggctgcatacctgaaattcacatcgcaccgggaacattctttatatctggtgatcccgtgggactcttgcacctcacgtggtcccacgagggccatccccccgggcgttcaccttgacagtggtccacggtaggcaggcttggaggtggcgctcatgtgggacaggggacagagtcctgttcttggccaccctgtgctgcgtgcggcattagctcatgcgcagagagcccagccctgagtcccgagtctgggggtttgggcaagcgagaggcacatcctggtgcctctcaaaagtggaggaacaggctctgactttggattccgcttccctggaaagggcgttgatttgttcagcgttctgcacggttcaggtcaccccgggggcagtggagagggcagcctgggcctccctgtgacttgacagcacagagaggtccatcctggggtcaggagctctgcccatgcccctggcgtcttcccctgcagtgcagaccaatggggcaagttgcgagtgtggactgtactcctccctccttgcagactgagctcctccctccctggggaccgcgctcctccctccctgcggactgtgctccctgtctggggactgcgctcctccctccttggggaccgtgctcctccctccctccctgcggaccgcgctcctccctccctggggaccgcgctcctccctccctgcggaccgcgctcggccctccctggggaccgcgcccctccctcccagcggaccgcgctcctccctccctggggacctcgctcctccctccctccctgcggactgtgctgctccctccctgcggactgtgcttctccctcccttggagcagcctggacttgccagagctctgccaggtggggcctggccgccctttcccaggccctgcagtggccttgtcctttctcacctgtttccactcctgctgtccccgttgggccctgggcttcgtcctcttgctcaagccctttgttctgaacctgcgtggcagccgggactgggggatccccagcaaagagctctggcttggggctcagaaagagggtcatcgggtcctcgtgggatgcccgggctctgggccacctcccctccctccgcccagcctccctgcctccatctccgtccagggcagccccgggccctgctccccactgctaagtgtgtctgctgagcgctggcccccattgagtcctgagggctggggccgggggccgggttagtgaggtcagcgtcttgtccgagaggtccctgtgacagcccgggatgagccacgggtggagggcagtggggccttgcccaggggaggaccccactcttcctgcagggacctcccctgcgccggctcccagtccctggcactgcgcccacccagggctgtcagcctccaccttcagaggccggcccgggaaacccttccaaagccgagccggctgcgctgtgcacgcggtcacgcgggctccggctgcgggaagcgagactgaggcaaggtccctgcaggctgcccacctacggccgaggccctgctctacggcatcctgcagctgcagaggaagatcaagcgggagcggaggctgcagatctggtaccgcaggtagcgccgccgccgccgccgccggagcctgtcgccgtcctgtccccagcctgcttgtgtcccgtgaggttgtcaataaacctgccctcgggctgcc

SEQ ID NO: 215263 - DNA, 3871 bp, Artificial Sequence
  derived and/or modified sequence
gttgtctgaaggccgaggccaagatggcggtgctgtcagctcctggcctgcgcggcttccggatccttggtctgcgctccagcgtgggcccggctgtgcaggcacgaggtgtccatcagagcgtggccaccgatggcccaagcagcacccagcctgccctgccaaaggccagagccgtggctcccaaacccagcagccggggcgagtatgtggtggccaagctggatgacctcgtcaactgggcccgccgggtgagtactatgagctgtaggccctcctcgagcgccagggcctctctgcacactcacaggcacacacatacacacaccaacgtgcagacacgtacacacacaacacatgcatgcacactcacatgcgcacatgtgcatgcaagctcacatgtatggacagatgtgtacacggaccacacgcacactcacgcacacaatgcacatatgcacactcgcacacatgcacacttgcacacacatgcacacacaagcacatgtgcacacacgcttgcacacatacacacatgcacacttgcactcatgcacactcatgcgcacatatacacatgcacacgcacactcgcacacacgtgcacatatatgcacagtcatgcacacacatgcacactcacacacatgcacacacgtccttgtgtggacacatgcatgtgtgcctgttggcatgcatgcacacaggcacactcactgatgcacacacacccctgcggccgtggagcagggcggaccctcccggaggcccctgtgctggcctggtggcctgtggttccatctgaggattcggaccctgctggagatgacccctccgtttccgtcattctctttctggcgtccgtgtgttcctcttgtttctcttttaaggtgaaagcagtgttttaagttaaaaggagcgcgtgtgaaggcagtagatccttctcggtacccgtttaaagcctcccctgcctgtggcgccagcccccacgcagcccctgccatccccctgcagcgtgagcacgtgcagctccctccagctcctgcggcacttgctgcgacagcccgggttcaacaatcccccattgatggacgttcactgtttccttttgttttttgtttcctaaacaatgccacggcgaacgtcctgccagggccgcagtggtcgagacaaggatagtttttaatgcaggatagttcttttctttttcttttcttttcttttttttttttttgagacggaggctcgctctgtcgcccaggctggagtgcagtggtgcgatctcggctcactgcatgctccgcttgccgggttctcctgcctcagcctcctaagtagctgggactacaggtgcccgccaccacgcccggctaattttttgtatttttatttttagtagagatggggtttcaccgtgttggccaggatggtctcgatctcctgacctcgtgatccgcccacctcggcctcccaaagtgctgggattacaggcgtgagccaccacgcccggctaatgcaggatagtttctaatggagggaacctgagacatggccagcggccgtcccaacacaggcttctggcgggcaggtggacctggccatttctgcccgggcagccctgcctcactctgtagcctgaccctgtcacccgccaacacatgcagcagggcccctgccaggtctcagagccgcgtgcagggagagcgggaacggtgggggaaatgagaagccacagggatggaggagaggggagggagtggccaaggagatctgagagggcttcctggaggcgtcgcacttggtatgtggacccagatctagttaacgcagagagttcccggttagacctgcgctactactcgcctgtagcccacgcgctcagagagtggctggagccccctgttgaaatggtgggacttaggatacactgggttcgaggaactatgtgatgaggacagatctcacccgtttctctctattttatgtatttgaatgtggctggtggggcgcgctttacaactcttggggcccggaggccacctgcaggagccgctgtgcctctcacctctgccggctgccgccccgggacatgagtcgggggttctgggtgctccacgtggagtctcacgctgggccacgcggggctccgggggtggcgtctgacccgagcccggcctccgcagagttctctgtggcccatgaccttcggcctggcctgctgcgccgtggagatgatgcacatggcagcaccccgctacgacatggaccgctttggcgtggtcttccgcgccagcccgcgccagtccgacgtcatgatcgtggccggcacactcaccaacaagatggccccagcgcttcgcaaggtctacgaccagatgccggagccgcgctacgtggtctccatggggagctgcgccaacggaggaggctactaccactattcctactcggtggtgaggggctgcgaccgcatcgtgcccgtggacatctacatcccaggtagggccgggaccgcaccgcccacgagggagctggagacagggccagcgccacacggagcccggcggcccctgtgagggagtcccacacccccagcagacggcgggctcccccatcctatggatgggccgactcggagcgctgcctcttagtggagcctgtcccctgtgagaagtcggcgatgtattcaggcatcagagggatcagagggagcaggggaagctgagtggaattcctgacacacgcctggtttacagcagtttcatatggtcctacctggcacaaaccaaagacctgcagttagaaataccaagcgagaaggttcctgggggccaaggacactgtcccgcgccctcagccttacagaagggcacgcaggactccctggggaccgcgcccctccctcccagcggaccgcgctcctccctccctggggacctcgctcctccctccctccctgcggactgtgctgctccctccctgcggactgtgcttctccctcccttggagcagcctggacttgccagagctctgccaggtggggcctggccgccctttcccaggccctgcagtggccttgtcctttctcacctgtttccactcctgctgtccccgttgggccctgggcttcgtcctcttgctcaagccctttgttctgaacctgcgtggcagccgggactgggggatccccagcaaagagctctggcttggggctcagaaagagggtcatcgggtcctcgtgggatgcccgggctctgggccacctcccctccctccgcccagcctccctgcctccatctccgtccagggcagccccgggccctgctccccactgctaagtgtgtctgctgagcgctggcccccattgagtcctgagggctggggccgggggccgggttagtgaggtcagcgtcttgtccgagaggtccctgtgacagcccgggatgagccacgggtggagggcagtggggccttgcccaggggaggaccccactcttcctgcagggacctcccctgcgccggctcccagtccctggcactgcgcccacccagggctgtcagcctccaccttcagaggccggcccgggaaacccttccaaagccgagccggctgcgctgtgcacgcggtcacgcgggctccggctgcgggaagcgagactgaggcaaggtccctgcaggctgcccacctacggccgaggccctgctctacggcatcctgcagctgcagaggaagatcaagcgggagcggaggctgcagatctggtaccgcaggtagcgccgccgccgccgccgccggagcctgtcgccgtcctgtccccagcctgcttgtgtcccgtgaggttgtcaataaacctgccctcgggctgccgcc

SEQ ID NO: 215264 - DNA, 754 bp, Artificial Sequence
  derived and/or modified sequence
gaggccaagatggcggtgctgtcagctcctggcctgcgcggcttccggatccttggtctgcgctccagcgtgggcccggctgtgcaggcacgaggtgtccatcagagcgtggccaccgatggcccaagcagcacccagcctgccctgccaaaggccagagccgtggctcccaaacccagcagccggggcgagtatgtggtggccaagctggatgacctcgtcaactgggcccgccggagttctctgtggcccatgaccttcggcctggcctgctgcgccgtggagatgatgcacatggcagcaccccgctacgacatggaccgctttggcgtggtcttccgcgccagcccgcgccagtccgacgtcatgatcgtggccggcacactcaccaacaagatggccccagcgcttcgcaagtcttccctacgaccagatgccggagccgcgctacgtggtctccatggggagctgcgccaacggaggaggctactaccactattcctactcggtggtgaggggctgcgaccgcatcgtgcccgtggacatctacatcccaggctgcccaccacggccgaggccctgctctacggcatcctgcagctgcagaggaagatcaagcgggagcggaggctgcagatctggtaccgcaggtagcgccgccgccgccgccgccggagcctgtcgccgtcctgtccccagcctgcttgtgtcccgtgaggttgtcaataaacctgccctcgggctgccgcctccc

SEQ ID NO: 215265 - DNA, 1060 bp, Artificial Sequence
  derived and/or modified sequence
tttgtaaggtctcccagggcgccggagcgcagtgtcgtctctgtggcgcaatcggttagcgcgttcggctgttaaccgaaagacccgcggcccccacgtgcgcactccgatgacctttccgcctcgggtgatctgggggtgcacggcgcaacacgaccacggaggccgaaagcgcagcggaacctcccggctccaggttccggtttccgcatgcgctccgagccgctttgggcggcggccccgggaacccggagcgctaaggagaacggacctcagaggttgtctgaaggccgaggccaagatggcggtgctgtcagctcctggcctgcgcggcttccggatccttggtctgcgctccagcgtgggcccggctgtgcaggcacgaggtgtccatcagagcgtggccaccgatggcccaagcagcacccagcctgccctgccaaaggccagagccgtggctcccaaacccagcagccggggcgagtatgtggtggccaagctggatgacctcgtcaactgggcccgccggagttctctgtggcccatgaccttcggcctggcctgctgcgccgtggagatgatgcacatggcagcaccccgctacgacatggaccgctttggcgtggtcttccgcgccagcccgcgccagtccgacgtcatgatcgtggccggcacactcaccaacaagatggccccagcgcttcgcaaggtctacgaccagatgccggagccgcgctacgtggtctccatggggagctgcgccaacggaggaggctactaccactattcctactcggtggtgaggggctgcgaccgcatcgtgcccgtggacatctacatcccaggtagggccgggaccgcaccgcccacgagggagctggagacagggccagcgccacacggagcccggcggcccctgtgagggagtcccacacccccagcagacggcgggctcccccatcctatggatgggccgactcggagcgctgcctcttagtggagcctgtcccctgtgagaagtcggcgatgtattcaggcatcagagggatcagagggagca

SEQ ID NO: 215266 - DNA, 621 bp, Artificial Sequence
  derived and/or modified sequence
atggccgtgctgagcgcccccggcctgcggggcttccggatcctgggactcagaagctctgtgggacccgccgtccaggccagaggtgtgcaccagtccgtcgctactgacggaccgtcctccacacaacccgctctgcctaaagctagagcggtagcacccaaaccttccagccgaggagaatatgttgtggcgaagttggacgatttggtaaattgggcacgtcgctcgtcactctggcccatgacatttgggcttgcttgctgcgccgtcgagatgatgcacatggctgccccccggtatgatatggaccgattcggagttgtgttccgcgcaagtccaagacagagcgacgtgatgatagttgcgggtacactgactaataagatggctcccgccttaaggaaggtgtatgaccagatgcccgagccccggtatgtggtctccatgggtagttgcgccaatggtggtggctactaccattattcctatagcgtggtacggggatgcgacagaattgttcccgttgatatttacatccctggcagggctggcacagcgcctcctacccgggagctggaaacaggcccggctccccatggtgctcggcgccctttgtag

SEQ ID NO: 215267 - DNA, 645 bp, Artificial Sequence
  derived and/or modified sequence
atggccgtgctgagcgcccccggcctgcggggcttccggatcctgggcctacgctctagcgtgggccccgcagttcaggcacgaggtgtacaccagtccgtcgcaaccgatggtccaagttccacccagcctgcactaccgaaggccagggccgtcgcccctaagccttcatctcgtggggagtacgtggtagccaagctggacgatctggtcaattgggcccgaaggtcttctctgtggcccatgacctttggcctggcctgctgtgctgtggaaatgatgcacatggccgctcccagatacgatatggaccgcttcggagtagtgttcagggccagccctcggcagtctgacgttatgatagttgcggggacacttaccaacaagatggccccagcgcttcgcaagtctagtctgagaccagatgctggcgccgctctgagaggactccacggcgagttgcggcaacgaaggcggctactccccctgttcctgctgggtggagaagggcttcgcccacaccgtgcccggggtcacttgcaccctcgcttgcccacaactgccgaggccttgttatacggtatcctgcagcttcagcgtaaaatcaagagggaacggcgtcttcagatctggtatcggcggtag

SEQ ID NO: 215268 - DNA, 621 bp, Artificial Sequence
  derived and/or modified sequence
atggccgtgctgagcgcccccggcctgcggggcttccggatcctggggttgcggagttctgtggggccggcggtgcaggccaggggtgtgcaccagagcgtggcaactgacggtcccagcagcactcaacccgccttacctaaggccagagctgttgcacctaaaccttctagccgtggggagtacgtggtcgctaaacttgacgaccttgtgaactgggcccggaggagcagtctctggcccatgacttttggtttggcttgctgcgctgtcgaaatgatgcacatggccgcccctcgatatgacatggaccgttttggcgttgtgttcagagctagccctcggcaatctgacgtcatgatcgtagcaggaacacttacaaacaaaatggctcccgctctccggaaggtgtacgatcagatgcctgagccaagatacgtggtgagcatgggatcatgcgccaacggcggcggttactatcactatagctacagcgttgtgcgcgggtgtgaccggatcgtgcctgttgacatttacatacctggccgagccgggacagctcctcctactcgggagcttgaaactggaccagcgccgcatggagccagacgccccctctag

SEQ ID NO: 215269 - DNA, 621 bp, Artificial Sequence
  derived and/or modified sequence
atggctgttctctcggctccaggtctgcggggatttaggattctaggcctacgatcctccgtgggcccagcagtgcaggcgaggggagttcaccaatcagtcgctacagacggaccatcctccactcagcccgctctacccaaggctcgggcagtagctcccaagccatctagcaggggagaatacgtggttgcaaagctggacgaccttgttaactgggctaggcggtcctctttatggcctatgacattcggtctcgcctgctgcgccgtggaaatgatgcacatggccgcaccacggtacgacatggacaggttcggggttgtgtttagagcgtcccctaggcagtcggacgttatgatcgtggccggtactttaaccaacaagatggcccctgccttgaggaaagtttacgaccagatgcccgagcctcggtacgtggtctctatgggaagctgcgcaaacggcggaggatattaccattattcctacagtgtcgtgcgcggatgtgaccgaatcgtgcccgtggatatttacatcccaggcagagccggaaccgcgcctccaacaagagagctggagactggccctgcccctcatggcgcacgtcgtcctctgtag

SEQ ID NO: 215270 - DNA, 645 bp, Artificial Sequence
  derived and/or modified sequence
atggctgttctgagcgctcccggactgaggggttttaggattttagggcttaggagtagcgtgggacctgctgtgcaggcacgcggagtacatcaatccgtggcgaccgatggtcccagcagcacccaacctgctttgccaaaagcccgagccgtcgcacctaagcctagttcccggggagagtatgtggttgccaagctggatgatcttgtcaactgggcacgacggagttccctatggcccatgacttttggattggcgtgctgtgcagttgagatgatgcatatggccgcaccaagatacgatatggatagatttggagttgtcttcagagctagcccacgtcaatctgacgtgatgatcgttgcgggaacacttacgaataagatggccccagccttgcggaaatctagtcttcggcctgatgccggagcagctctccgcggtctgcatggagaactgcgacagagacgcagattgcttcctctgtttttgctgggaggcgaaggcctccgaccacacagagcaagagggcaccttcacccacgcctgccaacaacagcagaggctctgctgtacggcatcctccagcttcagcgcaagatcaagagggaaaggagactgcaaatttggtatcgcagatag

SEQ ID NO: 215271 - DNA, 621 bp, Artificial Sequence
  derived and/or modified sequence
atggccgtgctgtccgccccaggtctgagaggcttcagaatactgggcctcagatccagcgttggtccagcggttcaagctcgtggggtgcaccagagcgtggccaccgacgggccatcatctacccagcctgctttacccaaggccagagccgtcgccccaaaaccgtcttccaggggcgagtacgtggtcgccaaattagacgacctcgtcaattgggccagaagaagctccctttggcccatgaccttcggcctggcatgttgtgccgtggagatgatgcatatggccgcacccagatatgatatggatcgctttggcgtggtgttccgagcgtcaccacgtcagtcagacgttatgatcgtggccggtacccttacaaacaagatggctcccgctctaagaaaggtgtacgatcagatgcctgaaccacggtacgtggtctcaatgggaagctgtgctaatgggggagggtattaccactattcttactctgttgtaaggggctgtgataggattgtaccggtggacatttacatacctggcagggccggaacggcccctcctacccgagagttggaaacgggccctgcaccacatggcgcacggagacccctatag

SEQ ID NO: 215272 - DNA, 621 bp, Artificial Sequence
  derived and/or modified sequence
atggccgtgctgagcgcccccggcctgagaggcttcagaatcctgggcctgagaagcagcgtgggccccgccgtgcaggccagaggcgtgcaccagagcgtggccaccgacggccccagcagcacccagcccgccctgcccaaggccagagccgtggcccccaagcccagcagcagaggcgagtacgtggtggccaagctggacgacctggtgaactgggccagaagaagcagcctgtggcccatgaccttcggcctggcctgctgcgccgtggagatgatgcacatggccgcccccagatacgacatggacagattcggcgtggtgttcagagccagccccagacagagcgacgtgatgatcgtggccggcaccctgaccaacaagatggcccccgccctgagaaaggtgtacgaccagatgcccgagcccagatacgtggtgagcatgggcagctgcgccaacggcggcggctactaccactacagctacagcgtggtgagaggctgcgacagaatcgtgcccgtggacatctacatccccggcagagccggcaccgccccccccaccagagagctggagaccggccccgccccccacggcgccagaagacccctgtag

SEQ ID NO: 215273 - DNA, 645 bp, Artificial Sequence
  derived and/or modified sequence
atggccgtgctgagcgcccccggcctgagaggcttcagaatcctgggcctgagaagcagcgtgggccccgccgtgcaggccagaggcgtgcaccagagcgtggccaccgacggccccagcagcacccagcccgccctgcccaaggccagagccgtggcccccaagcccagcagcagaggcgagtacgtggtggccaagctggacgacctggtgaactgggccagaagaagcagcctgtggcccatgaccttcggcctggcctgctgcgccgtggagatgatgcacatggccgcccccagatacgacatggacagattcggcgtggtgttcagagccagccccagacagagcgacgtgatgatcgtggccggcaccctgaccaacaagatggcccccgccctgagaaagagcagcctgagacccgacgccggcgccgccctgagaggcctgcacggcgagctgagacagagaagaagactgctgcccctgttcctgctgggcggcgagggcctgagaccccacagagccagaggccacctgcaccccagactgcccaccaccgccgaggccctgctgtacggcatcctgcagctgcagagaaagatcaagagagagagaagactgcagatctggtacagaagatag

SEQ ID NO: 215274 - protein, 126 aa, Artificial Sequence
  derived and/or modified sequence
MHLSQLLACALLLTLLSLRPSEAKPGAPPKVPRTPPAEELAEPQAAGGGQKKGDKAPGGGGANLKGDRSRLLRDLRVDTKSRAAWARLLQEHPNARKYKGANKKGLSKGCFGLKLDRIGSMSGLGC

SEQ ID NO: 215275 - DNA, 381 bp, Artificial Sequence
  derived and/or modified sequence
atgcacctgtcacagttattggcctgtgccctgctcctgactctcctgtcgctgcggccaagcgaagccaaacctggagcccctcctaaagttcctaggacaccccctgccgaagagctggcggaaccacaggctgcgggagggggtcagaagaaaggggacaaggctcccggtggaggtggcgcaaacctgaaaggcgaccgatcacggctgcttcgcgacctgcgggtagacacgaaaagtcgcgcagcttgggccaggctgctgcaggagcaccctaacgcaaggaagtataaaggagctaataaaaagggcctgtcaaaggggtgtttcggcttgaagctggacagaatcggctctatgtcaggtttgggctgttag

SEQ ID NO: 215276 - DNA, 381 bp, Artificial Sequence
  derived and/or modified sequence
atgcatttgtcacagctccttgcttgtgccctgttgctcactctgctgagtttgaggcctagtgaggccaaaccaggtgctccccctaaggttccgcgaactcctcctgctgaagaactggccgagcctcaggcagccggaggtggacagaaaaagggcgacaaagccccagggggagggggagcaaacctgaaaggtgaccggtccaggttgcttcgagatttgcgggttgataccaagtctcgcgctgcctgggccaggcttcttcaggaacaccctaatgctaggaagtacaagggagctaacaagaaaggtctgtcaaaggggtgctttggcctcaagttggaccggatcgggtccatgtcgggcctgggctgttag

SEQ ID NO: 215277 - DNA, 1051 bp, Artificial Sequence
  derived and/or modified sequence
cgggctcagagcgcacccagccggcgccgcgcagcactgggaccctgctcgccctgcagcccagccagcctgctccgcatccccctgctggtctgcccgccgacctgcgcgccctcgctgccgcccgtgtgcgcccctcgaccccagcggcaccatgcatctctcccagctgctggcctgcgccctgctgctcacgctgctctccctccggccctccgaagccaagcccggggcgccgccgaaggtcccgcgaaccccgccggcagaggagctggccgagccgcaggctgcgggcggcggtcagaagaagggcgacaaggctcccgggggcgggggcgccaatctcaagggcgaccggtcgcgactgctccgggacctgcgcgtggacaccaagtcgcgggcagcgtgggctcgccttctgcaagagcaccccaacgcgcgcaaatacaaaggagccaacaagaagggcttgtccaagggctgcttcggcctcaagctggaccgaatcggctccatgagcggcctgggatgttagtgcggcgccccctggcggcggatcgggaactggctccgttgtgctgaggtcatctttggtcatcagcctccagcatctggaaacacctccaacgcaatgtggcttttacatttctttctttctttctttttttttcctggtactgggaatacacaacaccagctgttttattattatttggggagggggttgtgattttattatttgtttttttaaaatgaaaaataaaaagttatatattatatatatattatatacatgaaacacacacacctacaccgacttgatgacaagggacagtttttaagagactgacagaaccagctgtaaaacattgctgtttgtaaattcatgtcatgcataaatgtatttatgttgtaaagctatttatattgtttataaagagatatttataaaaattttatttatgtaactaaatgaaagaagtcaatcattgtaatgtttttgtcctaactagttaaaaaaaatgtaaaaaaaaaaaagtcattccatgaa

SEQ ID NO: 215278 - DNA, 381 bp, Artificial Sequence
  derived and/or modified sequence
atgcacttgagtcagctgctagcatgcgcactgctgctcacactcctgtctctgcgtccttctgaagcgaagcccggtgcacctccgaaagtgccccgaacccccccagccgaggaactggctgaacctcaggcagctggaggcggacagaagaagggagacaaagcgcctggtggaggaggtgccaatctgaaaggggaccgtagccgtttactcagggacttaagggtcgataccaaatctcgggcggcctgggctaggcttttgcaggaacatccaaacgcccgaaaatataaaggtgctaataagaaggggctgagcaagggatgctttggtctgaagctcgataggatcggatctatgtcgggacttggctgttag

SEQ ID NO: 215279 - DNA, 381 bp, Artificial Sequence
  derived and/or modified sequence
atgcatctaagccagctactggcttgcgcgctgctgctgaccctactcagtcttagacctagtgaggcgaagcctggagccccaccaaaggtaccaagaactccaccggctgaggagctggccgaaccccaagcggcgggagggggacagaaaaagggtgacaaggcccctggcggcggaggagccaatctcaaaggtgataggtccagattactgcgagatctgagggtggacacaaagagtagagccgcatgggcccgactgctccaagagcaccctaatgcaaggaagtataaaggagcaaataaaaaaggcctgagcaagggttgcttcggactcaaactggacagaatcggatctatgtcgggtctcggatgctag

SEQ ID NO: 215280 - DNA, 381 bp, Artificial Sequence
  derived and/or modified sequence
atgcacctgagccagctgttggcctgcgcactgctccttacactgctaagtctgagacccagcgaagcaaagcccggagccccacccaaagtgccccggacacccccagccgaggaattagctgaaccacaagcagcaggcggaggtcagaaaaaaggggataaggccccgggaggaggtggagccaacctaaaaggagatcgcagcaggctgttaagggacctgcgggtggacacaaaatcacgggcagcctgggcaaggttactgcaagagcatcctaacgcccggaaatataaaggcgcgaataaaaagggacttagtaaagggtgcttcggactaaagctagacagaatagggtctatgtcaggattgggatgttag

SEQ ID NO: 215281 - DNA, 381 bp, Artificial Sequence
  derived and/or modified sequence
atgcatctaagccagctactggcttgcgcgctgctgctgaccctactcagtcttagacctagtgaggcgaagcctggagccccaccaaaggtaccaagaactccaccggctgaggagctggccgaaccccaagcggcgggagggggacagaaaaagggtgacaaggcccctggcggcggaggagccaatctcaaaggtgataggtccagattactgcgagatctgagggtggacacaaagagtagagccgcatgggcccgactgctccaagagcaccctaatgcaaggaagtataaaggagcaaataagaagggtctttctaaagggtgttttggactcaagcttgaccgcattggtagcatgtctggactgggttgttag

SEQ ID NO: 215282 - DNA, 500 bp, Artificial Sequence
  derived and/or modified sequence
cgcatccccctgctggtctgcccgccgacctgcgcgccctcgctgccgcccgtgtgcgcccctcgaccccagcggcaccatgcatctctcccagctgctggcctgcgccctgctgctcacgctgctctccctccggccctccgaagccaagcccggggcgccgccgaaggtcccgcgaaccccgccggcagaggagctggccgagccgcaggctgcgggcggcggtcagaagaagggcgacaaggctcccgggggcgggggcgccaatctcaagggcgaccggtcgcgactgctccgggacctgcgcgtggacaccaagtcgcgggcagcgtgggctcgccttctgcaagagcaccccaacgcgcgcaaatacaaaggagccaacaagaagggcttgtccaagggctgcttcggcctcaagctggaccgaatcggctccatgagcggcctgggatgttagtgcggcgccccctggcggcggtgagtacggcccacccgac

SEQ ID NO: 215283 - DNA, 381 bp, Artificial Sequence
  derived and/or modified sequence
atgcacctgagccagctgctggcctgcgccctgctgctgaccctgctgagcctgagacccagcgaggccaagcccggcgccccccccaaggtgcccagaaccccccccgccgaggagctggccgagccccaggccgccggcggcggccagaagaagggcgacaaggcccccggcggcggcggcgccaacctgaagggcgacagaagcagactgctgagagacctgagagtggacaccaagagcagagccgcctgggccagactgctgcaggagcaccccaacgccagaaagtacaagggcgccaacaagaagggcctgagcaagggctgcttcggcctgaagctggacagaatcggcagcatgagcggcctgggctgctag

SEQ ID NO: 215284 - DNA, 381 bp, Artificial Sequence
  derived and/or modified sequence
atgcacttgtctcagctcctagcctgtgcccttctgctgaccctcttgtcactgcgacccagtgaggctaagcctggcgccccaccaaaggtccctcgtaccccacctgcggaggagctagccgagcctcaggccgccggcggtggacagaagaagggagataaggccccaggaggcggtggagcaaacttgaagggcgatcgctctcggctattgagagatctgagggtggatacaaagtcccgggcggcttgggcacgcctgctccaagagcaccccaatgccaggaagtacaagggtgcaaacaagaagggcctcagcaaggggtgctttgggctcaagctggataggattgggagcatgtccggtctgggttgttag

SEQ ID NO: 215285 - DNA, 381 bp, Artificial Sequence
  derived and/or modified sequence
atgcacctttcccagctgctggcttgtgcacttctgctgactctgctctctctcagaccctccgaggccaaaccaggcgcgccacccaaggtccccagaaccccccctgccgaggaactggctgaaccccaggccgctggggggggccagaaaaagggtgataaggcccctgggggtggtggggctaacctgaagggcgatcgaagccgtctgttgagagatttgagggtcgacacgaagtccagggcagcgtgggccaggctcctccaggagcacccaaacgctcggaagtacaagggagctaataaaaaggggctgagcaagggctgcttcggacttaagttagataggatcgggtctatgagcggcttgggttgttag

SEQ ID NO: 215286 - DNA, 381 bp, Artificial Sequence
  derived and/or modified sequence
atgcacctgagccagctgctggcctgtgccctgctgctgaccctgctgagcctgcggcccagcgaggccaagccaggggccccacccaaggtgcccaggaccccacctgctgaggagctggccgagccccaggccgccggcggcggccagaagaagggggacaaggcccctgggggcggcggggccaacctgaagggggacaggagccggctgctgcgggacctgcgggtggacaccaagagcagagctgcctgggcccggctgctgcaggagcaccccaatgccaggaagtacaagggggccaacaagaagggcctgagcaagggctgcttcggcctgaagctggaccgcatcggctccatgagcggcctgggctgctag

SEQ ID NO: 215287 - DNA, 381 bp, Artificial Sequence
  derived and/or modified sequence
atgcacctgagccagctgctggcctgcgccctgctgctgaccctgctgtcattgcggccctctgaggcaaagcccggtgccccaccaaaagttcctaggactcctccagccgaagagctggcagagccccaggctgcaggtggaggacagaaaaaaggcgacaaagcgcccggaggtggtggcgctaacctcaaaggcgatcgctctaggctgctgcgagacctccgcgttgacactaagtcacgtgctgcttgggcaagattgctgcaggaacacccgaacgccaggaagtataagggagcaaataagaagggccttagcaagggatgttttggcctcaaattagacaggattggtagcatgtctggactaggctgctag

SEQ ID NO: 215288 - DNA, 381 bp, Artificial Sequence
  derived and/or modified sequence
atgcacctgagccagctgctggcctgcgccctgctgctgaccctgttaagcttgcgcccctccgaagcgaagccaggagcccctcccaaagttcctaggacccctcccgcagaggagttggccgagccacaggcagccggcggggggcagaaaaaaggagacaaggcccctggagggggcggcgcaaaccttaagggtgaccgtagtcggttgctcagggatcttcgcgtcgataccaagagccgggcagcatgggcaagactactgcaggagcaccctaatgccaggaagtataaaggcgccaacaaaaaagggctgagtaaaggctgcttcggactcaagttggataggataggttctatgtctgggttgggctgctag

SEQ ID NO: 215289 - RNA, 381 nt, Artificial Sequence
  derived and/or modified sequence
augcacuugagucagcugcuagcaugcgcacugcugcucacacuccugucucugcguccuucugaagcgaagcccggugcaccuccgaaagugccccgaacccccccagccgaggaacuggcugaaccucaggcagcuggaggcggacagaagaagggagacaaagcgccugguggaggaggugccaaucugaaaggggaccguagccguuuacucagggacuuaagggucgauaccaaaucucgggcggccugggcuaggcuuuugcaggaacauccaaacgcccgaaaauauaaaggugcuaauaagaaggggcugagcaagggaugcuuuggucugaagcucgauaggaucggaucuaugucgggacuuggcuguuag

SEQ ID NO: 215290 - RNA, 381 nt, Artificial Sequence
  derived and/or modified sequence
augcaucuaagccagcuacuggcuugcgcgcugcugcugacccuacucagucuuagaccuagugaggcgaagccuggagccccaccaaagguaccaagaacuccaccggcugaggagcuggccgaaccccaagcggcgggagggggacagaaaaagggugacaaggccccuggcggcggaggagccaaucucaaaggugauagguccagauuacugcgagaucugaggguggacacaaagaguagagccgcaugggcccgacugcuccaagagcacccuaaugcaaggaaguauaaaggagcaaauaaaaaaggccugagcaaggguugcuucggacucaaacuggacagaaucggaucuaugucgggucucggaugcuag

SEQ ID NO: 215291 - RNA, 381 nt, Artificial Sequence
  derived and/or modified sequence
augcaccugagccagcuguuggccugcgcacugcuccuuacacugcuaagucugagacccagcgaagcaaagcccggagccccacccaaagugccccggacacccccagccgaggaauuagcugaaccacaagcagcaggcggaggucagaaaaaaggggauaaggccccgggaggagguggagccaaccuaaaaggagaucgcagcaggcuguuaagggaccugcggguggacacaaaaucacgggcagccugggcaagguuacugcaagagcauccuaacgcccggaaauauaaaggcgcgaauaaaaagggacuuaguaaagggugcuucggacuaaagcuagacagaauagggucuaugucaggauugggauguuag

SEQ ID NO: 215292 - RNA, 381 nt, Artificial Sequence
  derived and/or modified sequence
augcaucuaagccagcuacuggcuugcgcgcugcugcugacccuacucagucuuagaccuagugaggcgaagccuggagccccaccaaagguaccaagaacuccaccggcugaggagcuggccgaaccccaagcggcgggagggggacagaaaaagggugacaaggccccuggcggcggaggagccaaucucaaaggugauagguccagauuacugcgagaucugaggguggacacaaagaguagagccgcaugggcccgacugcuccaagagcacccuaaugcaaggaaguauaaaggagcaaauaagaagggucuuucuaaaggguguuuuggacucaagcuugaccgcauugguagcaugucuggacuggguuguuag

SEQ ID NO: 215293 - protein, 250 aa, Artificial Sequence
  derived and/or modified sequence
MAALSCLLDSVRRDIKKVDRELRQLRCIDEFSTRCLCDLYMHPYCCCDLHPYPYCLCYSKRSRSCGLCDLYPCCLCDYKLYCLRPSLRSLERKAIRAIEDEKRELAKLRRTTNRILASSCCSSNILGSVNVCGFEPDQVKVRVKDGKVCVSAERENRYDCLGSKKYSYMNICKEFSLPPCVDEKDVTYSYGLGSCVKIESPCYPCTSPCSPCSPCSPCNPCSPCNPCSPYDPCNPCYPCGSRFSCRKMIL

SEQ ID NO: 215294 - DNA, 753 bp, Artificial Sequence
  derived and/or modified sequence
atggccgccttgtcatgtctgctggacagtgtgcgaagggatattaagaaggtggacagagagctgcggcagttgcggtgtatcgatgagtttagcacacggtgtttatgtgatctctacatgcacccctactgttgttgcgacctccacccctatccctactgcctttgctactcgaaaagaagtaggagttgcggactttgcgacctttacccctgctgcctttgcgactataagctgtactgtctaaggccgtccctccgaagtctggaacggaaggcgatcagggcgattgaggatgagaaacgtgagctggcaaagctgcgacgcacaaccaatagaattcttgcaagcagctgctgttcttctaacattctgggctcagtgaacgtatgtgggttcgaaccagatcaggtaaaggtgcgcgtgaaggatgggaaagtctgcgtgtcagctgagagagagaaccgctatgattgcctcgggagtaagaagtactcatacatgaacatctgcaaggaattctccctgccgccgtgtgttgatgaaaaggatgtgacctactcatacggactcggcagctgtgtgaagatcgaaagcccctgttatccgtgcacttctccttgttctccctgctcaccttgctccccctgtaacccatgttctccctgtaacccttgttctccctatgacccttgtaatccttgttatccctgcggttcgagattcagctgtcgcaagatgatcctgtag

SEQ ID NO: 215295 - DNA, 753 bp, Artificial Sequence
  derived and/or modified sequence
atggccgccctgagctgcctgctggacagcgtgcggcgggacatcaagaaggtggaccgggagctgcggcagctgcgctgcattgatgagttcagcacccgctgcctgtgtgacctgtacatgcacccctactgctgctgtgacctgcacccctacccctactgcctgtgctacagcaagaggagccgcagctgtggcctgtgtgacctgtacccctgctgcctgtgtgactacaagctgtactgcctgcggcccagcctgcggagcctggagaggaaggccatccgggccattgaagatgagaagcgggagctggccaagctgcggaggaccaccaaccgcatcctggccagcagctgctgcagcagcaacatcctgggctctgtgaatgtgtgtggctttgagccagaccaggtgaaggtgcgggtgaaggatggcaaggtgtgtgtgtctgctgagagagaaaatagatatgactgcctgggcagcaagaagtacagctacatgaacatctgcaaggagttcagcctgcccccctgtgtggatgagaaggatgtgacctacagctatggcctgggcagctgtgtgaagattgagagcccctgctacccctgcaccagcccctgcagcccctgcagcccctgcagcccctgcaacccctgcagcccctgcaacccctgcagcccctatgacccctgcaacccctgctacccctgtggcagccgcttcagctgcaggaagatgatcctgtag

SEQ ID NO: 215296 - DNA, 753 bp, Artificial Sequence
  derived and/or modified sequence
atggccgccctgagctgcctgctggacagcgtgcggcgggacatcaaaaaagtggaccgagaactgagacaattgaggtgcattgatgagttcagtactcggtgtctgtgtgacctgtatatgcacccgtactgctgttgcgacctccacccctacccatattgcctctgttactcgaaacggtctcgctcttgcggtctttgcgacttgtatccgtgttgcctctgtgattacaagttgtactgcctgcgtccgtcactccgctcactcgagaggaaggcaatcagagcaatcgaagacgagaaacgggagctggccaaactgagacgcacaacaaaccggatcctggctagctcttgctgttctagtaatattctgggttctgtcaacgtatgtggctttgagcctgatcaggtaaaagtgagagtgaaggacgggaaggtatgtgtttccgcggagagggaaaatcggtacgactgtttgggctccaagaagtactcttacatgaacatttgcaaggagtttagtcttccgccctgtgtggatgagaaagatgtgacatactcctacggtctcggcagctgcgtgaagatcgagtctccctgctacccctgtacatccccctgctcaccatgtagtccctgttctccatgtaatccctgctctccatgtaacccatgttctccttacgatccgtgcaacccttgttatccctgcggcagtcggttttcatgccggaagatgatcctttag

SEQ ID NO: 215297 - DNA, 1013 bp, Artificial Sequence
  derived and/or modified sequence
gaaggtggtgaggtcatagaacacaagctttaaagtaagtgaatcatgtgtgcctcatttatttttaaaagcaacttctgagaagggcttagaacaaattttttcccggagtgccatttcccaaaggtactcacagaacaatcaggtgtgaccataatggctgcactgagttgtctcttggacagtgtcagaagggacataaagaaggtggacagagaactaaggcaactgagatgcatcgacgaatttagcacacggtgcctgtgcgacttgtatatgcacccctattgctgctgtgacttgcacccatatccgtactgcttgtgctattccaagcgatcacgctcttgcggcctgtgtgatctctacccatgttgcctgtgtgattataagctttactgtctgcgaccatctctcagaagtttggagaggaaagccatcagagccatagaagatgagaagcgagagcttgccaaactgagaagaacaacaaatagaattctggcttcctcctgctgtagcagtaacattttaggatcggtgaatgtatgcggttttgaacccgatcaagtcaaagttcgagtgaaggatggaaaggtatgtgtgtcggctgagcgggagaacaggtacgactgccttggatcgaaaaagtacagctacatgaacatctgcaaagagttcagcttgccgccctgtgtggatgagaaggatgtaacatactcctatgggctcggcagctgtgtcaagatcgagtctccttgctacccttgcacttctccttgcagcccctgcagcccctgcagcccctgcaacccctgcagcccctgcaacccgtgcagcccatatgatccttgcaacccgtgttatccctgtggaagccgattttcctgtaggaagatgattttgtaaagtgcgcataggaacccattacttaatagaagtcagttactccagccaggcagctctcccaatgtttctcctctccttcccatggcccctgttgttgaagtacg

SEQ ID NO: 215298 - DNA, 753 bp, Artificial Sequence
  derived and/or modified sequence
atggcagctttgtcatgtctgctcgatagtgtgcgccgagatatcaagaaggtcgaccgagagctgagacagctgcgttgcatcgatgaattttccacccggtgcctctgcgacttgtacatgcacccgtattgctgttgtgatctccatccatatccctattgcctgtgttactctaaaagatctcggtcttgcggactttgcgatctgtatccctgctgcctatgcgattacaagttgtattgcctccgtccctcattacgatcactagagcgcaaagctatccgcgctatcgaagacgagaagcgggaattagccaaactcaggcggactacgaacaggattctggccagttcatgttgcagtagtaacatcctgggatctgtaaatgtatgcggctttgagcccgatcaagtcaaagtgcgcgtgaaggacggaaaggtgtgcgtgtccgctgaacgggagaaccggtacgactgcctggggagtaaaaaatacagttatatgaatatatgcaaagagttttccctgccaccatgtgtggatgagaaggacgtcacgtacagctacggcctcggcagctgcgtgaaaatcgaatccccctgctacccatgtacttccccatgcagcccttgtagcccctgctccccgtgcaatccctgctcaccctgcaatccttgctcgccatacgacccgtgcaatccctgctatccgtgcggctcacggttcagctgcagaaaaatgatactgtag

SEQ ID NO: 215299 - DNA, 753 bp, Artificial Sequence
  derived and/or modified sequence
atggccgccctgagctgcctgctggacagcgtgagaagagacatcaagaaggtggacagagagctgagacagctgagatgcatcgacgagttcagcaccagatgcctgtgcgacctgtacatgcacccctactgctgctgcgacctgcacccctacccctactgcctgtgctacagcaagagaagcagaagctgcggcctgtgcgacctgtacccctgctgcctgtgcgactacaagctgtactgcctgagacccagcctgagaagcctggagagaaaggccatcagagccatcgaggacgagaagagagagctggccaagctgagaagaaccaccaacagaatcctggccagcagctgctgcagcagcaacatcctgggcagcgtgaacgtgtgcggcttcgagcccgaccaggtgaaggtgagagtgaaggacggcaaggtgtgcgtgagcgccgagagagagaacagatacgactgcctgggcagcaagaagtacagctacatgaacatctgcaaggagttcagcctgcccccctgcgtggacgagaaggacgtgacctacagctacggcctgggcagctgcgtgaagatcgagagcccctgctacccctgcaccagcccctgcagcccctgcagcccctgcagcccctgcaacccctgcagcccctgcaacccctgcagcccctacgacccctgcaacccctgctacccctgcggcagcagattcagctgcagaaagatgatcctgtag

SEQ ID NO: 215300 - protein, 724 aa, Artificial Sequence
  derived and/or modified sequence
MGDEDWEAEINPHMSSYVPIFEKDRYSGENGDNFNRTPASSSEMDDGPSRRDHFMKSGFASGRNFGNRDAGECNKRDNTSTMGGFGVGKSFGNRGFSNSRFEDGDSSGFWRESSNDCEDNPTRNRGFSKRGGYRDGNNSEASGPYRRGGRGSFRGCRGGFGLGSPNNDLDPDECMQRTGGLFGSRRPVLSGTGNGDTSQSRSGSGSERGGYKGLNEEVITGSGKNSWKSEAEGGESSDTQGPKVTYIPPPPPEDEDSIFAHYQTGINFDKYDTILVEVSGHDAPPAILTFEEANLCQTLNNNIAKAGYTKLTPVQKYSIPIILAGRDLMACAQTGSGKTAAFLLPILAHMMHDGITASRFKELQEPECIIVAPTRELVNQIYLEARKFSFGTCVRAVVIYGGTQLGHSIRQIVQGCNILCATPGRLMDIIGKEKIGLKQIKYLVLDEADRMLDMGFGPEMKKLISCPGMPSKEQRQTLMFSATFPEEIQRLAAEFLKSNYLFVAVGQVGGACRDVQQTVLQVGQFSKREKLVEILRNIGDERTMVFVETKKKADFIATFLCQEKISTTSIHGDREQREREQALGDFRFGKCPVLVATSVAARGLDIENVQHVINFDLPSTIDEYVHRIGRTGRCGNTGRAISFFDLESDNHLAQPLVKVLTDAQQDVPAWLEEIAFSTYIPGFSGSTRGNVFASVDTRKGKSTLNTAGFSSSQAPNPVDDESWD

SEQ ID NO: 215301 - protein, 159 aa, Artificial Sequence
  derived and/or modified sequence
MGDEDWEAEINPHMSSYVPIFEKDRYSGENGDNFNRTPASSSEMDDGPSRRDHFMKSGFASGRNFGNRDAGECNKRDNTSTMGGFGVGKSFGNRGFSNSRFEDGDSSGFWRESSNDCEDNPTRNRGFSKRGGYRDGNNSEASGPYRRGGRGSFRGCRGG

SEQ ID NO: 215302 - DNA, 2175 bp, Artificial Sequence
  derived and/or modified sequence
atgggagatgaggattgggaagcagagataaatccgcatatgagcagctatgtacctatttttgagaaagacagatatagcggagagaacggcgacaattttaatcgcacccccgcctcgtcttccgagatggatgacggtccatcccgcagagatcactttatgaaatctgggttcgccagtggccggaactttggcaaccgagacgccggcgaatgcaataaacgggacaacacctcaactatgggtggcttcggtgttggtaagagtttcggcaacaggggtttctcaaacagccgcttcgaagacggggattcctcaggattctggcgcgagagttccaatgactgtgaggataatccgactagaaaccgcggattctctaaacggggcggctaccgagacggtaataacagcgaggcctctggcccctaccgcaggggtggccggggctcatttcgcggatgccggggagggttcgggttaggctctccaaataatgacctggacccagacgagtgcatgcaacgtaccggcgggctgtttgggagcaggcggcccgtgttatctggcaccgggaacggagatacaagtcagtctaggtctgggtctggctcagaaaggggtggctacaaagggctgaacgaggaggtcataacagggtccggtaaaaatagctggaaaagtgaggcagaaggaggagaatctagtgacacacagggccccaaggtgacctacattcccccaccaccaccagaagacgaagattctatctttgcccactatcagaccgggattaactttgataagtatgacaccattctagtcgaggtgtccgggcatgacgcccctcctgccatcctaaccttcgaagaggcgaatctctgccagaccctgaacaacaacatcgcaaaagcgggctatactaagcttacccctgttcagaagtattcaatccccattatcctggccggcagggacctaatggcctgcgcccagactgggtctggaaagactgccgcgttccttctgcctattctcgctcatatgatgcacgatggcatcaccgcttcccgttttaaagagctccaggaaccggaatgcattatcgtcgcaccgacccgcgagctcgttaaccagatctatctggaggcacggaagtttagcttcggcacctgcgtcagagctgtcgttatttatggaggcactcaactggggcattcaatccgccaaatagtacaagggtgtaacatcctgtgtgcgacacctggccgtctgatggatatcataggcaaagaaaaaattggcctaaaacaaattaaatatctggttcttgatgaggccgaccgcatgctagatatggggttcggccctgaaatgaaaaaactgatttcctgccctggtatgcccagcaaggaacaacggcagaccctgatgtttagcgcaaccttccccgaggagatccagcgcctagctgccgaattcctgaagtcaaactatttgttcgttgccgtgggccaggtcggcggggcctgtcgggacgtgcaacagaccgttttacaggtgggacagttctcaaaacgtgagaaactggttgagatattgcggaacatcggcgatgaaaggacgatggtttttgtggaaacaaagaaaaaagccgattttattgccactttcctgtgccaggaaaagatctctacaacgtccattcatggagacagagagcagagagagagagagcaggccttgggcgacttcagattcggcaaatgcccagtgctcgtcgccacaagcgttgctgcgcgcggtctggatatcgagaatgtacaacacgtgatcaacttcgacctaccctcaacaatagacgagtacgtgcacaggatcggccgtactggtagatgtgggaacacagggagagccattagtttctttgatctggaaagcgacaatcatctcgcacagccccttgttaaagtgttgaccgatgcacagcaagacgtgcctgcgtggctggaggagattgcatttagtacctacattcccggttttagcggatctacccgcgggaacgtgtttgctagcgtcgacacccggaagggaaagtccacattaaataccgccggtttcagcagcagtcaggctcctaaccccgtcgacgatgagagctgggactag

SEQ ID NO: 215303 - DNA, 480 bp, Artificial Sequence
  derived and/or modified sequence
atgggcgacgaagattgggaggctgagattaacccccatatgtccagctatgttcctatattcgagaaggaccggtattccggggagaacggtgacaattttaacaggacaccggcctcttcttctgagatggatgacggaccatccaggagagatcacttcatgaaatctggatttgctagcggccgcaacttcggcaacagagacgcaggcgagtgtaacaaacgagataatacgtccacgatgggtggttttggcgtgggcaagagcttcggtaaccgaggctttagtaactcaagatttgaggacggcgattccagtggtttctggagagaatctagtaacgactgcgaggataaccccactagaaatcgcggctttagcaagagaggcggttaccgtgacgggaataattcggaagcttcggggccataccggcggggcggccggggcagtttcagaggttgtcgggggggctag

SEQ ID NO: 215304 - DNA, 2175 bp, Artificial Sequence
  derived and/or modified sequence
atgggagatgaggactgggaggccgagatcaacccccacatgagcagctatgtgcccatctttgagaaggaccgctacagcggagaaaatggagacaacttcaacagaacaccagccagcagcagcgagatggatgatggccccagccggcgggaccacttcatgaagagcggctttgccagcggcaggaactttggaaacagagatgctggggagtgcaacaagagggacaacaccagcaccatgggcggctttggagtgggcaagagctttggaaacagaggcttcagcaacagcagatttgaagatggagacagcagcggcttctggagggagagcagcaatgactgtgaggacaaccccaccaggaacagaggcttcagcaagagaggaggctacagagatggcaacaacagcgaggccagcggcccctaccgccggggcggccggggcagcttccggggctgccggggcggcttcggcctgggcagccccaacaatgacctggaccctgatgagtgcatgcagaggactggaggcctgtttggcagcagaagacctgtgctgagcggcactggaaatggagacaccagccagagccgcagcggcagcggcagcgagcggggcggctacaagggcctgaatgaggaggtgatcaccggcagcggcaagaacagctggaagtctgaggccgagggcggggagagcagtgacacccagggccccaaggtgacctacatccccccacctcctccagaagatgaagattccatctttgcccactaccagacaggcatcaactttgacaagtatgacaccatcctggtggaggtgtctggccatgatgcccccccagccatcctgacctttgaggaggccaacctgtgccagaccctgaacaacaacatcgccaaggccggctacaccaagctgacccctgtgcagaagtacagcatccccatcatcctggccggccgggacctgatggcctgtgcccagacaggcagcggcaagacagctgccttcctgctgcccatcctggcccacatgatgcatgatggcatcacagccagccgcttcaaggagctgcaggagcctgagtgcatcatcgtggcccccacccgggagctggtgaaccagatctacctggaggccaggaagttctcctttggcacctgtgtgcgggctgtggtgatctacggcggcacccagctgggccacagcatccggcagatcgtgcagggctgcaacatcctgtgtgccaccccaggccgcctgatggacatcatcggcaaggagaagattggcctgaagcagatcaagtacctggtgctggatgaggccgacaggatgctggacatgggcttcggccctgagatgaagaagctgatcagctgccccggcatgcccagcaaggagcagaggcagaccctgatgttttctgccaccttccctgaggagatccagaggctggccgctgagttcctgaagagcaactacctgtttgtggccgtgggccaggtgggcggggcctgcagagatgtgcagcagacagtgctgcaggtgggccagttcagcaagcgggagaagctggtggagatcctgaggaacattggagatgagaggaccatggtgtttgtggagaccaagaagaaggctgacttcatcgccaccttcctgtgccaggagaagatcagcaccaccagcatccatggagaccgggagcagcgggagcgggagcaggccctgggggacttccgctttgggaagtgccctgtgctggtggccacctctgtggccgcccggggcctggacattgaaaatgtgcagcacgtgatcaactttgacctgcccagcaccattgatgaatatgtgcaccgcatcggccgcacaggccgctgtggcaacacaggccgggccatctccttctttgacctggagagtgacaaccacctggcccagcccctggtgaaggtgctgacagatgcccagcaggatgtgcctgcctggctggaggagatcgccttcagcacctacatccctggcttcagcggcagcaccagaggaaatgtgtttgcctctgtggacaccaggaagggcaagagcaccctgaacacagctggcttcagcagcagccaggcccccaaccctgtggatgatgagagctgggactag

SEQ ID NO: 215305 - DNA, 480 bp, Artificial Sequence
  derived and/or modified sequence
atgggagatgaggactgggaggccgagatcaacccccacatgagcagctatgtgcccatctttgagaaggaccgctacagcggagaaaatggagacaacttcaacagaacaccagccagcagcagcgagatggatgatggccccagccggcgggaccacttcatgaagagcggctttgccagcggcaggaactttggaaacagagatgctggggagtgcaacaagagggacaacaccagcaccatgggcggctttggagtgggcaagagctttggaaacagaggcttcagcaacagcagatttgaagatggagacagcagcggcttctggagggagagcagcaatgactgtgaggacaaccccaccaggaacagaggcttcagcaagagaggaggctacagagatggcaacaacagcgaggccagcggcccctaccgccggggcggccggggcagcttccggggctgccggggcggctag

SEQ ID NO: 215306 - DNA, 2175 bp, Artificial Sequence
  derived and/or modified sequence
atgggcgacgaggactgggaggccgagatcaacccccacatgagcagttatgtccctatctttgagaaggaccgttattccggagaaaatggagataacttcaaccggactcccgcctcatcaagcgaaatggacgacggccctagcagacgcgatcattttatgaagagcggctttgccagcggtcgcaacttcggcaaccgggatgccggggaatgtaataaacgcgataataccagtactatgggtgggttcggggtgggtaagagcttcggaaatcggggcttcagcaattcccggtttgaagatggggactcctctggcttttggcgggaaagctctaacgactgtgaagacaacccaactagaaatcggggattcagcaaacgcggaggatacagagacggcaacaattccgaggcgtctgggccttatagacgcggtggaagagggtcgtttcgaggctgcagaggagggtttggtctgggatctccaaacaacgatctagatccagatgagtgcatgcagcggactggtgggctcttcggtagccgccgtccagtgctgtccggcaccggcaatggggacaccagccagtctcggagtggctcaggctccgagagaggcggctacaagggcctcaatgaggaggtaataacgggatccggcaaaaattcctggaaatccgaggctgaggggggagagtcgagcgatacccaaggacccaaagtgacatacattcctccgccgccacctgaggacgaggacagtattttcgcccactatcagaccgggattaactttgacaagtacgatacaattctggtggaggtctccggccatgatgccccccccgctattctgaccttcgaagaagcaaatctctgccagacgcttaacaataacatcgcaaaggccgggtacaccaagttaacccctgtacagaagtatagcattcccatcatcctggctggcagagaccttatggcctgtgcacaaactggctcagggaagaccgcagccttcctcctgcctattctggcccacatgatgcatgacggaataacagcctcccggttcaaagagctccaggaaccagagtgcataatcgtggcccccactcgggagctggtcaaccagatatatttggaggcaaggaagtttagcttcgggacgtgtgtcagagcggtggtaatctatggaggtacacagctcggccactccattagacagatcgtgcagggctgcaacatattgtgcgcaacacccggtcgattaatggacatcataggaaaagaaaaaattggccttaaacagatcaagtacttagtcctggacgaggcagatagaatgttggacatggggtttggcccggagatgaaaaagcttattagttgtccaggaatgccgagcaaggagcagaggcagacgctgatgttcagtgcgacatttccggaagaaattcagcgcctcgcagccgagtttctgaagtcaaactatttgttcgtggctgtgggacaggtgggcggagcctgccgtgacgtccagcagactgttctgcaggtaggacaatttagcaaaagagagaaattggtcgagatcctccgcaacataggtgacgagcgcactatggtctttgtggaaacaaaaaagaaagctgacttcatcgcgacatttctgtgccaggagaagataagtacaacttctatccatggcgaccgagagcaaagggagcgcgagcaggccttgggcgacttccgctttggtaaatgtccggttcttgtggcaaccagcgttgctgcgcgcggcctggacattgaaaacgtgcagcatgtgatcaatttcgaccttccttccaccatcgacgagtacgttcacagaatcgggcgaaccggtcggtgcgggaatacaggccgcgcaattagtttctttgacctggagtctgataaccacctggcccaacctctggtcaaggtcctaactgacgcgcaacaagatgtccctgcctggttggaggaaatcgccttctctacctacattccaggcttcagtgggtcaacaaggggtaacgtcttcgccagcgtggatacccgcaagggtaagtccactctcaacaccgcgggcttctcatcttcccaggccccgaatccggtggacgatgagtcctgggattag

SEQ ID NO: 215307 - DNA, 480 bp, Artificial Sequence
  derived and/or modified sequence
atgggcgacgaggactgggaggccgagatcaacccccacatgagctcctatgtgccaatcttcgagaaagatcggtactccggtgagaacggggacaatttcaacagaaccccggcatcctcctcagagatggatgacggacccagcaggcgcgatcatttcatgaagagtgggttcgctagcggcagaaactttggaaaccgggatgcaggcgagtgtaataaaagagataacacgagcactatggggggcttcggcgtcggaaagagctttggtaatcgagggtttagcaacagcagattcgaggacggagactcttccggcttctggcgggagtctagcaatgactgcgaggacaatcccactcgtaataggggcttctctaaaaggggggggtaccgcgatgggaataatagtgaggcttctggcccttacagacgtggtggccgcgggtcttttaggggttgtcgtggcggctag

SEQ ID NO: 215308 - DNA, 2175 bp, Artificial Sequence
  derived and/or modified sequence
atgggggacgaggactgggaggcggagattaatccacatatgtccagctatgtgcctatcttcgaaaaagacaggtactccggcgagaacggggacaattttaataggacgcccgctagctctagcgaaatggacgacgggccatcgagacgggatcatttcatgaagtcagggtttgcctccggacgaaattttggaaacagggacgccggagagtgcaacaagcgagataatactagtacaatggggggattcggcgtgggcaagtcatttggtaaccgaggcttcagtaattcccggttcgaggatggtgattcctcaggcttttggcgtgagagctctaatgattgtgaggacaatccaacccgcaataggggtttcagcaaaagagggggataccgggatggcaataacagcgaagcctcgggcccttataggcgtggaggtcgtggcagttttaggggctgtcggggaggctttggtctgggctctcctaataacgacctagacccagacgagtgtatgcaaagaacagggggattgtttggctcacggcgtccggtcctcagtggcacggggaacggggacaccagtcagtcgcgtagtggctctggatctgaacggggtgggtataaaggactgaacgaggaagtgataacaggtagtggaaaaaacagctggaagtcagaagcagaaggcggagagagctcggacacccaggggccaaaggttacatacatccccccaccacccccagaagatgaagatagtattttcgcccattaccagaccgggattaacttcgataaatacgatactattttggtcgaggttagcggccacgatgcccctcctgccatcctgacatttgaggaggctaacctgtgccagacacttaataacaacatcgctaaggccggttatacaaagttgacccccgtgcaaaagtactctataccgatcatcctcgccggtagggacctcatggcatgcgcccagacgggctctggcaagacagcggctttcctgctgccaatactggcgcatatgatgcatgacggaataacggcaagcaggtttaaggaactgcaggaaccagagtgcatcatagtggctccaacgagggaactggttaatcagatataccttgaggctaggaagttttcctttggcacctgcgtgagagccgtagtgatctacgggggaactcaactgggccactcaatccgtcagattgtgcagggctgtaacatcctgtgtgcaactccaggtagactgatggatatcattgggaaagagaagataggtttgaagcagatcaagtacctggtgctcgacgaagccgataggatgctcgacatgggatttgggcctgagatgaagaagctgatcagctgccctggaatgcccagcaaggaacagcgccaaactctgatgtttagcgccacattccccgaagagatacagagattggcagcagagtttttaaaaagtaattatttgtttgtggccgtcggccaggtaggtggcgcttgtagagatgtgcaacagactgtgttacaggtcggccagttcagcaaaagggaaaagcttgtggagattctccgaaacatcggagatgagcggaccatggtgttcgtggaaaccaagaagaaggcggatttcatcgcaacattcttgtgccaggagaagatttcgacaaccagcatccacggcgaccgagaacagagggaacgggagcaggctttgggcgacttccgcttcggaaaatgccccgtgctggttgcgactagcgttgccgcacgtggattggacattgagaatgttcagcatgtgatcaatttcgatcttccctcgaccatagatgaatatgtacacaggattggaagaacgggcagatgtgggaatacaggccgagccataagcttctttgatctcgagtctgataatcacctggcccagccccttgtcaaagtcctgaccgatgcacagcaggatgttcccgcatggttggaggagatcgcattctcaacctatattcccggtttttccggctccacaagaggcaacgtgtttgcaagcgtggacaccagaaaaggcaagtcgaccctgaatacagctgggttttcatcttctcaggcccctaatcctgtagatgatgaaagctgggattag

SEQ ID NO: 215309 - DNA, 480 bp, Artificial Sequence
  derived and/or modified sequence
atgggagatgaagattgggaggccgagatcaatccacacatgtcttcctacgtgcctatcttcgaaaaagatcgctactctggggagaatggcgataactttaatcggacccctgcatcttcatcagagatggatgacgggccttcaagacgagatcattttatgaagtcaggctttgcttctggacggaacttcggcaaccgcgacgcgggagaatgtaacaaacgagacaacacctccacaatggggggatttggtgtaggtaagtcctttgggaacagaggtttctcaaattccaggttcgaagacggcgattcatctggattttggagagagagttcaaacgactgcgaagacaatcctacccgtaatcggggattttccaagcggggtggctatcgagacgggaataactcagaagcttccggtccataccggagggggggaaggggaagctttcgaggctgcaggggcggatag

SEQ ID NO: 215310 - DNA, 2884 bp, Artificial Sequence
  derived and/or modified sequence
gcagtgggcgtcttgcacgtgcagccgtttaagtcgcgtgggcgcctgcgagggcttgggagagcaagccgcggagagaacttgaagccaccatgggagatgaagattgggaagcagaaatcaaccctcatatgtcttcctatgttcccatatttgagaaggataggtattctggagaaaatggagacaattttaacaggactccagcttcatcatcagaaatggatgatggaccttctcgaagagatcatttcatgaaaagtggatttgcctctgggcggaattttggaaacagagatgctggtgagtgtaataagcgagataatacatccacaatgggtggttttggagttggaaagagttttggaaacagaggtttttcaaacagcaggtttgaagatggtgatagctctggtttctggagagagtctagtaatgactgcgaagataatccaacacggaacagagggttttccaagagaggcggctatcgagatggaaataattcagaagcttcagggccatacagaagaggtggaagaggtagtttccgaggttgccgtggaggatttggtctaggaagtccaaataatgacttagacccagacgaatgtatgcagcgcactggtggcctttttggttctagaagaccagtattaagtggcacaggtaatggtgatacttctcaaagcagaagtggcagtggaagtgaacgaggtggttacaaaggtttaaatgaagaagtaataacaggctctggaaagaattcttggaagtcagaagcagaaggaggagaaagtagtgatactcaaggaccaaaagtgacctacataccccctcctccacctgaggatgaggactccatctttgcacattatcagacaggcataaacttcgacaaatacgacactattcttgtggaagtgtctggacatgatgcaccaccagcaattctgacttttgaagaagctaatctctgtcagacactgaataacaacattgctaaagctggttatactaagcttactcctgtgcaaaaatacagtattcctatcatacttgcaggacgagatttgatggcttgcgctcaaacagggtctgggaagactgcggcttttctcctaccaattttggctcatatgatgcatgatggaataactgccagtcgttttaaagagttgcaggaaccagagtgtattattgtagcaccaactcgagaattggtcaaccagatttatttggaagccagaaaattttcttttgggacttgtgtaagagctgttgttatatatgggggaacccagctgggacattcaattcgacaaatagtacaaggctgtaatatattatgtgctactcctggaagactgatggatatcataggcaaagaaaagattggtctcaaacagatcaaatacttagttttggatgaagctgatcgcatgttggatatgggttttggtccagaaatgaagaagttaatttcttgcccaggaatgccatcaaaggaacagcgccaaacccttatgttcagtgcaacttttccagaggaaattcaaaggttggctgcagagtttttaaagtcaaattatctgtttgttgctgttggacaagtgggtggagcatgtagagatgttcagcagaccgttctccaagttggccagttctcaaaaagagaaaagctcgttgaaattctgcgaaacataggggatgaaagaactatggtctttgttgaaactaagaaaaaagcagattttattgcaacttttctttgtcaagaaaaaatatcaactacaagtattcatggtgatcgggaacagagagagcgggagcaagctcttggagattttcgctttggaaagtgcccagttcttgttgctacttcagtagctgccagagggctggatattgaaaatgtgcaacatgttatcaattttgatcttccttctaccattgatgaatatgttcatcgaattgggcgtactggtcgttgtgggaatactggcagagcaatttccttttttgatcttgaatcggataaccatttagcacagcctctagtaaaagtattgacagatgctcaacaggatgttcctgcatggttggaagaaattgcctttagtacatacattcctggcttcagtggtagtacaagaggaaacgtgtttgcatcagttgataccagaaagggcaagagcactttgaacacagctgggttttcttcttcacaagctcccaatccagtagatgatgagtcatgggattaaagccaaaacatccttcaagtctgtggttttgatgcagagaagaaaatagttttgatttttgagtttttaacagaagtataaaacttaacattctcatagctcctgtccttgtattctcactcctacacttaaaaaaaaaatccttactgactagttatgtgagatgctaaaacttacaacattgcagttactgatacaaatggtgttaactgggaatattaaagcattctaaatgtctttcttatttctggtatattctttagggggcttagacatgtttaatgtttaaatgccaagtcttactatagtgtttattgatcttataaaacaagcaaataggatatgatacacttttggttaaaaattactgggtctcatttttacttgagtctttaaaacagtagtgtgtcactataatgtgataatctttaagagaaagtagaatacttaagcctttcaaagtgattttgatttttagatcatcagatgtatgatgaaaatggttaaatgtttgtgatgggagctctgtactcaatggcataacaatgtttatttttataatatacaatctttccttgaaataaaggatgaaacacttttcccttaagttttccatc

SEQ ID NO: 215311 - DNA, 566 bp, Artificial Sequence
  derived and/or modified sequence
ttttctacgggaactggcctgaactcggccgtacgggctccccagtaaccgacctttggccaaagtgtggatggaaacttgaagccaccatgggagatgaagattgggaagcagaaatcaaccctcatatgtcttcctatgttcccatatttgagaaggataggtattctggagaaaatggagacaattttaacaggactccagcttcatcatcagaaatggatgatggaccttctcgaagagatcatttcatgaaaagtggatttgcctctgggcggaattttggaaacagagatgctggtgagtgtaataagcgagataatacatccacaatgggtggttttggagttggaaagagttttggaaacagaggtttttcaaacagcaggtttgaagatggtgatagctctggtttctggagagagtctagtaatgactgcgaagataatccaacacggaacagagggttttccaagagaggcggctatcgagatggaaataattcagaagcttcagggccatacagaagaggtggaagaggtagtttccgaggttgccgtggagga

SEQ ID NO: 215312 - DNA, 2175 bp, Artificial Sequence
  derived and/or modified sequence
atgggcgacgaggactgggaggccgagatcaacccccacatgagcagctacgtgcccatcttcgagaaggacagatacagcggcgagaacggcgacaacttcaacagaacccccgccagcagcagcgagatggacgacggccccagcagaagagaccacttcatgaagagcggcttcgccagcggcagaaacttcggcaacagagacgccggcgagtgcaacaagagagacaacaccagcaccatgggcggcttcggcgtgggcaagagcttcggcaacagaggcttcagcaacagcagattcgaggacggcgacagcagcggcttctggagagagagcagcaacgactgcgaggacaaccccaccagaaacagaggcttcagcaagagaggcggctacagagacggcaacaacagcgaggccagcggcccctacagaagaggcggcagaggcagcttcagaggctgcagaggcggcttcggcctgggcagccccaacaacgacctggaccccgacgagtgcatgcagagaaccggcggcctgttcggcagcagaagacccgtgctgagcggcaccggcaacggcgacaccagccagagcagaagcggcagcggcagcgagagaggcggctacaagggcctgaacgaggaggtgatcaccggcagcggcaagaacagctggaagagcgaggccgagggcggcgagagcagcgacacccagggccccaaggtgacctacatccccccccccccccccgaggacgaggacagcatcttcgcccactaccagaccggcatcaacttcgacaagtacgacaccatcctggtggaggtgagcggccacgacgccccccccgccatcctgaccttcgaggaggccaacctgtgccagaccctgaacaacaacatcgccaaggccggctacaccaagctgacccccgtgcagaagtacagcatccccatcatcctggccggcagagacctgatggcctgcgcccagaccggcagcggcaagaccgccgccttcctgctgcccatcctggcccacatgatgcacgacggcatcaccgccagcagattcaaggagctgcaggagcccgagtgcatcatcgtggcccccaccagagagctggtgaaccagatctacctggaggccagaaagttcagcttcggcacctgcgtgagagccgtggtgatctacggcggcacccagctgggccacagcatcagacagatcgtgcagggctgcaacatcctgtgcgccacccccggcagactgatggacatcatcggcaaggagaagatcggcctgaagcagatcaagtacctggtgctggacgaggccgacagaatgctggacatgggcttcggccccgagatgaagaagctgatcagctgccccggcatgcccagcaaggagcagagacagaccctgatgttcagcgccaccttccccgaggagatccagagactggccgccgagttcctgaagagcaactacctgttcgtggccgtgggccaggtgggcggcgcctgcagagacgtgcagcagaccgtgctgcaggtgggccagttcagcaagagagagaagctggtggagatcctgagaaacatcggcgacgagagaaccatggtgttcgtggagaccaagaagaaggccgacttcatcgccaccttcctgtgccaggagaagatcagcaccaccagcatccacggcgacagagagcagagagagagagagcaggccctgggcgacttcagattcggcaagtgccccgtgctggtggccaccagcgtggccgccagaggcctggacatcgagaacgtgcagcacgtgatcaacttcgacctgcccagcaccatcgacgagtacgtgcacagaatcggcagaaccggcagatgcggcaacaccggcagagccatcagcttcttcgacctggagagcgacaaccacctggcccagcccctggtgaaggtgctgaccgacgcccagcaggacgtgcccgcctggctggaggagatcgccttcagcacctacatccccggcttcagcggcagcaccagaggcaacgtgttcgccagcgtggacaccagaaagggcaagagcaccctgaacaccgccggcttcagcagcagccaggcccccaaccccgtggacgacgagagctgggactag

SEQ ID NO: 215313 - DNA, 480 bp, Artificial Sequence
  derived and/or modified sequence
atgggcgacgaggactgggaggccgagatcaacccccacatgagcagctacgtgcccatcttcgagaaggacagatacagcggcgagaacggcgacaacttcaacagaacccccgccagcagcagcgagatggacgacggccccagcagaagagaccacttcatgaagagcggcttcgccagcggcagaaacttcggcaacagagacgccggcgagtgcaacaagagagacaacaccagcaccatgggcggcttcggcgtgggcaagagcttcggcaacagaggcttcagcaacagcagattcgaggacggcgacagcagcggcttctggagagagagcagcaacgactgcgaggacaaccccaccagaaacagaggcttcagcaagagaggcggctacagagacggcaacaacagcgaggccagcggcccctacagaagaggcggcagaggcagcttcagaggctgcagaggcggctag

SEQ ID NO: 215314 - protein, 1797 aa, Artificial Sequence
  derived and/or modified sequence
MEQLTTLPRPGDPGAMEPWALPTWHSWTPGRGGEPSSAAPSIADTPPAALQLQELRSEESSKPKGDGSSRPVGGTDPEGAEACLPSLGQQASSSGPACQRPEDEEVEAFLKAKLNMSFGDRPNLELLRALGELRQRCAILKEENQMLRKSSFPETEEKVRRLKRKNAELAVIAKRLEERARKLQETNLRVEGPQWLHVRDFDRLLRESQREVLRLQRQIALRNQRETLPLPPSWPPGPALQARAGAPAPGAPGEATPQEDADNLPVILGEPEKEQRVQQLESELSKKRKKCESLEQEARKKQRRCEELELQLRQAQNENARLVEENSRLSGRATEKEQVEWENAELRGQLLGVTQERDSALRKSQGLQSKLESLEQVLKHMREVAQRRQQLEVEHEQARLSLREKQEEVRRLQQAQAEAQREHEGAVQLLESTLDSMQARVRELEEQCRSQTEQFSLLAQELQAFRLHPGPLDLLTSALDCGSLGDCPPPPCCCSIPQPCRGSGPKDLDLPPGSPGRCTPKSSEPAPATLTGVPRRTAKKAESLSNSSHSESIHNSPKSCPTPEVDTASEVEELEADSVSLLPAAPEGSRGGARIQVFLARYSYNPFEGPNENPEAELPLTAGEYIYIYGNMDEDGFFEGELMDGRRGLVPSNFVERVSDDDLLTSLPPELADLSHSSGPELSFLSVGGGGSSSGGQSSVGRSQPRPEEEDAGDELSLSPSPEGLGEPPAVPYPRRLVVLKQLAHSVVLAWEPPPEQVELHGFHICVNGELRQALGPGAPPKAVLENLDLWAGPLHISVQALTSRGSSDPLRCCLAVGARAGVVPSQLRVHRLTATSAEITWVPGNSNLAHAIYLNGEECPPASPSTYWATFCHLRPGTPYQAQVEAQLPPQGPWEPGWERLEQRAATLQFTTLPAGPPDAPLDVQIEPGPSPGILIISWLPVTIDAAGTSNGVRVTGYAIYADGQKIMEVASPTAGSVLVELSQLQLLQVCREVVVRTMSPHGESADSIPAPITPALAPASLPARVSCPSPHPSPEARAPLASASPGPGDPSSPLQHPAPLGTQEPPGAPPASPSREMAKGSHEDPPAPCSQEEAGAAVLGTSEERTASTSTLGEKDPGPAAPSLAKQEAEWTAGEACPASSSTQGARAQQAPNTEMCQGGDPGSGLRPRAEKEDTAELGVHLVNSLVDHGRNSDLSDIQEEEEEEEEEEEEELGSRTCSFQKQVAGNSIRENGAKSQPDPFCETDSDEEILEQILELPLQQFCSKKLFSIPEEEEEEEEDEEEEKSGAGCSSRDPGPPEPALLGLGCDSGQPRRPGQCPLSPESSRAGDCLEDMPGLVGGSSRRRGGGSPEKPPSRRRPPDPREHCSRLLSNNGPQASGRLGPTRERGGLPVIEGPRTGLEASGRGRLGPSRRCSRGRALEPGLASCLSPKCLEISIEYDSEDEQEAGSGGISITSSCYPGDGEAWGTATVGRPRGPPKANSGPKPYPRLPAWEKGEPERRGRSATGRAKEPLSRATETGEARGQDGSGRRGPQKRGVRVLRPSTAELVPARSPSETLAYQHLPVRIFVALFDYDPVSMSPNPDAGEEELPFREGQILKVFGDKDADGFYQGEGGGRTGYIPCNMVAEVAVDSPAGRQQLLQRGYLSPDILLEGSGNGPFVYSTAHTTGPPPKPRRSKKAESEGPAQPCPGPPKLVPSADLKAPHSMVAAFDYNPQESSPNMDVEAELPFRAGDVITVFGGMDDDGFYYGELNGQRGLVPSNFLEGPGPEAGGLDREPRTPQAESQRTRRRRVQC

SEQ ID NO: 215315 - DNA, 7526 bp, Artificial Sequence
  derived and/or modified sequence
ctgaggctcagccctcctcggagcccaccatctcgaggctcctggactgtaagggacccctgcagtccccagagcagaggccagcaggggctgagactatgaggcaagcagcccatcgacccaggcctccttaggaccagcccagccacccagcaagcgaaagagcagcagcagagagcagagccggagataaaggaccacagcggaccactggggatcacccccagcagctcctgaagcctctggccgggctgaggggttgcgacagacggccagacccacagacactgacagacacacaacgacaccgatgcacacagctgcacgacactgacacactcagatacaaccagggacagcatcacatactgccacagccctgcaatacagacacccacacacacacacacaaacaactggcaactctgaaatgggcagacagtgacacacagcaccacccccctcaacacacagaagtgggggcacccatcttcccaacacatgagacagcattgacctgcacggacagacctggagacacacacacgcaccctcacccaggcgcagctgtcggtggcctctgcacatcctccctacccccacagggacaccctcgctcctccacatactcgcgcacacacacagctaccagcaaacatagctcacatacccctggctccagctccagcagccctggcgccttctgcagcctcctttgtgggtggggaagagctcagccaaccttggatggagcgtcggtgaagcaagagctcagaggggagaggggctggcctggcatgaccctcgccagtccccccacctggctgggtgatgtcccccggcccgggttctggggccccttggcagtaccatggagcaactgacaaccctcccacggcctggggaccctggagccatggagccatgggcactgcccacctggcatagctggactccaggtcgagggggtgaacctagcagtgcagccccaagcatcgctgatactcctccggcagctctgcagcttcaagaactgaggtctgaggagagttccaagcccaaaggagacgggagctccaggcccgtggggggaactgaccctgaaggagcagaggcttgtctgcccagcctgggccagcaagcatccagctctggacccgcctgccagaggccagaggatgaggaagtggaggctttcctgaaggccaagctgaatatgagctttggggacaggcccaatctggagctgctgagggccctgggggagctgcggcagcgctgtgccatccttaaggaggaaaaccagatgctgaggaagagcagcttccctgagacagaagagaaggtgcggaggctgaagaggaagaacgccgagctggcggtcattgccaagcgcctggaggagagggcccgaaagctgcaggaaacgaacctgagggtggagggtccccagtggctccacgtgcgggacttcgatcggctgctgcgcgagtcccagcgggaggtgctgcggctgcagaggcagatcgcgctgcgcaaccagcgggagacgctcccgctcccgccgtcctggcccccgggccctgctctccaggccagagcaggggcgcctgctcccggggccccgggagaggccacgccccaggaggatgcggacaacctacccgtgattctaggggagccagagaaagagcagagggtgcagcagctggaatcggagctcagcaagaagcggaagaaatgcgagagcctggagcaggaagcccggaaaaagcagaggcgatgtgaggagctggaactgcagctgagacaagcgcagaatgagaatgcccgcctggtggaggagaactcccggctcagtgggagagccacagagaaggagcaggtggagtgggagaatgcggagctgaggggccagctcctgggggtgacacaggagagggactcagcccttcgcaagagccagggcctgcagagcaagctggagagcctggagcaagtgctgaagcacatgcgggaggtggcccagcggcggcagcagctggaggtggagcatgaacaggctcggctcagcctacgggagaagcaggaggaggtccggagactgcagcaggcccaggctgaagcccagagggaacatgaaggagccgtgcagctgctggagtctaccttggattccatgcaggcccgggttcgagagctcgaagaacagtgccgcagccaaaccgagcagttcagcctcctggcacaggaactccaggctttccgcctgcacccgggccccttggatctgctcacatctgccctggactgtgggagccttggagactgcccaccacccccctgctgctgctccattccccagccttgccgggggtctggccccaaagaccttgacctcccgccgggctcccctgggcgctgcaccccaaagtcttccgagcctgcccctgccactctcactggggtccctcgaaggacagccaagaaggcagagtctctctccaactcctcccactccgagtccatccacaacagccccaagtcatgccctacacctgaggtggacacagccagtgaggtagaggagctggaggcagacagtgtctccctgctcccagctgcgccagagggcagccggggaggagccaggatccaggtcttcctagcacgttatagctacaacccctttgagggtcccaatgagaatccagaagcagagcttccgctgacagctggcgagtacatctacatctatggcaacatggatgaggatggcttttttgaaggagagctcatggatggccgaaggggcctggtcccttccaattttgtagagcgtgtgtcggatgatgacctcctgacctccctccctccagagctggccgatttgtcccacagctcaggccctgaactcagtttcctgagtgtaggtgggggtggcagcagtagcgggggccaaagcagtgtgggaaggagccagcccagacctgaggaggaggatgcaggggacgagctcagtctgagcccatcaccggagggcctgggcgagcctcctgccgtgccttacccccgccgtctggtggtcctcaagcagctggcccacagcgtggtgctggcctgggagccgcctcctgagcaagtggagctacacggcttccatatctgtgtgaatggggagctgcgacaggccctggggcctggggcgccacccaaggccgtgctggagaacctggacctgtgggccgggccccttcacatttctgtccaggccctgactagccggggcagctctgacccactgcgctgttgcttggcggtgggtgcccgggccggagtggtgcccagccagctgcgggtccatcggttgacagccacatctgctgagatcacctgggtgcccggcaatagcaacttggcccatgccatctacctcaatggggaagagtgcccacctgccagccccagtacctactgggccaccttctgccacttacggcctggcacaccctatcaggcccaagtggaggctcagctcccaccccaagggccctgggaaccaggctgggagaggctggagcagcgggctgccaccctgcagttcaccacactcccagcaggcccacctgatgcccctctggatgtgcagatcgagcctgggccctcccctgggatcttgatcatcagttggctcccagtcaccatcgatgctgctggcacatccaacggtgtccgggtcacaggctatgccatctacgctgatgggcagaagatcatggaggtggcctcacccacggcaggcagtgtactggtggagttgtcccagctgcagctgctgcaggtgtgtcgtgaggtggtcgtgcgcaccatgtcgccccacggggagtcggcggactccatcccggctcctatcactcccgccctggctccggccagcctgccagcccgagtctcctgcccctcaccgcacccaagcccagaggccagagcgccccttgcttcagcctccccagggcctggagaccccagctctcctctccagcaccctgctccccttggaactcaagagcctccaggagcaccccctgcaagcccttccagagagatggcaaaagggtcccacgaggaccctccagcaccttgctcccaggaggaggctggggcagcagtgctgggcacctcagaggagaggacagccagcacatctaccctgggtgagaaggaccctggccccgcagctccctcactggccaagcaggaggccgagtggactgcaggagaggcctgtccggcctccagctccacccagggagcacgggcccagcaggcgccaaataccgagatgtgccaaggaggagacccagggtctgggctgaggcccagggctgagaaggaggacacagcagagcttggggttcatctggtgaactccctcgtggaccacggccgcaactcagacctgtcagacatccaggaggaagaggaagaggaggaggaggaggaggaagaggagctgggttccaggacttgctccttccagaagcaggttgctggcaacagcatcagggagaatggggccaagtcccagcccgaccccttttgtgagactgacagcgatgaggagatcttggagcagatcctggagctgcccctccagcagttctgtagcaagaagctctttagcatcccggaggaggaggaagaggaagaggaggacgaggaggaggagaagtcaggggcaggctgttcttcccgagaccctggcccgcctgaacctgcattgctggggctgggctgtgacagtggtcagccccgaagacctggccagtgtcccttgtctcctgagtcctccagggctggagactgcctggaagacatgcctggattagttggtggaagcagccggaggagaggagggggctcccctgagaagcccccaagccgcaggcggcctccagatccccgagaacactgcagccgacttctcagcaacaatgggccccaggcctctggacgactgggccccacacgggagaggggtggcctccccgtaattgagggccccaggactggactagaggctagcgggagaggccggctgggcccttcccggaggtgctcccgtggccgggcgctggagcctggcctggccagctgcctttcccccaagtgcttggaaatcagcattgaatatgattcggaggatgagcaggaggcgggcagcgggggcatcagcatcaccagctcctgctaccctggagatggggaggcctggggcacagcaactgtaggaaggcccagggggcctccgaaggccaattcaggccccaagccctacccacgcctcccagcctgggagaaaggggaaccagagcggagaggccgcagtgcgacgggcagagccaaggagccactctcccgggcaacagagaccggagaggccagagggcaggacggctctgggcggaggggcccccagaagagaggtgtccgagtcctcaggccaagcactgcagagctagtccctgcgaggagcccctcagaaacactggcttaccagcacctacccgtcaggatctttgtggctctgtttgactatgaccccgtgtcaatgtcgcccaatcctgatgctggagaagaagagcttcccttccgagagggtcagatcctgaaggtgtttggggacaaggatgccgatggcttctaccagggcgaaggtgggggccggacaggctacattccctgcaacatggtggctgaggtggctgtggacagccctgctgggagacagcaactgctccagcggggttatttgtccccagatattctccttgagggctcagggaatggtccgtttgtgtactccacagcccacacaactgggcctcctcccaagccccgccgctccaagaaagctgagtcggaaggccctgcccagccctgtccaggcccccctaagctggtcccctctgctgacctgaaagctccccactccatggtggctgcatttgactacaacccccaggagagttcccccaatatggacgtggaggcagagctgcccttccgggcaggggatgtcattactgtgtttgggggcatggacgatgacggtttctactatggggaattaaatggacaaaggggcctggttccatccaacttcctggagggccctgggcctgaggcaggcggcctggacagggaacccaggacaccccaggctgagagtcagagaacgaggaggagaagagtccagtgctagatggagatagatatatgtagagagagcaacatgactggggctgcaccacacaagggtccccagggcccccaggtgggccttgtacccccagctctggcagcgcccccaggattgaacgtggggagccccagggcagaagcgagaaggtgtggggtttcttctccaaggggaagcagctcctcaggaggctgggctctgggaagaaggagtgaagctgtggcccatcctgcaggcagaagaggccctgagaggcccccagatcactgtctctgctgagcagggaaggctcagactgggcccagagcccccgttcttctgcgttaacactgtggcattcagagggaatcaaagagccttggtgaaggtcagagctaaatggctccttaaggatgaactctctagagaagcaccttcctcctacaggaggggaaactgagcccacagtgagtatgtaacttgaccaaggtcactgagccaggactggacccaggaccctcgcgtcctggtccacccacctcgtctactagtgtcccacagtgctgcgctagtcccttctgccacccttcccagtcccaggacgggccctggagggagaaaggagcctgtgccccctgatggctctggctgtcctgatcctgtcttccctcccctgaaggaaagtttgcactggattttattggagccccatctccccagcgggcaggcgggcggagcctgtatatatgtatatactcagtgcctcagttcagcttcctccacctcgcttccactgcacaggcccaggaaggagaaaggccaagccaaagtgggccccaccctgcccccgtcgtgctccatccttccctgccggggcctgctggcccctgtaaggtcccgcccccaaagaccctggggccagcggggccgaaagcggagttgggtttgccttattttgctcattggattcaagttcttttgcatagttttcttctaacccctgttggagtccaggggctggagaaaaggacagatttatgcagctattttcatacattccctgttcagagtggggtaggggttctccgccgttacccgatccactccatcccccaccctctgaggggtgagtgtgtctttgcatgtttcctttgctgtggtgggagatagtttgactgaacccccaccttgaccttggtctccaggggtgtggaatggtgggggaatttgtttaaaaagacattttattataataaagtctattttcacaaaaaaaaaaaaaaaa

SEQ ID NO: 215316 - DNA, 5394 bp, Artificial Sequence
  derived and/or modified sequence
atggaacagctcacaaccttaccaaggcccggcgatccaggcgccatggaaccatgggctcttcccacctggcacagttggactccagggagagggggtgaaccctctagtgccgccccatcaatcgccgacacaccacccgctgccttacagcttcaggaactgcgctcagaagaaagcagcaagcccaagggcgatgggtccagtaggcccgtgggcgggaccgatccagagggggctgaagcttgcttgcctagcctgggacagcaggcctcttccagcgggcctgcctgtcagcgtccagaagatgaagaggtggaggccttcctgaaggctaaactgaacatgtcgtttggggaccgacccaaccttgagctgctccgagctctgggagagttaaggcaaaggtgtgccatcctgaaggaggaaaatcagatgctgcggaagtcatcttttcccgagactgaggagaaagtgcgtcggctgaaaaggaaaaatgctgagttggcagtgatcgccaaacgtctggaggagagggccaggaagttacaggagacaaacctccgagtcgagggccctcagtggcttcacgtgagggatttcgatcggctacttagggaatcccagagagaggtgctgcggctgcagcggcagatcgccctacgaaatcagcgagagacacttccccttcctccatcgtggccccctgggcctgctctgcaggcccgggcaggagctccagccccaggggcaccgggggaagcgacccctcaagaagacgccgacaaccttcctgtcattctcggcgagcccgaaaaagagcagcgggtgcagcagttagaaagtgaactttcaaagaaaagaaaaaagtgtgagtcactggaacaggaggcacggaagaaacaacgaaggtgtgaggagctggagttgcaacttcgccaggctcagaacgagaatgcccgcctcgtggaagaaaacagtaggttgagcggccgggctactgaaaaagaacaggtggaatgggagaacgcggaactgcgaggccaactgctgggcgttacccaggaaagggattctgccctccggaagtcccagggcctgcagtctaaactggagagtcttgagcaagtcctcaagcacatgagggaagtggctcaaagacgtcaacagttagaagttgagcatgagcaagcaagattatccctgcgggaaaagcaggaagaggtgcgaaggctccaacaggcgcaggccgaggcacagagggagcacgagggggcagtgcagttgctcgagagcaccctggactccatgcaggcgcgcgtccgcgaactcgaggaacagtgtaggagccagaccgagcaattctcattactggctcaggagcttcaggcctttcgactccatcccggacctctggatcttttaactagtgccctggattgcgggtcacttggcgattgcccccctccaccttgttgttgttcaatcccccagccgtgcagagggagcggcccgaaggacctggacctcccccccggatccccaggaagatgtacaccgaaaagcagtgagccagcacctgcgaccctgacgggggtccctaggcgcactgccaaaaaggccgagtctctgagtaattccagccactctgagagtattcacaactccccaaagagttgcccaacccccgaggtcgatacagcaagcgaggtcgaagaattggaagctgacagcgtctcccttctgccggccgctcctgaggggtccagaggcggcgccagaatccaggtgttcctcgccagatactcttacaatcccttcgagggcccgaatgagaaccctgaagccgagctcccactgacagcaggggagtacatctacatttacggtaatatggacgaggacggcttcttcgaaggagagctgatggacggccggcgcggcctggtgccaagcaactttgtggagcgggtgagcgacgacgatctgttaacttcacttccccccgagttggcggacctgtctcactcaagtggtcccgagctctcatttctgagtgtgggtggcggagggtcctccagcggcggccaatcttccgtaggccgctcccagccgcggccagaggaagaagacgcaggggacgagcttagcctgtcacctagtccggagggcttgggcgagccaccagctgtgccgtatccgaggagactggtggttctgaaacagcttgcccactctgtcgttctagcatgggagccccctccagagcaggtcgaactgcatgggttccatatctgcgtgaatggcgagttaaggcaggcactgggacccggcgctccacctaaggcagtgcttgagaacctggacctctgggctggtcccttgcacatctccgttcaggctttaacttcccggggatcaagcgacccgctacggtgttgtctggccgttggtgcccgagccggagtggtcccctctcagctgcgcgtacataggttgacagcaaccagcgcagagattacttgggtgccgggcaattctaacctagcccatgctatttatctgaacggagaagagtgtcccccagcatcccctagtacctattgggctaccttctgtcatcttagaccagggacgccttatcaggcacaggtggaagcacaacttccaccacagggtccctgggaaccaggatgggagcggttggagcaaagagctgctacacttcagtttaccacgcttcctgcagggcctcccgatgccccgctggacgtgcagatcgaaccaggcccaagccctggcatcttaataatcagctggttgcccgtaaccattgatgctgccggaacctccaacggagtacgagtgacagggtatgcgatctacgcagatggccagaagattatggaggtcgccagtcctacggcaggcagcgtattggtggagctgagccagctgcagttgctccaagtgtgtcgcgaggtggtggtcagaaccatgtcacctcatggcgaaagtgctgatagcattccagctccaattacccccgccttggcccctgctagcctccctgcacgcgtctcctgtccaagtcctcacccatctcctgaggccagggccccactggcctccgcatctcctggtccaggcgatccctcctctcctttgcagcatcccgcccccctgggaacgcaggagccccccggagcaccaccagctagtccatctcgggagatggcgaagggctctcacgaagacccccccgctccgtgctcacaggaggaggccggggcggctgtgctgggcacctcagaggaacgaaccgcttctacctccaccctaggcgagaaggacccaggcccagctgctccgagccttgcaaagcaggaagctgagtggaccgcaggcgaagcctgtccagcaagttctagcacccagggcgccagagcgcagcaggccccaaacacagagatgtgccagggcggggacccgggctctggccttcgacctcgagccgagaaggaggataccgccgaactcggtgtccatctggtgaattctttagttgaccatgggagaaattccgatctgtccgatattcaggaggaagaggaggaggaggaagaggaggaagaagaggagctgggctctagaacgtgcagcttccaaaagcaggtagctggtaactcaattcgcgagaatggggcaaaaagccagcctgaccctttttgtgagaccgatagtgacgaagaaattctggagcagatcctagaattacccctgcagcagttttgcagtaagaagctgttttcgattccggaggaagaggaggaagaggaggaagacgaagaagaggaaaagtctggcgcaggatgttccagcagagaccccggcccacccgagcccgccctactgggactgggttgtgacagtggccagccccgcagacccggccagtgcccattatcgcctgagtcttcgcgtgcaggcgattgtctagaggacatgcccggcctggtcgggggctctagtcggagacgcggtggcgggtcacctgaaaaacccccttcccgcaggagaccacccgatccaagggaacactgttctaggctattgagcaataacggacctcaagcaagcggaagacttggacctactcgggagcgggggggattgccggtgattgagggacctaggactggactggaggccagcggaagaggccggctggggccctcccggcggtgttcccgcggacgggcactggagcccggacttgcctcgtgcctcagtcctaagtgcctcgagatatccatcgagtacgacagcgaggacgagcaagaggctggctccggcggaatttctatcacatccagctgttatcctggcgacggagaagcctgggggactgcaacagtggggcggccacgaggtcccccgaaagcaaacagcggcccaaagccctacccaagactgccggcttgggagaagggagaaccggagcgcagagggaggagcgcgaccggcagggctaaggaacctttgtcccgggcaacagaaacaggagaagcgcgcggacaggacggcagcggccgacgcggaccccagaagcggggcgtgcgggtgttgcggcccagcacagcagaactggttccagctaggtcgccaagcgagacacttgcctaccaacacctgcctgtccgcatcttcgtggcactcttcgactatgacccagtctcaatgagtcccaatcccgacgccggggaagaagaacttccttttcgtgagggccagatcctgaaggtgttcggtgacaaggatgctgacgggttctaccagggggaggggggcggcagaacggggtacattccttgcaacatggttgccgaagtggccgtggattctcccgcaggcagacaacaactgctgcagcgtggttatctatcccccgatatcctgttggaggggtcagggaacgggccctttgtttattctactgcgcacaccacagggcccccacccaagcctcgacggagcaaaaaggccgagtcggagggccctgctcagccatgtcccggacctcccaaattagtgccctctgccgatctcaaggcccctcactcaatggtcgccgccttcgactataatccgcaggaatccagtcccaacatggacgtggaagcagaattgccgttccgtgcgggggacgtgatcactgtattcggaggtatggatgacgacggattctactatggtgaactcaacgggcaaagagggctcgtaccttccaacttcttggagggccccggtcccgaggcaggaggtctggatcgagaaccacgcacaccacaggcagagtcacagcgcactcgccgtcgccgggtgcagtgctag

SEQ ID NO: 215317 - DNA, 5394 bp, Artificial Sequence
  derived and/or modified sequence
atggagcagctgaccaccctgcccaggcctggggaccccggggccatggagccctgggccctgcccacctggcacagctggaccccaggccggggcggggagcccagcagcgctgcccccagcattgctgacaccccacctgctgccctgcagctgcaggagctgcggtctgaggagagcagcaagcccaagggagatggcagcagcaggcctgtgggcggcacagatcctgagggcgctgaggcctgcctgcccagcctgggccagcaggccagcagcagcggccctgcctgccagaggccagaagatgaggaggtggaggccttcctgaaggccaagctgaacatgagctttggagaccggcccaacctggagctgctgcgggccctgggggagctgcggcagagatgtgccatcctgaaggaggagaaccagatgctgaggaagagcagcttccctgagacagaggagaaggtgcggcggctgaagaggaagaatgctgagctggccgtcatcgccaagaggctggaggagcgggccaggaagctgcaggagaccaacctgcgggtggagggcccccagtggctgcacgtgcgggactttgaccggctgctgcgggagagccagcgggaggtgctgcggctgcagaggcagatcgccctgaggaaccagcgggagaccctgcccctgcccccatcctggcccccaggccctgccctgcaggcccgggccggggccccagcccctggggcccctggagaggccaccccccaggaggatgctgacaacctgcctgtgatcctgggggagcctgagaaggagcagagggtgcagcagctggagagcgagctgagcaagaagaggaagaagtgtgagagcctggagcaggaggccaggaagaagcagaggcgctgtgaggagctggagctgcagctgcggcaggcccagaatgaaaatgcccggctggtggaggagaacagccggctgagcggccgggccacagagaaggagcaggtggagtgggagaatgctgagctgcggggccagctgctgggcgtgacccaggagcgggacagcgccctgaggaagagccagggcctgcagagcaagctggagagcctggagcaggtgctgaagcacatgagggaggtggcccagaggcggcagcagctggaggtggagcacgagcaggcccggctgagcctgcgggagaagcaggaggaggtgcggcggctgcagcaggcccaggccgaggcccagcgggagcatgaaggagctgtgcagctgctggagagcaccctggacagcatgcaggcccgggtgcgggagctggaggagcagtgccgcagccagacagagcagttcagcctgctggcccaggagctgcaggccttccggctgcaccctggccccctggacctgctgaccagcgccctggactgtggcagcctgggggactgccccccaccaccctgctgctgcagcatcccccagccctgccggggcagcggccccaaggacctggacctgcccccaggcagccctggccgctgcacccccaagagcagcgagcccgccccagccaccctgactggagtgcccaggagaacagccaagaaggccgagagcctgagcaacagcagccacagcgagagcatccacaacagccccaagagctgccccaccccagaggtggacacagccagcgaggtggaggagctggaggccgacagcgtgtccctgctgcctgctgcccctgagggcagcagaggaggagcccgcatccaggtgttcctggcccgctacagctacaacccctttgagggccccaatgaaaatcctgaggccgagctgcccctgacagctggggagtacatctacatctacggcaacatggatgaagatggcttctttgaaggagagctgatggatggccggcggggcctggtgcccagcaactttgtggagcgggtgtctgatgatgacctgctgaccagcctgcccccagagctggccgacctgagccacagcagcggccctgagctgtccttcctgtctgtgggcggcggcggcagcagcagcggcggccagagctctgtgggccgcagccagcccaggcctgaggaggaggatgctggagatgagctgagcctgagccccagccctgagggcctgggggagcccccagctgtgccctacccccggcggctggtggtgctgaagcagctggcccacagcgtggtgctggcctgggagcccccacctgagcaggtggagctgcacggcttccacatctgtgtgaatggagagctgcggcaggccctgggccctggggccccacccaaggctgtgctggagaacctggacctgtgggccggccccctgcacatctctgtgcaggccctgaccagccggggcagcagtgaccccctgcgctgctgcctggccgtgggcgcccgggccggcgtggtgcccagccagctgcgggtgcaccggctgacagccaccagcgctgagatcacctgggtgcccggcaacagcaacctggcccacgccatctacctgaatggagaagaatgtcctccagccagccccagcacctactgggccaccttctgccacctgcggcccggcaccccctaccaggcccaggtggaggcccagctgcccccccagggcccctgggagcccggctgggagcggctggagcagagagctgccaccctgcagttcaccaccctgcctgctggccccccagatgcccccctggatgtgcagatcgagcccggccccagccctggcatcctgatcatctcctggctgcctgtgaccattgatgctgctggcaccagcaatggagtgcgggtgacaggctacgccatctatgcagatggccagaagatcatggaggtggccagccccacagctggctctgtgctggtggagctgagccagctgcagctgctgcaggtgtgccgggaggtggtggtgaggaccatgagcccccatggagagagcgctgacagcatcccagcccccatcaccccagccctggccccagccagcctgcctgcccgggtgtcctgccccagcccccaccccagccctgaggcccgggcccccctggccagcgccagccctggccctggggaccccagcagccccctgcagcacccagcccccctgggcacccaggagcccccaggggcccccccagccagccccagccgggagatggccaagggcagccatgaagatcctccagccccctgcagccaggaggaggccggggctgctgtgctgggcaccagcgaggagaggacagccagcaccagcaccctgggggagaaggaccccggccctgctgcccccagcctggccaagcaggaggccgagtggacagctggggaggcctgcccagccagcagcagcacccagggcgcccgggcccagcaggcccccaacacagagatgtgccagggcggggaccccggcagcggcctgcggcccagggctgagaaggaggacacagctgagctgggcgtgcacctggtgaacagcctggtggaccatggaagaaacagcgacctgagtgacatccaggaggaggaggaggaggaggaggaggaggaggaggaggagctgggcagcaggacctgcagcttccagaagcaggtggccggcaacagcatcagagaaaatggagccaagagccagcctgaccccttctgtgaaacagacagtgatgaggagatcctggagcagatcctggagctgcccctgcagcagttctgcagcaagaagctgttcagcatccctgaggaggaggaggaggaggaggaggatgaggaggaggagaagagcggggccggctgcagcagccgggaccccggccccccagagcccgccctgctgggcctgggctgtgacagcggccagcccaggaggcctggccagtgccccctgagccctgagagcagcagagctggggactgcctggaggacatgcctggcctggtgggcggcagcagcagaagaagaggaggcggcagccctgagaagccacccagcagaagaagacctccagacccccgggagcactgcagccggctgctgagcaacaacggcccccaggccagcggccgcctgggccccacccgggagcggggcggcctgcctgtgattgagggccccaggacaggcctggaggccagcggccggggccgcctgggccccagccgccgctgcagccggggccgggccctggagcccggcctggccagctgcctgagccccaagtgcctggagatcagcattgaatatgattctgaagatgagcaggaggccggcagcggcggcatcagcatcaccagcagctgctacccaggagatggagaggcctggggcacagccaccgtgggccggccccggggcccccccaaggccaacagcggccccaagccctacccccggctgcctgcctgggagaagggggagcctgagcggcggggccgcagcgccaccggccgggccaaggagcccctgagccgggccacagaaacaggagaggcccggggccaggacggcagcggccggcggggcccccagaagaggggcgtgcgggtgctgcggcccagcacagctgagctggtgcctgcccggagccccagcgagaccctggcctaccagcacctgcctgtgcgcatctttgtggccctgtttgattatgaccctgtgtccatgagccccaacccagatgctggggaggaggagctgcccttccgggagggccagatcctgaaggtgtttggagacaaggatgctgatggcttctaccagggcgagggcggcggccgcacaggctacatcccctgcaacatggtggccgaggtggccgtggacagccctgctggccggcagcagctgctgcagaggggctacctgagcccagacatcctgctggagggcagcggaaatggcccctttgtgtacagcacagcccacaccaccggccccccacccaagcccaggaggagcaagaaggccgagagcgagggccctgcccagccctgccccggcccccccaagctggtgcccagcgctgacctgaaggccccccacagcatggtggccgcctttgactacaacccccaggagagcagccccaacatggatgtggaggccgagctgcccttccgggctggagatgtgatcaccgtgtttggaggcatggatgatgatggcttctactatggagagctgaatggccagaggggcctggtgcccagcaacttcctggagggccctggccctgaggccggcggcctggaccgggagcccaggaccccccaggccgagagccagaggaccaggagaagaagagtgcagtgctag

SEQ ID NO: 215318 - DNA, 5394 bp, Artificial Sequence
  derived and/or modified sequence
atggagcagctgaccaccctgccccggcccggcgaccccggcgccatggaaccttgggccctgccaacttggcactcttggactcctggcaggggtggcgaacccagcagcgccgcccctagcattgctgacaccccccccgctgctctgcagctgcaagagcttaggagtgaggaatctagcaagccaaagggggacggatcctcacgacccgtcggcggcactgacccagagggtgcagaagcttgtctgccttcgcttggccagcaggcgtcatccagtgggcctgcttgccagcgccctgaggatgaggaagtcgaagcctttctcaaagcaaagttaaatatgtcattcggggatcgacctaatctcgagttactgcgagccctgggagaactgcggcagcgctgcgccatcctgaaggaggagaatcagatgttgcgcaaatctagttttccagaaaccgaggagaaggtccggagattgaaaaggaaaaacgcggaattggctgtgatcgcaaagcggttggaagagcgtgcgcggaagctgcaagagactaacctgcgagtcgaagggccacagtggctgcacgttagagacttcgaccgactgctgagagagtctcagcgggaggtgctcaggctgcagaggcagatagctcttaggaaccagcgcgaaacactccctcttcccccctcctggccccctggtcctgcgctgcaagcgcgcgctggcgcacctgccccaggggcgccaggggaagcaaccccccaggaggatgccgacaatctgcccgttattctgggcgaaccggagaaggaacagcgcgtccagcaactcgagagcgaattgtcgaaaaagaggaagaagtgcgagtctctagaacaggaggcccggaaaaaacaacggagatgcgaggagctggagctccagctgcgccaggcccagaacgagaacgctaggctggtggaagagaactccaggcttagtggtagggctactgagaaagaacaggtagaatgggagaacgcggaactcaggggacagctgctgggcgttacacaggagagggacagcgctctccgcaagagtcaggggctccagagcaaactggagagtctggagcaggtcctgaagcacatgcgcgaagtggcacagagacgccagcagctggaagtggagcacgaacaggcccggctctctctgcgtgaaaaacaggaagaagtcaggcggctgcagcaggcccaagctgaggctcagcgggagcacgaaggtgcagttcagctgctcgaatctacactggatagcatgcaggcacgggtgagagagctggaggagcaatgtagatcccagacggaacagttctccctgctggcacaagagctgcaagcctttcgccttcaccccgggccgctggatttactgaccagcgcactagattgcggctctctcggagactgtccacctcccccttgctgctgcagtattccccagccgtgtagaggtagcggccccaaagatctcgacctccccccggggagtcctggccgctgcacgcccaagtcctccgagcctgctcctgccaccctaactggcgtaccccgccgtaccgcgaaaaaagctgagtcgctgtctaactcctcccattccgagtccatccacaatagtcctaagtcttgtccgacgcctgaggttgacacagcaagcgaagtggaggagcttgaagctgacagcgtgtccctgctgcctgccgctccggagggttctaggggtggtgccagaatccaagttttcctagcgcggtactcatacaatcccttcgaaggccccaacgagaacccggaggcagagctccctctgaccgcgggtgaatatatatacatctatggaaatatggacgaggacggcttctttgaaggtgaactgatggatggccgccgcggactggtgccatctaactttgtagagagagtttccgacgatgacctcttgactagtctgcctcctgaattggccgacttgagccacagctctggacctgagctaagtttccttagtgtcggcggcggaggctcgagttctgggggacagtcttccgtgggcaggtctcagccccgacctgaagaggaggacgccggggacgagctttccctcagcccctctccggaaggcctcggcgaaccaccggcagtgccctatccgcgcaggttggtggtactaaaacagcttgcacatagcgtcgttcttgcgtgggaacctccacctgaacaggtggagctgcacggtttccacatctgtgtgaatggagagctccgccaggccctcggtcctggcgcacctccaaaagcagtactggaaaatctcgatctgtgggccgggccgctgcacatctctgtccaagccttaacttcaagaggcagttccgatcccctgcggtgctgcctggccgttggagcacgggcaggggtcgtgccttcacaactccgggtccacaggctgacagctacctctgcagagatcacctgggtgcccggaaacagtaatctggcccacgccatttatttgaacggggaagaatgtccccccgcctcgccgagcacttattgggcgaccttttgccacctccgacctggcactccttaccaagctcaggtcgaagcccagctgccaccccaaggaccctgggagcctggatgggagcgcctggaacagcgggcagctacactgcagttcacgactttgccggccgggcctccggacgcaccactggacgtgcaaatagagccaggcccatcccccggaatcctgatcataagctggcttccagtgacaatagacgcggcaggtacctcaaatggagtgcgagtcaccggatacgctatctatgctgacggacaaaagatcatggaggttgctagcccaactgccggatccgtgctggttgaactgtcccaacttcagctgttgcaggtttgccgggaggtggtggtgagaactatgtcgccacacggcgagtctgcagattccattccagcccccatcaccccagcactggccccagcctctctccccgccagagtatcctgtccgtctccccacccctctcctgaagctagggcgcccctggctagcgcatcccctggtcctggcgatccctcatcacctctccagcatccggctcctttgggaacccaggaacctccgggagccccccctgcatctcccagccgggaaatggccaaaggtagtcacgaagacccccctgcaccttgctctcaggaagaggcaggggcagccgtcctgggaacctctgaagagcgtactgcctctaccagtaccttgggcgagaaagatccaggacctgccgcacccagcctggcaaagcaggaggccgaatggacagccggagaagcttgtcccgcctcctcctctacacagggggcgcgggctcagcaggctccaaacaccgaaatgtgtcaggggggtgaccctgggtctggcctgaggcccagggcggagaaggaggacactgcagagctgggcgtgcatctggtcaattccctggtggaccacggccggaactctgacttgtctgatatccaggaggaagaagaggaagaagaggaggaggaggaggaggagttaggcagtaggacttgttcattccagaagcaggtggctggaaattctatcagagaaaacggagcaaagtcccaacccgatcctttttgtgagaccgacagcgacgaagagatcttagagcaaatcttggaactgcccctgcagcagttttgtagcaagaaactcttcagcatcccagaggaagaagaggaagaggaagaggacgaggaggaagaaaagtcaggagctggctgtagttctcgggatccaggcccccctgagcctgccctgctcggactggggtgcgatagcgggcagccgcgtcgccccgggcagtgtccactctcccctgagagctctagagcaggggactgcctggaggatatgcctggcctggtgggcggaagctctcgcaggagaggcggagggagcccagaaaaaccccccagtcgtcgtcggcctcccgaccctcgggagcactgctcgcgcctgctatctaacaatggcccgcaagcctccggtagactcggcccaacccgcgagagaggaggccttccggtgatcgaaggcccccgcaccgggctagaggctagcgggcggggacggcttgggcctagcagaaggtgcagtaggggaagggctctggaaccaggtctcgccagctgcctgtctccgaagtgtctcgagataagcatcgagtacgattccgaagacgagcaggaagccggatctgggggcattagtatcacgagcagctgttaccctggcgacggggaagcctggggcaccgccacggttggaaggccaagaggaccccctaaagcaaattccggcccaaagccttacccaaggctgccggcttgggaaaagggggagccagagcgcagaggaagaagtgctactgggagagcgaaagagcctctgtccagagctactgagaccggagaggcgcgagggcaggatggtagtggaagaagggggcctcagaagaggggtgtgcgtgtgctccggcccagcactgcagagctagtgcctgcgaggagtccaagcgagaccctcgcatatcagcacctgcccgttcgcatcttcgtggctttattcgactacgaccctgtcagcatgagtcccaatccggacgcaggcgaggaggaactccccttcagggagggacagatcttgaaggtttttggcgacaaggacgccgatggattttaccagggcgaaggaggtgggaggaccggctacataccttgcaatatggtggctgaggtagctgtggacagccctgcggggcggcagcagctgctgcagcggggctatctgagtcccgatatcctgctggagggcagtggaaatggcccattcgtgtacagcacagcgcacaccactggaccaccccctaaacctcggcgctccaaaaaggcagaaagcgaaggaccggctcagccttgtcccggccctcctaagctggtcccatcagcagacctgaaggccccccattcaatggtcgctgcattcgactacaatccgcaggaatccagccccaatatggacgtcgaggcagaactgccattccgtgccggggacgtcataactgtcttcggcggaatggacgatgacgggttttactatggggaactgaacggacagcgtggcctggtcccatctaactttttagaaggacccggtcctgaggctggcggtctagaccgcgagcctcggaccccacaggctgaatctcagcggacccgtcgacgccgtgtccagtgctag

SEQ ID NO: 215319 - DNA, 5393 bp, Artificial Sequence
  derived and/or modified sequence
atggaacagctaacaactctgccacggccaggggatccaggcgcaatggaaccgtgggcactgcctacatggcatagctggacccctgggcgaggcggagagcctagctcagcggctccctccatcgctgacacacctcccgcagcactgcaactgcaggaactgcgatctgaggagtcttctaaaccaaagggtgatggatccagcagacccgtgggcggtactgacccagagggcgcagaggcttgtctccccagcttaggacagcaagccagcagcagtggaccagcatgccagcggcctgaagatgaagaggtggaggctttcctaaaagctaagctaaacatgtcctttggagacaggcccaacctcgagctgttgcgtgctctgggtgagctgcggcaaagatgcgctattctgaaggaagaaaaccagatgctgagaaaaagctctttcccagagacagaggagaaggtgcggaggctgaaacgcaagaacgccgagctggccgtgatcgctaagaggctggaggaacgggctcggaaacttcaggagacaaacctacgcgtggaaggcccacaatggctgcacgtaagagactttgaccggctcctccgggagtctcagagggaggtgctccggcttcagcgtcaaatcgctttacgcaaccagcgcgaaactttacctctaccaccatcctggccaccgggacccgcactgcaggctcgggcaggtgctccagccccaggcgcacctggcgaggcgactccccaggaagatgctgataatcttccggtgattctaggcgaaccggaaaaagagcagcgggtccaacaactcgaatccgagctgagtaagaagcgcaaaaagtgtgaaagtcttgagcaggaagccagaaaaaaacaacggagatgcgaagaactagaactgcagttgcggcaggcacagaatgaaaacgcccgactcgttgaggagaattccagactgtccggacgtgccactgaaaaggaacaggttgagtgggagaatgccgagctccggggacaactgctaggggtaacgcaggagagagattccgctctacgcaaatcccagggcctgcaatcaaagctggagagcttagagcaggtcctgaagcacatgcgagaggtcgctcagcgcagacagcaactggaagtggagcacgagcaagcaagactgagcctgcgcgagaagcaagaagaagttagaagattgcaacaggctcaggcagaagcccagagagaacacgagggcgctgttcagttgttggagtccacattggacagcatgcaggcacgagtacgtgaacttgaagaacaatgtaggagtcagacagaacagttctccttactggcccaggaattacaggcttttcggctgcatccgggaccccttgacctgttgacctctgccctggactgcggtagtctcggggattgtcctccccctccctgctgttgttccattccacagccttgcagaggttctggccctaaggatctagatcttccgcctggatcccccggacgctgtaccccaaagtctagtgagccagcacctgccactttgacaggcgtgcctaggcggacagcaaaaaaagccgaaagtctatccaactctagccattctgaatctattcataactcacctaagtcatgtcctacccctgaggttgataccgctagcgaagtcgaagagctggaggccgactcggtgtccttgctccccgctgccccagaaggttcacgcggtggcgctagaatccaggtgtttttagcccgatatagctataatccgttcgagggcccaaatgagaaccccgaagcagaactaccgttgacagccggagagtacatttatatctatggcaacatggacgaggatggattctttgaaggtgagctcatggacggccgacgtgggctggtcccttcaaattttgttgagcgcgtgtccgacgacgacctgctcacctcacttccacctgagttggcggatctttcccatagttcaggacccgagctgagcttcctgagcgtcggaggcggagggtcctcgagcggcggtcagtcttcagtaggacgatcccagccacgtcccgaggaagaggacgcgggtgatgagctgagtttatcaccgagtccagagggcctcggcgaacccccagccgtgccgtatcctcgcaggctcgtggtgctaaagcagcttgctcactcagtggttctggcatgggagccacccccagagcaggtcgaacttcatggattccatatatgtgtcaatggcgagttaaggcaggcactggggcctggggctccacctaaggccgtgctggagaacctggatttgtgggccggtcctcttcacatctccgttcaggccttgacttcgcgaggatcttcagaccctctccggtgctgtctggccgttggtgcacgcgctggggtggtgccgtcacagttgcgtgttcatcgactgacggcaacaagtgctgagatcacttgggtgcctggaaacagcaacctggcgcatgccatttacctcaacggcgaggaatgcccacctgcgtccccttctacctactgggccactttttgtcaccttaggcccggtaccccatatcaggcccaggttgaggcccagttgcctcctcaggggccttgggaacctggttgggagcggttggagcagcgggctgctactttgcaattcactacactcccagcagggccacccgacgctccgctcgacgtgcagatagagcccggacccagccctggaatcctgatcatctcctggctccccgtaactatcgatgcagccggaacctcaaacggcgtacgggtgaccggatatgcaatttacgcagacggtcaaaagataatggaggttgctagccccaccgctggctccgtgctggtggagctctcacagctgcaactgctgcaggtgtgccgggaagttgtggtgaggactatgtctccacatggggagtcagccgattccatcccagcccctattacccctgccctggcacctgcttcgctgcctgcccgtgtatcttgcccgagtcctcacccaagtcccgaggcgagggccccactcgccagcgcttccccaggtcccggagatcctagcagccctctacaacatcccgctcccctggggacgcaggagccgcctggagctccacccgctagtccctctcgtgagatggccaaagggtcacatgaagatccacctgcaccctgttctcaggaggaggccggagccgcagtgttggggacctcagaagaaaggaccgcctctacctccacccttggcgagaaggatcccggaccggcagccccttcactagcaaagcaggaggcagagtggactgccggagaggcctgtcctgcctcatcttcgactcaaggggctagggctcagcaggcacctaacaccgagatgtgtcagggcggagatccaggctctggtctgagacctcgcgcagagaaagaagacaccgcagagctcggtgtccacctggtgaatagtctcgtcgatcatggtaggaactctgacctgtcagatattcaggaggaggaagaagaagaagaggaggaggaggaggaggagttaggatcgcgtacctgcagcttccagaagcaagtggcagggaactctatacgtgagaatggagccaaaagccagcctgatccattttgtgagacagatagcgacgaggagatcctggagcagatactcgagctccctctgcagcaattctgctctaaaaaactgttttccattccagaagaagaggaagaggaagaggaagacgaggaggaagagaaatctggcgcaggttgtagcagtagggatccaggtccacctgagcccgcactactgggactgggatgcgacagcggccagcctcggaggcctggccagtgtcctttatcacccgagagctcgcgggcaggcgattgtttggaagacatgcctggcttagtgggaggatcttctagaagacggggtggaggcagtccagagaaacctccatcacgcagaaggccccctgacccgagggaacactgtagtcggttgctatctaataatggcccacaagcttcaggtcgactgggccctacgagggagcggggaggcctccccgtgatcgaagggccacggactggtttggaggctagcggccgtgggcgtttgggtcctagccgacgatgttctcgcggacgggctcttgagccgggtctcgcctcgtgtctgagtcctaaatgtctggaaatcagtatcgagtatgacagtgaagacgagcaggaggctggatctggaggtattagtattacctcttcatgctaccctggtgacggcgaggcctggggaaccgcgacagtgggacgccctcggggaccgccaaaagcgaacagtggaccgaagccctacccccgactgccggcatgggagaagggagaaccagagaggagagggcgtagtgccacaggacgagctaaggaacctctgagccgtgcgaccgaaaccggcgaagctcggggacaggatgggtcaggaaggcggggaccacagaagaggggagtgagagtcctgcggccttcgactgctgagctggtgccagcgcgatccccctctgaaactctggcataccagcacctcccagtgcgtattttcgttgccctctttgactacgatccagtgagcatgtctcccaacccagacgcaggcgaggaggagcttccatttagggaagggcagatactgaaagtgttcggggacaaggacgctgatggattctatcaaggagaaggcggaggccgaaccggatatattccatgcaatatggttgctgaggtcgccgtggactctccggctggtcgtcagcagttgcttcagcggggttatctcagcccagacattctgctcgagggtagcggaaacggcccatttgtttacagtaccgcccacactaccgggcctccgcctaagccaaggaggtctaaaaaagccgagtccgaaggccctgctcagccttgtcccggtcctccaaagttggtgccctctgccgatctgaaggcaccacattcgatggtggccgcttttgactacaacccgcaagagtctagccctaacatggacgtggaagcggaattgccctttcgggctggcgatgtcataaccgtttttggcggaatggacgacgatggtttttactacggggagctgaatggtcagcgtggccttgtacccagcaatttcctggaaggcccagggcctgaggctggcggactggatcgggagcctagaactcctcaggctgaatcccagaggacacggaggcggagggtgcaatgtta

SEQ ID NO: 215320 - DNA, 7508 bp, Artificial Sequence
  derived and/or modified sequence
ctgaggctcagccctcctcggagcccaccatctcgaggctcctggactgtaagggacccctgcagtccccagagcagaggccagcaggggctgagactatgaggcaagcagcccatcgacccaggcctccttaggaccagcccagccacccagcaagcgaaagagcagcagcagagagcagagccggagataaaggaccacagcggaccactggggatcacccccagcagctcctgaagcctctggccgggctgaggggttgcgacagacggccagacccacagacactgacagacacacaacgacaccgatgcacacagctgcacgacactgacacactcagatacaaccagggacagcatcacatactgccacagccctgcaatacagacacccacacacacacacacaaacaactggcaactctgaaatgggcagacagtgacacacagcaccacccccctcaacacacagaagtgggggcacccatcttcccaacacatgagacagcattgacctgcacggacagacctggagacacacacacgcaccctcacccaggcgcagctgtcggtggcctctgcacatcctccctacccccacagggacaccctcgctcctccacatactcgcgcacacacacagctaccagcaaacatagctcacatacccctggctccagctccagcagccctggcgccttctgcagcctcctttgtgggtggggaagagctcagccaaccttggatggagcgtcggtgaagcaagagctcagaggggagaggggctggcctggcatgaccctcgccagtccccccacctggctgggtgatgtcccccggcccgggttctggggccccttggcagtaccatggagcaactgacaaccctcccacggcctggggaccctggagccatggagccatgggcactgcccacctggcatagctggactccaggtcgagggggtgaacctagcagtgcagccccaagcatcgctgatactcctccggcagctctgcagcttcaagaactgaggtctgaggagagttccaagcccaaaggagacgggagctccaggcccgtggggggaactgaccctgaaggagcagaggcttgtctgcccagcctgggccagcaagcatccagctctggacccgcctgccagaggccagaggatgaggaagtggaggctttcctgaaggccaagctgaatatgagctttggggacaggcccaatctggagctgctgagggccctgggggagctgcggcagcgctgtgccatccttaaggaggaaaaccagatgctgaggaagagcagcttccctgagacagaagagaaggtgcggaggctgaagaggaagaacgccgagctggcggtcattgccaagcgcctggaggagagggcccgaaagctgcaggaaacgaacctgagggtggagggtccccagtggctccacgtgcgggacttcgatcggctgctgcgcgagtcccagcgggaggtgctgcggctgcagaggcagatcgcgctgcgcaaccagcgggagacgctcccgctcccgccgtcctggcccccgggccctgctctccaggccagagcaggggcgcctgctcccggggccccgggagaggccacgccccaggaggatgcggacaacctacccgtgattctaggggagccagagaaagagcagagggtgcagcagctggaatcggagctcagcaagaagcggaagaaatgcgagagcctggagcaggaagcccggaaaaagcagaggcgatgtgaggagctggaactgcagctgagacaagcgcagaatgagaatgcccgcctggtggaggagaactcccggctcagtgggagagccacagagaaggagcaggtggagtgggagaatgcggagctgaggggccagctcctgggggtgacacaggagagggactcagcccttcgcaagagccagggcctgcagagcaagctggagagcctggagcaagtgctgaagcacatgcgggaggtggcccagcggcggcagcagctggaggtggagcatgaacaggctcggctcagcctacgggagaagcaggaggaggtccggagactgcagcaggcccaggctgaagcccagagggaacatgaaggagccgtgcagctgctggagtctaccttggattccatgcaggcccgggttcgagagctcgaagaacagtgccgcagccaaaccgagcagttcagcctcctggcacaggaactccaggctttccgcctgcacccgggccccttggatctgctcacatctgccctggactgtgggagccttggagactgcccaccacccccctgctgctgctccattccccagccttgccgggggtctggccccaaagaccttgacctcccgccgggctcccctgggcgctgcaccccaaagtcttccgagcctgcccctgccactctcactggggtccctcgaaggacagccaagaaggcagagtctctctccaactcctcccactccgagtccatccacaacagccccaagtcatgccctacacctgaggtggacacagccagtgaggtagaggagctggaggcagacagtgtctccctgctcccagctgcgccagagggcagccggggaggagccaggatccaggtcttcctagcacgttatagctacaacccctttgagggtcccaatgagaatccagaagcagagcttccgctgacagctggcgagtacatctacatctatggcaacatggatgaggatggcttttttgaaggagagctcatggatggccgaaggggcctggtcccttccaattttgtagagcgtgtgtcggatgatgacctcctgacctccctccctccagagctggccgatttgtcccacagctcaggccctgaactcagtttcctgagtgtaggtgggggtggcagcagtagcgggggccaaagcagtgtgggaaggagccagcccagacctgaggaggaggatgcaggggacgagctcagtctgagcccatcaccggagggcctgggcgagcctcctgccgtgccttacccccgccgtctggtggtcctcaagcagctggcccacagcgtggtgctggcctgggagccgcctcctgagcaagtggagctacacggcttccatatctgtgtgaatggggagctgcgacaggccctggggcctggggcgccacccaaggccgtgctggagaacctggacctgtgggccgggccccttcacatttctgtccaggccctgactagccggggcagctctgacccactgcgctgttgcttggcggtgggtgcccgggccggagtggtgcccagccagctgcgggtccatcggttgacagccacatctgctgagatcacctgggtgcccggcaatagcaacttggcccatgccatctacctcaatggggaagagtgcccacctgccagccccagtacctactgggccaccttctgccacttacggcctggcacaccctatcaggcccaagtggaggctcagctcccaccccaagggccctgggaaccaggctgggagaggctggagcagcgggctgccaccctgcagttcaccacactcccagcaggcccacctgatgcccctctggatgtgcagatcgagcctgggccctcccctgggatcttgatcatcagttggctcccagtcaccatcgatgctgctggcacatccaacggtgtccgggtcacaggctatgccatctacgctgatgggcagaagatcatggaggtggcctcacccacggcaggcagtgtactggtggagttgtcccagctgcagctgctgcaggtgtgtcgtgaggtggtcgtgcgcaccatgtcgccccacggggagtcggcggactccatcccggctcctatcactcccgccctggctccggccagcctgccagcccgagtctcctgcccctcaccgcacccaagcccagaggccagagcgccccttgcttcagcctccccagggcctggagaccccagctctcctctccagcaccctgctccccttggaactcaagagcctccaggagcaccccctgcaagcccttccagagagatggcaaaagggtcccacgaggaccctccagcaccttgctcccaggaggaggctggggcagcagtgctgggcacctcagaggagaggacagccagcacatctaccctgggtgagaaggaccctggccccgcagctccctcactggccaagcaggaggccgagtggactgcaggagaggcctgtccggcctccagctccacccagggagcacgggcccagcaggcgccaaataccgagatgtgccaaggaggagacccagggtctgggctgaggcccagggctgagaaggaggacacagcagagcttggggttcatctggtgaactccctcgtggaccacggccgcaactcagacctgtcagacatccaggaggaagaggaagaggaggaggaggaggaggaagaggagctgggttccaggacttgctccttccagaagcaggttgctggcaacagcatcagggagaatggggccaagtcccagcccgaccccttttgtgagactgacagcgatgaggagatcttggagcagatcctggagctgcccctccagcagttctgtagcaagaagctctttagcatcccggaggaggaggaagaggaagaggaggacgaggaggaggagaagtcaggggcaggctgttcttcccgagaccctggcccgcctgaacctgcattgctggggctgggctgtgacagtggtcagccccgaagacctggccagtgtcccttgtctcctgagtcctccagggctggagactgcctggaagacatgcctggattagttggtggaagcagccggaggagaggagggggctcccctgagaagcccccaagccgcaggcggcctccagatccccgagaacactgcagccgacttctcagcaacaatgggccccaggcctctggacgactgggccccacacgggagaggggtggcctccccgtaattgagggccccaggactggactagaggctagcgggagaggccggctgggcccttcccggaggtgctcccgtggccgggcgctggagcctggcctggccagctgcctttcccccaagtgcttggaaatcagcattgaatatgattcggaggatgagcaggaggcgggcagcgggggcatcagcatcaccagctcctgctaccctggagatggggaggcctggggcacagcaactgtaggaaggcccagggggcctccgaaggccaattcaggccccaagccctacccacgcctcccagcctgggagaaaggggaaccagagcggagaggccgcagtgcgacgggcagagccaaggagccactctcccgggcaacagagaccggagaggccagagggcaggacggctctgggcggaggggcccccagaagagaggtgtccgagtcctcaggccaagcactgcagagctagtccctgcgaggagcccctcagaaacactggcttaccagcacctacccgtcaggatctttgtggctctgtttgactatgaccccgtgtcaatgtcgcccaatcctgatgctggagaagaagagcttcccttccgagagggtcagatcctgaaggtgtttggggacaaggatgccgatggcttctaccagggcgaaggtgggggccggacaggctacattccctgcaacatggtggctgaggtggctgtggacagccctgctgggagacagcaactgctccagcggggttatttgtccccagatattctccttgagggctcagggaatggtccgtttgtgtactccacagcccacacaactgggcctcctcccaagccccgccgctccaagaaagctgagtcggaaggccctgcccagccctgtccaggcccccctaagctggtcccctctgctgacctgaaagctccccactccatggtggctgcatttgactacaacccccaggagagttcccccaatatggacgtggaggcagagctgcccttccgggcaggggatgtcattactgtgtttgggggcatggacgatgacggtttctactatggggaattaaatggacaaaggggcctggttccatccaacttcctggagggccctgggcctgaggcaggcggcctggacagggaacccaggacaccccaggctgagagtcagagaacgaggaggagaagagtccagtgctagatggagatagatatatgtagagagagcaacatgactggggctgcaccacacaagggtccccagggcccccaggtgggccttgtacccccagctctggcagcgcccccaggattgaacgtggggagccccagggcagaagcgagaaggtgtggggtttcttctccaaggggaagcagctcctcaggaggctgggctctgggaagaaggagtgaagctgtggcccatcctgcaggcagaagaggccctgagaggcccccagatcactgtctctgctgagcagggaaggctcagactgggcccagagcccccgttcttctgcgttaacactgtggcattcagagggaatcaaagagccttggtgaaggtcagagctaaatggctccttaaggatgaactctctagagaagcaccttcctcctacaggaggggaaactgagcccacagtgagtatgtaacttgaccaaggtcactgagccaggactggacccaggaccctcgcgtcctggtccacccacctcgtctactagtgtcccacagtgctgcgctagtcccttctgccacccttcccagtcccaggacgggccctggagggagaaaggagcctgtgccccctgatggctctggctgtcctgatcctgtcttccctcccctgaaggaaagtttgcactggattttattggagccccatctccccagcgggcaggcgggcggagcctgtatatatgtatatactcagtgcctcagttcagcttcctccacctcgcttccactgcacaggcccaggaaggagaaaggccaagccaaagtgggccccaccctgcccccgtcgtgctccatccttccctgccggggcctgctggcccctgtaaggtcccgcccccaaagaccctggggccagcggggccgaaagcggagttgggtttgccttattttgctcattggattcaagttcttttgcatagttttcttctaacccctgttggagtccaggggctggagaaaaggacagatttatgcagctattttcatacattccctgttcagagtggggtaggggttctccgccgttacccgatccactccatcccccaccctctgaggggtgagtgtgtctttgcatgtttcctttgctgtggtgggagatagtttgactgaacccccaccttgaccttggtctccaggggtgtggaatggtgggggaatttgtttaaaaagacattttattataataaagtctattttc

SEQ ID NO: 215321 - DNA, 5394 bp, Artificial Sequence
  derived and/or modified sequence
atggagcagctgaccaccctgcccagacccggcgaccccggcgccatggagccctgggccctgcccacctggcacagctggacccccggcagaggcggcgagcccagcagcgccgcccccagcatcgccgacaccccccccgccgccctgcagctgcaggagctgagaagcgaggagagcagcaagcccaagggcgacggcagcagcagacccgtgggcggcaccgaccccgagggcgccgaggcctgcctgcccagcctgggccagcaggccagcagcagcggccccgcctgccagagacccgaggacgaggaggtggaggccttcctgaaggccaagctgaacatgagcttcggcgacagacccaacctggagctgctgagagccctgggcgagctgagacagagatgcgccatcctgaaggaggagaaccagatgctgagaaagagcagcttccccgagaccgaggagaaggtgagaagactgaagagaaagaacgccgagctggccgtgatcgccaagagactggaggagagagccagaaagctgcaggagaccaacctgagagtggagggcccccagtggctgcacgtgagagacttcgacagactgctgagagagagccagagagaggtgctgagactgcagagacagatcgccctgagaaaccagagagagaccctgcccctgccccccagctggccccccggccccgccctgcaggccagagccggcgcccccgcccccggcgcccccggcgaggccaccccccaggaggacgccgacaacctgcccgtgatcctgggcgagcccgagaaggagcagagagtgcagcagctggagagcgagctgagcaagaagagaaagaagtgcgagagcctggagcaggaggccagaaagaagcagagaagatgcgaggagctggagctgcagctgagacaggcccagaacgagaacgccagactggtggaggagaacagcagactgagcggcagagccaccgagaaggagcaggtggagtgggagaacgccgagctgagaggccagctgctgggcgtgacccaggagagagacagcgccctgagaaagagccagggcctgcagagcaagctggagagcctggagcaggtgctgaagcacatgagagaggtggcccagagaagacagcagctggaggtggagcacgagcaggccagactgagcctgagagagaagcaggaggaggtgagaagactgcagcaggcccaggccgaggcccagagagagcacgagggcgccgtgcagctgctggagagcaccctggacagcatgcaggccagagtgagagagctggaggagcagtgcagaagccagaccgagcagttcagcctgctggcccaggagctgcaggccttcagactgcaccccggccccctggacctgctgaccagcgccctggactgcggcagcctgggcgactgccccccccccccctgctgctgcagcatcccccagccctgcagaggcagcggccccaaggacctggacctgccccccggcagccccggcagatgcacccccaagagcagcgagcccgcccccgccaccctgaccggcgtgcccagaagaaccgccaagaaggccgagagcctgagcaacagcagccacagcgagagcatccacaacagccccaagagctgccccacccccgaggtggacaccgccagcgaggtggaggagctggaggccgacagcgtgagcctgctgcccgccgcccccgagggcagcagaggcggcgccagaatccaggtgttcctggccagatacagctacaaccccttcgagggccccaacgagaaccccgaggccgagctgcccctgaccgccggcgagtacatctacatctacggcaacatggacgaggacggcttcttcgagggcgagctgatggacggcagaagaggcctggtgcccagcaacttcgtggagagagtgagcgacgacgacctgctgaccagcctgccccccgagctggccgacctgagccacagcagcggccccgagctgagcttcctgagcgtgggcggcggcggcagcagcagcggcggccagagcagcgtgggcagaagccagcccagacccgaggaggaggacgccggcgacgagctgagcctgagccccagccccgagggcctgggcgagccccccgccgtgccctaccccagaagactggtggtgctgaagcagctggcccacagcgtggtgctggcctgggagcccccccccgagcaggtggagctgcacggcttccacatctgcgtgaacggcgagctgagacaggccctgggccccggcgccccccccaaggccgtgctggagaacctggacctgtgggccggccccctgcacatcagcgtgcaggccctgaccagcagaggcagcagcgaccccctgagatgctgcctggccgtgggcgccagagccggcgtggtgcccagccagctgagagtgcacagactgaccgccaccagcgccgagatcacctgggtgcccggcaacagcaacctggcccacgccatctacctgaacggcgaggagtgcccccccgccagccccagcacctactgggccaccttctgccacctgagacccggcaccccctaccaggcccaggtggaggcccagctgcccccccagggcccctgggagcccggctgggagagactggagcagagagccgccaccctgcagttcaccaccctgcccgccggcccccccgacgcccccctggacgtgcagatcgagcccggccccagccccggcatcctgatcatcagctggctgcccgtgaccatcgacgccgccggcaccagcaacggcgtgagagtgaccggctacgccatctacgccgacggccagaagatcatggaggtggccagccccaccgccggcagcgtgctggtggagctgagccagctgcagctgctgcaggtgtgcagagaggtggtggtgagaaccatgagcccccacggcgagagcgccgacagcatccccgcccccatcacccccgccctggcccccgccagcctgcccgccagagtgagctgccccagcccccaccccagccccgaggccagagcccccctggccagcgccagccccggccccggcgaccccagcagccccctgcagcaccccgcccccctgggcacccaggagccccccggcgccccccccgccagccccagcagagagatggccaagggcagccacgaggacccccccgccccctgcagccaggaggaggccggcgccgccgtgctgggcaccagcgaggagagaaccgccagcaccagcaccctgggcgagaaggaccccggccccgccgcccccagcctggccaagcaggaggccgagtggaccgccggcgaggcctgccccgccagcagcagcacccagggcgccagagcccagcaggcccccaacaccgagatgtgccagggcggcgaccccggcagcggcctgagacccagagccgagaaggaggacaccgccgagctgggcgtgcacctggtgaacagcctggtggaccacggcagaaacagcgacctgagcgacatccaggaggaggaggaggaggaggaggaggaggaggaggaggagctgggcagcagaacctgcagcttccagaagcaggtggccggcaacagcatcagagagaacggcgccaagagccagcccgaccccttctgcgagaccgacagcgacgaggagatcctggagcagatcctggagctgcccctgcagcagttctgcagcaagaagctgttcagcatccccgaggaggaggaggaggaggaggaggacgaggaggaggagaagagcggcgccggctgcagcagcagagaccccggcccccccgagcccgccctgctgggcctgggctgcgacagcggccagcccagaagacccggccagtgccccctgagccccgagagcagcagagccggcgactgcctggaggacatgcccggcctggtgggcggcagcagcagaagaagaggcggcggcagccccgagaagccccccagcagaagaagaccccccgaccccagagagcactgcagcagactgctgagcaacaacggcccccaggccagcggcagactgggccccaccagagagagaggcggcctgcccgtgatcgagggccccagaaccggcctggaggccagcggcagaggcagactgggccccagcagaagatgcagcagaggcagagccctggagcccggcctggccagctgcctgagccccaagtgcctggagatcagcatcgagtacgacagcgaggacgagcaggaggccggcagcggcggcatcagcatcaccagcagctgctaccccggcgacggcgaggcctggggcaccgccaccgtgggcagacccagaggcccccccaaggccaacagcggccccaagccctaccccagactgcccgcctgggagaagggcgagcccgagagaagaggcagaagcgccaccggcagagccaaggagcccctgagcagagccaccgagaccggcgaggccagaggccaggacggcagcggcagaagaggcccccagaagagaggcgtgagagtgctgagacccagcaccgccgagctggtgcccgccagaagccccagcgagaccctggcctaccagcacctgcccgtgagaatcttcgtggccctgttcgactacgaccccgtgagcatgagccccaaccccgacgccggcgaggaggagctgcccttcagagagggccagatcctgaaggtgttcggcgacaaggacgccgacggcttctaccagggcgagggcggcggcagaaccggctacatcccctgcaacatggtggccgaggtggccgtggacagccccgccggcagacagcagctgctgcagagaggctacctgagccccgacatcctgctggagggcagcggcaacggccccttcgtgtacagcaccgcccacaccaccggccccccccccaagcccagaagaagcaagaaggccgagagcgagggccccgcccagccctgccccggcccccccaagctggtgcccagcgccgacctgaaggccccccacagcatggtggccgccttcgactacaacccccaggagagcagccccaacatggacgtggaggccgagctgcccttcagagccggcgacgtgatcaccgtgttcggcggcatggacgacgacggcttctactacggcgagctgaacggccagagaggcctggtgcccagcaacttcctggagggccccggccccgaggccggcggcctggacagagagcccagaaccccccaggccgagagccagagaaccagaagaagaagagtgcagtgctag

SEQ ID NO: 215322 - DNA, 150 bp, Artificial Sequence
  derived and/or modified sequence
atgagcttcatcgacccctaccagcacatcatcgtggagcaccagtacagccacaagttcaccgtggtggtgctgagagccaccaaggtgaccaagggcgccttcggcgacatgcccaaggtgaccaagggcgccttcggcgacatgtag

SEQ ID NO: 215323 - DNA, 150 bp, Artificial Sequence
  derived and/or modified sequence
atgagttttatcgatccttatcagcatatcattgtggagcaccagtactctcataagttcactgtggttgtgctccgagccacgaaagtgacaaaaggtgcgtttggagacatgcccaaggtcaccaaaggcgcatttggggacatgtag

SEQ ID NO: 215324 - DNA, 150 bp, Artificial Sequence
  derived and/or modified sequence
atgtccttcatcgacccctaccagcacatcatcgtggagcaccagtacagccacaagttcaccgtggtggtgctgcgggccaccaaggtgaccaagggggcctttggagacatgcccaaggtgaccaagggggccttcggggacatgtag

SEQ ID NO: 215325 - DNA, 150 bp, Artificial Sequence
  derived and/or modified sequence
atgagcttcatcgacccctaccagcacatcatcgtggagcaccagtatagtcacaaatttaccgtggtagtgctgagggcgactaaagttaccaaaggcgccttcggggacatgcccaaagtgactaagggggcgttcggagacatgtag

SEQ ID NO: 215326 - DNA, 150 bp, Artificial Sequence
  derived and/or modified sequence
atgagctttatcgacccctaccagcacatcattgtagagcaccaatattcccacaagttcactgtagtggtgttgagagcaaccaaagtcacgaaaggagcctttggggacatgccaaaggtgaccaaaggggcttttggggacatgtag

SEQ ID NO: 215327 - protein, 894 aa, Artificial Sequence
  derived and/or modified sequence
MALASAAPGSIFCKQLLFSLLVLTLLCDACQKVYLRVPSHLQAETLVGKVNLEECLKSASLIRSSDPAFRILEDGSIYTTHDLILSSERKSFSIFLSDGQRREQQEIKVVLSARENKSPKKRHTKDTALKRSKRRWAPIPASLMENSLGPFPQHVQQIQSDAAQNYTIFYSISGPGVDKEPFNLFYIEKDTGDIFCTRSIDREKYEQFALYGYATTADGYAPEYPLPLIIKIEDDNDNAPYFEHRVTIFTVPENCRSGTSVGKVTATDLDEPDTLHTRLKYKILQQIPDHPKHFSIHPDTGVITTTTPFLDREKCDTYQLIMEVRDMGGQPFGLFNTGTITISLEDENDNPPSFTETSYVTEVEENRIDVEILRMKVQDQDLPNTPHSKAVYKILQGNENGNFIISTDPNTNEGVLCVVKPLNYEVNRQVILQVGVINEAQFSKAASSQTPTMCTTTVTVKIIDSDEGPECHPPVKVIQSQDGFPAGQELLGYKALDPEISSGEGLRYQKLGDEDNWFEINQHTGDLRTLKVLDRESKFVKNNQYNISVVAVDAVGRSCTGTLVVHLDDYNDHAPQIDKEVTICQNNEDFAVLKPVDPDGPENGPPFQFFLDNSASKNWNIEEKDGKTAILRQRQNLDYNYYSVPIQIKDRHGLVATHMLTVRVCDCSTPSECRMKDKSTRDVRPNVILGRWAILAMVLGSVLLLCILFTCFCVTAKRTVKKCFPEDIAQQNLIVSNTEGPGEEVTEANIRLPMQTSNICDTSMSVGTVGGQGIKTQQSFEMVKGGYTLDSNKGGGHQTLESVKGVGQGDTGRYAYTDWQSFTQPRLGEKVYLCGQDEEHKHCEDYVCSYNYEGKGSLAGSVGCCSDRQEEEGLEFLDHLEPKFRTLAKTCIKK

SEQ ID NO: 215328 - DNA, 2685 bp, Artificial Sequence
  derived and/or modified sequence
atggcactggcatctgctgcccccggtagcattttttgcaagcagctgctattctccctcttagtcctgactctgctctgtgatgcctgtcagaaggtgtatcttagggtgccaagtcaccttcaggctgagactttagtgggcaaggtgaacctcgaggagtgcctaaagtccgcctctctcatccgctctagcgaccctgctttccggatacttgaagatgggtccatatataccacacacgaccttattctgtcaagcgaaagaaagagcttttcaattttcttatctgacggtcagcgccgcgaacagcaggagataaaggtcgttttatctgcgcgagaaaacaaatctcctaagaagcggcacacaaaagacacagcactaaaacgtagcaagcggaggtgggcccctattccagcttctttgatggagaattcactgggcccattcccccagcacgtccagcaaattcaaagcgacgccgcccaaaattataccatcttctatagcatctcaggaccgggcgttgataaggagccatttaacctcttctatattgaaaaggatacgggagacatcttctgcacaagaagcatcgatcgggagaagtacgaacagttcgccctgtacggctacgctacaactgctgatggatacgcccctgaataccctctaccccttataattaaaattgaagatgataacgacaatgccccttatttcgaacatagagtcacaatctttaccgtcccagagaactgtcgctctggcacttcagtggggaaggtgaccgctacagatctcgatgaacctgacaccctgcatacgaggctgaagtacaagattttacaacaaatccctgatcacccgaagcacttcagcattcatcccgacaccggcgtgattaccacaactacaccattcctggacagagagaaatgtgacacctaccagcttataatggaagtgcgggatatgggcggccagccattcggcttgttcaacaccgggacaataactataagcttagaggatgagaacgacaatccaccttcttttaccgaaacttcctacgtaacagaggtcgaggagaaccggatcgacgttgaaatcctcagaatgaaggtgcaggaccaagacttgccaaacaccccacacagtaaggctgtgtataagatcctccaaggaaacgaaaacgggaatttcattatctccacagaccctaacaccaatgaaggtgtgctgtgcgtggtgaaacctttgaactacgaagtgaaccgacaggttatcctacaagttggcgtgatcaatgaggcacagttttctaaagctgcctcttctcagaccccaacaatgtgtaccactaccgtgacagtcaaaattatcgactcggacgagggcccggagtgtcacccaccagtgaaggttatccagtctcaggatgggtttccagccggacaggagctcctggggtataaggccctggaccccgagattagctccggtgaggggttacggtaccagaagctaggagacgaggacaactggtttgaaatcaatcagcacacaggcgacctgcgaaccctcaaggtgctggacagagaaagcaaattcgtgaagaataatcaatataatataagcgttgtcgccgtcgatgcggtcgggagaagctgcaccggcacactggtggtccaccttgacgactacaacgatcacgcacctcagatagacaaggaggtaactatttgccagaacaatgaggactttgccgtattaaagcccgttgatccagacggaccagaaaacggcccacctttccagttttttctggataattccgcctcaaaaaactggaacatcgaggagaaggacgggaagacagccatattgcggcaacgtcagaacttggactacaattactattccgtgcccattcaaattaaagacaggcatgggcttgtcgccacacatatgctgaccgttcgtgtctgtgactgctctacaccatcagaatgccggatgaaggataagtccactagagatgtgcggcctaacgtgattctgggaaggtgggctatattagcaatggtcttaggatcagtgctgctgctgtgtattttgttcacctgtttctgcgtgaccgctaagcgcaccgtcaaaaaatgcttcccagaagacatcgcccagcaaaatcttattgtgtccaataccgaggggcctggcgaagaagtgactgaggctaacattcggttaccaatgcaaacttctaacatctgcgacactagcatgtcagtgggaaccgttgggggtcaggggattaagacccagcagagtttcgagatggtcaagggaggttacaccctggattccaacaaaggcggggggcaccagacgctggagagcgtgaagggagtcgggcagggcgacacagggcggtatgcctacactgactggcaaagtttcacccagccacgtctgggggagaaggtctacctctgcgggcaggatgaagaacataaacactgcgaggactatgtgtgttcatacaactacgaggggaaaggctcattagcaggctccgtgggctgctgttctgaccgtcaggaggaggaaggtctggagttcttagaccacctagaaccaaagtttagaacacttgctaaaacgtgtatcaagaaatag

SEQ ID NO: 215329 - DNA, 2685 bp, Artificial Sequence
  derived and/or modified sequence
atggccctggccagcgctgcccctggcagcatcttctgcaagcagctgctcttcagcctgctggtgctgaccctgctgtgtgatgcctgccagaaggtgtacctgcgggtgcccagccacctgcaggccgagaccctggtgggcaaggtgaacctggaggagtgcctgaagagcgccagcctcatccgcagcagtgaccctgccttccgcatcctggaggatggcagcatctacaccacccatgacctgatcctgagcagcgagaggaagagcttcagcatcttcctgagtgatggccagaggcgggagcagcaggagatcaaggtggtgctgagcgcccgggagaacaagagccccaagaagaggcacaccaaggacacagccctgaagaggagcaagaggcgctgggcccccatcccagccagcctgatggagaacagcctgggccccttcccccagcacgtgcagcagatccagagtgatgctgcccagaactacaccatcttctacagcatcagcggccctggggtggacaaggagcccttcaacctcttctacatcgagaaggacacaggagacatcttctgcaccaggagcattgaccgggagaagtatgagcagtttgccctgtatggctacgccaccacagcagatggctacgcccctgagtaccccctgcccctcatcatcaagattgaagatgacaatgacaatgccccctactttgagcaccgggtgaccatcttcaccgtgcctgagaactgccgcagcggcacctctgtgggcaaggtgacagccacagacctggatgagccagacaccctgcacacccggctgaagtacaagatcctgcagcagatcccagaccaccccaagcacttcagcatccacccagacaccggggtcatcaccaccaccacccccttcctggaccgggagaagtgtgacacctaccagctgatcatggaggtgcgggacatgggcggccagcccttcggcctcttcaacacaggcaccatcaccatcagcctggaggatgaaaatgacaaccccccatccttcacagagaccagctatgtgacagaggtggaggagaacagaattgatgtggagatcctgaggatgaaggtgcaggaccaggacctgcccaacaccccccacagcaaggctgtgtacaagatcctgcagggcaatgaaaatggaaacttcatcatcagcacagaccccaacaccaatgaaggagtgctgtgtgtggtgaagcccctgaactatgaggtgaaccggcaggtgatcctgcaggtgggcgtcatcaatgaggcccagttcagcaaggccgccagcagccagacccccaccatgtgcaccaccaccgtgacagtgaagatcatcgacagtgatgagggccctgagtgccacccccctgtgaaggtgatccagagccaggacggcttccctgctggccaggagctgctgggctacaaggccctggaccctgagatcagcagcggggagggcctgcgctaccagaagctgggagatgaggacaactggtttgagatcaaccagcacactggagacctgcggaccctgaaggtgctggaccgggagagcaagtttgtgaagaacaaccagtacaacatctctgtggtggccgtggatgctgtgggccgcagctgcaccggcaccctggtggtgcacctggatgactacaatgaccacgccccccagattgacaaggaggtgaccatctgccagaacaatgaagattttgctgtgctgaagcctgtggaccctgatggcccagaaaatggaccacccttccagttcttcctggacaacagcgccagcaagaactggaacatcgaggagaaggatggcaagacagccatcctgcggcagaggcagaacctggactacaactactacagcgtgcccatccagatcaaggacagacatggcctggtggccacccacatgctgactgtgcgggtgtgtgactgcagcaccccatctgagtgcaggatgaaggacaagagcaccagagatgtgcggcccaacgtcatcctgggccgctgggccatcctggccatggtgctgggctctgtgctgctgctgtgcatcctcttcacctgcttctgtgtgacagccaagaggacagtgaagaagtgcttccctgaggacatcgcccagcagaacctgattgtgagcaacacagagggccctggagaggaggtgacagaggccaacatccggctgcccatgcagaccagcaacatctgtgacacctccatgtctgtgggcaccgtgggcggccagggcatcaagacccagcagagctttgagatggtgaagggcggctacaccctggacagcaacaagggcggcggccaccagaccctggagagcgtgaagggcgtgggccagggcgacaccggccgctatgcctacacagactggcagagcttcacccagccccggctgggggagaaggtgtacctgtgtggccaggatgaggagcacaagcactgtgaggactatgtgtgcagctacaactatgagggcaagggcagcctggccggctctgtgggctgctgcagcgaccggcaggaggaggagggcctggagttcctggaccacctggagcccaagttccgcaccctggccaagacctgcatcaagaagtag

SEQ ID NO: 215330 - DNA, 2685 bp, Artificial Sequence
  derived and/or modified sequence
atggccctggccagcgccgcccccggcagcatcttctgcaagcagctcctgttcagcctccttgtgctgaccctcttgtgtgacgcttgccagaaagtgtacctgcgcgtcccaagtcacctgcaggccgaaactctggttggcaaagtcaaccttgaggaatgcctcaagtccgctagcctcatcaggtcaagtgacccagcctttcgtattctggaggatggctccatatacactacgcacgacctgatactgagctcagaaagaaagagtttttcaatcttcctatcagatggccagcggcgtgaacagcaagagatcaaagtggtactctctgccagggagaacaaaagcccaaaaaaacgacatacaaaggacactgcacttaagcgaagcaagaggagatgggctcctataccagctagtctcatggagaacagtctcggcccttttcctcagcatgtgcagcagatacagtctgatgccgcccagaattataccattttctacagtattagtgggcctggtgtcgataaagaacctttcaacttattctacatcgagaaggatacaggagacattttctgcacacgctccatcgatagggaaaaatatgaacagtttgccctttatggttatgctaccacggctgacggctatgcccctgagtatcccttgccactgatcatcaaaatcgaagacgataatgataacgcaccctattttgaacaccgcgtgacgatttttacggttcccgagaactgtaggagcgggacatcagttggtaaggtgaccgctacagatctggacgaacctgatacccttcatacaaggcttaagtacaagattttacagcagattcctgaccaccccaagcactttagtattcatcctgacaccggggtcattactactactacgccttttctcgatcgagagaagtgcgatacctaccaactcatcatggaggtccgcgacatggggggccagccttttgggctgttcaacacgggaaccattactataagtctagaagatgagaatgataacccaccctcgttcacagaaacttcttacgtcaccgaagtggaagagaatcggatcgacgtggagatactgaggatgaaagtgcaggatcaagatttaccaaacacacctcattctaaagctgtttacaagattcttcaggggaacgagaacggaaacttcattatctcgacagatcccaatactaatgaaggagttctctgtgtcgtcaagcccctaaattacgaagtgaatagacaggtcattctccaggtgggggtgatcaacgaagctcagttcagtaaggccgcctcctcccagaccccaaccatgtgcaccacaacagttaccgtcaagattatcgacagcgatgagggccctgaatgtcaccctcctgttaaagtcatccagtcacaggacggatttccagcagggcaggaactgctcggctataaagcgctggatcctgagatttccagcggggagggccttcggtaccagaagctgggggatgaagataattggtttgaaattaaccagcatacaggcgatctccggaccctgaaagttctcgatagagaatccaagtttgtgaagaataatcagtataacattagtgtcgtggccgttgatgcggtaggccggtcctgcaccggaacactggtcgtccacttggatgattacaatgatcacgccccccaaatcgacaaggaagtgactatttgtcagaacaatgaggacttcgctgtgctgaagccggtggatccagacggcccagaaaatggacccccgttccagttttttctggataatagtgcttctaagaactggaacatcgaagagaaagacggtaagaccgcaattctcagacaaagacagaatttagactacaactactacagcgttcctatccagattaaagaccggcatggtctagtggctacacatatgctgaccgttcgtgtgtgtgactgttctacgccttccgaatgcagaatgaaagataaatccacacgggatgtgaggccaaacgtgattctaggtcggtgggcgatccttgctatggtactgggaagtgttctgctactgtgtatactgttcacgtgtttctgtgtcaccgcgaagcggactgttaaaaaatgcttcccagaggacatcgcccagcagaatcttatcgtgtccaacacagaaggcccaggcgaagaggtcacagaagcaaatatccgtctgccaatgcagacttctaacatttgcgatacctctatgtcggtaggtactgtgggcggtcagggtattaaaacacaacaatcgttcgagatggtgaagggaggttacactctggattccaacaagggagggggtcaccagaccctcgaatcagtgaagggcgttggacaaggcgataccggaagatacgcatatacagattggcagagtttcacacagccaaggctgggtgagaaagtgtacctctgcggccaagacgaggaacacaagcactgtgaggattatgtctgttcttacaactacgaaggaaaggggtcattagccggatccgtgggatgttgtagcgaccgccaagaagaggaaggactggaattcctggaccacctagagcccaaatttcgaacacttgctaagacatgcattaagaagtag

SEQ ID NO: 215331 - DNA, 2685 bp, Artificial Sequence
  derived and/or modified sequence
atggctctggccagcgctgccccaggttccatattttgcaagcagttgttattttccctgctcgtcctgaccttattatgcgatgcttgccaaaaagtctaccttcgggtgccaagccatctgcaagctgaaaccctcgtgggaaaggtgaacctggaagagtgtcttaaatccgcgtcactgatccggtccagtgatcctgcatttcggatactggaggatggctcaatatataccactcatgacctaattctgtcctctgagcgcaagtccttcagcatttttctctccgatggacagaggagggagcagcaggaaattaaagttgtcttgagtgccagggaaaacaaaagcccaaagaaaaggcacactaaagatacggctctgaagcgtagcaaacgacgatgggcccctatcccagccagtttgatggaaaactctctaggcccattcccccagcatgttcagcagatccagagtgacgccgcacagaattacaccatcttctactcaatctctggccctggcgtcgataaggaacctttcaatttgttctatatcgagaaagacacaggcgacattttctgtaccaggagtattgacagagagaaatatgaacagttcgccctgtacggatacgctaccaccgctgacggctatgccccagaataccccctgcctcttatcataaagatcgaagacgataatgacaatgccccttattttgaacatcgggtgactatattcaccgtgccagaaaattgcaggagcgggacgtctgtcgggaaggtcacggccacggatcttgatgaaccagacaccctccatacgagattaaagtataagatcctccagcagatcccagatcaccccaaacacttttcaatacaccctgataccggcgttatcaccacgacaactccctttctggatcgtgagaagtgtgatacttaccagcttatcatggaagtccgggatatgggcggacagcctttcgggctcttcaatacaggcaccattactatcagccttgaggacgagaacgataatcctccgagcttcactgagacttcatatgtcaccgaggtcgaggaaaatcgcattgatgttgagatactcagaatgaaagtacaggatcaagacttacccaataccccgcattctaaggcagtgtacaaaatcctgcagggtaacgagaatggaaattttatcatctccaccgaccccaacacaaatgagggagtgctctgtgtggtaaagcctctgaattacgaagtgaacagacaggttattctgcaagtcggtgtaattaacgaagcacagttttcgaaggctgctagctctcagacacctactatgtgtacaacaacagtcaccgtcaaaatcatcgactctgacgaagggcctgagtgccaccccccagtgaaagtgattcagtcccaggacggtttccctgctggacaagagctgctaggttataaggccctcgatccagaaatcagctccggggagggcctacgctaccaaaagctgggtgacgaggacaattggttcgagataaatcaacacaccggggacttgcgaactctcaaagtcctggatcgagaaagtaaatttgttaagaacaatcagtataatattagcgtggttgctgtagacgctgtcggacgaagttgcacaggcaccctagtggtgcacctcgacgactacaatgatcacgcacctcagatcgataaggaagtgaccatttgccagaacaacgaggactttgcagtgcttaagcccgtggaccccgatgggccagaaaatggccctccttttcagttttttctggacaattccgcttctaaaaattggaatattgaggagaaggacgggaagacggctatcctcagacaacgccagaaccttgattataattattatagtgttcccatccagataaaggaccggcacggtctggtggctacacacatgttgactgtccgggtgtgtgattgtagcactccatcggagtgtcgtatgaaggataagagcacaagagacgtaaggcctaacgttattctgggcaggtgggccattctggctatggtcctagggagcgttctcctgctttgcatcctgttcacctgtttttgtgtgaccgctaagaggaccgttaagaagtgctttcctgaagatatagcccagcagaacctgatagtgagtaatacagagggcccaggtgaggaagttactgaggcaaacattagactgcctatgcagacttccaatatatgtgatacgtctatgtctgtcggtactgtcggaggtcaaggcattaaaacgcagcaatcctttgagatggtcaagggcggttataccctggacagtaataaaggtgggggtcaccagacccttgagtctgtcaagggcgttggccaaggcgatacagggaggtacgcctacaccgactggcagagttttacccagcctagattaggggaaaaggtctacctgtgcggacaggatgaagaacataaacactgtgaagactacgtatgctcatataattacgagggcaaaggcagcttggccggatcagttggctgctgtagcgataggcaagaggaggaagggttggaatttctggatcacctggagcctaaattccgaacgctcgcaaagacgtgcatcaagaagtag

SEQ ID NO: 215332 - DNA, 2685 bp, Artificial Sequence
  derived and/or modified sequence
atggccctggccagcgccgcccccggcagcatcttctgcaagcagctgctgttcagcctgctggtgctgaccctgctgtgcgacgcctgccagaaggtgtacctgagagtgcccagccacctgcaggccgagaccctggtgggcaaggtgaacctggaggagtgcctgaagagcgccagcctgatcagaagcagcgaccccgccttcagaatcctggaggacggcagcatctacaccacccacgacctgatcctgagcagcgagagaaagagcttcagcatcttcctgagcgacggccagagaagagagcagcaggagatcaaggtggtgctgagcgccagagagaacaagagccccaagaagagacacaccaaggacaccgccctgaagagaagcaagagaagatgggcccccatccccgccagcctgatggagaacagcctgggccccttcccccagcacgtgcagcagatccagagcgacgccgcccagaactacaccatcttctacagcatcagcggccccggcgtggacaaggagcccttcaacctgttctacatcgagaaggacaccggcgacatcttctgcaccagaagcatcgacagagagaagtacgagcagttcgccctgtacggctacgccaccaccgccgacggctacgcccccgagtaccccctgcccctgatcatcaagatcgaggacgacaacgacaacgccccctacttcgagcacagagtgaccatcttcaccgtgcccgagaactgcagaagcggcaccagcgtgggcaaggtgaccgccaccgacctggacgagcccgacaccctgcacaccagactgaagtacaagatcctgcagcagatccccgaccaccccaagcacttcagcatccaccccgacaccggcgtgatcaccaccaccacccccttcctggacagagagaagtgcgacacctaccagctgatcatggaggtgagagacatgggcggccagcccttcggcctgttcaacaccggcaccatcaccatcagcctggaggacgagaacgacaacccccccagcttcaccgagaccagctacgtgaccgaggtggaggagaacagaatcgacgtggagatcctgagaatgaaggtgcaggaccaggacctgcccaacaccccccacagcaaggccgtgtacaagatcctgcagggcaacgagaacggcaacttcatcatcagcaccgaccccaacaccaacgagggcgtgctgtgcgtggtgaagcccctgaactacgaggtgaacagacaggtgatcctgcaggtgggcgtgatcaacgaggcccagttcagcaaggccgccagcagccagacccccaccatgtgcaccaccaccgtgaccgtgaagatcatcgacagcgacgagggccccgagtgccacccccccgtgaaggtgatccagagccaggacggcttccccgccggccaggagctgctgggctacaaggccctggaccccgagatcagcagcggcgagggcctgagataccagaagctgggcgacgaggacaactggttcgagatcaaccagcacaccggcgacctgagaaccctgaaggtgctggacagagagagcaagttcgtgaagaacaaccagtacaacatcagcgtggtggccgtggacgccgtgggcagaagctgcaccggcaccctggtggtgcacctggacgactacaacgaccacgccccccagatcgacaaggaggtgaccatctgccagaacaacgaggacttcgccgtgctgaagcccgtggaccccgacggccccgagaacggcccccccttccagttcttcctggacaacagcgccagcaagaactggaacatcgaggagaaggacggcaagaccgccatcctgagacagagacagaacctggactacaactactacagcgtgcccatccagatcaaggacagacacggcctggtggccacccacatgctgaccgtgagagtgtgcgactgcagcacccccagcgagtgcagaatgaaggacaagagcaccagagacgtgagacccaacgtgatcctgggcagatgggccatcctggccatggtgctgggcagcgtgctgctgctgtgcatcctgttcacctgcttctgcgtgaccgccaagagaaccgtgaagaagtgcttccccgaggacatcgcccagcagaacctgatcgtgagcaacaccgagggccccggcgaggaggtgaccgaggccaacatcagactgcccatgcagaccagcaacatctgcgacaccagcatgagcgtgggcaccgtgggcggccagggcatcaagacccagcagagcttcgagatggtgaagggcggctacaccctggacagcaacaagggcggcggccaccagaccctggagagcgtgaagggcgtgggccagggcgacaccggcagatacgcctacaccgactggcagagcttcacccagcccagactgggcgagaaggtgtacctgtgcggccaggacgaggagcacaagcactgcgaggactacgtgtgcagctacaactacgagggcaagggcagcctggccggcagcgtgggctgctgcagcgacagacaggaggaggagggcctggagttcctggaccacctggagcccaagttcagaaccctggccaagacctgcatcaagaagtag

SEQ ID NO: 215333 - DNA, 4225 bp, Artificial Sequence
  derived and/or modified sequence
acttgtaggaaagcctctttgcatttagacgtaattgaactggaaggaaggagactggccagggaatagggggaaagaaattctcccgttgctcctcctactgtttatcacttgcctccggactgtcttccaaaccaagctcagctgcatcaaggtggcagcagaataccctgtgcaagtgccagcgtcttcttagccgctctgtgcatcccaggctgccctgttatctggccaccgtccctggccattgggactgcttctgatggctctggcctctgctgccccagggagcatcttctgtaagcagctccttttctctctcctggttttaacattactttgcgatgcttgtcagaaagtttatcttcgagttccttctcatcttcaggctgaaacacttgtaggcaaagtgaatctggaggagtgtctcaagtcggccagcctaatccggtccagtgaccctgccttcagaattctagaagatggctcaatttacacaacacatgacctcattttgtcttctgaaaggaaaagtttttccattttcctttcagatggtcagagacgggaacaacaagagataaaagttgtactgtcagcaagagaaaacaagtctcctaagaagagacataccaaagacacagccctcaagcgcagcaagagacgatgggctcctattccagcttcattgatggagaactcgttgggtccatttccacaacacgttcagcagatccaatctgatgctgcacagaattacaccatcttttattccataagtgggccaggcgtggacaaagaacccttcaatttgttttacatagagaaagacactggggatatcttttgtacaaggagcattgaccgtgagaaatatgaacagtttgcgttatatggctatgcaacaactgcagatggctatgcaccagaatatccactccctttgatcatcaaaattgaagatgataatgataacgccccatattttgaacacagagtgactatctttactgtgcctgaaaattgccgatccggaacttcagtgggaaaagtgaccgccacagaccttgacgaacctgacactctccatactcgtctgaaatataaaatcttacaacaaatcccagatcatccaaagcatttctccatacacccagataccggtgtcatcaccacaactacaccttttctggatagagaaaaatgtgatacttaccagttaataatggaagtgcgagacatgggtggtcagcctttcggtttatttaatacaggaacaattactatttcacttgaggatgaaaatgacaatccaccatctttcacagaaacttcttatgttacagaagtagaagaaaacagaattgacgtggagattttacgaatgaaggtacaggatcaggatttgccaaacactcctcactcaaaggctgtatacaaaatcctacaaggaaatgaaaatggaaacttcataattagcacagatccaaatacaaatgaaggagtgctgtgtgttgtcaagccattgaactatgaagtcaatcgccaagttattttgcaagttggtgtcattaacgaggcacaattctctaaagcagcgagctcacaaactcctacaatgtgcactacaactgtcaccgttaaaattatagacagtgatgagggccctgaatgccaccctccagtgaaagttattcagagtcaagatggcttcccagctggccaagaactccttggatacaaagcactggacccggaaatatccagtggtgaaggcttaaggtatcagaagttaggggatgaagataactggtttgaaattaatcaacacactggcgacttgagaactctaaaagtactagatagagaatccaaatttgtaaaaaacaaccaatacaatatttcagttgttgcagtggatgcagttggccgatcttgcactggaacattagtagttcatttggatgattacaacgatcacgcacctcaaattgacaaagaagtgaccatttgtcagaataatgaggattttgctgttctgaaacctgtagatccagatggacctgaaaatggaccaccttttcaattctttctggataattctgccagtaaaaactggaacatagaagaaaaggatggtaaaactgccattcttcgtcaacggcaaaatcttgattataactattattctgtgcctattcaaataaaagacaggcatggtttagttgcaacacatatgttaacagtgagagtatgtgactgttcaactccatctgagtgtagaatgaaggataaaagtacaagagacgttagaccaaatgtaatacttggaagatgggctattcttgctatggtgttgggttctgtattgttattatgtattctgtttacatgtttctgtgtcactgctaagagaacagtcaagaaatgttttccagaagacatagcccagcaaaatttaattgtatcaaatactgaaggacctggagaagaagtaacggaagcaaatattagactccccatgcagacatccaacatttgtgacacaagcatgtctgttggtactgttggtggccagggaatcaaaacacagcaaagttttgagatggtcaaaggaggctacactttggattccaacaaaggaggtggacatcagaccttggagtccgtcaagggagtggggcagggagatactggcagatatgcgtacacggactggcagagtttcacccaacctcggcttggcgaaaaggtgtatttgtgtggacaagatgaggagcataaacattgtgaagactacgtttgttcgtataactatgaaggcaaaggttctctggccggctcagtaggttgctgcagcgatcggcaggaagaagagggactggagtttctagatcacctggaacccaaatttaggacattagcaaagacatgcatcaagaaataaatgtgccttttaatagtgtaatatccacagatgcataagtaggaatttattacttgcagaatgttagcagcatctgctaatgtttttgtttatggaggtaaactttgtcatgtataggtaagggtactataaatatgagattcccctacattctccttgtctggtataacttccatgttctctagaaatcaaggttttgtttgttaattctcttttatatgcatgtatatattgcccttttcacgactgtactgtacaccttcttgcaccttttatttgcaaactgatgttactttttgtgctgtggaagagcatttgggaaagctgggtattatagaggccaatgaaagatgaatttgcattgtagatgtacgaattaaatatgttcttcaaaatcttggggagaattatgttcttagaacatagttggtgccagataattgcattctctccacctgagtggtttaaaaaggacttttaagtattcttcagtgcaatcttcagttttgtgattaagttcatttctcttttacacttttgtactcctcagagcagtgctcccagcattgttttctttcaggatccttcagagctcagtccctggacctctgcccatgtggatttgttgttaggtcactccaacttctagggttcttggaaagataaggaccagaacaagctcatagcaaattgaggggcagagattttatgaagattacatgagaagatttccatgaaagaattgcagccctgaggtccatgggttgacttatgctcacaaatatgtttcgtttgctcaacatggtttactactaacattttaaaaatataaatactttagcaaaaacattcactcttgagtttgacataggcctgccttatctgtggttgccacctgccatctccaagcatttggacaactagccctgatgcattaggctgcaactctgatatacagagactagcaccttgaatatgccagaaattgaattaccatctgtattagaacttaagactcagcctaaatttacagttactttaagaaaatgggcagtcagaattagggactagaatgtatatgagaaacccccactctactaaaaatataagaaattagccggacatggtggcgaatgactgtaatcccagctactcaggaggctgaggcaggagaatcgcttgaatccaggaggcggaggttgcagtgagccgagattgccactgcactccagcctgggcaacaagagcgaaactccgtctcaaaaaaaaaaaaaaaaa

SEQ ID NO: 215334 - protein, 901 aa, Artificial Sequence
  derived and/or modified sequence
MEAARPSGSWNGALCRLLLLTLAILIFASDACKNVTLHVPSKLDAEKLVGRVNLKECFTAANLIHSSDPDFQILEDGSVYTTNTILLSSEKRSFTILLSNTENQEKKKIFVFLEHQTKVLKKRHTKEKVLRRAKRRWAPIPCSMLENSLGPFPLFLQQVQSDTAQNYTIYYSIRGPGVDQEPRNLFYVERDTGNLYCTRPVDREQYESFEIIAFATTPDGYTPELPLPLIIKIEDENDNYPIFTEETYTFTIFENCRVGTTVGQVCATDKDEPDTMHTRLKYSIIGQVPPSPTLFSMHPTTGVITTTSSQLDRELIDKYQLKIKVQDMDGQYFGLQTTSTCIINIDDVNDHLPTFTRTSYVTSVEENTVDVEILRVTVEDKDLVNTANWRANYTILKGNENGNFKIVTDAKTNEGVLCVVKPLNYEEKQQMILQIGVVNEAPFSREASPRSAMSTATVTVNVEDQDEGPECNPPIQTVRMKENAEVGTTSNGYKAYDPETRSSSGIRYKKLTDPTGWVTIDENTGSIKVFRSLDREAETIKNGIYNITVLASDQGGRTCTGTLGIILQDVNDNSPFIPKKTVIICKPTMSSAEIVAVDPDEPIHGPPFDFSLESSTSEVQRMWRLKAINDTAARLSYQNDPPFGSYVVPITVRDRLGMSSVTSLDVTLCDCITENDCTHRVDPRIGGGGVQLGKWAILAILLGIALLFCILFTLVCGASGTSKQPKVIPDDLAQQNLIVSNTEAPGDDKVYSANGFTTQTVGASAQGVCGTVGSGIKNGGQETIEMVKGGHQTSESCRGAGHHHTLDSCRGGHTEVDNCRYTYSEWHSFTQPRLGEKVYLCNQDENHKHAQDYVLTYNYEGRGSVAGSVGCCSERQEEDGLEFLDNLEPKFRTLAEACMKR

SEQ ID NO: 215335 - protein, 914 aa, Artificial Sequence
  derived and/or modified sequence
MEAARPSGSWNGALCRLLLLTLAILIFASDACKNVTLHVPSKLDAEKLVGRVNLKECFTAANLIHSSDPDFQILEDGSVYTTNTILLSSEKRSFTILLSNTENQEKKKIFVFLEHQTKISLLVPWLCLVAEVLKKRHTKEKVLRRAKRRWAPIPCSMLENSLGPFPLFLQQVQSDTAQNYTIYYSIRGPGVDQEPRNLFYVERDTGNLYCTRPVDREQYESFEIIAFATTPDGYTPELPLPLIIKIEDENDNYPIFTEETYTFTIFENCRVGTTVGQVCATDKDEPDTMHTRLKYSIIGQVPPSPTLFSMHPTTGVITTTSSQLDRELIDKYQLKIKVQDMDGQYFGLQTTSTCIINIDDVNDHLPTFTRTSYVTSVEENTVDVEILRVTVEDKDLVNTANWRANYTILKGNENGNFKIVTDAKTNEGVLCVVKPLNYEEKQQMILQIGVVNEAPFSREASPRSAMSTATVTVNVEDQDEGPECNPPIQTVRMKENAEVGTTSNGYKAYDPETRSSSGIRYKKLTDPTGWVTIDENTGSIKVFRSLDREAETIKNGIYNITVLASDQGGRTCTGTLGIILQDVNDNSPFIPKKTVIICKPTMSSAEIVAVDPDEPIHGPPFDFSLESSTSEVQRMWRLKAINDTAARLSYQNDPPFGSYVVPITVRDRLGMSSVTSLDVTLCDCITENDCTHRVDPRIGGGGVQLGKWAILAILLGIALLFCILFTLVCGASGTSKQPKVIPDDLAQQNLIVSNTEAPGDDKVYSANGFTTQTVGASAQGVCGTVGSGIKNGGQETIEMVKGGHQTSESCRGAGHHHTLDSCRGGHTEVDNCRYTYSEWHSFTQPRLGEKVYLCNQDENHKHAQDYVLTYNYEGRGSVAGSVGCCSERQEEDGLEFLDNLEPKFRTLAEACMKR

SEQ ID NO: 215336 - protein, 667 aa, Artificial Sequence
  derived and/or modified sequence
MKMITTQFLQKKLILLQFLKIAEWGTTVGQVCATDKDEPDTMHTRLKYSIIGQVPPSPTLFSMHPTTGVITTTSSQLDRELIDKYQLKIKVQDMDGQYFGLQTTSTCIINIDDVNDHLPTFTRTSYVTSVEENTVDVEILRVTVEDKDLVNTANWRANYTILKGNENGNFKIVTDAKTNEGVLCVVKPLNYEEKQQMILQIGVVNEAPFSREASPRSAMSTATVTVNVEDQDEGPECNPPIQTVRMKENAEVGTTSNGYKAYDPETRSSSGIRYKKLTDPTGWVTIDENTGSIKVFRSLDREAETIKNGIYNITVLASDQGGRTCTGTLGIILQDVNDNSPFIPKKTVIICKPTMSSAEIVAVDPDEPIHGPPFDFSLESSTSEVQRMWRLKAINDTAARLSYQNDPPFGSYVVPITVRDRLGMSSVTSLDVTLCDCITENDCTHRVDPRIGGGGVQLGKWAILAILLGIALLFCILFTLVCGASGTSKQPKVIPDDLAQQNLIVSNTEAPGDDKVYSANGFTTQTVGASAQGVCGTVGSGIKNGGQETIEMVKGGHQTSESCRGAGHHHTLDSCRGGHTEVDNCRYTYSEWHSFTQPRLGEKVYLCNQDENHKHAQDYVLTYNYEGRGSVAGSVGCCSERQEEDGLEFLDNLEPKFRTLAEACMKR

SEQ ID NO: 215337 - DNA, 2706 bp, Artificial Sequence
  derived and/or modified sequence
atggaggccgccagacccagcggcagctggaacggcgccctgtgcagactgctgctgctgaccctggccatcctgatcttcgccagcgacgcctgcaagaacgtgaccctgcacgtgcccagcaagctggacgccgagaagctggtgggcagagtgaacctgaaggagtgcttcaccgccgccaacctgatccacagcagcgaccccgacttccagatcctggaggacggcagcgtgtacaccaccaacaccatcctgctgagcagcgagaagagaagcttcaccatcctgctgagcaacaccgagaaccaggagaagaagaagatcttcgtgttcctggagcaccagaccaaggtgctgaagaagagacacaccaaggagaaggtgctgagaagagccaagagaagatgggcccccatcccctgcagcatgctggagaacagcctgggccccttccccctgttcctgcagcaggtgcagagcgacaccgcccagaactacaccatctactacagcatcagaggccccggcgtggaccaggagcccagaaacctgttctacgtggagagagacaccggcaacctgtactgcaccagacccgtggacagagagcagtacgagagcttcgagatcatcgccttcgccaccacccccgacggctacacccccgagctgcccctgcccctgatcatcaagatcgaggacgagaacgacaactaccccatcttcaccgaggagacctacaccttcaccatcttcgagaactgcagagtgggcaccaccgtgggccaggtgtgcgccaccgacaaggacgagcccgacaccatgcacaccagactgaagtacagcatcatcggccaggtgccccccagccccaccctgttcagcatgcaccccaccaccggcgtgatcaccaccaccagcagccagctggacagagagctgatcgacaagtaccagctgaagatcaaggtgcaggacatggacggccagtacttcggcctgcagaccaccagcacctgcatcatcaacatcgacgacgtgaacgaccacctgcccaccttcaccagaaccagctacgtgaccagcgtggaggagaacaccgtggacgtggagatcctgagagtgaccgtggaggacaaggacctggtgaacaccgccaactggagagccaactacaccatcctgaagggcaacgagaacggcaacttcaagatcgtgaccgacgccaagaccaacgagggcgtgctgtgcgtggtgaagcccctgaactacgaggagaagcagcagatgatcctgcagatcggcgtggtgaacgaggcccccttcagcagagaggccagccccagaagcgccatgagcaccgccaccgtgaccgtgaacgtggaggaccaggacgagggccccgagtgcaacccccccatccagaccgtgagaatgaaggagaacgccgaggtgggcaccaccagcaacggctacaaggcctacgaccccgagaccagaagcagcagcggcatcagatacaagaagctgaccgaccccaccggctgggtgaccatcgacgagaacaccggcagcatcaaggtgttcagaagcctggacagagaggccgagaccatcaagaacggcatctacaacatcaccgtgctggccagcgaccagggcggcagaacctgcaccggcaccctgggcatcatcctgcaggacgtgaacgacaacagccccttcatccccaagaagaccgtgatcatctgcaagcccaccatgagcagcgccgagatcgtggccgtggaccccgacgagcccatccacggcccccccttcgacttcagcctggagagcagcaccagcgaggtgcagagaatgtggagactgaaggccatcaacgacaccgccgccagactgagctaccagaacgacccccccttcggcagctacgtggtgcccatcaccgtgagagacagactgggcatgagcagcgtgaccagcctggacgtgaccctgtgcgactgcatcaccgagaacgactgcacccacagagtggaccccagaatcggcggcggcggcgtgcagctgggcaagtgggccatcctggccatcctgctgggcatcgccctgctgttctgcatcctgttcaccctggtgtgcggcgccagcggcaccagcaagcagcccaaggtgatccccgacgacctggcccagcagaacctgatcgtgagcaacaccgaggcccccggcgacgacaaggtgtacagcgccaacggcttcaccacccagaccgtgggcgccagcgcccagggcgtgtgcggcaccgtgggcagcggcatcaagaacggcggccaggagaccatcgagatggtgaagggcggccaccagaccagcgagagctgcagaggcgccggccaccaccacaccctggacagctgcagaggcggccacaccgaggtggacaactgcagatacacctacagcgagtggcacagcttcacccagcccagactgggcgagaaggtgtacctgtgcaaccaggacgagaaccacaagcacgcccaggactacgtgctgacctacaactacgagggcagaggcagcgtggccggcagcgtgggctgctgcagcgagagacaggaggaggacggcctggagttcctggacaacctggagcccaagttcagaaccctggccgaggcctgcatgaagagatag

SEQ ID NO: 215338 - DNA, 2745 bp, Artificial Sequence
  derived and/or modified sequence
atggaggccgccagacccagcggcagctggaacggcgccctgtgcagactgctgctgctgaccctggccatcctgatcttcgccagcgacgcctgcaagaacgtgaccctgcacgtgcccagcaagctggacgccgagaagctggtgggcagagtgaacctgaaggagtgcttcaccgccgccaacctgatccacagcagcgaccccgacttccagatcctggaggacggcagcgtgtacaccaccaacaccatcctgctgagcagcgagaagagaagcttcaccatcctgctgagcaacaccgagaaccaggagaagaagaagatcttcgtgttcctggagcaccagaccaagatcagcctgctggtgccctggctgtgcctggtggccgaggtgctgaagaagagacacaccaaggagaaggtgctgagaagagccaagagaagatgggcccccatcccctgcagcatgctggagaacagcctgggccccttccccctgttcctgcagcaggtgcagagcgacaccgcccagaactacaccatctactacagcatcagaggccccggcgtggaccaggagcccagaaacctgttctacgtggagagagacaccggcaacctgtactgcaccagacccgtggacagagagcagtacgagagcttcgagatcatcgccttcgccaccacccccgacggctacacccccgagctgcccctgcccctgatcatcaagatcgaggacgagaacgacaactaccccatcttcaccgaggagacctacaccttcaccatcttcgagaactgcagagtgggcaccaccgtgggccaggtgtgcgccaccgacaaggacgagcccgacaccatgcacaccagactgaagtacagcatcatcggccaggtgccccccagccccaccctgttcagcatgcaccccaccaccggcgtgatcaccaccaccagcagccagctggacagagagctgatcgacaagtaccagctgaagatcaaggtgcaggacatggacggccagtacttcggcctgcagaccaccagcacctgcatcatcaacatcgacgacgtgaacgaccacctgcccaccttcaccagaaccagctacgtgaccagcgtggaggagaacaccgtggacgtggagatcctgagagtgaccgtggaggacaaggacctggtgaacaccgccaactggagagccaactacaccatcctgaagggcaacgagaacggcaacttcaagatcgtgaccgacgccaagaccaacgagggcgtgctgtgcgtggtgaagcccctgaactacgaggagaagcagcagatgatcctgcagatcggcgtggtgaacgaggcccccttcagcagagaggccagccccagaagcgccatgagcaccgccaccgtgaccgtgaacgtggaggaccaggacgagggccccgagtgcaacccccccatccagaccgtgagaatgaaggagaacgccgaggtgggcaccaccagcaacggctacaaggcctacgaccccgagaccagaagcagcagcggcatcagatacaagaagctgaccgaccccaccggctgggtgaccatcgacgagaacaccggcagcatcaaggtgttcagaagcctggacagagaggccgagaccatcaagaacggcatctacaacatcaccgtgctggccagcgaccagggcggcagaacctgcaccggcaccctgggcatcatcctgcaggacgtgaacgacaacagccccttcatccccaagaagaccgtgatcatctgcaagcccaccatgagcagcgccgagatcgtggccgtggaccccgacgagcccatccacggcccccccttcgacttcagcctggagagcagcaccagcgaggtgcagagaatgtggagactgaaggccatcaacgacaccgccgccagactgagctaccagaacgacccccccttcggcagctacgtggtgcccatcaccgtgagagacagactgggcatgagcagcgtgaccagcctggacgtgaccctgtgcgactgcatcaccgagaacgactgcacccacagagtggaccccagaatcggcggcggcggcgtgcagctgggcaagtgggccatcctggccatcctgctgggcatcgccctgctgttctgcatcctgttcaccctggtgtgcggcgccagcggcaccagcaagcagcccaaggtgatccccgacgacctggcccagcagaacctgatcgtgagcaacaccgaggcccccggcgacgacaaggtgtacagcgccaacggcttcaccacccagaccgtgggcgccagcgcccagggcgtgtgcggcaccgtgggcagcggcatcaagaacggcggccaggagaccatcgagatggtgaagggcggccaccagaccagcgagagctgcagaggcgccggccaccaccacaccctggacagctgcagaggcggccacaccgaggtggacaactgcagatacacctacagcgagtggcacagcttcacccagcccagactgggcgagaaggtgtacctgtgcaaccaggacgagaaccacaagcacgcccaggactacgtgctgacctacaactacgagggcagaggcagcgtggccggcagcgtgggctgctgcagcgagagacaggaggaggacggcctggagttcctggacaacctggagcccaagttcagaaccctggccgaggcctgcatgaagagatag

SEQ ID NO: 215339 - DNA, 5124 bp, Artificial Sequence
  derived and/or modified sequence
ggcttctgctgggcagggccggctgttaatctcgcctggcggagcggacaccggggcgtggtgggggagatgggccttataggtggcgtccgctggtgagaaacaccttgcgcaggtaaaagggtggcggcgagagggagttcccacccgtggctttcttagagaaatgaagtcttaagtcttaaatagacaacaaggaggggccgatcggtgtcttttggacgcgtctggagcccctccctccgccaaaggaaaagccccttggatgagaggcaggcgcttcagagaagctaagaaaagcacctctccgcgcgccccacctcctccgcctcgcgctcctcctgagcagcgggcccagactgcgctccggccgcggccctcgccccgcggagccctcctaccccggcccgacgctcggcccgcgacctgccccgagccctctccatggaggcagcccgcccctccggctcctggaacggagccctctgccggctgctcctgctgaccctcgcgatcttaatatttgccagtgatgcctgcaaaaatgtgacattacatgttccctccaaactagatgccgagaaacttgttggtagagttaacctgaaagagtgctttacagctgcaaatctaattcattcaagtgatcctgacttccaaattttggaggatggttcagtctatacaacaaatactattctattgtcctcggagaagagaagttttaccatattactttccaacactgagaaccaagaaaagaagaaaatatttgtctttttggagcatcaaacaaaggtcctaaagaaaagacatactaaagaaaaagttctaaggcgcgccaagagaagatgggctccaattccttgttcgatgctagaaaactccttgggtccttttccacttttccttcaacaggttcaatctgacacggcccaaaactataccatatactattccataagaggtcctggagttgaccaagaacctcggaatttattttatgtggagagagacactggaaacttgtattgtactcgtcctgtagatcgtgagcagtatgaatcttttgagataattgcctttgcaacaactccagatgggtatactccagaacttccactgcccctaataatcaaaatagaggatgaaaatgataactacccaatttttacagaagaaacttatacttttacaatttttgaaaattgcagagtgggcactactgtgggacaagtgtgtgctactgacaaagatgagcctgacacgatgcacacacgcctgaagtactccatcattgggcaggtgccaccatcacccaccctattttctatgcatccaactacaggcgtgatcaccacaacatcatctcagctagacagagagttaattgacaagtaccagttgaaaataaaagtacaagacatggatggtcagtattttggtctacagacaacttcaacttgtatcattaacattgatgatgtaaatgaccacttgccaacatttactcgtacttcttatgtgacatcagtggaagaaaatacagttgatgtggaaatcttacgagttactgttgaggataaggacttagtgaatactgctaactggagagctaattataccattttaaagggcaatgaaaatggcaattttaaaattgtaacagatgccaaaaccaatgaaggagttctttgtgtagttaagcctttgaattatgaagaaaagcaacagatgatcttgcaaattggtgtagttaatgaagctccattttccagagaggctagtccaagatcagccatgagcacagcaacagttactgttaatgtagaagatcaggatgagggccctgagtgtaaccctccaatacagactgttcgcatgaaagaaaatgcagaagtgggaacaacaagcaatggatataaagcatatgacccagaaacaagaagtagcagtggcataaggtataagaaattaactgatccaacagggtgggtcaccattgatgaaaatacaggatcaatcaaagttttcagaagcctggatagagaggcagagaccatcaaaaatggcatatataatattacagtccttgcatcagaccaaggagggagaacatgtacggggacactgggcattatacttcaagacgtgaatgataacagcccattcatacctaaaaagacagtgatcatctgcaaacccaccatgtcatctgcggagattgttgcggttgatcctgatgagcctatccatggcccaccctttgactttagtctggagagttctacttcagaagtacagagaatgtggagactgaaagcaattaatgatacagcagcacgtctttcctatcagaatgatcctccatttggctcatatgtagtacctataacagtgagagatagacttggcatgtctagtgtcacttcattggatgttacactgtgtgactgcattaccgaaaatgactgcacacatcgtgtagatccaaggattggcggtggaggagtacaacttggaaagtgggccatccttgcaatattgttgggcatagcattgctcttttgcatcctgtttacgctggtctgtggggcttctgggacgtctaaacaaccaaaagtaattcctgatgatttagcccagcagaacctaattgtatcaaacacagaagctcctggagatgacaaagtgtattctgcgaatggcttcacaacccaaactgtgggcgcttctgctcagggagtttgtggcaccgtgggatcaggaatcaaaaacggaggtcaggagaccatcgaaatggtgaaaggaggacaccagacctcggaatcctgccggggggctggccaccatcacaccctggactcctgcaggggaggacacacggaggtggacaactgcagatacacttactcggagtggcacagttttactcagccccgtcttggtgaaaaagtgtatctgtgtaatcaagatgaaaatcacaagcatgcccaagactatgtcctgacatataactatgaaggaagaggatcggtggctgggtctgtaggttgttgcagtgaacgacaagaagaagatgggcttgaatttttggataatttggagcccaaatttaggacactagcagaagcatgcatgaagagatgagtgtgttctaataagtctctgaaagccagtggctttatgacttttaaaaaaaattacaaaccaagaattttttaaagcagaagatgctatttgtgggggtttttctctcattatttggatggaatctctttggtcaaatgcacatttacagagagacactataaacaagtacacaaatttttcaatttttacatatttttaaattacttatcttctatccaaggaggtctacagagaaattaaagtctgccttatttgttacatttgggtataatgacaacagccaatttatagtgcaataaaatgtaattaattcaagtccttattatagactatttgaagcacaacctaatggaaaattgtagagaccttgctttaacattatctccagttaattaagtgttcatgtggtgcttggaaactgttgttttcctgaacatctaaagtgtgtagactgcattcttgctattattttattcttgtaatgtgaccttttcactgtgcaaagggagatttctagccaggcattgactattacaatttcattttggtggagtttagttttaggttttattgtatataaaatcctgcactgaatctgtgtctcctctgttacctacttttgccagtgaaatttaagttttaaaatactttcagaatgtatttttactactgcaagtttttggtctttaaaatgtcaagtagcatctctctctttctctctgtctctttctgtttctctctccagttttttttttttttttaatttccatatgggctaaagaatccaaatattttaaaaatctgtctctcttttcttctctcataaagtgaattattccttttttttgttttatgtaagtgtatatattcttagtttttcttgaaatcattgtaatgttaactttgttgtttcaaatatcttggtgattgcttcattatctcttcaacaaaaaaaacctttaattttgccattgaaactgtagaactatgccatgcttttattagaagcagtgctctgtgttaacaacaagaatggtgtaattagaattgggatgtggatatttactgtatgacaacacatttacagttctgtaatgcaaggatgcagtttaaaaatgtgaagtagtgatggtttttgaaataagctttaaaatatagggatcttgaaggctccctggggtaactattttataacttagataaaatggctagtcatatctgtgtgtttgtaaagttatttttttaatattttaagattacaattttaacaaatgtagaaatgagccaaactatttaaattttaaaacagtaaaacaaaatgaaacttaatagctcacaaaattccagtccatgtttcatgacttattttagtcaatgaattttctatttatactaaacatatggacattttaaatgtgtttctaatatttttgattatctataatgtgcctgtcttcaattcacaagattgggttataacaattatttgccagattaacactagggaattatttgataaccagcttatcttatcagtagttttattgctgatcaggcaaaaatagttttccaaagttatttttaataaagtatatacaaaattcttatatattactagtcatgataaagtaaattaagcagtttttaaaacttagtgtgagtttgttcatcacaggtctgatatgagtttaagggatttcgcactccctgaatcagagaagtaagaccccttccttagattcctgttatacattttttaaaatgtagagtttgttttggagacattttcagtgcattgttattgccatatttatataatatgactattctaaaggctgtgaggccatggggtattggttaagttgcttgcttttgctttgtccattttcatcattttaaaatgggggataataacagaacttgtttcctagggccattgtaagtcacttgaataaaaaatagttttgaagc

SEQ ID NO: 215340 - DNA, 3005 bp, Artificial Sequence
  derived and/or modified sequence
agactgcgctccggccgcggccctcgccccgcggagccctcctaccccggcccgacgctcggcccgcgacctgccccgagccctctccatggaggcagcccgcccctccggctcctggaacggagccctctgccggctgctcctgctgaccctcgcgatcttaatatttgccagtgatgcctgcaaaaatgtgacattacatgttccctccaaactagatgccgagaaacttgttggtagagttaacctgaaagagtgctttacagctgcaaatctaattcattcaagtgatcctgacttccaaattttggaggatggttcagtctatacaacaaatactattctattgtcctcggagaagagaagttttaccatattactttccaacactgagaaccaagaaaagaagaaaatatttgtctttttggagcatcaaacaaagatctctctgttggttccctggctctgcctagttgctgaggtcctaaagaaaagacatactaaagaaaaagttctaaggcgcgccaagagaagatgggctccaattccttgttcgatgctagaaaactccttgggtccttttccacttttccttcaacaggttcaatctgacacggcccaaaactataccatatactattccataagaggtcctggagttgaccaagaacctcggaatttattttatgtggagagagacactggaaacttgtattgtactcgtcctgtagatcgtgagcagtatgaatcttttgagataattgcctttgcaacaactccagatgggtatactccagaacttccactgcccctaataatcaaaatagaggatgaaaatgataactacccaatttttacagaagaaacttatacttttacaatttttgaaaattgcagagtgggcactactgtgggacaagtgtgtgctactgacaaagatgagcctgacacgatgcacacacgcctgaagtactccatcattgggcaggtgccaccatcacccaccctattttctatgcatccaactacaggcgtgatcaccacaacatcatctcagctagacagagagttaattgacaagtaccagttgaaaataaaagtacaagacatggatggtcagtattttggtctacagacaacttcaacttgtatcattaacattgatgatgtaaatgaccacttgccaacatttactcgtacttcttatgtgacatcagtggaagaaaatacagttgatgtggaaatcttacgagttactgttgaggataaggacttagtgaatactgctaactggagagctaattataccattttaaagggcaatgaaaatggcaattttaaaattgtaacagatgccaaaaccaatgaaggagttctttgtgtagttaagcctttgaattatgaagaaaagcaacagatgatcttgcaaattggtgtagttaatgaagctccattttccagagaggctagtccaagatcagccatgagcacagcaacagttactgttaatgtagaagatcaggatgagggccctgagtgtaaccctccaatacagactgttcgcatgaaagaaaatgcagaagtgggaacaacaagcaatggatataaagcatatgacccagaaacaagaagtagcagtggcataaggtataagaaattaactgatccaacagggtgggtcaccattgatgaaaatacaggatcaatcaaagttttcagaagcctggatagagaggcagagaccatcaaaaatggcatatataatattacagtccttgcatcagaccaaggagggagaacatgtacggggacactgggcattatacttcaagacgtgaatgataacagcccattcatacctaaaaagacagtgatcatctgcaaacccaccatgtcatctgcggagattgttgcggttgatcctgatgagcctatccatggcccaccctttgactttagtctggagagttctacttcagaagtacagagaatgtggagactgaaagcaattaatgatacagcagcacgtctttcctatcagaatgatcctccatttggctcatatgtagtacctataacagtgagagatagacttggcatgtctagtgtcacttcattggatgttacactgtgtgactgcattaccgaaaatgactgcacacatcgtgtagatccaaggattggcggtggaggagtacaacttggaaagtgggccatccttgcaatattgttgggcatagcattgctcttttgcatcctgtttacgctggtctgtggggcttctgggacgtctaaacaaccaaaagtaattcctgatgatttagcccagcagaacctaattgtatcaaacacagaagctcctggagatgacaaagtgtattctgcgaatggcttcacaacccaaactgtgggcgcttctgctcagggagtttgtggcaccgtgggatcaggaatcaaaaacggaggtcaggagaccatcgaaatggtgaaaggaggacaccagacctcggaatcctgccggggggctggccaccatcacaccctggactcctgcaggggaggacacacggaggtggacaactgcagatacacttactcggagtggcacagttttactcagccccgtcttggtgaaaaagtgtatctgtgtaatcaagatgaaaatcacaagcatgcccaagactatgtcctgacatataactatgaaggaagaggatcggtggctgggtctgtaggttgttgcagtgaacgacaagaagaagatgggcttgaatttttggataatttggagcccaaatttaggacactagcagaagcatgcatgaagagatgagtgtgttctaataagtctctgaaagccagtggctttatgacttttaaaaaaaattacaaaccaagaattttttaaagcagaagatgctatttgtgggggtttttctctcattatttggatggaatctctttggtcaaatgcacatttacagagagacactataaacaagtac

SEQ ID NO: 215341 - DNA, 2706 bp, Artificial Sequence
  derived and/or modified sequence
atggaagctgctcggcctagcggtagctggaacggagcgttgtgcaggctccttctactgaccctggccattctaatttttgcgtctgacgcatgcaagaatgtgactctgcatgttccctccaaactggatgctgaaaagctcgtcggcagagtgaatctgaaggaatgtttcaccgcggcgaaccttattcactcgtctgacccagattttcagattcttgaagacggaagtgtgtacacgaccaataccatcctgctaagctctgagaagcggtcctttaccatcttgctatccaacacagaaaaccaggagaaaaaaaagatttttgtctttttggagcaccagaccaaggtcctgaaaaaaaggcacaccaaagagaaggtcctaaggcgcgcaaagaggcgttgggctcctattccctgctctatgctggaaaactccctggggccgttcccactcttcctgcagcaagttcaaagcgatactgctcagaattataccatatattatagcattcgtggccccggagtggatcaggaacccaggaatctgttttacgtggagcgcgacactggaaacctgtactgcaccagacccgtcgatcgcgagcaatacgaaagctttgaaatcatcgcgtttgccaccacacctgatggctacacgcctgaactcccactgccgcttatcattaaaattgaagatgagaacgacaactatcctatctttactgaagaaacttataccttcacaatatttgaaaactgccgagtgggcaccacagtgggccaagtctgcgctactgataaggatgagcccgacaccatgcatacccgccttaaatactctattattggacaggtaccaccttcacctacattgttcagcatgcatccaacaaccggagtaataaccacaacttcttctcagctcgaccgcgagctcattgataaatatcagctgaaaatcaaggtccaggatatggatggacagtacttcgggttacaaactacctcaacctgcattatcaacatagacgatgtcaacgaccacttacctacattcaccagaacctcatacgtaacctctgttgaggagaatactgtcgacgtggaaatactccgggtgacagtagaagataaagatctggtaaatactgccaattggcgcgctaattacacaatccttaaggggaatgaaaatggaaatttcaagatcgtgacagatgctaagactaatgaaggagtgttatgcgtcgtgaaacctctgaattatgaagagaagcagcagatgatcctccaaatcggtgtggtgaacgaggcaccattctctcgcgaggcaagccctcgcagtgctatgtctactgcaacagtcacagtgaacgtagaggatcaagatgaagggcccgagtgtaacccaccaatccaaacagttaggatgaaagaaaacgctgaggttggcacaacttctaacggctacaaggcgtatgaccccgaaacaagaagcagtagtggtattcgttataaaaagctgacggatccaaccgggtgggtcaccattgacgaaaacaccggatcaattaaagtattccgcagtctcgatagagaagctgaaactattaagaatggcatttataatataactgtgctggcatcagaccagggcgggcggacatgcactggtaccctgggaattattctgcaggacgtcaacgataactctccattcattccaaaaaagaccgtgattatatgtaagcctaccatgtccagtgctgaaattgttgcagtggatcccgacgaacccatacatggcccccctttcgacttcagcctggaaagcagcacctctgaggtccagaggatgtggagactgaaagcaataaacgacaccgcggccaggctaagctaccagaatgatcctccatttggcagttacgtcgtccccatcacggtgcgggatagactgggaatgagcagcgtcactagccttgacgtgacactgtgcgactgtatcactgaaaatgattgtacccatcgggtcgatccgcggattggggggggcggtgtgcagctaggcaagtgggcaatattggcaatattgctcggcatcgcactgctcttttgcatactctttactttggtttgcggcgcttcagggacgtccaaacagcccaaagtgattcctgacgatctcgcccagcagaacctaatcgtgagtaacactgaggccccgggtgacgacaaagtctacagcgcaaacggcttcactacccagactgtcggggcatccgctcagggcgtgtgcggaacagtgggcagcgggattaaaaacggcggacaagagacaattgagatggttaaggggggtcatcagacatccgagtcgtgtagaggagcaggacaccaccacactttagactcatgccgtgggggccacacagaggtggacaactgccggtacacctattcagagtggcactccttcacccagccgagattgggtgaaaaggtgtacctgtgcaatcaagatgagaatcataaacatgcccaggactacgtgctgacctataactacgaaggcagaggctccgtggcagggagcgttggctgttgctctgagcgccaggaggaggatggcctggagttcctggacaatcttgagcccaagtttcgcacgctggccgaggcctgcatgaagcggtag

SEQ ID NO: 215342 - DNA, 2745 bp, Artificial Sequence
  derived and/or modified sequence
atggaagcagctcgtccatccggtagttggaacggcgccctctgtcggctactcctgctgacactggcaattctgattttcgcatcagacgcgtgcaagaacgtcaccctgcatgtgcccagcaaactggatgctgaaaagctcgtcggcagggtgaacctcaaggagtgtttcaccgcagctaatctgattcatagtagtgatcctgacttccagatcctagaggacggctcagtatacaccacgaatacaatactgctttcttcagaaaaacggtctttcaccattctgctttccaatacagaaaatcaagagaagaaaaaaattttcgtctttcttgagcaccaaacaaaaattagtctgctggtgccctggctgtgccttgtagccgaggttctgaagaagcgccataccaaggagaaggtgctgcgtcgggctaagcgcagatgggctcctatcccctgttccatgttagaaaatagccttggcccctttcctctgtttctgcaacaggtacagagtgacacagcgcagaattacactatttattatagcatccggggccccggcgtagatcaagaaccaaggaatctgttctacgtcgaaagagacaccggtaacttatattgcacccggccggtggacagggaacagtatgaatctttcgagattatcgctttcgcaactacacccgatggatacaccccagagctacctctgccactcataatcaagatagaggacgagaatgacaactatccaatctttaccgaggaaacatatacattcactattttcgaaaactgcagagttggtaccacggtgggccaggtgtgtgccaccgataaagacgagccagatacaatgcacaccaggctgaagtacagcattatcggccaggtcccgccatctcctacgcttttcagcatgcacccaacgaccggcgtgataactacaacctcctctcagttggatagagaactgatcgataagtaccaattaaaaatcaaggttcaggatatggacggacagtatttcgggctgcagacaacatctacatgcatcattaacattgacgacgtgaacgaccatctgcctacctttacccgaacttcttatgtgacgtcagtggaggaaaatacagtggatgttgaaatactcagagtcacggtggaggacaaggatctggtgaacaccgctaactggcgggctaattataccattctaaaaggaaatgaaaatggaaatttcaaaatcgttactgacgcaaagactaacgaaggagtcctgtgtgtggtgaaaccgcttaattacgaggagaagcaacagatgatcttacaaatcggcgttgtgaatgaggcacctttctctcgagaggctagcccaaggtccgctatgagcacagctacagtaactgtgaatgtggaggatcaggatgaagggccggagtgcaacccgcccattcagacagttcgcatgaaggaaaacgccgaggtcggcactacatccaacggctataaagcttacgaccccgaaacacggagcagctccgggattagatacaaaaagctgaccgatccaaccggctgggtgacaattgatgaaaatacaggatcaatcaaagtatttcgctcactggacagggaagcagagaccattaaaaacggaatttacaatattactgtccttgcatctgatcagggaggaagaacctgtacaggcaccctgggaattatcctgcaagatgtcaatgataactcaccctttattcccaaaaaaacagtgatcatttgtaagcccacgatgtcctccgccgagattgtagctgtagacccagatgagccaatccacggtccacctttcgacttcagccttgagagttccacctctgaagttcagcgtatgtggaggctcaaagccatcaatgacacagccgcacgcttgtcatatcaaaacgatccccccttcggctcgtatgttgtgccaataactgttagagatagactgggaatgtcgagcgtcacttcattagacgttacactgtgcgactgcatcactgaaaatgactgcacacatcgtgtggacccgcgcattggcggcggcggggtgcaattgggaaaatgggctatcctggccatactgctggggatcgccttactgttttgcatcctctttactctcgtttgcggagcttcgggcacctccaaacagcctaaagtcattcctgatgacctggcacagcaaaatttgatcgtgagcaataccgaagcacccggggacgataaagtgtactcagcaaacggattcaccacccagaccgtcggcgcaagtgctcagggtgtttgcgggacagtggggtcaggcattaaaaatgggggccaggagaccattgagatggtaaaaggcggccaccagacttcagagtcatgcagaggcgccgggcaccatcacaccctcgatagctgccgaggcggccacactgaggttgacaattgcaggtacacctacagtgagtggcactcatttactcaacccaggctaggggaaaaagtctatctatgtaatcaagatgagaatcacaagcatgctcaggattatgtactgacctacaattatgagggacggggaagcgtggcaggcagcgttggatgctgcagcgaacgccaggaggaagatggactcgagtttctggataacctcgagccgaagtttcgtacactagccgaagcgtgtatgaagcggtag

SEQ ID NO: 215343 - DNA, 2706 bp, Artificial Sequence
  derived and/or modified sequence
atggaggccgcccggcccagcggctcctggaatggagccctgtgccgcctgctgctgctgaccctggccatcctgatctttgccagtgatgcctgcaagaatgtgaccctgcacgtgcccagcaagctggatgctgagaagctggtgggccgggtgaacctgaaggagtgcttcaccgctgccaacctgatccacagcagtgaccctgacttccagatcctggaggatggctctgtgtacaccaccaacaccatcctgctgagcagcgagaagaggagcttcaccatcctgctgagcaacacagagaaccaggagaagaagaagatctttgtgttcctggagcaccagaccaaggtgctgaagaagaggcacaccaaggagaaggtgctgcggcgggccaagaggcgctgggcccccatcccctgcagcatgctggagaacagcctgggccccttccccctcttcctgcagcaggtgcagagcgacacagcccagaactacaccatctactacagcatccggggccctggggtggaccaggagcccaggaacctcttctacgtggagcgggacaccggcaacctgtactgcaccaggcctgtggaccgggagcagtatgagagctttgagatcatcgcctttgccaccaccccagatggctacaccccagagctgcccctgcccctcatcatcaagattgaagatgaaaatgacaactaccccatcttcacagaggagacctacaccttcaccatctttgagaactgccgggtgggcaccaccgtgggccaggtgtgtgccacagacaaggatgagccagacaccatgcacacccggctgaagtacagcatcatcggccaggtgccccccagccccaccctcttctccatgcaccccaccactggagtcatcaccaccaccagcagccagctggaccgggagctgattgacaagtaccagctgaagatcaaggtgcaggacatggatggccagtacttcggcctgcagaccaccagcacctgcatcatcaacattgatgatgtgaatgaccacctgcccaccttcaccaggaccagctatgtgacctctgtggaggagaacacagtggatgtggagatcctgcgggtgacagtggaggacaaggacctggtgaacacagccaactggagggccaactacaccatcctgaagggaaatgaaaatggaaacttcaagatcgtgacagatgccaagaccaatgaaggagtgctgtgtgtggtgaagcccctgaactatgaggagaagcagcagatgatcctgcagattggagtggtgaatgaggcccccttcagccgggaggccagccccaggtctgccatgagcacagccaccgtgacagtgaatgtggaggaccaggatgagggccctgagtgcaacccccccatccagacagtgaggatgaaggaaaatgctgaggtgggcaccaccagcaatggctacaaggcctatgaccctgagaccaggagcagcagcggcatccgctacaagaagctgacagaccccaccggctgggtgaccattgatgagaacacaggcagcatcaaggtgttccgcagcctggaccgggaggccgagaccatcaagaatggcatctacaacatcaccgtgctggccagtgaccagggcggccgcacctgcaccggcaccctgggcatcatcctgcaggatgtgaatgacaacagccccttcatccccaagaagacagtcatcatctgcaagcccaccatgagcagcgctgagatcgtggccgtggaccctgatgagcccatccacggccccccatttgacttcagcctggagagcagcaccagcgaggtgcagaggatgtggaggctgaaggccatcaatgacacagctgcccggctgagctaccagaatgaccccccatttggcagctatgtggtgcccatcaccgtgcgggaccggctgggcatgagctctgtgaccagcctggatgtgaccctgtgtgactgcatcacagaaaatgactgcacccaccgggtggaccccagaattggaggcggcggcgtgcagctgggcaagtgggccatcctggccatcctgctgggcatcgccctgctcttctgcatcctcttcaccctggtgtgtggggccagcggcaccagcaagcagcccaaggtgatcccagatgacctggcccagcagaacctgattgtgagcaacacagaggcccctggagatgacaaggtgtacagcgccaacggcttcaccacccagacagtgggcgccagcgcccagggcgtgtgtggcaccgtgggcagcggcatcaagaatggaggccaggagaccatcgagatggtgaagggcggccaccagaccagcgagagctgccgcggggccggccaccaccacaccctggacagctgccggggcggccacacagaggtggacaactgccgctacacctacagcgagtggcacagcttcacccagccccggctgggggagaaggtgtacctgtgcaaccaggatgagaaccacaagcacgcccaggactatgtgctgacctacaactatgagggccggggctctgtggccggctctgtgggctgctgcagcgagcggcaggaggaggatggcctggagttcctggacaacctggagcccaagttccgcaccctggccgaggcctgcatgaagaggtag

SEQ ID NO: 215344 - DNA, 2745 bp, Artificial Sequence
  derived and/or modified sequence
atggaggccgcccggcccagcggctcctggaatggagccctgtgccgcctgctgctgctgaccctggccatcctgatctttgccagtgatgcctgcaagaatgtgaccctgcacgtgcccagcaagctggatgctgagaagctggtgggccgggtgaacctgaaggagtgcttcaccgctgccaacctgatccacagcagtgaccctgacttccagatcctggaggatggctctgtgtacaccaccaacaccatcctgctgagcagcgagaagaggagcttcaccatcctgctgagcaacacagagaaccaggagaagaagaagatctttgtgttcctggagcaccagaccaagatcagcctgctggtgccctggctgtgcctggtggccgaggtgctgaagaagaggcacaccaaggagaaggtgctgcggcgggccaagaggcgctgggcccccatcccctgcagcatgctggagaacagcctgggccccttccccctcttcctgcagcaggtgcagagcgacacagcccagaactacaccatctactacagcatccggggccctggggtggaccaggagcccaggaacctcttctacgtggagcgggacaccggcaacctgtactgcaccaggcctgtggaccgggagcagtatgagagctttgagatcatcgcctttgccaccaccccagatggctacaccccagagctgcccctgcccctcatcatcaagattgaagatgaaaatgacaactaccccatcttcacagaggagacctacaccttcaccatctttgagaactgccgggtgggcaccaccgtgggccaggtgtgtgccacagacaaggatgagccagacaccatgcacacccggctgaagtacagcatcatcggccaggtgccccccagccccaccctcttctccatgcaccccaccaccggggtcatcaccaccaccagcagccagctggaccgggagctgattgacaagtaccagctgaagatcaaggtgcaggacatggatggccagtacttcggcctgcagaccaccagcacctgcatcatcaacattgatgatgtgaatgaccacctgcccaccttcaccaggaccagctatgtgacctctgtggaggagaacacagtggatgtggagatcctgcgggtgacagtggaggacaaggacctggtgaacacagccaactggagggccaactacaccatcctgaagggaaatgaaaatggaaacttcaagatcgtgacagatgccaagaccaatgaaggagtgctgtgtgtggtgaagcccctgaactatgaggagaagcagcagatgatcctgcagatcggcgtggtgaatgaggcccccttcagccgggaggccagccccaggtctgccatgagcacagccaccgtgacagtgaatgtggaggaccaggatgagggccctgagtgcaacccccccatccagacagtgaggatgaaggaaaatgctgaggtgggcaccaccagcaatggctacaaggcctatgaccctgagaccaggagcagcagcggcatccgctacaagaagctgacagaccccaccggctgggtgaccattgatgaaaatacaggcagcatcaaggtgttccgcagcctggaccgggaggccgagaccatcaagaatggcatctacaacatcaccgtgctggccagtgaccagggcggccgcacctgcaccggcaccctgggcatcatcctgcaggatgtgaatgacaacagccccttcatccccaagaagacagtcatcatctgcaagcccaccatgagcagcgctgagatcgtggccgtggaccctgatgagcccatccacggccccccatttgacttcagcctggagagcagcaccagcgaggtgcagaggatgtggaggctgaaggccatcaatgacacagctgcccggctgagctaccagaatgacccccccttcggcagctatgtggtgcccatcaccgtgcgggaccggctgggcatgagctctgtgaccagcctggatgtgaccctgtgtgactgcatcacagaaaatgactgcacccaccgggtggacccccgcatcggcggcggcggcgtgcagctgggcaagtgggccatcctggccatcctgctgggcatcgccctgctcttctgcatcctcttcaccctggtgtgtggggccagcggcaccagcaagcagcccaaggtgatcccagatgacctggcccagcagaacctgattgtgagcaacacagaggcccctggagatgacaaggtgtacagcgccaacggcttcaccacccagacagtgggcgccagcgcccagggcgtgtgtggcaccgtgggcagcggcatcaagaatggaggccaggagaccatcgagatggtgaagggcggccaccagaccagcgagagctgcagaggagctggccaccaccacaccctggacagctgccggggcggccacacagaggtggacaactgccgctacacctacagcgagtggcacagcttcacccagccccggctgggggagaaggtgtacctgtgcaaccaggatgagaaccacaagcacgcccaggactatgtgctgacctacaactatgagggccggggctctgtggccggctctgtgggctgctgcagcgagcggcaggaggaggatggcctggagttcctggacaacctggagcccaagttccgcaccctggccgaggcctgcatgaagaggtag

SEQ ID NO: 215345 - DNA, 2706 bp, Artificial Sequence
  derived and/or modified sequence
atggaggccgcccggcccagcggcagctggaacggcgccctgtgcaggcttctcctactcacgttagccatactgatcttcgcatccgatgcctgcaaaaatgtgacgcttcatgttccatcgaaactcgacgctgaaaagcttgtagggcgcgtgaacctaaaggagtgtttcacagctgcaaatcttatccattcttccgacccagattttcagattcttgaggacgggagtgtgtatacaacgaatacaatactcttatctagtgagaaacgaagcttcaccatcctgctcagtaacaccgagaatcaggaaaagaaaaaaattttcgtatttctcgagcatcagaccaaagtccttaagaaaagacacacaaaggagaaggtgctgcgacgagccaaaagacggtgggcaccgattccatgttccatgttggagaacagccttgggccattccccctgtttttgcagcaggtccagtcagataccgcacagaactacaccatatactacagtatcaggggacccggggtggaccaagagccacggaacctcttttacgtggaacgtgacactgggaatctctattgcactcgtccggtggaccgggaacagtatgagtcattcgagatcattgcatttgcgactacgcctgacggatatacaccggagctgccgttacccctgatcattaagattgaagacgaaaacgataactacccaatctttactgaggagacctatacctttaccatcttcgagaactgtcgtgtcggcaccaccgtaggtcaggtatgtgcaactgacaaagacgagccagacacaatgcatacaagactgaagtatagcataattggacaggttccacctagccctactctgttcagtatgcacccgaccaccggagtgataaccacgacatccagccaactggaccgagagctgatcgataagtaccagctgaaaatcaaagtacaggacatggatggacagtacttcggcctgcagactacttcgacttgcatcattaatatagacgacgtaaacgatcacctcccaacgttcactcggacttcctacgttacttctgtggaggagaataccgtggacgtcgagattctccgggtgacagtggaggataaagatttagtgaatacagctaattggagagcgaattacaccattctgaaaggcaacgagaatgggaactttaagattgttacggatgccaaaacaaatgagggcgttttatgcgtcgttaagcccctcaattacgaggagaagcagcaaatgatcctgcagataggcgtggtgaatgaggcacctttctccagggaggcaagtccccgatcggccatgagcacggccactgtgacagtgaacgttgaagatcaggacgagggtccggagtgtaatccccccatccagaccgtaagaatgaaggagaatgctgaagtgggaacaacaagtaatgggtacaaggcctatgacccggaaaccaggagtagtagtggaatcaggtacaaaaaactgactgaccccacagggtgggtcaccatcgacgaaaatacaggaagtattaaggttttcagaagcctggaccgagaagctgagaccattaaaaatggaatctataacattaccgttttggcgtccgatcagggtggcaggacctgtacgggcactttgggtataatcctccaagatgtcaatgacaatagtccatttatacctaagaaaaccgtcatcatttgtaagccaaccatgtcatctgcggaaatcgtcgctgttgaccccgatgagcctatacacggaccaccctttgacttcagtctggagagctccacaagtgaggtacaaaggatgtggagactgaaggcgataaatgacactgcagctcgcctaagttaccagaatgacccgccttttggcagctacgtggtgccaatcacagttagggatcgcttgggcatgtcctccgtgacctcacttgatgtgacgctgtgcgactgcatcacagagaacgattgcactcacagggtggacccaaggatcggaggcggaggcgtccagcttggaaaatgggctatcctggccattctgctggggatcgctttactgttttgtattctcttcacactagtgtgtggggcgtctgggacctctaagcagccgaaggtgattccagatgatctggcacagcagaatctgatagtatccaacactgaggccccaggagacgacaaggtgtattcagccaacggatttactactcagaccgtgggagcttcggctcagggcgtctgtggtacggtcggatctggcataaagaatgggggtcaggagaccattgaaatggtgaaaggggggcaccaaacttcagagtcgtgccgaggtgctggacaccaccacacattagacagctgcagaggggggcacactgaggtcgataactgcaggtacacgtacagtgagtggcatagcttcacccaacccagacttggtgaaaaagtgtacctgtgtaatcaggatgagaatcacaagcatgcacaggactatgttctgacttataactacgaggggcgggggagcgttgccggaagcgtgggctgctgctctgaaaggcaggaggaagatggcctagagttcttagacaatcttgaaccaaagtttcgtactttagctgaagcatgcatgaagcgttag

SEQ ID NO: 215346 - DNA, 2745 bp, Artificial Sequence
  derived and/or modified sequence
atggaggccgcccggcccagcggcagctggaacggcgccctgtgccgccttctcttgttaactttggcgattttaatatttgcttccgacgcctgtaaaaacgtaactctgcacgtgccatccaaactcgatgcagagaaactcgtcggccgagtaaacctaaaggagtgttttaccgctgcgaatctgatccactcatcggatcccgatttccagatcctcgaggatgggagcgtatatacaacgaacacaattcttcttagttctgagaaaagatccttcacaatactgctttccaatactgagaaccaggagaaaaaaaaaatttttgtatttctggagcatcagactaaaatttctctcttagtaccatggctgtgcctggtggccgaagtattgaaaaaacggcataccaaggaaaaggtactccgtagggctaagagacggtgggcgcctattccttgcagcatgttggagaacagtttggggccctttcctctgtttttgcaacaggtgcagtcagacacagcccagaattatacaatctactatagtattcgcggacccggagtcgaccaagagcccaggaacctgttctacgtggagcgcgatacaggtaatctttactgtactcggccggtggatcgcgagcagtacgaatcatttgagatcattgcattcgccactacaccggatggctatactccagagctcccattgcccctgattatcaagatcgaggacgaaaacgataactatcccatcttcactgaggagacatatacattcactatcttcgagaactgtcgtgtcgggacaactgttggacaagtgtgtgccaccgataaggacgaaccggacacaatgcacactcgcctgaagtattccatcatcggtcaagtaccacccagccccactctgttcagtatgcaccccaccactggcgtgatcacgactaccagttcacagctggacagagagcttatagacaaatatcagcttaagattaaggttcaggatatggatgggcaatacttcggactgcagacgacgtcaacatgcatcataaatattgacgatgtaaatgaccaccttccaaccttcacaagaaccagctacgtgacaagtgtcgaagagaacacggtggatgtggagatcttgagagtaaccgtggaagataaggacctggtgaatacagccaattggagagcgaattacacgattctcaagggcaatgagaacggaaatttcaagatcgttacggacgctaagacaaacgagggtgtgctgtgcgtggtcaagccacttaattatgaagagaagcagcagatgattctgcaaattggggttgtcaacgaggccccattctccagagaagcatcaccacgctctgccatgtccacagccaccgtgaccgtaaacgtagaggaccaggacgagggacctgagtgcaatcccccgatccagactgtccgaatgaaagagaatgcagaagtcggcaccacctccaatgggtataaggcctacgacccagaaacccggagttcctcaggaataaggtacaagaaactcacagatcctacaggttgggtgactatcgacgaaaacaccggcagcataaaggtctttcgaagcctggatagggaggccgagaccatcaaaaacgggatctataacatcacagttctggcctcggatcaaggcggacgaacttgtacaggaactctggggattatcctgcaggacgttaacgacaactcccccttcatacctaagaagaccgtcattatctgtaagccaaccatgtcatcagccgaaattgtggcagtggaccccgacgaacctatacacggacccccttttgacttctccctcgagtcttctaccagcgaagtgcagcgcatgtggaggcttaaggctattaacgatacagccgctcggttatcttaccagaacgatcccccatttggaagctatgtcgtccccattacagtgagggatagattagggatgagctctgttaccagcctggacgtgacactgtgcgattgcattacggagaacgactgtacacatcgggtagatccaagaatcgggggcggaggtgtacagctgggcaaatgggcaattctcgctatcctgctgggcattgctttgctcttttgcatcctttttacgttggtctgtggggcaagtggaactagcaaacagccaaaggtgatcccagacgacctagctcagcagaatctgattgtcagtaatactgaggctcctggcgacgacaaagtatactctgccaatgggtttacaacccagacagtgggtgcctccgcccagggtgtgtgtggtacagtcgggtcaggcatcaagaacggaggacaggaaactattgaaatggtgaagggtggacaccagacctctgaatcctgtagaggagccggacaccaccacactttggattcatgtcgaggcggtcacaccgaggtggataactgccggtatacctatagcgaatggcactcgttcactcaaccaaggcttggagaaaaggtgtatctatgtaaccaagacgagaaccataagcatgctcaggactatgttctgacatacaactatgaaggcaggggctctgtggccgggtcagttggctgttgctctgagcggcaagaagaggacggtctcgagttcctggataatttagagcctaagtttagaaccctcgcggaggcatgcatgaagcggtag

SEQ ID NO: 215347 - DNA, 2706 bp, Artificial Sequence
  derived and/or modified sequence
atggaagctgctagaccttcgggatcttggaatggcgctttatgcagactgctgctactgacgctggctatcctgatttttgcctctgatgcatgcaaaaatgttacactgcacgtacccagcaaactggatgcagaaaaattagtcggaagggtgaatctgaaggagtgcttcaccgcagcgaatctgatccacagctctgacccagattttcagatactcgaggacggttctgtgtacacgacgaacaccatactgctgtcaagcgagaagcgctccttcactattctgctgagtaatacagagaaccaagaaaaaaaaaagatcttcgtgttcctcgagcaccagacgaaagtactcaagaaacggcacactaaagagaaagttctgaggagggctaagaggagatgggccccaatcccgtgttctatgcttgaaaatagtttgggacccttcccacttttcctgcagcaagtgcagagtgacacggcccaaaactacacgatttattactccatcagaggccctggcgtggaccaagaaccaagaaatctgttttacgtggagcgtgacacagggaacctctattgtactaggcccgttgacagggagcagtatgaaagctttgagatcatcgcctttgcaacgacccccgatgggtatactcctgagttacccctgcctctgattatcaagatcgaggatgagaacgacaactacccgatttttacagaagaaacctatacctttacaattttcgaaaactgccgagtcggtaccactgttggtcaagtgtgtgccaccgacaaggatgaacccgatacgatgcataccaggctcaaatatagtatcattggacaggtgccgcctagccccaccttattcagcatgcatccgacaacaggtgtgataaccactacgagcagccagctggatagagagcttatagataagtaccagctgaaaatcaaagtgcaggatatggacgggcaatactttggcctgcaaaccacctcaacctgcatcatcaatattgatgacgtcaacgatcatttaccgactttcacccggacttcctacgtcacaagcgtggaagaaaatacggtggatgtggaaattcttagggttaccgtcgaagacaaagatctagttaatactgccaactggcgggcaaattataccatactgaaaggtaatgagaacgggaacttcaagattgtcactgatgcaaagacaaacgaaggagtcctttgcgtggtaaaacctctgaattacgaggagaagcagcagatgatcttgcagatcggcgtcgtaaatgaagcccctttttctcgtgaagcttcccccaggtcagccatgtctaccgccactgtgacggtgaacgtagaagaccaggacgagggacccgagtgcaatccaccgattcagactgttaggatgaaggaaaatgccgaagtcggtaccacctccaacggttacaaggcgtacgaccccgagactcgctccagcagtggaataagatataagaaattaaccgaccccactgggtgggtaactatcgatgagaatacaggttcgatcaaggttttcagaagcctggaccgcgaggctgaaacaattaaaaacggcatttacaacatcaccgttttagcatctgatcaaggtggccgaacctgtacgggcaccctggggatcattctccaggacgtaaacgataactccccatttatccctaagaagactgttattatttgcaaaccaaccatgagtagtgccgagattgtggcggtcgaccctgacgagcccatccacggcccaccctttgacttctcactcgaaagcagcacatcagaagtccagcgcatgtggcgcctgaaagcaattaatgatacagccgcacggctttcatatcagaatgacccaccattcggaagctatgtcgtgcccatcactgtccgcgacaggcttggaatgtcaagtgtcaccagccttgacgtcacactctgtgactgtatcaccgaaaatgattgtacccatagagttgatccgcgtattggtggcggtggggtacagctggggaagtgggccatccttgctattctccttggcattgcgttactattctgcattctttttaccctggtctgtggcgcttccggtacctcaaagcaaccgaaggtcattcccgatgacctagcgcagcagaatctcattgtgtcgaacacagaggccccaggcgacgataaggtgtactctgccaatgggttcaccacccagacagtgggtgcaagcgcccagggtgtgtgcggcacagtagggtccggaattaagaacggaggccaggaaacaatcgaaatggttaagggtggtcaccagactagcgagtcttgccggggagccggacaccaccataccctggacagctgccggggaggacacactgaagttgataattgtcgttatacttactccgagtggcactcctttacacagcctagacttggtgagaaagtgtatctttgtaatcaagatgaaaatcacaaacacgctcaagactacgtactgacatacaactacgaggggagaggttccgtcgcgggatctgttggttgctgttctgagcgacaggaagaagacggtctggaattccttgacaatcttgaacccaaattcagaaccttagctgaagcctgcatgaagcggtag

SEQ ID NO: 215348 - DNA, 2745 bp, Artificial Sequence
  derived and/or modified sequence
atggaagcggcacggccttctggatcttggaatggggcactatgccgtttgctgctgctgaccctggctattctgatctttgcttctgatgcctgtaaaaacgtgacactgcatgtcccaagtaagctggatgcggagaagttagttggccgagtcaatctgaaagaatgctttacggctgccaatctgatccactcatccgacccagattttcagatccttgaggacggttccgtgtatactacaaataccattctcttgtcctccgagaagcgctcattcacaatcctgctcagcaacacagagaatcaagagaagaaaaagatttttgtgtttttggaacatcagacaaaaattagcctgctggtgccgtggctttgcttagtagccgaggtgctgaagaaacgacataccaaggaaaaggtcctgcggagggccaagcgccgttgggcgccaattccctgctcaatgctcgagaatagtcttggacctttcccactcttcctgcaacaggtgcaatccgacacagcccagaattatactatctattatagcatcagaggacctggagttgatcaggaacccagaaatctgttttacgtagaacgcgacactggcaatctgtactgtacccgtccagtggatcgggagcagtatgagtcgtttgaaatcatcgcctttgcgaccacgcccgatggatataccccagagctcccactaccattaataattaagattgaggatgagaatgacaattatccaatcttcaccgaggaaacatacactttcaccattttcgaaaactgccgcgtgggtacaaccgtggggcaggtgtgcgcaacagataaggatgagcctgatacaatgcatactcgcctgaagtatagcattattggacaagtcccaccttcacctaccctcttttctatgcatccaactactggcgttattacaacgacctcatctcagctggaccgcgaactgatcgacaagtaccagcttaaaattaaagttcaggatatggacggtcaatactttggactgcagacgacgagtacttgtatcattaatatagatgacgtcaatgatcaccttcctaccttcactagaacgtcatatgtgacctcagtggaggagaacactgtggatgtcgagattctgcgcgttaccgtggaagacaaagatctggtgaatactgccaactggcgtgccaattacacgatactcaagggcaatgagaacggcaatttcaagattgtgacagatgctaagacgaacgaaggcgttctgtgtgtggttaagccactgaactatgaagaaaagcagcagatgatcctgcagatcggcgtagtgaatgaggcaccattttcaagggaagcctctccacggtccgctatgtccactgcgacagtgaccgtcaatgttgaggaccaggacgaaggacccgaatgtaatcctcccatacagaccgtgcgaatgaaggaaaatgccgaggttggcaccacatccaacgggtataaagcgtatgaccccgagacccgcagctcttccggtattcggtacaaaaagctgacagacccaacaggttgggtcactatcgatgagaataccggcagcatcaaggtctttagatctctagatagagaggctgagactatcaagaacgggatctataacatcactgtcctggcaagcgaccagggcggaagaacatgtactggcactctggggattattttgcaggacgttaacgataatagcccgtttattcctaaaaaaacagtgattatatgcaaacccaccatgtcctcagctgagattgttgcagtagaccctgatgagcctatccatgggccaccattcgatttctctctggagagttccacttctgaggtccagcgcatgtggcggttgaaagctatcaatgataccgctgctcgcctgagttatcagaatgaccctcctttcggcagctacgtggtaccgatcacagtacgggaccgcctgggaatgtcaagtgtgaccagcctggacgtgaccctttgtgactgcatcacagagaatgattgtacccatcgggtggacccgcgaatcgggggaggtggcgttcagctggggaagtgggccatcttggccattctgctgggtattgccctcctcttttgtatcttattcactcttgtatgcggtgcctccggaacatcgaagcagcctaaagttatccctgatgatttggcccaacagaatttgatagtcagcaacactgaggcccctggcgacgataaagtgtactctgccaatggattcaccactcagacagtgggagcttcagctcagggtgtgtgcggtaccgtcggctctgggattaagaacgggggacaggaaaccatcgaaatggtaaagggtgggcaccagacttcagaatcttgcagaggcgctggtcaccatcataccttggattcctgtcggggaggacacacggaagtggacaattgtcgatacacctatagtgagtggcactcttttacgcaacctcgactgggagagaaggtatacctatgtaaccaggacgagaaccataaacacgctcaggattacgtgttgacttataattatgaaggaaggggtagtgtggcagggagtgtggggtgttgctctgagcggcaggaagaagatggcctggagtttctcgataatttggagcccaagtttaggactctggcagaggcatgtatgaagaggtag

SEQ ID NO: 215349 - protein, 839 aa, Artificial Sequence
  derived and/or modified sequence
MAAAGPRRSVRGAVCLHLLLTLVIFSRAGEACKKVILNVPSKLEADKIIGRVNLEECFRSADLIRSSDPDFRVLNDGSVYTARAVALSDKKRSFTIWLSDKRKQTQKEVTVLLEHQKKVSKTRHTRETVLRRAKRRWAPIPCSMQENSLGPFPLFLQQVESDAAQNYTVFYSISGRGVDKEPLNLFYIERDTGNLFCTRPVDREEYDVFDLIAYASTADGYSADLPLPLPIRVEDENDNHPVFTEAIYNFEVLESSRPGTTVGVVCATDRDEPDTMHTRLKYSILQQTPRSPGLFSVHPSTGVITTVSHYLDREVVDKYSLIMKVQDMDGQFFGLIGTSTCIITVTDSNDNAPTFRQNAYEAFVEENAFNVEILRIPIEDKDLINTANWRVNFTILKGNENGHFKISTDKETNEGVLSVVKPLNYEENRQVNLEIGVNNEAPFARDIPRVTALNRALVTVHVRDLDEGPECTPAAQYVRIKENLAVGSKINGYKAYDPENRNGNGLRYKKLHDPKGWITIDEISGSIITSKILDREVETPKNELYNITVLAIDKDDRSCTGTLAVNIEDVNDNPPEILQEYVVICKPKMGYTDILAVDPDEPVHGAPFYFSLPNTSPEISRLWSLTKVNDTAARLSYQKNAGFQEYTIPITVKDRAGQAATKLLRVNLCECTHPTQCRATSRSTGVILGKWAILAILLGIALLFSVLLTLVCGVFGATKGKRFPEDLAQQNLIISNTEAPGDDRVCSANGFMTQTTNNSSQGFCGTMGSGMKNGGQETIEMMKGGNQTLESCRGAGHHHTLDSCRGGHTEVDNCRYTYSEWHSFTQPRLGEESIRGHTG

SEQ ID NO: 215350 - DNA, 2520 bp, Artificial Sequence
  derived and/or modified sequence
atggcggctgcaggccctcgtcgttctgtgcgcggtgcagtgtgcctgcacttacttctgacactggttatctttagtcgagccggcgaggcttgtaaaaaggtaattcttaacgttccatccaagttggaagccgacaaaatcattggccgagtgaacctggaagagtgctttagaagcgctgacctgattcggtcatcagatccagacttccgggttctgaatgacggctccgtgtacaccgcccgtgccgttgctctctctgacaagaagcggagtttcaccatttggttgtcagacaaacgtaagcaaacacagaaggaggtgactgtgcttcttgaacaccaaaagaaggtttcaaagactaggcacacccgagagacggttttgagaagagccaaaagacggtgggcccccatcccgtgtagcatgcaggaaaatagtctgggcccattcccccttttcctccagcaggtggagtcagacgcagcacaaaactacacggtgttttactccatctcgggcagaggagtcgataaagagccactcaatctcttctatatcgagcgggacacagggaacctcttctgcacacgccctgtggacagagaggagtatgatgtttttgacttaatcgcgtacgccagcaccgccgatggttacagtgccgacctgcctcttccgctgcccatacgtgtggaggatgaaaatgacaatcaccccgtgtttaccgaggccatatacaatttcgaagtgttggagagctctaggcctggcactaccgtcggagtcgtgtgcgcgacagaccgcgatgaaccagatacgatgcacacaagactaaagtactctattcttcagcaaactccaagatccccaggactgttcagtgtgcatcctagcacaggagttattacaacagttagccactacctagaccgtgaagtggtggacaaatattcactgattatgaaagtccaggacatggatggtcaattcttcgggctgatcgggacatctacgtgtatcattacagtgacggactcaaatgataatgccccaacattccggcaaaacgcgtacgaggcattcgtcgaggagaacgcctttaacgtggaaatacttcgaattccaattgaagacaaggatctgatcaacaccgccaactggcgcgttaacttcaccattctgaaggggaatgaaaacggccatttcaaaatcagtaccgacaaggagactaacgagggggttctgtccgtagtgaagccacttaattatgaagagaatcgacaggtgaacctggaaatcggagttaataatgaggcccctttcgccagagacattccaagggtgaccgctctcaatagggcattggttacagtccacgtgcgggatctggatgaggggccagaatgcacacctgcagcccagtatgtgagaatcaaggagaaccttgctgtggggtccaagattaacggctacaaagcatacgatccggaaaaccgaaacggaaacggcctgaggtacaagaagctccacgaccccaaaggctggatcactatcgacgagatatcaggatccataatcacaagcaagatattagaccgcgaggtggagacccctaaaaatgaattatataatatcacggtgttagctattgacaaggacgataggtcatgcacaggcaccctggcagtcaacatcgaagatgtaaacgacaatccacctgagattctacaagagtatgtcgtcatctgtaaaccaaaaatgggctatactgacatactggccgtcgaccccgacgaacctgtacacggggctcccttctacttctcactccccaatactagccctgaaatatctaggctgtggtctctcacaaaggtgaacgacaccgccgctcgtctgagctatcaaaagaacgccggtttccaggagtacactatccccattactgtgaaggaccgcgcgggacaggctgctaccaagctgctgcgcgtaaatttgtgtgagtgcacccacccaactcagtgtcgggccacaagcagatcgacgggcgtcatattgggaaaatgggcaatccttgcaatcttgctgggtattgccctattattctctgtgctcttgacactcgtatgcggtgtcttcggcgctaccaagggcaagaggttcccagaagacctagcacaacagaacctgatcatatcaaacaccgaggctccgggcgatgacagggtttgctccgcgaatgggttcatgacccaaaccaccaacaatagcagccagggcttctgtggaactatgggctctgggatgaaaaacggtggtcaagagacgatcgagatgatgaaaggtggaaaccagaccttggagagttgtaggggggcagggcatcatcacaccttggactcgtgccgcggggggcacactgaggtggataattgcagatacacttactcagagtggcactcctttacacagcctcggctgggggaggaaagtattcggggccacaccggatag

SEQ ID NO: 215351 - DNA, 2520 bp, Artificial Sequence
  derived and/or modified sequence
atggctgctgctggccccaggagatctgtgagaggagctgtgtgcctgcacctgctgctgaccctggtgatcttcagccgggccggggaggcctgcaagaaggtgatcctgaatgtgcccagcaagctggaggccgacaagatcatcggccgggtgaacctggaggagtgcttccgctctgctgacctgatccgcagcagtgaccctgacttccgggtgctgaatgatggctctgtgtacacagcccgggctgtggccctgagtgacaagaagaggagcttcaccatctggctgagtgacaagaggaagcagacccagaaggaggtgacagtgctgctggagcaccagaagaaggtgtccaagaccaggcacacccgggagaccgtgctgcggcgggccaagaggcgctgggcccccatcccctgcagcatgcaggagaacagcctgggccccttccccctcttcctgcagcaggtggagagtgatgctgcccagaactacaccgtcttctacagcatcagcggccggggcgtggacaaggagcccctgaacctcttctacatcgagcgggacaccggcaacctcttctgcaccaggcctgtggaccgggaggagtatgatgtgtttgacctgattgcctatgccagcacagcagatggctacagcgctgacctgcccctgcccctgcccatccgggtggaggatgaaaatgacaaccaccctgtgttcacagaggccatctacaactttgaggtgctggagagcagccggcccggcaccaccgtgggcgtggtgtgtgccacagacagagatgagccagacaccatgcacacccggctgaagtacagcatcctgcagcagacccccaggagccctggcctcttctctgtgcaccccagcactggagtcatcaccaccgtgagccactacctggaccgggaggtggtggacaagtacagcctcatcatgaaggtgcaggacatggatggccagttcttcggcctcatcggcaccagcacctgcatcatcaccgtgacagacagcaatgacaatgcccccaccttccggcagaatgcctatgaggcctttgtggaggagaatgccttcaacgtggagatcctgcgcatccccatcgaggacaaggacctgatcaacacagccaactggagggtgaacttcaccatcctgaagggaaatgaaaatggccacttcaagatcagcacagacaaggagaccaatgaaggagtgctgtctgtggtgaagcccctgaactatgaagaaaatcggcaggtgaacctggagattggagtgaacaatgaggccccctttgcccgggacatcccccgggtgacagccctgaacagagccctggtgacagtgcacgtgcgggacctggatgagggccctgagtgcaccccagctgcccagtatgtgcgcatcaaggagaacctggccgtgggcagcaagatcaatggctacaaggcctatgaccctgaaaatagaaatggaaatggcctgcgctacaagaagctgcatgaccccaagggctggatcaccattgatgagatcagcggcagcatcatcaccagcaagatcctggaccgggaggtggagacccccaagaatgagctgtacaacatcaccgtgctggccatcgacaaggatgacaggagctgcaccggcaccctggccgtgaacattgaagatgtgaatgacaaccccccagagatcctgcaggagtatgtggtgatctgcaagcccaagatgggctacacagacatcctggccgtggaccctgatgagcctgtgcacggggcccccttctacttcagcctgcccaacaccagccctgagatcagccggctgtggagcctgaccaaggtgaatgacacagctgcccggctgagctaccagaagaatgccggcttccaggagtacaccatccccatcaccgtgaaggaccgggccggccaggccgccaccaagctgctgcgggtgaacctgtgtgagtgcacccaccccacccagtgccgggccaccagccgcagcactggagtcatcctgggcaagtgggccatcctggccatcctgctgggcatcgccctgctcttctctgtgctgctgaccctggtgtgtggggtgtttggagccaccaagggcaagcgcttccctgaggacctggcccagcagaacctgatcatcagcaacacagaggcccctggagatgacagagtgtgcagcgccaacggcttcatgacccagaccaccaacaacagcagccagggcttctgtggcaccatgggcagcggcatgaagaatggaggccaggagaccatcgagatgatgaagggcggcaaccagaccctggagagctgcagaggagctggccaccaccacaccctggacagctgccggggcggccacacagaggtggacaactgccgctacacctacagcgagtggcacagcttcacccagccccggctgggggaggagagcatccggggccacactggatag

SEQ ID NO: 215352 - DNA, 2520 bp, Artificial Sequence
  derived and/or modified sequence
atggccgccgccggcccccggcggagcgtgcggggcgccgtgtgcctgcatttgttgctcacgctggttattttctctcgggccggcgaggcctgtaagaaagttattctgaatgtcccatcaaaactggaggcggacaagattattggacgggtcaatcttgaagagtgcttcagatccgctgacctgattagaagctcagacccagactttcgcgtgctgaatgatggctcagtgtataccgctagagccgtggccctgagtgacaaaaagcgatcctttacgatctggttgagtgataaaaggaaacagacccagaaggaagtgacagtactcctggagcaccaaaagaaagtttccaagactcgacatacacgcgagacagtgttgagaagagctaagcggagatgggcccccataccctgctctatgcaggagaactccctcggcccgttcccgctgttcctccagcaggttgagtctgatgctgcacagaactataccgttttctactccatctccgggcgaggtgttgacaaggagcccctgaatttattctatattgagagagatacaggtaatctattctgtactagacccgtggatcgggaagagtacgatgttttcgacctgattgcttacgcttccaccgctgacgggtattccgctgacctgccactccctctgcctattcgggtggaggatgagaatgacaatcatcccgtatttactgaggcaatttataacttcgaggtgctggagtcttcccggcccggcaccaccgtgggcgttgtgtgcgctacagacagggatgaacccgatacgatgcatactaggctcaagtattccattctgcagcagaccccccggtctccaggactattctcagtgcacccaagtaccggcgtgatcaccactgtgagccattatttggatcgcgaagtggtggataagtactcgttgataatgaaagtacaggacatggacggtcaattcttcgggctgatcggcacatctacgtgtataataaccgtaaccgatagcaatgacaacgccccaacttttcgccagaacgcctacgaagctttcgtggaagaaaacgcttttaatgtcgaaattctacggatacctatcgaagataaggatttgataaatacagccaattggagggtgaatttcactattcttaaagggaatgagaacggacactttaagatcagcacagacaaagagaccaacgaaggcgtactgtccgtcgttaagccactgaactatgaagagaataggcaggtgaaccttgaaatcggggtgaacaacgaggctccttttgctcgtgatattcctcgagtgacagccctgaatcgcgcactggtcacagtccatgtgcgcgaccttgatgagggaccagagtgcacccccgcagcccagtacgtgcgtataaaggaaaacctggccgttggctcgaagatcaatggttataaggcttatgaccccgaaaatagaaatggaaacggactgagatataaaaaactgcacgacccgaagggatggattactatagacgagatctcaggctcgatcatcacttcaaagattctggaccgagaggttgagactcctaaaaacgagctgtacaacattacagtgcttgctatcgacaaggatgatcgaagttgtacaggaactctcgccgtaaacatcgaggatgtgaacgataacccccctgaaatcctccaggaatacgttgtaatctgtaagcctaaaatgggttacactgatatattagccgtcgaccccgatgagcctgtgcatggcgcccccttctatttctcactacctaatacaagccccgagatctcaagactgtggtccttgacaaaggttaatgacacagctgctcggttgtcctatcaaaagaatgcaggcttccaggaatacactatcccaatcactgtgaaagatagggccggccaggccgccacgaagctattgagggtaaatctttgcgaatgtacgcatccaacgcaatgtcgcgccacgagtaggtctactggtgtgattctagggaagtgggccattctcgccattctgctgggcatcgccctgctgttcagcgtcttacttaccctggtgtgtggcgtattcggagccacaaagggtaaaagattccctgaagatttggcccagcagaatttgattatttccaatactgaagcgcccggagacgatcgtgtgtgttccgccaacggcttcatgactcagaccactaacaattcgtcacagggattttgtggaactatgggaagcggcatgaagaacgggggacaggagacaattgaaatgatgaaggggggaaatcagaccctagaaagctgtcgtggcgctggacaccatcacacactggatagctgccgggggggacatacagaagtcgacaactgtcggtacacatatagcgagtggcatagttttactcagccaagactgggcgaggaaagcatacggggtcatactggctag

SEQ ID NO: 215353 - DNA, 2520 bp, Artificial Sequence
  derived and/or modified sequence
atggccgctgccggtccaaggagatccgtgcgcggagccgtgtgtcttcatctgctgctgacactcgtgatcttttcacgggctggggaggcttgtaagaaggtgatcctgaatgttccctcaaagctggaagccgataaaatcatcggcagagtcaatctcgaagagtgcttccgaagcgcagacctcattaggtcgagcgatccagacttcagagtattgaacgacggatcagtgtacacggccagggcagtggccctgagtgataaaaaaaggtcatttacgatttggttgtctgataagcgcaagcaaactcagaaggaggtgaccgtgctgctagaacaccagaagaaggtgtcaaaaaccaggcacactcgggaaacagtcctgagacgagccaaacgtaggtgggcccctatcccttgcagtatgcaagaaaactcactgggacctttcccactatttttgcagcaggtagaatcggacgccgctcaaaactacacagtcttttattctatttctggaaggggggtggataaagagcccctcaaccttttttatatagagcgggacaccggaaacctcttctgcacccgacctgtggatagagaagaatatgacgtatttgacctgattgcttacgcgtccaccgcagacgggtattccgccgatctgcctcttccactaccaatcagggtagaagatgagaatgacaaccatcccgtcttcactgaggcaatatacaatttcgaagtcctggagtcaagccgccctggaacaacagtgggcgtcgtatgtgctaccgaccgggatgaaccagataccatgcacacccgcctcaagtactccattctgcagcagacacctcggtcacctggtctgtttagcgtgcaccctagcacaggagtaatcactacagtgtcccattatttagaccgcgaagtcgtggataagtattcactcattatgaaggttcaggacatggatggccaattctttggactgatcggaactagcacttgtatcattacagtgactgactccaatgataatgcacccacatttcgccagaatgcctacgaggccttcgtcgaggagaatgcatttaatgtggaaatcctgaggatacctatcgaggacaaggatctaatcaatacagccaattggcgagttaattttacgatcctcaaagggaacgagaacggccactttaagatctccacagataaggaaactaatgagggggtgttatcggtcgtgaaaccgctaaattatgaagagaataggcaggttaatttggaaattggtgtcaacaatgaggctccttttgctcgagacattcccagggtcaccgcccttaaccgggctttagtgacagtgcacgtgagagacctcgacgaaggacctgagtgtactccagcagcccagtacgtcaggatcaaggagaacttagccgtgggaagcaagattaacggttacaaggcttacgaccctgaaaaccgcaacggaaatgggctgcgctataaaaagctccacgatccaaaggggtggataacgatcgacgagattagcgggagtatcattacctccaagatcttggatcgggaagtggagaccccaaagaacgagctctataacattacagtcttggcgatcgataaagacgaccgctcttgcacaggaaccctcgctgtgaacatcgaggacgttaatgataatccccctgagatcttacaagagtacgtcgtgatctgcaagcccaaaatgggttatacagatatcctggcagtcgaccccgacgaacctgttcacggggctccgttttacttctcactgccgaatacttcaccagaaatttcccgactttggagtctcacaaaagtgaatgacactgctgctcgcctgtcctatcagaaaaatgcaggattccaggagtacaccatcccaatcacggtgaaagaccgcgcaggccaggccgctacaaagctgctccgcgttaacctgtgcgagtgtacgcacccaacgcaatgccgagccacctcgagatctaccggagtaatcctggggaaatgggccatcctggccatcctactgggcatagctctgctatttagcgtcctgctgacacttgtgtgcggggttttcggtgcaactaaagggaaacggtttcctgaagacctcgcccagcaaaatctgatcatttctaatacagaggcaccaggggatgacagagtgtgcagcgctaatggctttatgactcagaccacaaacaactctagccagggattttgtgggaccatgggttcgggcatgaagaacggcggacaggagactatcgagatgatgaagggtggtaatcagacgctggagtcttgtcgaggggctggccatcatcacaccctcgacagttgtcgtggaggccacaccgaggtcgataactgtcgctacacgtatagtgagtggcacagctttacacaacccaggctgggagaagaatccattaggggccacacagggtag

SEQ ID NO: 215354 - DNA, 2520 bp, Artificial Sequence
  derived and/or modified sequence
atggccgccgccggccccagaagaagcgtgagaggcgccgtgtgcctgcacctgctgctgaccctggtgatcttcagcagagccggcgaggcctgcaagaaggtgatcctgaacgtgcccagcaagctggaggccgacaagatcatcggcagagtgaacctggaggagtgcttcagaagcgccgacctgatcagaagcagcgaccccgacttcagagtgctgaacgacggcagcgtgtacaccgccagagccgtggccctgagcgacaagaagagaagcttcaccatctggctgagcgacaagagaaagcagacccagaaggaggtgaccgtgctgctggagcaccagaagaaggtgagcaagaccagacacaccagagagaccgtgctgagaagagccaagagaagatgggcccccatcccctgcagcatgcaggagaacagcctgggccccttccccctgttcctgcagcaggtggagagcgacgccgcccagaactacaccgtgttctacagcatcagcggcagaggcgtggacaaggagcccctgaacctgttctacatcgagagagacaccggcaacctgttctgcaccagacccgtggacagagaggagtacgacgtgttcgacctgatcgcctacgccagcaccgccgacggctacagcgccgacctgcccctgcccctgcccatcagagtggaggacgagaacgacaaccaccccgtgttcaccgaggccatctacaacttcgaggtgctggagagcagcagacccggcaccaccgtgggcgtggtgtgcgccaccgacagagacgagcccgacaccatgcacaccagactgaagtacagcatcctgcagcagacccccagaagccccggcctgttcagcgtgcaccccagcaccggcgtgatcaccaccgtgagccactacctggacagagaggtggtggacaagtacagcctgatcatgaaggtgcaggacatggacggccagttcttcggcctgatcggcaccagcacctgcatcatcaccgtgaccgacagcaacgacaacgcccccaccttcagacagaacgcctacgaggccttcgtggaggagaacgccttcaacgtggagatcctgagaatccccatcgaggacaaggacctgatcaacaccgccaactggagagtgaacttcaccatcctgaagggcaacgagaacggccacttcaagatcagcaccgacaaggagaccaacgagggcgtgctgagcgtggtgaagcccctgaactacgaggagaacagacaggtgaacctggagatcggcgtgaacaacgaggcccccttcgccagagacatccccagagtgaccgccctgaacagagccctggtgaccgtgcacgtgagagacctggacgagggccccgagtgcacccccgccgcccagtacgtgagaatcaaggagaacctggccgtgggcagcaagatcaacggctacaaggcctacgaccccgagaacagaaacggcaacggcctgagatacaagaagctgcacgaccccaagggctggatcaccatcgacgagatcagcggcagcatcatcaccagcaagatcctggacagagaggtggagacccccaagaacgagctgtacaacatcaccgtgctggccatcgacaaggacgacagaagctgcaccggcaccctggccgtgaacatcgaggacgtgaacgacaacccccccgagatcctgcaggagtacgtggtgatctgcaagcccaagatgggctacaccgacatcctggccgtggaccccgacgagcccgtgcacggcgcccccttctacttcagcctgcccaacaccagccccgagatcagcagactgtggagcctgaccaaggtgaacgacaccgccgccagactgagctaccagaagaacgccggcttccaggagtacaccatccccatcaccgtgaaggacagagccggccaggccgccaccaagctgctgagagtgaacctgtgcgagtgcacccaccccacccagtgcagagccaccagcagaagcaccggcgtgatcctgggcaagtgggccatcctggccatcctgctgggcatcgccctgctgttcagcgtgctgctgaccctggtgtgcggcgtgttcggcgccaccaagggcaagagattccccgaggacctggcccagcagaacctgatcatcagcaacaccgaggcccccggcgacgacagagtgtgcagcgccaacggcttcatgacccagaccaccaacaacagcagccagggcttctgcggcaccatgggcagcggcatgaagaacggcggccaggagaccatcgagatgatgaagggcggcaaccagaccctggagagctgcagaggcgccggccaccaccacaccctggacagctgcagaggcggccacaccgaggtggacaactgcagatacacctacagcgagtggcacagcttcacccagcccagactgggcgaggagagcatcagaggccacaccggctag

SEQ ID NO: 215355 - DNA, 6978 bp, Artificial Sequence
  derived and/or modified sequence
gaagttgctcccgggcaggcaagcctgagagaggccaaatacacttaaaaacaagcagcggcgagaaaagcacctcccgcgccctgcacctcggcaggtctcgctctcggcaccctcccggcgcccgcgttctcctggccctgcccggcatcccgatggccgccgctgggccccggcgctccgtgcgcggagccgtctgcctgcatctgctgctgaccctcgtgatcttcagtcgtgctggtgaagcctgcaaaaaggtgatacttaatgtaccttctaaactagaggcagacaaaataattggcagagttaatttggaagagtgcttcaggtctgcagacctcatccggtcaagtgatcctgatttcagagttctaaatgatgggtcagtgtacacagccagggctgttgcgctgtctgataagaaaagatcatttaccatatggctttctgacaaaaggaaacagacacagaaagaggttactgtgctgctagaacatcagaagaaggtatcgaagacaagacacactagagaaactgttctcaggcgtgccaagaggagatgggcacctattccttgctctatgcaagagaattccttgggccctttcccattgtttcttcaacaagttgaatctgatgcagcacagaactatactgtcttctactcaataagtggacgtggagttgataaagaacctttaaatttgttttatatagaaagagacactggaaatctattttgcactcggcctgtggatcgtgaagaatatgatgtttttgatttgattgcttatgcgtcaactgcagatggatattcagcagatctgcccctcccactacccatcagggtagaggatgaaaatgacaaccaccctgttttcacagaagcaatttataattttgaagttttggaaagtagtagacctggtactacagtgggggtggtttgtgccacagacagagatgaaccggacacaatgcatacgcgcctgaaatacagcattttgcagcagacaccaaggtcacctgggctcttttctgtgcatcccagcacaggcgtaatcaccacagtctctcattatttggacagagaggttgtagacaagtactcattgataatgaaagtacaagacatggatggccagttttttggattgataggcacatcaacttgtatcataacagtaacagattcaaatgataatgcacccactttcagacaaaatgcttatgaagcatttgtagaggaaaatgcattcaatgtggaaatcttacgaatacctatagaagataaggatttaattaacactgccaattggagagtcaattttaccattttaaagggaaatgaaaatggacatttcaaaatcagcacagacaaagaaactaatgaaggtgttctttctgttgtaaagccactgaattatgaagaaaaccgtcaagtgaacctggaaattggagtaaacaatgaagcgccatttgctagagatattcccagagtgacagccttgaacagagccttggttacagttcatgtgagggatctggatgaggggcctgaatgcactcctgcagcccaatatgtgcggattaaagaaaacttagcagtggggtcaaagatcaacggctataaggcatatgaccccgaaaatagaaatggcaatggtttaaggtacaaaaaattgcatgatcctaaaggttggatcaccattgatgaaatttcagggtcaatcataacttccaaaatcctggatagggaggttgaaactcccaaaaatgagttgtataatattacagtcctggcaatagacaaagatgatagatcatgtactggaacacttgctgtgaacattgaagatgtaaatgataatccaccagaaatacttcaagaatatgtagtcatttgcaaaccaaaaatggggtataccgacattttagctgttgatcctgatgaacctgtccatggagctccattttatttcagtttgcccaatacttctccagaaatcagtagactgtggagcctcaccaaagttaatgatacagctgcccgtctttcatatcagaaaaatgctggatttcaagaatataccattcctattactgtaaaagacagggccggccaagctgcaacaaaattattgagagttaatctgtgtgaatgtactcatccaactcagtgtcgtgcgacttcaaggagtacaggagtaatacttggaaaatgggcaatccttgcaatattactgggtatagcactgctcttttctgtattgctaactttagtatgtggagtttttggtgcaactaaagggaaacgttttcctgaagatttagcacagcaaaacttaattatatcaaacacagaagcacctggagacgatagagtgtgctctgccaatggatttatgacccaaactaccaacaactctagccaaggtttttgtggtactatgggatcaggaatgaaaaatggagggcaggaaaccattgaaatgatgaaaggaggaaaccagaccttggaatcctgccggggggctgggcatcatcataccctggactcctgcaggggaggacacacggaggtggacaactgcagatacacttactcggagtggcacagttttactcaaccccgtctcggtgaagaatccattagaggacacactggttaaaaattaaacataaaagaaattgcatcgatgtaatcagaatgaagaccgcatgccatcccaagattatgtcctcacttataactatgagggaagaggatctccagctggttctgtgggctgctgcagtgaaaagcaggaagaagatggccttgactttttaaataatttggaacccaaatttattacattagcagaagcatgcacaaagagataatgtcacagtgctacaattaggtctttgtcagacattctggaggtttccaaaaataatattgtaaagttcaatttcaacatgtatgtatatgatgatttttttctcaattttgaattatgctactcaccaatttatatttttaaagcaagttgttgcttatcttttccaaaaagtgaaaaatgttaaaacagacaactggtaaatctcaaactccagcactggaattaaggtctctaaagcatctgctcttttttttttttacggatattttagtaataaatatgctggataaatattagtccaacaatagctaagttatgctaatatcacattattatgtattcactttaagtgatagtttaaaaaataaacaagaaatattgagtatcactatgtgaagaaagttttggaaaagaaacaatgaagactgaattaaattaaaaatgttgcagctcataaagaattgggactcacccctactgcactaccaaattcatttgactttggaggcaaaatgtgttgaagtgccctatgaagtagcaattttctataggaatatagttggaaataaatgtgtgtgtgtatattattattaatcaatgcaatatttaaaatgaaatgagaacaaagaggaaaatggtaaaaacttgaaatgaggctggggtatagtttgtcctacaatagaaaaaagagagagcttcctaggcctgggctcttaaatgctgcattataactgagtctatgaggaaatagttcctgtccaatttgtgtaatttgtttaaaattgtaaataaattaaacttttctggtttctgtgggaaggaaatagggaatccaatggaacagtagctttgctttgcagtctgtttcaagatttctgcatccacaagttagtagcaaactggggaatactcgctgcagctggggttccctgctttttggtagcaagggtccagagatgaggtgtttttttcggggagctaataacaaaaacattttaaaacttacctttactgaagttaaatcctctattgctgtttctattctctcttatagtgaccaacatctttttaatttagatccaaataaccatgtcctcctagagtttagaggctagagggagctgaggggaggatcttactgaaagcaccctggggagattgattgtccttaaacctaagccccacaaacttgacacctgatcaggtctgggagctacaaaatttcatttttctcctcactgcccttcttctgagtggcattggcctgaatcaaggaaagccaggccttgtgggcccccttctttcggctttctgctaaagcaacacctccagcagagattcccttaagtgactccaggttttccaccatccttcagcgtgaattaatttttaatcagtttgctttctccagagaaattttaaaataatagaagaaatagaaattttgaatgtataaaagaaaaagatcaagttgtcattttagaacagagggaactttgggagaaagcagcccaagtaggttatttgtacagtcagagggcaacaggaagatgcaggccttcaagggcaaggagaggccacaaggaatatgggtgggagtaaaagcaacatcgtctgcttcatactttttcctaggcttggcactgccttttcctttctcaggccaatggcaactgccatttgagtccggtgagggatcagccaacctcttctctatggctcaccttatttggagtgagaaatcaaggagacagagctgactgcatgatgagtctgaaggcatttgcaggatgagcctgaactggttgtgcagaacaaacaaggcattcatgggaattgttgtattccttctgcagccctccttctgggcactaagaaggtctatgaattaaatgcctatctaaaattctgatttattcctacattttctgttttctaatttgaccctaaaatctatgtgttttagacttagactttttattgccccccccccccccttttttttttgagacggagtctcgctctgacgcacaggctggagtgcagtggctccgatctctgctcactgaaagctccgcctcccgggttcacgccattctcctgcctcagcctcctgagtagctgggactacaggcgcccaccaccacgcccggctaattttttgtatttttaatagagacggggtttcactgtgttagccaggatggtctcgatctcctgacctcgtgatccgcctgcctcggcctcccaaagtgctgggattacaggcatgacccaccgctcccggccttgttttccgtttaaagtcgtcttcttttaatgtaatcattttgaacatgtgtgaaagttgatcatacgaattggatcaatcttgaaatactcaaccaaaagacagtcgagaagccagggggagaaagaactcagggcacaaaatattggtctgagaatggaattctctgtaagcctagttgctgaaatttcctgctgtatccagaagccagttttatctaacggctactgaaacacccactgtgttttgctcactccctcactcaccgatcaaaacctgctacctccccaagactttactagtgccgataaactttctcaaagagcaaccagtatcacttccctgtttataaaacctctaaccatctctttgttctttgaacatgctgaaaaccacctggtctgcatgtatgcccgaatttgtaattcttttctctcaaatgaaaatttaattttagggattcatttctatattttcacatatgtagtattattatttccttatatgtgtaaggtgaaatttatggtatttgagtgtgcaagaaaatatatttttaaagctttcatttttcccccagtgaatgatttagaattttttatgtaaatatacagaatgttttttcttacttttataaggaagcagctgtctaaaatgcagtggggtttgttttgcaatgttttaaacagagttttagtattgctattaaaagaagttactttgcttttaaagaaacttggctgcttaaaataagcaaaaattggatgcgtaaagtaatatttacagatgtggggagatgtaataaaacaatattaacttggtttcttgtttttgctgtatttagagattaaataattctaagatgatcactttgcaaaattatgcttatggctggcatggaaatagaaataattatgtctttgttgtattaatggggaatattttggacaatgtttcattatcaaattgtcgacatcattaatatatattgtaatgttgggaagagatcactattttgaagcacagctttacagatgagtatctatgatacatatgtataataaattttgattgggtattaaaagtattagaaggtggttataattgcagagtattccatgaatagtacactgacacaggggttttactttgaggaccagtgtagtcaagggaaaacatgagttaaaaagaaaagcaggcgatattgcagtcttgattctgccacttacaggatagataacgcctgaactttaatgacaagatgatccaaccataaaggtgctctgtgcttcacagtgaatcttttccccatgcaggagtgtgctcccctacaaacgttaagactgatcatttcaaaaatctattagctatatcaaaagccttacattttaatataggttgaaccaaaatttcaattccagtaacttctattgtaaccattatttttgtgtatgtcttcaagaatgttcattggatttttgtttgtaatagtaaaataccggatacatttcacgtgtccttcagtattgatttggttgaatattgggtcataatggttgagaagcatggacactagagccagaatgcttggatatgaatcctggatctgtcacttacttctgtgtgacctttgaaaggctacttatttcctctcttagctttctcattaaaatcaatgaacaatgccagcctcatggggttgttgaatgattaaatgagttactatacctaaagtacatagaacactgcctgcacatagtaaaagaattataagtgtgaggtagttggtaaaattatgta

SEQ ID NO: 215356 - protein, 514 aa, Artificial Sequence
  derived and/or modified sequence
LQDPASTCVPEPASQHTLRSGPGCLQQPEQQGVRDPGGIWAKLGAAEASAERLQGRRSRGASGSEPQQMGSDVRDLNALLPAVPSLGGGGGCALPVSGAAQWAPVLDFAPPGASAYGSLGGPAPPPAPPPPPPPPPHSFIKQEPSWGGAEPHEEQCLSAFTVHFSGQFTGTAGACRYGPFGPPPPSQASSGQARMFPNAPYLPSCLESQPAIRNQGYSTVTFDGTPSYGHTPSHHAAQFPNHSFKHEDPMGQQGSLGEQQYSVPPPVYGCHTPTDSCTGSQALLLRTPYSSDNLYQMTSQLECMTWNQMNLGATLKGVAAGSSSSVKWTEGQSNHSTGYESDNHTTPILCGAQYRIHTHGVFRGIQDVRRVPGVAPTLVRSASETSEKRPFMCAYPGCNKRYFKLSHLQMHSRKHTGEKPYQCDFKDCERRFSRSDQLKRHQRRHTGVKPFQCKTCQRKFSRSDHLKTHTRTHTGEKPFSCRWPSCQKKFARSDELVRHHNMHQRNMTKLQLAL

SEQ ID NO: 215357 - DNA, 1545 bp, Artificial Sequence
  derived and/or modified sequence
ctgcaggaccccgccagcacctgcgtgcccgagcccgccagccagcacaccctgagaagcggccccggctgcctgcagcagcccgagcagcagggcgtgagagaccccggcggcatctgggccaagctgggcgccgccgaggccagcgccgagagactgcagggcagaagaagcagaggcgccagcggcagcgagccccagcagatgggcagcgacgtgagagacctgaacgccctgctgcccgccgtgcccagcctgggcggcggcggcggctgcgccctgcccgtgagcggcgccgcccagtgggcccccgtgctggacttcgccccccccggcgccagcgcctacggcagcctgggcggccccgcccccccccccgccccccccccccccccccccccccccccccacagcttcatcaagcaggagcccagctggggcggcgccgagccccacgaggagcagtgcctgagcgccttcaccgtgcacttcagcggccagttcaccggcaccgccggcgcctgcagatacggccccttcggcccccccccccccagccaggccagcagcggccaggccagaatgttccccaacgccccctacctgcccagctgcctggagagccagcccgccatcagaaaccagggctacagcaccgtgaccttcgacggcacccccagctacggccacacccccagccaccacgccgcccagttccccaaccacagcttcaagcacgaggaccccatgggccagcagggcagcctgggcgagcagcagtacagcgtgcccccccccgtgtacggctgccacacccccaccgacagctgcaccggcagccaggccctgctgctgagaaccccctacagcagcgacaacctgtaccagatgaccagccagctggagtgcatgacctggaaccagatgaacctgggcgccaccctgaagggcgtggccgccggcagcagcagcagcgtgaagtggaccgagggccagagcaaccacagcaccggctacgagagcgacaaccacaccacccccatcctgtgcggcgcccagtacagaatccacacccacggcgtgttcagaggcatccaggacgtgagaagagtgcccggcgtggcccccaccctggtgagaagcgccagcgagaccagcgagaagagacccttcatgtgcgcctaccccggctgcaacaagagatacttcaagctgagccacctgcagatgcacagcagaaagcacaccggcgagaagccctaccagtgcgacttcaaggactgcgagagaagattcagcagaagcgaccagctgaagagacaccagagaagacacaccggcgtgaagcccttccagtgcaagacctgccagagaaagttcagcagaagcgaccacctgaagacccacaccagaacccacaccggcgagaagcccttcagctgcagatggcccagctgccagaagaagttcgccagaagcgacgagctggtgagacaccacaacatgcaccagagaaacatgaccaagctgcagctggccctgtag

SEQ ID NO: 215358 - DNA, 1545 bp, Artificial Sequence
  derived and/or modified sequence
ttgcaggaccctgcctctacctgcgtgccagaacccgcaagccagcataccctccgctccggccctggctgtctccagcaacctgagcagcagggagttcgagatcccggcggaatctgggccaaactgggcgcggctgaagcttcagccgagcgcctccagggtcgcaggagtcggggagcttctgggagcgaaccacagcaaatgggctccgatgtgcgcgatctcaacgctctgttgcctgcagtgccatctctcggcggaggcggcggttgcgctctgccggtctctggggctgcccagtgggctccagtgctagatttcgcgccacctggcgctagtgcgtacggcagcctcggcggcccggcaccgccaccagcaccaccgcctccacctccacccccccctcactcatttatcaagcaggagcctagctggggcggtgctgagccgcacgaggaacagtgtcttagcgccttcactgtgcacttcagtggccagttcacaggtacagccggggcatgcagatacggtcctttcggtccccctcccccctcgcaagctagttccgggcaagcccgcatgtttcctaacgccccctacctgccaagttgcctagagtcacagccggccatcaggaaccaggggtattcaaccgtgaccttcgatgggacaccctcatacggccatacgccttctcatcacgcggcccaattccccaaccactcctttaaacatgaggaccccatgggacagcagggtagcctcggtgagcagcaatactctgtcccgcctcctgtatacgggtgccacactcctacggacagttgtaccggatcccaagccttgctgcttcgcactccctactcttctgacaacctttaccaaatgacatctcagctcgaatgcatgacatggaatcagatgaatttgggcgcgacactcaaaggtgtggccgcaggttcgtcctcgagcgtaaagtggaccgaggggcagtccaaccatagcactgggtacgagtccgataatcatactactcccatactgtgcggagcccagtatagaatccatactcacggagtgttccgcgggatacaggacgtgcgccgcgtgcccggcgtggccccaacccttgtaaggtctgctagtgagacctctgagaagcgcccttttatgtgtgcataccctggttgtaacaagcggtacttcaagctctctcatcttcagatgcactctaggaagcacacaggggaaaaaccttaccagtgcgatttcaaggattgcgagcgccggtttagccggtcagaccaactaaagaggcaccagcggagacataccggagtgaaaccttttcagtgcaaaacctgtcaacgaaagttcagccgatctgaccatctgaaaactcatacacggacccatactggggaaaagcctttcagctgccggtggccctcttgccagaagaagttcgcccgatctgatgaattggtgcggcaccataacatgcaccagcgcaatatgacgaaactccagcttgccctctag

SEQ ID NO: 215359 - DNA, 1545 bp, Artificial Sequence
  derived and/or modified sequence
ctgcaggaccctgccagcacctgtgtgcctgagcccgccagccagcacaccctgcggagcggccctggctgcctgcagcagcctgagcagcagggcgtgcgggaccccggcggcatctgggccaagctgggcgctgctgaggccagcgctgagcggctgcagggccgccgcagcagaggagccagcggcagcgagccccagcagatgggcagtgatgtgcgggacctgaatgccctgctgcctgctgtgcccagcctgggcggcggcggcggctgtgccctgcctgtgtctggagctgcccagtgggcccctgtgctggactttgcccctcctggggccagcgcctacggcagcctgggcggccctgcccctcctccagcccctcctcctcctcctcctcctccaccccacagcttcatcaagcaggagcccagctggggcggcgctgagccccatgaggagcagtgcctgagcgccttcaccgtgcacttcagcggccagttcaccggcacagctggggcctgccgctatggccccttcggccccccaccacccagccaggccagcagcggccaggccaggatgttccccaatgccccctacctgcccagctgcctggagagccagcctgccatccggaaccagggctacagcacagtgacctttgatggcacccccagctatggccacacccccagccaccacgccgcccagttccccaaccacagcttcaagcatgaggaccccatgggccagcagggcagcctgggggagcagcagtacagcgtgcccccacctgtgtatggctgccacacccccacagacagctgcaccggcagccaggccctgctgctgcggaccccctacagcagtgacaacctgtaccagatgaccagccagctggagtgcatgacctggaaccagatgaacctgggcgccaccctgaagggcgtggccgccggcagcagcagctctgtgaagtggacagagggccagagcaaccacagcacaggctatgaaagtgacaaccacaccacccccatcctgtgtggggcccagtaccgcatccacacccatggagtcttccggggcatccaggatgtgagaagagtgcctggggtggcccccaccctggtgcgcagcgccagcgagaccagcgagaagaggcccttcatgtgtgcctacccaggctgcaacaagcgctacttcaagctgagccacctgcagatgcacagcaggaagcacactggagagaagccctaccagtgtgacttcaaggactgtgagcggcgcttcagcagaagtgaccagctgaagaggcaccagaggaggcacactggagtgaagcccttccagtgcaagacctgccagaggaagttcagcagaagtgaccacctgaagacccacaccaggacccacactggagagaagcccttcagctgccgctggcccagctgccagaagaagtttgcccggagtgatgagctggtgcgccaccacaacatgcaccagaggaacatgaccaagctgcagctggccctgtag

SEQ ID NO: 215360 - DNA, 1545 bp, Artificial Sequence
  derived and/or modified sequence
ctgcaggaccccgccagcacctgcgtgcccgagcccgccagccagcatacacttcgtagcggaccgggatgtttacagcagcctgagcagcagggcgtaagagacccaggcggaatatgggctaagttaggcgctgcggaagcctcagcagagagactccagggccggaggagtcggggtgccagtgggtccgagccccagcaaatgggctccgatgtgcgggatctgaacgccttactcccagccgtgccttccctcggcgggggcggcggttgcgcattaccagtgtccggggcagcccaatgggcgcccgttttggacttcgcgcctccgggagccagcgcttatgggtccctaggcggcccagcccccccccccgccccaccaccacctcccccccctccaccccactctttcataaagcaagagcccagctggggtggcgccgagccccacgaggaacagtgtttaagcgccttcaccgtacattttagcggccagttcacaggtacggcaggagcctgtcgctacggaccctttggtccccctcctcctagtcaggcctcctcagggcaagctcggatgtttcccaatgctccatacctgccctcttgtctagaatcccagccggccattagaaaccagggctattctactgttacctttgacggcactccatcatatggccacaccccctcacaccatgccgcccagttcccaaatcacagttttaaacatgaagatcctatggggcaacaggggtcgttgggagaacagcagtactcagttccaccccccgtgtatgggtgtcacacccccacagacagttgcactggatcccaggccctgctcctcaggaccccatacagctccgacaatctttaccagatgacctcccagctcgagtgcatgacttggaatcagatgaacctcggagccacgttgaagggtgtggctgctggctcctcttcctcagtcaagtggacagaagggcagtccaaccactcaaccgggtatgaaagcgataatcatacaaccccgatcctatgcggcgcacagtaccgcatccacacccatggcgtattccgaggtattcaagatgtccgacgcgtccctggtgtagcaccaactctggtgcggagcgctagcgagacttctgaaaaaagaccattcatgtgtgcctatcctgggtgcaacaagaggtactttaaattatctcatctgcagatgcacagtcggaagcacacaggcgaaaagccctatcaatgtgacttcaaggactgtgaaagaaggtttagcagaagcgatcagctcaagagacatcagcgccggcataccggagtaaagccttttcagtgtaaaacctgtcagaggaagtttagtcgcagtgaccatttaaagacacacacaaggacacacacaggtgaaaaacctttctcttgccggtggccaagttgccagaagaagtttgcccgcagtgacgagctagtccgccaccataatatgcatcaacgcaacatgaccaaactgcagctggctttgtag

SEQ ID NO: 215361 - DNA, 1545 bp, Artificial Sequence
  derived and/or modified sequence
cttcaggatccggcatcaacgtgtgtgccagagccagcgtcacagcacacccttcgctctggccctggatgcctgcagcaaccggagcagcagggcgtccgcgatcccggtggcatatgggcgaaactcggagcggctgaggcatccgcagagcgcctgcagggcaggagaagtcggggagcttctggctcagaaccacagcagatggggagtgatgtgcgcgacctgaacgctctcctgccagccgtgcctagccttggcggtggaggaggctgcgcactcccagttagcggggcagcgcagtgggcccctgttttggattttgcccctccaggtgcaagcgcctacgggagcctcgggggaccagcacccccacccgcacctcctcccccaccgcctccccctccccatagcttcattaagcaagagcctagttggggaggcgcagaacctcacgaggagcagtgtttgagcgccttcacagtgcatttctccggccagtttacgggcacagctggggcatgtagatacgggccattcgggcctccacctccctcccaagctagctccggccaggccaggatgtttcctaacgcgccttacctgccctcttgcctggaatctcagcccgctataagaaatcaaggatactctacagtaaccttcgacgggactccctcttacggtcacacccctagtcatcatgccgctcaattccccaatcactcttttaaacacgaagacccgatgggacagcaggggagcctgggtgagcagcagtactccgtgccccctcctgtgtatggttgtcacacaccaaccgattcctgcactgggagccaggctttgcttctgaggaccccctattcctccgataacctctaccagatgacaagccagctggagtgcatgacttggaaccagatgaatttgggagccactctgaaaggcgtcgccgctgggtcctcttcctctgttaaatggactgagggccaatcaaaccactctacagggtatgaatctgacaatcacaccacaccaatcctctgtggggctcaatatagaatccacactcacggcgtgttccgcggtatccaggatgtgcggagagttccgggagtagctccaacattggtgagatctgcctccgagacttctgagaagaggccctttatgtgtgcatacccgggatgtaataagcggtactttaaactgagtcacctgcaaatgcactcaagaaagcacaccggagagaaaccgtaccagtgcgactttaaagactgcgaaaggcggttttctcgctctgaccagttaaaaaggcatcagcgtaggcacaccggggtgaagccatttcaatgtaagacctgccagcggaagttctcaagaagcgatcatttaaagacccacacaagaacccacaccggtgaaaagccattttcatgtcgctggccatcctgccagaagaagttcgcacggagtgatgaactggtgagacatcataatatgcaccagagaaacatgactaagctccagctggcattgtag

SEQ ID NO: 215362 - DNA, 2114 bp, Artificial Sequence
  derived and/or modified sequence
agctggggtaaggagttcaaggcagcgcccacacccgggggctctccgcaacccgaccgcctgtccgctcccccacttcccgccctccctcccacctactcattcacccacccacccacccagagccgggacggcagcccaggcgcccgggccccgccgtctcctcgccgcgatcctggacttcctcttgctgcaggacccggcttccacgtgtgtcccggagccggcgtctcagcacacgctccgctccgggcctgggtgcctacagcagccagagcagcagggagtccgggacccgggcggcatctgggccaagttaggcgccgccgaggccagcgctgaacgtctccagggccggaggagccgcggggcgtccgggtctgagccgcagcaaatgggctccgacgtgcgggacctgaacgcgctgctgcccgccgtcccctccctgggtggcggcggcggctgtgccctgcctgtgagcggcgcggcgcagtgggcgccggtgctggactttgcgcccccgggcgcttcggcttacgggtcgttgggcggccccgcgccgccaccggctccgccgccacccccgccgccgccgcctcactccttcatcaaacaggagccgagctggggcggcgcggagccgcacgaggagcagtgcctgagcgccttcactgtccacttttccggccagttcactggcacagccggagcctgtcgctacgggcccttcggtcctcctccgcccagccaggcgtcatccggccaggccaggatgtttcctaacgcgccctacctgcccagctgcctcgagagccagcccgctattcgcaatcagggttacagcacggtcaccttcgacgggacgcccagctacggtcacacgccctcgcaccatgcggcgcagttccccaaccactcattcaagcatgaggatcccatgggccagcagggctcgctgggtgagcagcagtactcggtgccgcccccggtctatggctgccacacccccaccgacagctgcaccggcagccaggctttgctgctgaggacgccctacagcagtgacaatttataccaaatgacatcccagcttgaatgcatgacctggaatcagatgaacttaggagccaccttaaagggagttgctgctgggagctccagctcagtgaaatggacagaagggcagagcaaccacagcacagggtacgagagcgataaccacacaacgcccatcctctgcggagcccaatacagaatacacacgcacggtgtcttcagaggcattcaggatgtgcgacgtgtgcctggagtagccccgactcttgtacggtcggcatctgagaccagtgagaaacgccccttcatgtgtgcttacccaggctgcaataagagatattttaagctgtcccacttacagatgcacagcaggaagcacactggtgagaaaccataccagtgtgacttcaaggactgtgaacgaaggttttctcgttcagaccagctcaaaagacaccaaaggagacatacaggtgtgaaaccattccagtgtaaaacttgtcagcgaaagttctcccggtccgaccacctgaagacccacaccaggactcatacaggtgaaaagcccttcagctgtcggtggccaagttgtcagaaaaagtttgcccggtcagatgaattagtccgccatcacaacatgcatcagagaaacatgaccaaactccagctggcgctttgaggggtctccctcggggaccgttcagtgtcccaggcagcacagtgtgtgaactgctttcaagtctgactctccactcctcctcactaaaaaggaaacttcagttgatcttcttcatccaacttccaagacaagataccggtgcttctggaaactaccaggtgtgcctggaagagttggtctctgccctgcctacttttagttgactcacaggccctggagaagcagctaacaatgtctggttagttaaaagcccattgccatttggtgtggattttctactgtaagaagagccatagctgatcatgtccccctgacccttcccttctttttttatgctcgttttcgctggggatggaattattgtaccattttctatcat

SEQ ID NO: 215363 - protein, 517 aa, Artificial Sequence
  derived and/or modified sequence
LQDPASTCVPEPASQHTLRSGPGCLQQPEQQGVRDPGGIWAKLGAAEASAERLQGRRSRGASGSEPQQMGSDVRDLNALLPAVPSLGGGGGCALPVSGAAQWAPVLDFAPPGASAYGSLGGPAPPPAPPPPPPPPPHSFIKQEPSWGGAEPHEEQCLSAFTVHFSGQFTGTAGACRYGPFGPPPPSQASSGQARMFPNAPYLPSCLESQPAIRNQGYSTVTFDGTPSYGHTPSHHAAQFPNHSFKHEDPMGQQGSLGEQQYSVPPPVYGCHTPTDSCTGSQALLLRTPYSSDNLYQMTSQLECMTWNQMNLGATLKGVAAGSSSSVKWTEGQSNHSTGYESDNHTTPILCGAQYRIHTHGVFRGIQDVRRVPGVAPTLVRSASETSEKRPFMCAYPGCNKRYFKLSHLQMHSRKHTGEKPYQCDFKDCERRFSRSDQLKRHQRRHTGVKPFQCKTCQRKFSRSDHLKTHTRTHTGKTSEKPFSCRWPSCQKKFARSDELVRHHNMHQRNMTKLQLAL

SEQ ID NO: 215364 - protein, 317 aa, Artificial Sequence
  derived and/or modified sequence
LQDPASTCVPEPASQHTLRSGPGCLQQPEQQGVRDPGGIWAKLGAAEASAERLQGRRSRGASGSEPQQMGSDVRDLNALLPAVPSLGGGGGCALPVSGAAQWAPVLDFAPPGASAYGSLGGPAPPPAPPPPPPPPPHSFIKQEPSWGGAEPHEEQCLSAFTVHFSGQFTGTAGACRYGPFGPPPPSQASSGQARMFPNAPYLPSCLESQPAIRNQGYSTVTFDGTPSYGHTPSHHAAQFPNHSFKHEDPMGQQGSLGEQQYSVPPPVYGCHTPTDSCTGSQALLLRTPYSSDNLYQMTSQLECMTWNQMNLGATLKG

SEQ ID NO: 215365 - protein, 178 aa, Artificial Sequence
  derived and/or modified sequence
  misc_feature (1)..(1): Xaa can be any naturally occurring amino acid
XLGATLKGVAAGSSSSVKWTEGQSNHSTGYESDNHTTPILCGAQYRIHTHGVFRGIQDVRRVPGVAPTLVRSASETSEKRPFMCAYPGCNKRYFKLSHLQMHSRKHTGVKPFQCKTCQRKFSRSDHLKTHTRTHTGKTSEKPFSCRWPSCQKKFARSDELVRHHNMHQRNMTKLQLAL

SEQ ID NO: 215366 - DNA, 1554 bp, Artificial Sequence
  derived and/or modified sequence
ctgcaggaccccgccagcacctgcgtgcccgagcccgccagccagcacaccctgagaagcggccccggctgcctgcagcagcccgagcagcagggcgtgagagaccccggcggcatctgggccaagctgggcgccgccgaggccagcgccgagagactgcagggcagaagaagcagaggcgccagcggcagcgagccccagcagatgggcagcgacgtgagagacctgaacgccctgctgcccgccgtgcccagcctgggcggcggcggcggctgcgccctgcccgtgagcggcgccgcccagtgggcccccgtgctggacttcgccccccccggcgccagcgcctacggcagcctgggcggccccgcccccccccccgccccccccccccccccccccccccccccccacagcttcatcaagcaggagcccagctggggcggcgccgagccccacgaggagcagtgcctgagcgccttcaccgtgcacttcagcggccagttcaccggcaccgccggcgcctgcagatacggccccttcggcccccccccccccagccaggccagcagcggccaggccagaatgttccccaacgccccctacctgcccagctgcctggagagccagcccgccatcagaaaccagggctacagcaccgtgaccttcgacggcacccccagctacggccacacccccagccaccacgccgcccagttccccaaccacagcttcaagcacgaggaccccatgggccagcagggcagcctgggcgagcagcagtacagcgtgcccccccccgtgtacggctgccacacccccaccgacagctgcaccggcagccaggccctgctgctgagaaccccctacagcagcgacaacctgtaccagatgaccagccagctggagtgcatgacctggaaccagatgaacctgggcgccaccctgaagggcgtggccgccggcagcagcagcagcgtgaagtggaccgagggccagagcaaccacagcaccggctacgagagcgacaaccacaccacccccatcctgtgcggcgcccagtacagaatccacacccacggcgtgttcagaggcatccaggacgtgagaagagtgcccggcgtggcccccaccctggtgagaagcgccagcgagaccagcgagaagagacccttcatgtgcgcctaccccggctgcaacaagagatacttcaagctgagccacctgcagatgcacagcagaaagcacaccggcgagaagccctaccagtgcgacttcaaggactgcgagagaagattcagcagaagcgaccagctgaagagacaccagagaagacacaccggcgtgaagcccttccagtgcaagacctgccagagaaagttcagcagaagcgaccacctgaagacccacaccagaacccacaccggcaagaccagcgagaagcccttcagctgcagatggcccagctgccagaagaagttcgccagaagcgacgagctggtgagacaccacaacatgcaccagagaaacatgaccaagctgcagctggccctgtag

SEQ ID NO: 215367 - DNA, 537 bp, Artificial Sequence
  derived and/or modified sequence
tgactgggcgccaccctgaagggcgtggccgccggcagcagcagcagcgtgaagtggaccgagggccagagcaaccacagcaccggctacgagagcgacaaccacaccacccccatcctgtgcggcgcccagtacagaatccacacccacggcgtgttcagaggcatccaggacgtgagaagagtgcccggcgtggcccccaccctggtgagaagcgccagcgagaccagcgagaagagacccttcatgtgcgcctaccccggctgcaacaagagatacttcaagctgagccacctgcagatgcacagcagaaagcacaccggcgtgaagcccttccagtgcaagacctgccagagaaagttcagcagaagcgaccacctgaagacccacaccagaacccacaccggcaagaccagcgagaagcccttcagctgcagatggcccagctgccagaagaagttcgccagaagcgacgagctggtgagacaccacaacatgcaccagagaaacatgaccaagctgcagctggccctgtag

SEQ ID NO: 215368 - DNA, 1554 bp, Artificial Sequence
  derived and/or modified sequence
ctgcaggaccccgcctcaacttgcgtacctgaacctgcctctcagcatactctcaggtcaggccctggctgcctccagcagccggagcaacaaggggtgcgcgatcctggagggatctgggccaagctgggagccgctgaggcctccgctgagcggctgcagggtagaagatcccggggcgctagcggttctgagcctcaacagatggggagcgacgttcgcgaccttaacgccctcctgccagccgtcccatcactgggaggtgggggaggttgcgccctgccggtgtccggggccgcacagtgggctcctgtgctagacttcgctccacccggggcgtccgcctacggatccctgggaggtcccgcacccccacctgccccgccacccccacccccacccccaccacattcgtttattaagcaagaaccttcatgggggggggccgaaccccatgaggagcagtgcctgtcagcgtttaccgtgcatttttcggggcagtttactggcactgccggagcatgcagatatggcccattcgggccaccccctccatcccaggcaagctcgggtcaggcaagaatgtttcctaacgctccatacctgcctagttgtctcgagagccagcccgccattcggaatcagggttactctacagtgaccttcgacgggacccccagctatggccatactccctcacatcacgccgctcagtttccaaaccattccttcaagcatgaggatcccatgggtcagcaggggagcctcggcgaacaacagtacagcgtgccaccccccgtatacggttgtcacacccccacagacagctgtactggaagccaggccctccttctgcgcaccccatacagcagcgacaacctgtaccaaatgacttcccagctggagtgcatgacgtggaatcagatgaaccttggagcgactctaaagggcgtcgcagccggatccagtagctcagttaagtggacggaagggcaatcaaatcattccactggttatgaatccgacaaccatacaacgccaattttatgcggtgcgcagtatcgcatccatacacacggtgtgttcagggggatacaggacgtcagacgggtgcccggtgtggctccgaccctggtccggagtgcgtccgagacatcagagaaaaggccttttatgtgcgcctaccctgggtgtaacaaacgctatttcaaactgagccacctgcagatgcattcccggaaacatactggcgaaaagccttaccaatgtgatttcaaagattgtgaacgcaggtttagtagaagcgatcagcttaagcgccaccaaaggcggcatacaggagtgaaaccctttcaatgtaaaacttgccagcgcaagttctctaggagcgatcatcttaagacccacaccaggactcacaccggaaaaacgagcgaaaagccctttagttgtagatggccatcctgccagaagaaatttgcccgcagcgatgaactggtacgccatcacaacatgcatcaacgcaacatgaccaaactccaattggccctgtag

SEQ ID NO: 215369 - DNA, 537 bp, Artificial Sequence
  derived and/or modified sequence
tgattgggtgctacactgaagggcgtcgcagcaggttcttcatccagcgtgaaatggacagagggacaaagtaatcatagcacgggatacgagtctgataatcacactacaccaattttgtgcggagcccaatacagaatccacactcacggcgtgtttcgggggattcaggatgtacgccgcgttcccggggtcgcgcccacactggtaagaagcgcatccgagacgagtgagaagcggccatttatgtgcgcttaccccggctgcaataagcgctactttaaactgtcccacctccagatgcactcccgtaagcataccggagtgaagccgtttcagtgcaagacctgtcaacggaagttttcccggagtgatcacctgaaaactcacacgcggacacacaccgggaagacttctgagaagccattttcctgtagatggccatcttgccaaaaaaagttcgcacggagtgacgagttggtgagacatcacaatatgcatcaaagaaatatgacaaaactgcaactcgccttgtag

SEQ ID NO: 215370 - DNA, 1554 bp, Artificial Sequence
  derived and/or modified sequence
ctgcaggaccctgccagcacctgtgtgcctgagcccgccagccagcacaccctgcggagcggccctggctgcctgcagcagcctgagcagcagggcgtgcgggaccccggcggcatctgggccaagctgggcgctgctgaggccagcgctgagcggctgcagggccgccgcagcagaggagccagcggcagcgagccccagcagatgggcagtgatgtgcgggacctgaatgccctgctgcctgctgtgcccagcctgggcggcggcggcggctgtgccctgcctgtgtctggagctgcccagtgggcccctgtgctggactttgcccctcctggggccagcgcctacggcagcctgggcggccctgcccctcctccagcccctcctcctcctcctcctcctccaccccacagcttcatcaagcaggagcccagctggggcggcgctgagccccatgaggagcagtgcctgagcgccttcaccgtgcacttcagcggccagttcaccggcacagctggggcctgccgctatggccccttcggccccccaccacccagccaggccagcagcggccaggccaggatgttccccaatgccccctacctgcccagctgcctggagagccagcctgccatccggaaccagggctacagcacagtgacctttgatggcacccccagctatggccacacccccagccaccacgccgcccagttccccaaccacagcttcaagcatgaggaccccatgggccagcagggcagcctgggggagcagcagtacagcgtgcccccacctgtgtatggctgccacacccccacagacagctgcaccggcagccaggccctgctgctgcggaccccctacagcagtgacaacctgtaccagatgaccagccagctggagtgcatgacctggaaccagatgaacctgggcgccaccctgaagggcgtggccgccggcagcagcagctctgtgaagtggacagagggccagagcaaccacagcacaggctatgaaagtgacaaccacaccacccccatcctgtgtggggcccagtaccgcatccacacccatggagtcttccggggcatccaggatgtgagaagagtgcctggggtggcccccaccctggtgcgcagcgccagcgagaccagcgagaagaggcccttcatgtgtgcctacccaggctgcaacaagcgctacttcaagctgagccacctgcagatgcacagcaggaagcacactggagagaagccctaccagtgtgacttcaaggactgtgagcggcgcttcagcagaagtgaccagctgaagaggcaccagaggaggcacactggagtgaagcccttccagtgcaagacctgccagaggaagttcagcagaagtgaccacctgaagacccacaccaggacccacacaggcaagaccagcgagaagcccttcagctgccgctggcccagctgccagaagaagtttgcccggagtgatgagctggtgcgccaccacaacatgcaccagaggaacatgaccaagctgcagctggccctgtag

SEQ ID NO: 215371 - DNA, 537 bp, Artificial Sequence
  derived and/or modified sequence
tgactgggcgccaccctgaagggcgtggccgccggcagcagcagctctgtgaagtggacagagggccagagcaaccacagcacaggctatgaaagtgacaaccacaccacccccatcctgtgtggggcccagtaccgcatccacacccacggcgtcttccggggcatccaggatgtgcggcgggtgcctggggtggcccccaccctggtgcgcagcgccagcgagaccagcgagaagaggcccttcatgtgtgcctacccaggctgcaacaagcgctacttcaagctgagccacctgcagatgcacagcaggaagcacactggagtgaagcccttccagtgcaagacctgccagaggaagttcagcagaagtgaccacctgaagacccacaccaggacccacacaggcaagaccagcgagaagcccttcagctgccgctggcccagctgccagaagaagtttgcccggagtgatgagctggtgcgccaccacaacatgcaccagaggaacatgaccaagctgcagctggccctgtag

SEQ ID NO: 215372 - DNA, 1554 bp, Artificial Sequence
  derived and/or modified sequence
ctgcaggaccccgccagcacctgcgtgcccgagcccgccagccagcacaccttacgcagcggccccggctgcctccaacagccagaacagcagggcgtacgcgacccggggggtatatgggcaaagctgggtgctgcagaggcgtccgcagagcgcctgcagggtcggagaagccgaggcgcctccgggtctgaaccccagcagatgggttcagacgtgcgagatctgaacgctctactgcctgccgtccccagtttgggtgggggcggggggtgcgcattacctgttagcggcgcggcacagtgggcacctgtgctggactttgccccccccggcgcctccgcatacggctccctaggcggcccagccccacccccagcccctcctccccccccacctcccccgccccacagtttcataaagcaggagcccagttgggggggtgcagaaccacatgaagagcagtgcctctcagcgttcactgttcacttctcaggtcagttcacaggtacagcgggcgcctgccggtacggcccattcggcccccccccgccatcccaggcctcatcagggcaggctcggatgttcccgaatgctccatatctgccttcctgtctggaatcccagcccgcaattagaaatcagggatattccacagtgacgtttgacggtactccatcttatgggcatactccttcacaccatgcggcccagttccctaaccacagtttcaaacacgaggacccaatgggccagcagggaagcctcggggagcagcagtacagcgtccctcccccagtctacggctgccatactcccaccgacagttgtacaggatcacaggccttgctgctcagaacaccatatagctcagataatctttatcagatgacatcccagctggagtgcatgacttggaatcagatgaacctgggagcgactcttaagggagtcgctgccggcagcagtagctctgtgaaatggacagaaggccagagcaaccacagtaccggttacgaaagcgataaccacacaacacccatcctgtgtggggctcagtaccggattcacacgcacggagtgtttcgaggtatacaggacgtacggcgcgtgccgggtgtggctccgaccctggttaggagcgcatctgaaacttcagaaaagagaccgtttatgtgcgcctatcctggatgcaataagcggtattttaagttgtcgcacctgcaaatgcactctcgtaagcacaccggcgaaaagccttatcagtgcgattttaaggactgcgagcgtcgcttctcacgaagcgaccagctgaagagacatcagagaagacacacgggtgtgaagcctttccagtgcaaaacatgtcaacgcaaattttctcgtagtgaccatctcaagacccatacccgcacacacacaggaaaaacctctgagaagccgttttcctgtagatggccttcgtgtcaaaagaagtttgcgcggagcgatgaactggtgaggcaccacaacatgcaccagcggaatatgacaaagctccagctggccctctag

SEQ ID NO: 215373 - DNA, 537 bp, Artificial Sequence
  derived and/or modified sequence
tgactgggcgccaccctgaagggcgtggccgccggcagcagcagctctgtcaagtggactgaagggcagagcaatcactcaaccggctatgaaagcgataatcatacaacaccgatcctttgcggggcccagtaccgtatacacacacatggcgtctttcgcggaatccaagatgtgaggagagtgccgggggttgccccaactctagtgcgtagcgcttctgaaaccagcgagaaacggccattcatgtgcgcatatcccggatgtaataagagatactttaaactcagccatctgcaaatgcattcccgtaaacataccggcgttaaacctttccaatgtaagacttgccagcggaagtttagtcggtcagaccacctgaagacccatactaggacacatacaggaaaaaccagtgaaaaacctttctcctgtcggtggcccagctgccagaaaaaattcgctcggtcagacgaactagtacgacaccataacatgcaccaaagaaatatgactaaactgcaattagctctgtag

SEQ ID NO: 215374 - DNA, 1554 bp, Artificial Sequence
  derived and/or modified sequence
ttgcaggatcccgcttcaacctgcgtgccagaacctgcctcacagcacacgctgcgctccgggcctggctgcctacaacaacctgagcagcagggcgttcgagatcccggtggcatctgggccaagctgggtgcggctgaagctagcgcggagagactccaaggaagacggtctaggggggctagcggaagcgaaccgcagcagatgggctccgatgtgagagatttgaacgccctgctacctgccgtgccatcactcggtgggggtggagggtgcgctctgccagtgagcggcgcagcacaatgggcacccgtgctggactttgcccctcccggtgccagcgcatacggatccctcggcggacccgcaccccctccagccccacctcccccacccccaccccctccacatagctttatcaaacaggagcccagctggggtggggcagaaccgcatgaggagcagtgcctgagtgccttcactgtccatttctctggtcaatttactgggaccgctggcgcatgccgctatggccctttcggcccacccccaccaagccaggcttcctctggccaggctcgcatgttccctaatgccccatacctcccttcgtgcctggaatcgcaaccggcaatccgaaaccaagggtattccactgtgaccttcgacggcacacccagctatggtcatacaccaagtcaccacgcagctcagttccctaaccattcctttaaacatgaagaccctatgggacagcagggtagcctgggagagcagcagtactcggtgccaccccctgtttacggatgtcacacccctacagatagctgcactgggtcgcaggccctactgctacggactccctattcttccgacaatttatatcaaatgacctctcagcttgaatgcatgacctggaaccagatgaatctgggggctacattgaaaggcgtggctgctgggagctcctcctccgtgaagtggactgagggccagtcaaaccacagtacaggctatgagtctgataaccacaccacacccatcttatgcggcgctcagtacaggatacacacacacggtgtcttcaggggtattcaggatgttcgtagggtcccaggagtggcacccacacttgtcagaagcgcatcagaaacttccgagaaaaggcctttcatgtgcgcctaccccggatgcaacaagcgatactttaagctgtcgcatctccagatgcattccaggaagcacaccggtgagaagccataccaatgcgactttaaggattgcgaacgtcgtttcagcaggtctgaccagctgaagaggcaccagcgtaggcataccggcgtgaaacctttccagtgtaagacatgccaaagaaaatttagcagatccgatcacttaaaaactcatacacggacacacaccggcaagacaagcgaaaagccattcagctgtaggtggcctagctgccaaaaaaagttcgcacggtctgatgagctggtacggcaccacaacatgcaccagaggaatatgacaaagctccagctggccctgtag

SEQ ID NO: 215375 - DNA, 537 bp, Artificial Sequence
  derived and/or modified sequence
tgactaggcgctacactgaaaggtgtcgctgccggatcatcttcctcggtcaagtggacagaaggccagagcaaccacagtactgggtacgaatccgataaccacaccactccaattctctgtggcgcacaatacagaattcacacacatggagtctttcggggaatacaagacgtaagacgtgtacctggagtcgccccaactctggtgagatccgcttccgaaacaagtgagaaacgccctttcatgtgtgcctaccccggttgcaacaagcgttacttcaaactgtctcacctgcagatgcacagccgcaaacatacaggcgttaagcccttccagtgtaaaacctgccagcgtaaattttcaagatctgaccacttaaaaacacatacacgtactcacacgggaaaaacgtcagaaaagccattctcttgtcggtggccctcctgccagaagaagttcgcgcgatccgatgaacttgtgcggcatcataatatgcatcagaggaatatgaccaagctgcaactcgcactgtag

SEQ ID NO: 215376 - DNA, 3122 bp, Artificial Sequence
  derived and/or modified sequence
tgagtgaatggagcggccgagcctcctggctcctcctcttccccgcgccgccggcccctcttatttgagctttgggaagctgagggcagccaggcagctggggtaaggagttcaaggcagcgcccacacccgggggctctccgcaacccgaccgcctgtccgctcccccacttcccgccctccctcccacctactcattcacccacccacccacccagagccgggacggcagcccaggcgcccgggccccgccgtctcctcgccgcgatcctggacttcctcttgctgcaggacccggcttccacgtgtgtcccggagccggcgtctcagcacacgctccgctccgggcctgggtgcctacagcagccagagcagcagggagtccgggacccgggcggcatctgggccaagttaggcgccgccgaggccagcgctgaacgtctccagggccggaggagccgcggggcgtccgggtctgagccgcagcaaatgggctccgacgtgcgggacctgaacgcgctgctgcccgccgtcccctccctgggtggcggcggcggctgtgccctgcctgtgagcggcgcggcgcagtgggcgccggtgctggactttgcgcccccgggcgcttcggcttacgggtcgttgggcggccccgcgccgccaccggctccgccgccacccccgccgccgccgcctcactccttcatcaaacaggagccgagctggggcggcgcggagccgcacgaggagcagtgcctgagcgccttcactgtccacttttccggccagttcactggcacagccggagcctgtcgctacgggcccttcggtcctcctccgcccagccaggcgtcatccggccaggccaggatgtttcctaacgcgccctacctgcccagctgcctcgagagccagcccgctattcgcaatcagggttacagcacggtcaccttcgacgggacgcccagctacggtcacacgccctcgcaccatgcggcgcagttccccaaccactcattcaagcatgaggatcccatgggccagcagggctcgctgggtgagcagcagtactcggtgccgcccccggtctatggctgccacacccccaccgacagctgcaccggcagccaggctttgctgctgaggacgccctacagcagtgacaatttataccaaatgacatcccagcttgaatgcatgacctggaatcagatgaacttaggagccaccttaaagggagttgctgctgggagctccagctcagtgaaatggacagaagggcagagcaaccacagcacagggtacgagagcgataaccacacaacgcccatcctctgcggagcccaatacagaatacacacgcacggtgtcttcagaggcattcaggatgtgcgacgtgtgcctggagtagccccgactcttgtacggtcggcatctgagaccagtgagaaacgccccttcatgtgtgcttacccaggctgcaataagagatattttaagctgtcccacttacagatgcacagcaggaagcacactggtgagaaaccataccagtgtgacttcaaggactgtgaacgaaggttttctcgttcagaccagctcaaaagacaccaaaggagacatacaggtgtgaaaccattccagtgtaaaacttgtcagcgaaagttctcccggtccgaccacctgaagacccacaccaggactcatacaggtaaaacaagtgaaaagcccttcagctgtcggtggccaagttgtcagaaaaagtttgcccggtcagatgaattagtccgccatcacaacatgcatcagagaaacatgaccaaactccagctggcgctttgaggggtctccctcggggaccgttcagtgtcccaggcagcacagtgtgtgaactgctttcaagtctgactctccactcctcctcactaaaaaggaaacttcagttgatcttcttcatccaacttccaagacaagataccggtgcttctggaaactaccaggtgtgcctggaagagttggtctctgccctgcctacttttagttgactcacaggccctggagaagcagctaacaatgtctggttagttaaaagcccattgccatttggtgtggattttctactgtaagaagagccatagctgatcatgtccccctgacccttcccttctttttttatgctcgttttcgctggggatggaattattgtaccattttctatcatggaatatttataggccagggcatgtgtatgtgtctgctaatgtaaactttgtcatggtttccatttactaacagcaacagcaagaaataaatcagagagcaaggcatcgggggtgaatcttgtctaacattcccgaggtcagccaggctgctaacctggaaagcaggatgtagttctgccaggcaacttttaaagctcatgcatttcaagcagctgaagaaaaaatcagaactaaccagtacctctgtatagaaatctaaaagaattttaccattcagttaattcaatgtgaacactggcacactgctcttaagaaactatgaagatctgagatttttttgtgtatgtttttgactcttttgagtggtaatcatatgtgtctttatagatgtacatacctccttgcacaaatggaggggaattcattttcatcactgggagtgtccttagtgtataaaaaccatgctggtatatggcttcaagttgtaaaaatgaaagtgactttaaaagaaaataggggatggtccaggatctccactgataagactgtttttaagtaacttaaggacctttgggtctacaagtatatgtgaaaaaaatgagacttactgggtgaggaaatccattgtttaaagatggtcgtgtgtgtgtgtgtgtgtgtgtgtgtgtgtgtgttgtgttgtgttttgttttttaagggagggaatttattatttaccgttgcttgaaattactgtgtaaatatatgtctgataatgatttgctctttgacaactaaaattaggactgtataagtactagatgcatcactgggtgttgatcttacaagatattgatgataacacttaaaattgtaacctgcatttttcactttgctctcaattaaagtctattcaaaaggaaa

SEQ ID NO: 215377 - DNA, 3032 bp, Artificial Sequence
  derived and/or modified sequence
gggccccgccgtctcctcgccgcgatcctggacttcctcttgctgcaggacccggcttccacgtgtgtcccggagccggcgtctcagcacacgctccgctccgggcctgggtgcctacagcagccagagcagcagggagtccgggacccgggcggcatctgggccaagttaggcgccgccgaggccagcgctgaacgtctccagggccggaggagccgcggggcgtccgggtctgagccgcagcaaatgggctccgacgtgcgggacctgaacgcgctgctgcccgccgtcccctccctgggtggcggcggcggctgtgccctgcctgtgagcggcgcggcgcagtgggcgccggtgctggactttgcgcccccgggcgcttcggcttacgggtcgttgggcggccccgcgccgccaccggctccgccgccacccccgccgccgccgcctcactccttcatcaaacaggagccgagctggggcggcgcggagccgcacgaggagcagtgcctgagcgccttcactgtccacttttccggccagttcactggcacagccggagcctgtcgctacgggcccttcggtcctcctccgcccagccaggcgtcatccggccaggccaggatgtttcctaacgcgccctacctgcccagctgcctcgagagccagcccgctattcgcaatcagggttacagcacggtcaccttcgacgggacgcccagctacggtcacacgccctcgcaccatgcggcgcagttccccaaccactcattcaagcatgaggatcccatgggccagcagggctcgctgggtgagcagcagtactcggtgccgcccccggtctatggctgccacacccccaccgacagctgcaccggcagccaggctttgctgctgaggacgccctacagcagtgacaatttataccaaatgacatcccagcttgaatgcatgacctggaatcagatgaacttaggagccaccttaaaggggtaaggttttctctattccattgcctttccacagtaacttatacctgtttgaaccatttcaaaggtgcttagaacttatgaagaaagtacagttttagaagaaagggcaaagctctctgtgacattagaacgctttcctccttcccctagttgagttgctgctgggagctccagctcagtgaaatggacagaagggcagagcaaccacagcacagggtacgagagcgataaccacacaacgcccatcctctgcggagcccaatacagaatacacacgcacggtgtcttcagaggcattcaggatgtgcgacgtgtgcctggagtagccccgactcttgtacggtcggcatctgagaccagtgagaaacgccccttcatgtgtgcttacccaggctgcaataagagatattttaagctgtcccacttacagatgcacagcaggaagcacactggtgagaaaccataccagtgtgacttcaaggactgtgaacgaaggttttctcgttcagaccagctcaaaagacaccaaaggagacatacaggtgtgaaaccattccagtgtaaaacttgtcagcgaaagttctcccggtccgaccacctgaagacccacaccaggactcatacaggtaaaacaagtgaaaagcccttcagctgtcggtggccaagttgtcagaaaaagtttgcccggtcagatgaattagtccgccatcacaacatgcatcagagaaacatgaccaaactccagctggcgctttgaggggtctccctcggggaccgttcagtgtcccaggcagcacagtgtgtgaactgctttcaagtctgactctccactcctcctcactaaaaaggaaacttcagttgatcttcttcatccaacttccaagacaagataccggtgcttctggaaactaccaggtgtgcctggaagagttggtctctgccctgcctacttttagttgactcacaggccctggagaagcagctaacaatgtctggttagttaaaagcccattgccatttggtgtggattttctactgtaagaagagccatagctgatcatgtccccctgacccttcccttctttttttatgctcgttttcgctggggatggaattattgtaccattttctatcatggaatatttataggccagggcatgtgtatgtgtctgctaatgtaaactttgtcatggtttccatttactaacagcaacagcaagaaataaatcagagagcaaggcatcgggggtgaatcttgtctaacattcccgaggtcagccaggctgctaacctggaaagcaggatgtagttctgccaggcaacttttaaagctcatgcatttcaagcagctgaagaaaaaatcagaactaaccagtacctctgtatagaaatctaaaagaattttaccattcagttaattcaatgtgaacactggcacactgctcttaagaaactatgaagatctgagatttttttgtgtatgtttttgactcttttgagtggtaatcatatgtgtctttatagatgtacatacctccttgcacaaatggaggggaattcattttcatcactgggagtgtccttagtgtataaaaaccatgctggtatatggcttcaagttgtaaaaatgaaagtgactttaaaagaaaataggggatggtccaggatctccactgataagactgtttttaagtaacttaaggacctttgggtctacaagtatatgtgaaaaaaatgagacttactgggtgaggaaatccattgtttaaagatggtcgtgtgtgtgtgtgtgtgtgtgtgtgtgtgtgtgttgtgttgtgttttgttttttaagggagggaatttattatttaccgttgcttgaaattactgtgtaaatatatgtctgataatgatttgctctttgacaactaaaattaggactgtataagtactagatgcatcactgggtgttgatcttacaagatattgatgataacacttaaaattgtaacctgcatttttcactttgctctcaattaaagtctattcaaaaggaaa

SEQ ID NO: 215378 - DNA, 551 bp, Artificial Sequence
  derived and/or modified sequence
cttaggagccaccttaaagggagttgctgctgggagctccagctcagtgaaatggacagaagggcagagcaaccacagcacagggtacgagagcgataaccacacaacgcccatcctctgcggagcccaatacagaatacacacgcacggtgtcttcagaggcattcaggatgtgcgacgtgtgcctggagtagccccgactcttgtacggtcggcatctgagaccagtgagaaacgccccttcatgtgtgcttacccaggctgcaataagagatattttaagctgtcccacttacagatgcacagcaggaagcacactggtgtgaaaccattccagtgtaaaacttgtcagcgaaagttctcccggtccgaccacctgaagacccacaccaggactcatacaggtaaaacaagtgaaaagcccttcagctgtcggtggccaagttgtcagaaaaagtttgcccggtcagatgaattagtccgccatcacaacatgcatcagagaaacatgaccaaactccagctggcgctttgaggggtctccctcgggg

SEQ ID NO: 215379 - protein, 312 aa, Artificial Sequence
  derived and/or modified sequence
MTRSLFKGNFWSADILSTIGYDNIIQHLNNGRKNCKEFEDFLKERAAIEERYGKDLLNLSRKKPCGQSEINTLKRALEVFKQQVDNVAQCHIQLAQSLREEARKMEEFREKQKLQRKKTELIMDAIHKQKSLQFKKTMDAKKNYEQKCRDKDEAEQAVSRSANLVNPKQQEKLFVKLATSKTAVEDSDKAYMLHIGTLDKVREEWQSEHIKACEAFEAQECERINFFRNALWLHVNQLSQQCVTSDEHPSCMRISTPPRRMQSQQERLQGLTWQGEDPSQFLKAHQMIPITLWLMTTVCSISKINETRAFSG

SEQ ID NO: 215380 - protein, 334 aa, Artificial Sequence
  derived and/or modified sequence
MTRSLFKGNFWSADILSTIGYDNIIQHLNNGRKNCKEFEDFLKERAAIEERYGKDLLNLSRKKPCGQSEINTLKRALEVFKQQVDNVAQCHIQLAQSLREEARKMEEFREKQKLQRKKTELIMDAIHKQKSLQFKKTMDAKKNYEQKCRDKDEAEQAVSRSANLVNPKQQEKLFVKLATSKTAVEDSDKAYMLHIGTLDKVREEWQSEHIKACEAFEAQECERINFFRNALWLHVNQLSQQCVTSDEMYEQVRKSLEMCSIQRDIEYFVNQRKTGQIPPAPIMYENFYSSQKNAVPAGKATGPNLARRGPLPIPKSSPDDPNYSLVDDYSLLYQ

SEQ ID NO: 215381 - DNA, 939 bp, Artificial Sequence
  derived and/or modified sequence
atgaccagaagcctgttcaagggcaacttctggagcgccgacatcctgagcaccatcggctacgacaacatcatccagcacctgaacaacggcagaaagaactgcaaggagttcgaggacttcctgaaggagagagccgccatcgaggagagatacggcaaggacctgctgaacctgagcagaaagaagccctgcggccagagcgagatcaacaccctgaagagagccctggaggtgttcaagcagcaggtggacaacgtggcccagtgccacatccagctggcccagagcctgagagaggaggccagaaagatggaggagttcagagagaagcagaagctgcagagaaagaagaccgagctgatcatggacgccatccacaagcagaagagcctgcagttcaagaagaccatggacgccaagaagaactacgagcagaagtgcagagacaaggacgaggccgagcaggccgtgagcagaagcgccaacctggtgaaccccaagcagcaggagaagctgttcgtgaagctggccaccagcaagaccgccgtggaggacagcgacaaggcctacatgctgcacatcggcaccctggacaaggtgagagaggagtggcagagcgagcacatcaaggcctgcgaggccttcgaggcccaggagtgcgagagaatcaacttcttcagaaacgccctgtggctgcacgtgaaccagctgagccagcagtgcgtgaccagcgacgagcaccccagctgcatgagaatcagcaccccccccagaagaatgcagagccagcaggagagactgcagggcctgacctggcagggcgaggaccccagccagttcctgaaggcccaccagatgatccccatcaccctgtggctgatgaccaccgtgtgcagcatcagcaagatcaacgagaccagagccttcagcggctag

SEQ ID NO: 215382 - DNA, 1005 bp, Artificial Sequence
  derived and/or modified sequence
atgaccagaagcctgttcaagggcaacttctggagcgccgacatcctgagcaccatcggctacgacaacatcatccagcacctgaacaacggcagaaagaactgcaaggagttcgaggacttcctgaaggagagagccgccatcgaggagagatacggcaaggacctgctgaacctgagcagaaagaagccctgcggccagagcgagatcaacaccctgaagagagccctggaggtgttcaagcagcaggtggacaacgtggcccagtgccacatccagctggcccagagcctgagagaggaggccagaaagatggaggagttcagagagaagcagaagctgcagagaaagaagaccgagctgatcatggacgccatccacaagcagaagagcctgcagttcaagaagaccatggacgccaagaagaactacgagcagaagtgcagagacaaggacgaggccgagcaggccgtgagcagaagcgccaacctggtgaaccccaagcagcaggagaagctgttcgtgaagctggccaccagcaagaccgccgtggaggacagcgacaaggcctacatgctgcacatcggcaccctggacaaggtgagagaggagtggcagagcgagcacatcaaggcctgcgaggccttcgaggcccaggagtgcgagagaatcaacttcttcagaaacgccctgtggctgcacgtgaaccagctgagccagcagtgcgtgaccagcgacgagatgtacgagcaggtgagaaagagcctggagatgtgcagcatccagagagacatcgagtacttcgtgaaccagagaaagaccggccagatcccccccgcccccatcatgtacgagaacttctacagcagccagaagaacgccgtgcccgccggcaaggccaccggccccaacctggccagaagaggccccctgcccatccccaagagcagccccgacgaccccaactacagcctggtggacgactacagcctgctgtaccagtag

SEQ ID NO: 215383 - DNA, 2900 bp, Artificial Sequence
  derived and/or modified sequence
ggcagtcaggcctccccgctctgtgctacctgcggcccggctctcctccgcgcccccactcgcgctgcgatgacgcgctcactgttcaagggaaacttttggagtgcagacatcctcagcaccatcggctatgacaacattatccaacatctgaacaatggccgcaagaactgcaaagagtttgaagactttctaaaagaaagggcagcaattgaagagaggtatggcaaagatctgctcaacctctctaggaagaagccgtgtggacagtctgaaatcaacaccctgaagcgggcccttgaagtcttcaagcagcaagtagacaatgtggcacaatgtcacattcagcttgcacagagtttaagagaagaggccaggaagatggaagaattcagggaaaagcaaaaactacaacgaaaaaagacagagctcataatggatgctatccataaacaaaagagcttacaattcaagaaaaccatggatgcaaagaagaactatgagcagaaatgccgggacaaagatgaggcagaacaggccgtcagccggagtgccaacctggtgaacccgaagcaacaagaaaagctttttgtgaaactggcaacttcaaagaccgcagtagaggactcagacaaagcatacatgctgcacatcggcaccctggataaggtccgagaagagtggcagagtgagcacatcaaggcctgcgaggcatttgaggctcaagaatgtgaacgaataaacttcttccggaatgcattgtggttacatgtgaatcagctgtcacaacaatgtgtcaccagtgatgaacacccatcatgtatgagaatttctactcctcccagaagaatgcagtcccagcaggaaaggctacagggcctaacttggcaaggagaggacccctcccaattcctaaaagctcaccagatgatcccaattactctttggttgatgactacagtttgctctatcagtaaaatcaatgaaaccagagctttttccggctagtgcttctgtgatatggaaagggcacccagagcagcaggacctatagccacgttatgtcagcaatgaagactttgaagtgaacccttgctataattttttagagatttaaaatttatggtagacatttaggacaacataagcaagtagagttctgcagttttttgaagtttacaaattgccccattctgaagaattattctttcccagttactcaggttatgaatgaattaggttttcaacatgggaagcatgaaatccacttctggatttggagcatccacttgaggagcagaggtggcagcagaggattctgagccaccaactgcagtagtggctcctttggctttgggcagcctggctgtggagtttccacggcgacacacagcctcagtggtgcaagatttaaaattaccttcctttttggctggaagacttagaagccgcctgatcatactttctcattttacagatgaggaaataaagcctacaagtgtgaaattaatttccttacagttttcctagctgatgagggacagaaccagaactagagcctgagcccaacccacatcactattcttctaacccttcctgaagttgtgatgctcatgctgaaatttaagatgccaaatatttttgccagcactttttcagttgggagaatcaccagggtttaaatgtcagatttatttttatgtggatccctgtgtatgctgaactacagagcatgatgtttaatctaatttaaggagccactgattgtaaaacatgccattattttatgttgcactaagaaggtggggtcgaggagttgccaataaacttgggacagactattgatggccaagcccatctgaatttaagatgctaaagtatgaaaaaaatacatcttagaatcaatgaaataccatattttgattccattcctcaagataattttagagttataaaaccagtcctcaattttgggtcttcacagagaatctttcccttgctagaccccagaattttaaatgcatccgtcttacactttcacaaatatttgggttttcctttttcactcacaaacagcagggaggtcatgtactttttgtacaacacctgtgcactatgagaaaatggtaccttttagttattgacaagttaaaatagcactctcagtttttcagtattacagagagcaaatagtttcctctcctgctctgtgcagtagcttttccagaactatggacaaattgatcagaagaagattgattatttcctcatctttttttcttttttttgagacagagtctctctctgtcccccaggctgaagtgcagcggcatgatctcagctcactgcaacctctgcctcccgggttcaagtgattctcctgcctcagcctcctgagtagctgggattacaggcacccaccaccacacctggctaattttttgtatttttagtaaagacagggttttaccatgttggtcaggctggtctcaaactcctgacctcaggtgatccacctgcctcggcctcccaaagtgctgggattacaggcgtgagccactgcgcccggcctatttccccacctttcgtgtaaggtgctactgaacatgacagcttcttgtcatgacaggaaacttgcatcagttggatatccttttgagaaactgaattttgcaaagggccaaatttccccaaactgaacgggctcaggaaatgttcctttacactcagaacattctattttaagtatattatttattgttggcagttcctcagggatttcccttttctctgtattggtcagtgtagttgatgtaaaaccgttttgtggatggaaaatatttttattttattgctcttttagtttggtaggttaaataaaggttcttggtaatttggga

SEQ ID NO: 215384 - DNA, 939 bp, Artificial Sequence
  derived and/or modified sequence
atgacgcgctccctgtttaaaggcaatttttggtccgctgatattttgagcacaataggctacgataacattatccagcatctgaataacggcaggaaaaattgcaaagagttcgaagattttcttaaagaaagagctgcaattgaggaacggtatggaaaagacctacttaacttgtcccgcaagaagccctgtgggcagtctgagatcaacacactcaagcgggcgctagaggtgttcaaacaacaggttgataacgtggcgcagtgtcatatccagctggcccagtctttgagggaggaggcccggaaaatggaagagttcagggagaagcagaaactgcagcgcaagaaaaccgaactaattatggacgccatacataagcagaaaagccttcagttcaaaaagacaatggacgccaaaaaaaattacgagcagaaatgccgggacaaggacgaggccgagcaggcagtgtcacgatccgccaatttagtgaatcccaagcagcaggagaaattatttgtaaagcttgccacgtccaagaccgccgtggaggactccgacaaggcctacatgcttcacataggaactctggacaaggtccgcgaggaatggcaaagcgagcacatcaaggcatgcgaagcgttcgaggcgcaggagtgcgagcgcatcaacttcttccgtaacgcactgtggctccacgtgaaccaactcagtcaacagtgtgtgaccagcgatgaacacccctcttgcatgcgcatttcaaccccaccgcgccgaatgcagagccagcaggagagattgcagggcctgacgtggcagggtgaggatccaagccagtttctcaaggctcaccaaatgataccaataacactttggctgatgacaacggtttgctccatctccaagattaatgagacaagagcgttcagcgggtag

SEQ ID NO: 215385 - DNA, 1005 bp, Artificial Sequence
  derived and/or modified sequence
atgacccggtctttatttaaagggaacttttggagcgccgatattctctctaccatcgggtatgacaatattattcagcacttaaataatgggagaaagaattgcaaagagttcgaagattttctgaaagagcgcgcagccattgaagaaaggtacggaaaggacttattaaatctgagccgcaagaagccgtgtggtcagtcagagataaacacattaaaacgggcgctggaggtcttcaagcagcaggttgataatgtggcacaatgtcacatccaactcgctcaatcattacgcgaagaagcgaggaagatggaggaatttcgtgagaagcaaaagcttcaaagaaaaaaaactgagttaattatggatgcgattcacaagcaaaagtcactgcaatttaagaagaccatggatgccaaaaaaaactacgagcagaagtgtagggataaagatgaggcggagcaggccgtatcacgttcagccaaccttgtcaatcccaagcagcaggaaaagctgtttgtgaagttagccacctcaaagacagcggtcgaggactcggataaagcctatatgctgcacatcggaactttggataaggtgcgtgaagagtggcagtccgaacatatcaaagcgtgcgaggcctttgaggctcaggagtgtgagcggatcaatttcttccgcaacgccttgtggctccacgtgaaccaattgagccagcagtgcgtaacctcagatgagatgtatgaacaggtgagaaagagcctcgagatgtgctccatccagcgtgacatcgagtacttcgtgaatcaacgcaaaacagggcagatcccgcctgctcctattatgtatgaaaacttttattcatcacagaagaatgccgtgcccgcgggaaaggctactgggcccaacctcgcccggcggggtccgctgccaatacccaaatcaagcccagatgatcctaactacagtctggtcgatgactactcactcctgtatcagtag

SEQ ID NO: 215386 - DNA, 939 bp, Artificial Sequence
  derived and/or modified sequence
atgaccaggagcctcttcaagggcaacttctggagcgctgacatcctgagcaccatcggctatgacaacatcatccagcacctgaacaacggcaggaagaactgcaaggagtttgaggacttcctgaaggagcgggccgccatcgaggagagatatggcaaggacctgctgaacctgagcaggaagaagccctgtggccagagcgagatcaacaccctgaagagggccctggaggtgttcaagcagcaggtggacaacgtggcccagtgccacatccagctggcccagagcctgcgggaggaggccaggaagatggaggagttccgggagaagcagaagctgcagaggaagaagacagagctgatcatggatgccatccacaagcagaagagcctgcagttcaagaagaccatggatgccaagaagaactatgagcagaagtgccgggacaaggatgaggccgagcaggccgtgagccgcagcgccaacctggtgaaccccaagcagcaggagaagctgtttgtgaagctggccaccagcaagacagctgtggaggacagcgacaaggcctacatgctgcacatcggcaccctggacaaggtgcgggaggagtggcagagcgagcacatcaaggcctgtgaggcctttgaggcccaggagtgtgagcgcatcaacttcttcagaaatgccctgtggctgcacgtgaaccagctgagccagcagtgtgtgaccagtgatgagcaccccagctgcatgaggatcagcaccccacccaggaggatgcagagccagcaggagcggctgcagggcctgacctggcagggcgaggaccccagccagttcctgaaggcccaccagatgatccccatcaccctgtggctgatgaccaccgtgtgcagcatcagcaagatcaatgagacccgggccttctctggatag

SEQ ID NO: 215387 - DNA, 1005 bp, Artificial Sequence
  derived and/or modified sequence
atgaccaggagcctcttcaagggcaacttctggagcgctgacatcctgagcaccatcggctatgacaacatcatccagcacctgaacaacggcaggaagaactgcaaggagtttgaggacttcctgaaggagcgggccgccatcgaggagagatatggcaaggacctgctgaacctgagcaggaagaagccctgtggccagagcgagatcaacaccctgaagagggccctggaggtgttcaagcagcaggtggacaacgtggcccagtgccacatccagctggcccagagcctgcgggaggaggccaggaagatggaggagttccgggagaagcagaagctgcagaggaagaagacagagctgatcatggatgccatccacaagcagaagagcctgcagttcaagaagaccatggatgccaagaagaactatgagcagaagtgccgggacaaggatgaggccgagcaggccgtgagccgcagcgccaacctggtgaaccccaagcagcaggagaagctgtttgtgaagctggccaccagcaagacagctgtggaggacagcgacaaggcctacatgctgcacatcggcaccctggacaaggtgcgggaggagtggcagagcgagcacatcaaggcctgtgaggcctttgaggcccaggagtgtgagcgcatcaacttcttcagaaatgccctgtggctgcacgtgaaccagctgagccagcagtgtgtgaccagtgatgagatgtatgagcaggtgaggaagagcctggagatgtgcagcatccagagggacatcgagtactttgtgaaccagaggaagacaggccagatccccccagcccccatcatgtatgagaacttctacagcagccagaagaatgctgtgcctgctgggaaggccaccggccccaacctggcccggcggggccccctgcccatccccaagagcagcccagatgaccccaactacagcctggtggatgactacagcctgctgtaccagtag

SEQ ID NO: 215388 - DNA, 939 bp, Artificial Sequence
  derived and/or modified sequence
atgacccggagcctgttcaagggcaacttctggagcgccgacatcctttccacaattggttatgacaatatcatacagcacctgaataacggcaggaagaactgtaaagagttcgaagatttcctgaaagaacgcgcagcaatcgaggaacgttacggcaaagatctgctgaacctgagtagaaaaaagccatgtggccagtccgaaatcaacacactgaaacgcgcgctggaagtgttcaagcagcaggtcgacaatgtcgcacaatgtcacattcagctagctcagagcctgcgggaagaggctcggaaaatggaggaattccgggagaaacagaagctccagagaaagaagacagagttgataatggatgccattcataaacagaagtcacttcaattcaagaaaacaatggatgcaaagaagaattatgagcagaagtgtcgggataaagacgaagccgagcaggccgtaagtcggtctgccaacctggttaatccaaagcagcaagagaagttgttcgtaaagctggcgacctctaaaactgctgtggaggactccgacaaggcttacatgctccatatcggaacccttgacaaggtgcgagaggagtggcagtctgagcacatcaaggcatgtgaagctttcgaggcgcaggagtgtgaacggataaacttctttaggaacgcactctggctgcacgtcaaccagcttagccagcagtgtgtgacgtctgatgagcacccttcctgtatgcgaatatctaccccaccaagacgtatgcaaagccagcaggagcgtcttcagggcctcacctggcagggggaggacccttcacagttcctcaaggcgcatcagatgattcccatcacactgtggctaatgactacagtctgcagtatttccaagatcaacgagactagggccttcagtggctag

SEQ ID NO: 215389 - DNA, 1005 bp, Artificial Sequence
  derived and/or modified sequence
atgacccggagcctgttcaagggcaacttctggagcgccgacatcctctccacaattggatatgacaacataattcagcatttgaacaacggcaggaagaattgcaaggagttcgaggacttcctgaaggagcgcgccgctatcgaggagcgttacgggaaggatcttctaaacttgtctcggaaaaaaccctgcgggcagagtgaaatcaatacactgaagcgggccctggaggtattcaagcagcaggtcgacaatgtggcccagtgtcatatccaactggcccagagtcttagagaagaagcgcgtaagatggaggaattccgtgagaagcagaagctgcagcgaaaaaaaactgagttaattatggatgctatccataaacagaagtctttgcagttcaaaaaaacaatggatgccaaaaagaattacgaacaaaagtgccgagataaggacgaggcagagcaggctgtgtcccgcagtgcaaacttggttaaccctaaacagcaggagaaactgttcgtcaaactggccaccagcaaaacagccgtggaggactctgataaagcttatatgctgcacatcgggacgctggataaggtaagggaggagtggcagtcggaacatattaaggcctgcgaggctttcgaggcgcaggagtgcgagcgaatcaattttttccgaaacgcactgtggctgcacgtcaatcagctctcacaacaatgtgtgaccagtgacgaaatgtacgagcaggtccggaagtccctcgaaatgtgtagtatccagagagatattgagtactttgtgaatcagcgcaagacgggccagatcccacccgcgccaattatgtatgagaacttttactccagccaaaagaacgccgtgccggcaggaaaagccactggacctaacctggcacgccgtggtccactgccaattccaaaaagttcaccagatgaccccaactattctttggtcgatgattattctcttctctatcagtag

SEQ ID NO: 215390 - DNA, 3000 bp, Artificial Sequence
  derived and/or modified sequence
agtggcagtcaggcctccccgctctgtgctacctgcggcccggctctcctccgcgcccccactcgcgctgcgatgacgcgctcactgttcaagggaaacttttggagtgcagacatcctcagcaccatcggctatgacaacattatccaacatctgaacaatggccgcaagaactgcaaagagtttgaagactttctaaaagaaagggcagcaattgaagagaggtatggcaaagatctgctcaacctctctaggaagaagccgtgtggacagtctgaaatcaacaccctgaagcgggcccttgaagtcttcaagcagcaagtagacaatgtggcacaatgtcacattcagcttgcacagagtttaagagaagaggccaggaagatggaagaattcagggaaaagcaaaaactacaacgaaaaaagacagagctcataatggatgctatccataaacaaaagagcttacaattcaagaaaaccatggatgcaaagaagaactatgagcagaaatgccgggacaaagatgaggcagaacaggccgtcagccggagtgccaacctggtgaacccgaagcaacaagaaaagctttttgtgaaactggcaacttcaaagaccgcagtagaggactcagacaaagcatacatgctgcacatcggcaccctggataaggtccgagaagagtggcagagtgagcacatcaaggcctgcgaggcatttgaggctcaagaatgtgaacgaataaacttcttccggaatgcattgtggttacatgtgaatcagctgtcacaacaatgtgtcaccagtgatgaaatgtacgaacaagtccgaaagagtttagaaatgtgcagcattcagagggacattgaatactttgtgaatcaacgcaaaactggacagattccaccagcacccatcatgtatgagaatttctactcctcccagaagaatgcagtcccagcaggaaaggctacagggcctaacttggcaaggagaggacccctcccaattcctaaaagctcaccagatgatcccaattactctttggttgatgactacagtttgctctatcagtaaaatcaatgaaaccagagctttttccggctagtgcttctgtgatatggaaagggcacccagagcagcaggacctatagccacgttatgtcagcaatgaagactttgaagtgaacccttgctataattttttagagatttaaaatttatggtagacatttaggacaacataagcaagtagagttctgcagttttttgaagtttacaaattgccccattctgaagaattattctttcccagttactcaggttatgaatgaattaggttttcaacatgggaagcatgaaatccacttctggatttggagcatccacttgaggagcagaggtggcagcagaggattctgagccaccaactgcagtagtggctcctttggctttgggcagcctggctgtggagtttccacggcgacacacagcctcagtggtgcaagatttaaaattaccttcctttttggctggaagacttagaagccgcctgatcatactttctcattttacagatgaggaaataaagcctacaagtgtgaaattaatttccttacagttttcctagctgatgagggacagaaccagaactagagcctgagcccaacccacatcactattcttctaacccttcctgaagttgtgatgctcatgctgaaatttaagatgccaaatatttttgccagcactttttcagttgggagaatcaccagggtttaaatgtcagatttatttttatgtggatccctgtgtatgctgaactacagagcatgatgtttaatctaatttaaggagccactgattgtaaaacatgccattattttatgttgcactaagaaggtggggtcgaggagttgccaataaacttgggacagactattgatggccaagcccatctgaatttaagatgctaaagtatgaaaaaaatacatcttagaatcaatgaaataccatattttgattccattcctcaagataattttagagttataaaaccagtcctcaattttgggtcttcacagagaatctttcccttgctagaccccagaattttaaatgcatccgtcttacactttcacaaatatttgggttttcctttttcactcacaaacagcagggaggtcatgtactttttgtacaacacctgtgcactatgagaaaatggtaccttttagttattgacaagttaaaatagcactctcagtttttcagtattacagagagcaaatagtttcctctcctgctctgtgcagtagcttttccagaactatggacaaattgatcagaagaagattgattatttcctcatctttttttcttttttttgagacagagtctctctctgtcccccaggctgaagtgcagcggcatgatctcagctcactgcaacctctgcctcccgggttcaagtgattctcctgcctcagcctcctgagtagctgggattacaggcacccaccaccacacctggctaattttttgtatttttagtaaagacagggttttaccatgttggtcaggctggtctcaaactcctgacctcaggtgatccacctgcctcggcctcccaaagtgctgggattacaggcgtgagccactgcgcccggcctatttccccacctttcgtgtaaggtgctactgaacatgacagcttcttgtcatgacaggaaacttgcatcagttggatatccttttgagaaactgaattttgcaaagggccaaatttccccaaactgaacgggctcaggaaatgttcctttacactcagaacattctattttaagtatattatttattgttggcagttcctcagggatttcccttttctctgtattggtcagtgtagttgatgtaaaaccgttttgtggatggaaaatatttttattttattgctcttttagtttggtaggttaaataaaggttcttggtaatttggga

SEQ ID NO: 215391 - DNA, 939 bp, Artificial Sequence
  derived and/or modified sequence
atgactaggtccctatttaaaggaaacttctggtcggccgacattctgtccaccattgggtatgacaatatcatacagcatctgaacaatgggagaaagaactgcaaggagtttgaagacttcctcaaggaaagagcagctatcgaagagagatatggcaaggatctgcttaatttatcgcgcaagaagccatgcggccagtctgaaatcaacactctgaagagggcactggaggtttttaaacaacaggtagataacgttgcccagtgtcatatacagctggcccaatctcttagggaggaagccagaaaaatggaggaattcagagagaaacagaaacttcagagaaagaaaacagagttgataatggacgcaattcacaaacagaaatcattacagtttaaaaagacaatggatgctaaaaagaattacgagcaaaaatgccgggataaagatgaggcagagcaagcagtgagccgtagcgccaatctcgtcaaccctaagcagcaggagaagctgtttgtcaaactggcaaccagcaaaacagccgtggaagactcagataaagcctatatgctccatataggtacccttgataaggtgcgcgaggaatggcagtcagagcacattaaggcctgtgaggccttcgaggcacaggaatgcgagcgtattaatttttttcgaaacgccctctggctgcacgtgaaccagttaagtcagcagtgcgtcacctcagatgaacatccctcatgcatgcgcatctccacaccaccacgtcggatgcagtcacaacaggaacgcctccagggactaacatggcagggggaggaccccagtcaatttctcaaggcacatcaaatgattcccattaccttatggttgatgaccactgtgtgttccatctccaagatcaacgaaactcgagcattctcaggctag

SEQ ID NO: 215392 - DNA, 1005 bp, Artificial Sequence
  derived and/or modified sequence
atgacacgaagtcttttcaaaggtaatttctggtccgcggatattctcagcaccatcggttatgataacatcattcaacacctcaacaacgggaggaagaattgcaaggaatttgaagatttcttgaaagagcgcgctgccatcgaagaaagatatggaaaggatcttctgaatctgagtcgaaaaaagccgtgcgggcagtcagagatcaataccttgaaaagagctctggaagtctttaagcagcaggttgataacgtggcccagtgtcatatccagctggctcagtctctccgcgaagaagccagaaaaatggaagagttccgggagaaacaaaagctgcagaggaaaaaaacagagctaatcatggatgcaattcacaaacagaagtccctacagttcaaaaagacgatggacgctaagaaaaattatgagcagaagtgtcgcgacaaggatgaggctgagcaagcagtctctcgaagcgcaaacctggttaatccgaaacagcaagagaagttgtttgtcaaactggctacatccaagacagcagtggaagactcagacaaagcctatatgcttcatatcggtaccctcgacaaggtgcgcgaggagtggcagagcgagcacatcaaggcctgtgaggctttcgaagctcaggagtgtgaaagaattaatttttttagaaatgccctgtggctgcacgtaaatcagctgtctcagcagtgtgtgacttctgacgagatgtatgagcaggttcgtaagtctctggagatgtgctccattcagagagacatagaatactttgtgaatcagcggaagactggccagataccacctgcgcctatcatgtacgagaatttttattcaagccagaagaacgccgttcctgctgggaaggccacagggccaaatctggcccgacgcggacctctgcctattcccaaatcctcccccgacgatcccaattactctttagtcgacgattattccttgctgtaccaatag

SEQ ID NO: 215393 - protein, 1499 aa, Artificial Sequence
  derived and/or modified sequence
MEREPAGTEEPGPPGRRRRREGRTRTVRSNLLPPPGAEDPAAGAAKGERRRRRGCAQHLADNRLKTTKYTLLSFLPKNLFEQFHRPANVYFVFIALLNFVPAVNAFQPGLALAPVLFILAITAFRDLWEDYSRHRSDHKINHLGCLVFSREEKKYVNRFWKEIHVGDFVRLRCNEIFPADILLLSSSDPDGLCHIETANLDGETNLKRRQVVRGFSELVSEFNPLTFTSVIECEKPNNDLSRFRGCIIHDNGKKAGLYKENLLLRGCTLRNTDAVVGIVIYAGHETKALLNNSGPRYKRSKLERQMNCDVLWCVLLLVCMSLFSAVGHGLWIWRYQEKKSLFYVPKSDGSSLSPVTAAVYSFLTMIIVLQVLIPISLYVSIEIVKACQVYFINQDMQLYDEETDSQLQCRALNITEDLGQIQYIFSDKTGTLTENKMVFRRCTVSGVEYSHDANAQRLARYQEADSEEEEVVPRGGSVSQRGSIGSHQSVRVVHRTQSTKSHRRTGSRAEAKRASMLSKHTAFSSPMEKDITPDPKLLEKVSECDKSLAVARHQEHLLAHLSPELSDVFDFFIALTICNTVVVTSPDQPRTKVRVRFELKSPVKTIEDFLRRFTPSCLTSGCSSIGSLAANKSSHKLGSSFPSTPSSDGMLLRLEERLGQPTSAIASNGYSSQADNWASELAQEQESERELRYEAESPDEAALVYAARAYNCVLVERLHDQVSVELPHLGRLTFELLHTLGFDSVRKRMSVVIRHPLTDEINVYTKGADSVVMDLLQPCSSVDARGRHQKKIRSKTQNYLNVYAAEGLRTLCIAKRVLSKEEYACWLQSHLEAESSLENSEELLFQSAIRLETNLHLLGATGIEDRLQDGVPETISKLRQAGLQIWVLTGDKQETAVNIAYACKLLDHDEEVITLNATSQEACAALLDQCLCYVQSRGLQRAPEKTKGKVSMRFSSLCPPSTSTASGRRPSLVIDGRSLAYALEKNLEDKFLFLAKQCRSVLCCRSTPLQKSMVVKLVRSKLKAMTLAIGDGANDVSMIQVADVGVGISGQEGMQAVMASDFAVPKFRYLERLLILHGHWCYSRLANMVLYFFYKNTMFVGLLFWFQFFCGFSASTMIDQWYLIFFNLLFSSLPPLVTGVLDRDVPANVLLTNPQLYKSGQNMEEYRPRTFWFNMADAAFQSLVCFSIPYLAYYDSNVDLFTWGTPIVTIALLTFLLHLGIETKTWTWLNWITCGFSVLLFFTVALIYNASCATCYPPSNPYWTMQALLGDPVFYLTCLMTPVAALLPRLFFRSLQGRVFPTQLQLARQLTRKSPRRCSAPKETFAQGRLPKDSGTEHSSGRTVKTSVPLSQPSWHTQQPVCSLEASGEPSTVDMSMPVREHTLLEGLSAPAPMSSAPGEAVLRSPGGCPEESKVRAASTGRVTPLSSLFSLPTFSLLNWISSWSLVSRLGSVLQFSRTEQLADGQAGRGLPVQPHSGRSGLQGPDHRLLIGASSRRSQ

SEQ ID NO: 215394 - DNA, 4500 bp, Artificial Sequence
  derived and/or modified sequence
atggagagggaaccagctggcactgaagaaccggggccgccagggagacgtagaaggcgtgaggggaggacgcgtacagtcagatccaacctcctgccaccccctggagccgaagaccccgccgctggtgcggcaaagggagagcggcgccgcagacgtgggtgtgcgcagcatctggcagacaatcggctgaaaacaaccaagtataccttgctgagcttcctcccaaaaaacctatttgaacagtttcaccgacctgcgaatgtatatttcgtctttatcgctctgttgaattttgtccccgcagtcaatgcattccaacctggtctcgcattggcccctgtgttgtttatcctggccatcacagcgttcagggatctgtgggaagactatagccggcatcgtagtgaccacaagattaaccatcttggttgcctggtcttcagcagagaggagaaaaagtacgttaatagattttggaaggaaattcacgtgggtgactttgtgcggcttcgctgcaacgagattttccctgcggacatattgctgttatcatcgtctgacccggatgggctttgccacattgagaccgctaacctggatggggagaccaaccttaagcggcgtcaagtagtccgtggcttctccgagctcgtttccgaattcaatcctttgacgttcacttctgtgattgaatgtgagaaacccaacaacgatctgtcaaggtttagagggtgcatcatccacgacaatggcaagaaggcaggcttgtataaagagaatctcctcctacgtggatgcacactgaggaatacagacgccgtggtcgggatagtgatttacgcaggacacgagaccaaggcccttttgaacaattcaggcccacgctataaaagatccaagctcgagcgacagatgaactgcgacgtgctctggtgcgtgttgctactggtgtgcatgtccttgttttctgcagttgggcacggcctgtggatttggcggtatcaggagaaaaaatcactattttatgttcctaaaagtgatggaagtagcctgtccccggtcactgccgcggtgtactccttcttgactatgataatagtgctgcaggtgttgatacccataagcctatacgtgtctatagagatcgtcaaggcctgtcaagtgtatttcattaaccaagacatgcagctgtatgatgaggagactgatagtcaacttcagtgccgcgctcttaatatcactgaggacctcggccaaattcagtatattttcagcgacaaaaccggaaccttaacggagaacaaaatggtctttagaaggtgcactgtttcgggggtggaatatagccatgacgccaacgcacaacggcttgctcggtatcaggaagcggactctgaggaggaagaggtggtgcctcggggcggatcagtatcccagcgtggttccatcgggtcccaccaatctgttagggtcgtacaccggacccagtccacaaagagccaccggaggaccggatctcgggctgaagcaaagagagccagcatgctgtcaaagcacactgcattctcgtccccaatggagaaagacataacacctgacccgaaacttctcgagaaagtgagcgaatgcgacaaatcactggctgtagcgcgccatcaggagcatctactggctcacctgagtccggagttgtcagacgtgtttgacttctttatcgccctcaccatttgcaatactgtagttgtgacctcccccgaccaacctcgtaccaaggttagggtccgctttgaactgaaatcaccggtgaagaccattgaggatttcctgcgtagatttacaccctcgtgccttaccagcggctgcagctctatcggctccctcgccgccaacaaaagctctcacaagctagggtccagcttcccgtcaacaccatctagtgatgggatgcttctccgacttgaggagagattgggacaaccgacgagtgccatagcgtcaaatgggtattctagccaggccgacaattgggcaagcgagctagcccaggaacaggagtctgagcgggagcttagatacgaagcggaaagcccagacgaggcggcacttgtgtacgcagctcgggcgtacaactgtgtcttggtggaacgcttacatgatcaggtgtcggtggagcttccacacttgggcaggcttacattcgaattgctgcatactctgggcttcgactctgtgaggaaaaggatgtccgtcgtcataagacaccccctcacagacgaaattaacgtttacaccaaaggcgccgacagcgtcgtcatggatttgctccagccatgctctagcgtggacgcccgggggcggcatcagaagaagatcagaagcaaaacccagaactatctgaacgtatatgccgccgagggattacgcacactgtgtatagccaaaagagtactgagtaaagaagaatatgcctgctggctgcaatcccacctcgaagccgaatcgtccctcgaaaactccgaggaattattgtttcaatctgctatccgacttgagactaatttgcatttgctaggcgctaccgggattgaggaccggcttcaggacggggttccagaaaccatttcaaagttaagacaggccgggctgcagatttgggtactgacaggagacaagcaggagaccgctgtcaacatagcatacgcctgtaagttgctcgaccatgatgaggaggtcattacactcaatgcgacctcccaggaggcctgtgcagcattgctggatcaatgcttgtgttacgttcagtccaggggcttgcaacgtgctcccgaaaagacaaagggcaaagtctctatgcgcttttcttctctatgtccgccgagcacatccactgctagcgggaggcggcctagcctcgtgattgacggaaggtcacttgcttacgcattggaaaagaatctggaagataaattcttgttcctcgcgaaacagtgtcggtccgtgctatgttgccgctcgacgcccttacaaaaatctatggttgtgaaactggtgcgttcgaagctcaaagcaatgacactggccattggtgacggggccaatgatgtttctatgattcaggtggccgacgtgggggtcggcatctcaggacaggaaggcatgcaagctgttatggccagcgatttcgctgtgccaaagttccgctacctggagaggctgctgatcctgcacgggcattggtgctacagtcgtctggcaaatatggtgttgtattttttctataagaacaccatgttcgtcggcctgctgttctggttccaatttttttgtggtttcagcgctagcactatgattgaccagtggtatctgatattctttaatctcctgttttcctccctcccccccttagtcaccggagtactggacagggatgttcccgccaatgtactgctgacaaatcctcaactgtacaaatctggacagaacatggaagagtaccgaccacggacattttggttcaacatggccgatgctgcttttcaatctcttgtttgcttttctataccttatctggcctattacgactctaatgtcgatctatttacgtggggaacgcctatcgtgacaatcgccctcctgacgtttcttctgcatctgggcatcgagactaagacatggacctggctgaattggatcacatgcggtttttcagtactgctcttttttacggtggccttaatctataatgcgagctgcgccacgtgctatccacccagtaacccgtattggacgatgcaggcactgttgggcgatccagtcttttatctgacttgtctgatgacccccgtcgccgctttactgccaagactctttttcaggagtctgcagggccgtgtgtttcctactcagcttcagctggcacggcagttgaccaggaagtccccccggcgctgcagcgctcctaaagagaccttcgctcaggggcgtctgcctaaagatagtggaaccgaacacagttctggccggacggtaaagacatcagtaccgttgtctcaaccttcctggcatacccagcaaccggtgtgctctcttgaagcatcaggggagccctccacagtggacatgagtatgccggtccgcgaacatactttactcgagggattatctgcgccagctcccatgtcttctgccccgggagaagctgtgcttcgaagccccggtgggtgcccggaagagtcaaaggtccgcgccgccagtacagggagggtaacacccttgtcctctttgttttccctaccgacattcagccttttgaactggatctcctcgtggtccctggtcagccgactcggctccgtcctgcagttttcaagaaccgaacagttagccgacggacaggccgggcgcgggctgcccgtccaacctcactccgggcggagtgggctccaaggacccgatcaccgactgttgattggcgccagctctcgtcgttctcagtag

SEQ ID NO: 215395 - DNA, 4500 bp, Artificial Sequence
  derived and/or modified sequence
atggagcgggagcccgccggcacagaggagcccggccccccaggaagaagaagaagaagagagggccgcaccaggacagtgcgcagcaacctgctgcccccacctggagctgaggaccctgctgctggggccgccaagggggagaggagaagaagaagaggctgtgcccagcacctggccgacaaccggctgaagaccaccaagtacaccctgctgtccttcctgcccaagaacctgtttgagcagttccacaggcctgccaacgtgtactttgtgttcatcgccctgctgaactttgtgcctgctgtgaatgccttccagcccggcctggccctggcccctgtgctcttcatcctggccatcacagccttccgggacctgtgggaggactacagccgccacagaagtgaccacaagatcaaccacctgggctgcctggtgttcagccgggaggagaagaagtatgtgaaccgcttctggaaggagatccacgtgggggactttgtgcggctgcgctgcaatgagatcttccctgctgacatcctgctgctgagcagcagtgaccctgatggcctgtgccacattgaaacagccaacctggatggagagaccaacctgaagaggcggcaggtggtgcggggcttcagcgagctggtgtctgagttcaaccccctgaccttcacctctgtgattgaatgtgagaagcccaacaatgacctgagccgcttccggggctgcatcatccatgacaatggcaagaaggccggcctgtacaaggagaacctgctgctgcggggctgcaccctgaggaacacagatgctgtggtgggcatcgtcatctatgccggccacgagaccaaggccctgctgaacaacagcggcccccgctacaagaggagcaagctggagcggcagatgaactgtgatgtgctgtggtgtgtgctgctgctggtgtgcatgagcctcttctctgctgtgggccacggcctgtggatctggagataccaggagaagaagagcctcttctacgtgcccaagagtgatggcagcagcctgagccctgtgacagctgctgtgtacagcttcctgaccatgatcatcgtgctgcaggtgctgatccccatcagcctgtatgtgtccattgaaattgtgaaggcctgccaggtgtacttcatcaaccaggacatgcagctgtatgatgaggagacagacagccagctgcagtgccgggccctgaacatcacagaggacctgggccagatccagtacatcttcagtgacaagacaggcaccctgacagagaacaagatggtgttccgccgctgcaccgtgtctggagtggagtacagccatgatgccaatgcccagaggctggcccgctaccaggaggccgacagcgaggaggaggaggtggtgccccggggcggctctgtgtcccagaggggcagcatcggcagccaccagagcgtgcgggtggtgcacaggacccagagcaccaagagccacagaagaacaggcagcagagctgaggccaagagggcctccatgctgagcaagcacacagccttcagcagccccatggagaaggacatcaccccagaccccaagctgctggagaaggtgtctgaatgtgacaagagcctggccgtggcccggcaccaggagcacctgctggcccacctgagccctgagctgagtgatgtgtttgacttcttcatcgccctgaccatctgcaacacagtggtggtgaccagcccagaccagcccaggaccaaggtgcgggtgcgctttgagctgaagagccctgtgaagaccatcgaggacttcctgcggcgcttcacccccagctgcctgaccagcggctgcagcagcatcggcagcctggccgccaacaagagcagccacaagctgggcagcagcttccccagcacccccagcagtgatggcatgctgctgcggctggaggagcggctgggccagcccaccagcgccatcgccagcaatggctacagcagccaggccgacaactgggccagcgagctggcccaggagcaggagagcgagcgggagctgcgctatgaagctgagagcccagatgaagctgccctggtgtatgctgcccgggcctacaactgtgtgctggtggagcggctgcatgaccaggtgtctgtggagctgccccacctgggccgcctgacctttgagctgctgcacaccctgggctttgacagcgtgaggaagaggatgtctgtggtgatccgccaccccctgacagatgagatcaacgtgtacaccaagggagctgacagcgtggtgatggacctgctgcagccctgcagctctgtggatgcccggggccgccaccagaagaagatccgcagcaagacccagaactacctgaatgtgtatgctgctgagggcctgcggaccctgtgcatcgccaagagggtgctgagcaaggaggagtatgcctgctggctgcagagccacctggaggccgagagcagcctggagaacagcgaggagctgctcttccagagcgccatccggctggagaccaacctgcacctgctgggcgccactggaattgaggaccggctgcaggatggagtgcctgagaccatcagcaagctgcggcaggccggcctgcagatctgggtgctgactggagacaagcaggagacagctgtgaacatcgcctatgcctgcaagctgctggaccatgatgaggaggtgatcaccctgaatgccaccagccaggaggcctgtgccgccctgctggaccagtgcctgtgctacgtgcagagccggggcctgcagagggcccctgagaagaccaagggcaaggtgtccatgaggttcagcagcctgtgcccccccagcaccagcacagccagcggccggcggcccagcctggtgattgatggccgcagcctggcctatgccctggagaagaacctggaggacaagttcctgttcctggccaagcagtgccgctctgtgctgtgctgccgcagcacccccctgcagaagtccatggtggtgaagctggtgcgcagcaagctgaaggccatgaccctggccatcggagatggagccaatgatgtgtccatgatccaggtggctgatgtgggcgtgggcatcagcggccaggagggcatgcaggccgtgatggccagtgactttgctgtgcccaagttccgctacctggagcggctgctgatcctgcacggccactggtgctacagccggctggccaacatggtgctgtacttcttctacaagaacaccatgtttgtgggcctgctcttctggttccagttcttctgtggcttcagcgccagcaccatgattgaccagtggtacctgatcttcttcaacctgctcttcagcagcctgccccccctggtgactggagtgctggacagagatgtgcctgccaacgtgctgctgaccaacccccagctgtacaagagcggccagaacatggaggagtaccggcccaggaccttctggttcaacatggctgatgctgccttccagagcctggtgtgcttcagcatcccctacctggcctactatgacagcaatgtggacctcttcacctggggcacccccatcgtgaccatcgccctgctgaccttcctgctgcacctgggcatcgagaccaagacctggacctggctgaactggatcacctgtggcttctctgtgctgctcttcttcaccgtggccctgatctacaatgccagctgtgccacctgctacccacccagcaacccctactggaccatgcaggccctgctgggggaccccgtcttctacctgacctgcctgatgacccctgtggccgccctgctgcccaggctcttcttccgcagcctgcagggccgggtcttccccacccagctgcagctggcccggcagctgaccaggaagagcccccggcgctgcagcgcccccaaggagacctttgcccagggccgcctgcccaaggacagcggcacagagcacagcagcggccgcacagtgaagacctctgtgcccctgagccagcccagctggcacacccagcagcctgtgtgcagcctggaggccagcggggagcccagcacagtggacatgtccatgcctgtgcgggagcacaccctgctggagggcctgagcgccccagcccccatgagcagcgcccctggagaggccgtgctgcggagccctgggggctgcccagaggagagcaaggtgcgggccgccagcacaggccgggtgacccccctgagcagcctcttcagcctgcccaccttcagcctgctgaactggatcagctcctggagcctggtgtcccggctgggctctgtgctgcagttcagcaggacagagcagctggctgatggccaggccggccggggcctgcctgtgcagccccacagcggccgcagcggcctgcagggccctgaccaccggctgctgattggagccagcagccgccgcagccagtag

SEQ ID NO: 215396 - DNA, 4500 bp, Artificial Sequence
  derived and/or modified sequence
atggagcgggagcccgccggcaccgaggagcccggcccccccggccgtagaagacggcgcgaggggcgtaccagaaccgttagatcaaatctgctcccacctccgggagctgaggatccagctgccggggctgccaaaggggaacgaaggaggcggcgcgggtgtgcccaacacttagccgataatagactgaagacaacaaaatacactcttctttcctttttgcctaaaaacttgttcgaacaattccacagacctgccaacgtgtatttcgtgttcattgcattgcttaatttcgtgcccgcagttaacgcgtttcaaccaggccttgcacttgcaccagtactctttattctggcaattacagccttccgggacctctgggaggattactcccggcacagatcggaccacaaaattaaccacttgggctgtctggtgttcagcagagaggagaagaagtacgtaaatcggttctggaaagagatacacgtcggcgatttcgtgagactccggtgcaacgaaatttttcccgcggacatcctgctgctgtcttcgtctgaccctgatgggctttgccacattgagacagccaacctggacggcgaaaccaacttaaagagaaggcaagtcgtccgtggattttctgagctcgtgtctgaatttaatcccctcactttcacttcggtgattgagtgcgaaaagcctaataatgatttatcccggttccggggctgcatcattcatgacaatgggaagaaagccggtctctacaaggagaaccttctacttcgaggatgtaccctgaggaataccgatgctgtcgtgggcatcgtgatctacgctggtcacgaaactaaagcactgcttaacaacagtgggccccggtacaaacggagcaagctggaaagacagatgaactgtgatgtgctgtggtgcgtgctgctcttggtttgcatgtctctattctcagccgtgggacacggactgtggatttggcgctatcaggaaaagaagagcctgttttacgtccctaaatctgatgggtctagtcttagccctgtcaccgccgccgtgtatagtttcctgacaatgatcattgtccttcaggtcctcatcccgatttctctatacgtgtccatcgagatcgtaaaggcctgtcaagtgtatttcattaatcaggatatgcagctgtacgacgaggaaacagatagccaattgcagtgtcgggcactgaacatcaccgaagatttagggcaaatacagtacatattctccgacaagactggtacacttactgagaataaaatggtctttcgccggtgcacggttagcggagtcgagtatagtcatgatgccaacgcccagcggctggcgcgctatcaggaagctgatagcgaagaggaggaggtcgtgccccgcggaggatctgtgtcccagaggggtagtattgggtctcatcagagcgtgcgcgtcgtacatcggacacaaagtactaaaagccacaggcgcacaggatcccgcgcagaggccaaaagagcttccatgctttctaagcatacagcattctcatctccgatggagaaagacattacgcctgacccaaagcttctggagaaggtcagtgaatgtgacaaatcactggccgtcgcccggcaccaagaacacttgctcgcccacctaagccccgaactcagcgatgtattcgacttttttatcgctctcaccatctgtaacacagtcgttgtcacgagcccggatcagccgagaacaaaagtcagggtgcgatttgagctgaaatcccccgtcaaaactatcgaggacttcctgcggaggttcacgcccagctgtcttaccagtgggtgcagctctattgggtccctagcagctaacaaatcctcccataagttgggcagttcctttccctctactcctagctccgacggaatgcttcttagactcgaagagcggctcgggcaacccactagtgccatcgcgtcgaacgggtactcaagccaggcagacaattgggcatcggagcttgcacaggagcaggagtcagagagagaactgcggtacgaagctgagagtccagacgaggcagctctagtgtacgccgcgagggcatataactgtgtgcttgtcgagagacttcacgatcaggtgtcagtcgaactcccccacctgggcagactgacctttgaactactgcataccctgggatttgattcggtgagaaagagaatgtcagtggtgatacggcaccctttaacagacgaaattaacgtttatactaaaggcgccgactccgtggtgatggacctcttacagccatgtagtagtgtggatgcccgaggacggcaccagaaaaagatcaggtctaagacacaaaactatctcaatgtatacgcagcagagggcttgaggacgttatgcattgctaaaagggtgttgagcaaggaggaatacgcatgttggctgcagtcccacctggaagcagagagctctctcgaaaacagcgaggaacttctctttcagtctgccattcgcctggagactaacctccacctcctcggcgcaacggggatagaagatcgactccaggacggcgtacctgagactataagcaagctgcgccaggccggcctgcagatttgggtgctgacaggcgataagcaagaaacagccgttaatattgcatacgcctgcaaacttcttgaccacgatgaagaagttatcacgctcaacgcgacaagccaggaagcctgtgctgccctcctggatcagtgtctttgctacgtgcagtcaaggggtctccagcgagcccctgaaaagactaagggcaaggtaagcatgcgattctcttcgctttgtcctccctctacgtctaccgccagcgggcgaagacctagtctggtcattgacggacggtcactggcatatgctcttgaaaaaaatctggaagataagtttctattcctggccaaacagtgcaggagtgtgctttgttgccgatctactcccctgcagaagtcaatggtcgtcaagctcgtccgatctaagcttaaagcaatgaccctagctattggcgatggggctaatgacgtttccatgattcaggtcgccgatgttggtgtgggcatatccggacaggaaggaatgcaggccgttatggcctctgacttcgcggtcccaaagtttaggtacctcgagcgcctgctgatattacacgggcattggtgctactcaagattggccaatatggtgctctactttttttacaagaatacgatgttcgtggggcttctgttctggtttcagttcttctgtggatttagtgcttctaccatgatagaccagtggtatctgattttctttaatctcctgttttcatccttgccccccctggttacgggcgtcttggatagagacgtgccggcgaatgtgttgctgacgaacccccagttgtacaagtctggccagaacatggaggaatatcgaccgcgaacgttctggttcaacatggcagacgccgcctttcaatcgttagtatgtttcagcatcccttacttagcttattacgactctaacgtggatctcttcacatgggggacccctatcgtaaccattgcactcttaacctttttactccacctcggaattgaaacgaagacgtggacctggctgaattggatcacctgcgggttctctgtgctactatttttcaccgtggcactgatttataatgcgagttgtgccacctgttacccacccagtaacccttactggacgatgcaggcactgttgggtgatcccgtcttctatttgacttgcctgatgacaccagtggctgctctgctgccccgtttatttttcaggtccctccaaggacgcgtgttccccacacaacttcagctggccagacagctgactcgcaaaagccccagacgatgcagcgcacctaaagagacatttgcccagggacgactgccgaaagactccggcactgagcatagtagtgggcggactgtaaagacctccgtgccactctcccagcccagttggcacacacaacaacctgtttgctccctggaggcgagcggggagccttctaccgttgacatgtccatgccagtacgagagcatactctgctggaaggattaagcgcccccgcccccatgtcttctgcccccggcgaggcagtgcttcgctcgcccggcgggtgcccagaggaaagtaaagttcgagctgccagcacaggtcgcgtcaccccgctgtcctccctgttctctctgcccacctttagccttctgaattggattagctcatggtcactcgtctcgcgtctgggaagcgtgctgcagttctctcggactgaacaactcgctgacgggcaagcagggaggggcctaccagtgcagccacacagcgggcggtccgggctccaaggccccgatcacagacttcttataggcgcctcatcccgcaggtcccagtag

SEQ ID NO: 215397 - DNA, 4500 bp, Artificial Sequence
  derived and/or modified sequence
atggagcgcgagcctgcaggcaccgaagagcctggccctcctgggaggaggcggaggcgagaaggcaggactcggaccgtcagatccaatctgctgccaccccctggagcagaagatcccgcagccggagccgctaaaggtgagaggcgtcgtcggagaggatgtgcacagcatttggccgataaccgcctcaaaaccaccaaatacaccttactgtcctttctccctaaaaacttgttcgagcagttccatcgtcccgctaatgtgtatttcgttttcatagccctgctcaatttcgtaccggctgtgaacgcattccagcccggacttgctcttgcccctgttcttttcattctcgcaatcaccgcattccgcgacctctgggaggactactcccgccatcggagtgaccacaagattaaccacctgggctgcctcgtattcagcagggaggaaaaaaaatacgtgaacaggttctggaaggaaatccatgtgggggatttcgtgcgcctgcgttgcaacgagatcttcccagccgatattctgctgctgagcagtagcgatccggacgggttgtgccacattgagacagccaacttggatggagagactaatttaaaaaggcgccaggtggttcgcggattttccgaactggtgtccgagtttaaccctttaacgtttactagcgtgatagaatgtgaaaaaccaaataatgatctgtcccggttccgcggttgcattatccacgacaacgggaaaaaggccggtctctacaaggaaaaccttctcctacggggatgcactttaaggaatacggacgccgtagtgggaattgtcatctatgcgggacacgaaacaaaggccctgttgaacaattccgggcctcggtacaagagatctaagctggaacggcaaatgaattgcgatgttctgtggtgcgtcttacttctggtgtgtatgtccttgttttcagccgtggggcatggcctatggatctggcgttatcaagagaaaaaatcactcttctacgtcccgaagtctgatggctcctccctttcccctgtgaccgctgccgtctactcgttccttacgatgatcattgtcctgcaggtcttgattccaatcagcctctacgtgtcaatagaaattgtaaaggcctgccaggtttactttatcaaccaggacatgcagctgtatgacgaggaaaccgattcccaattgcaatgtcgagcgctcaatatcactgaggacctcggccagatccagtacatttttagtgataagacaggtacgctcacggagaataagatggtattcaggcgttgcacggtcagtggagtcgagtactcacacgatgcaaacgctcagagattagctagatatcaggaggccgactccgaagaagaagaagtggtgccacgcggaggatcagtgtcccagcggggtagtatcggatcccaccagagcgttagggtggtgcacaggacacagtctaccaagagccatagaaggaccggatctcgggctgaagcgaagcgagcatctatgctgtcaaagcacacagcattttccagtccgatggaaaaggacataacccccgatcctaagcttttggagaaagtctcagaatgtgataaaagtctcgccgtggcacggcaccaggagcatctgctggctcacctctccccagagctttctgacgtgtttgacttttttatagctctcacaatctgcaatactgtggttgtgacatcgccagatcagccaaggaccaaggtgagggtgaggttcgaattaaaatctccggttaagacgattgaggacttcctccgaaggtttaccccttcctgcctgactagtggctgttcttccatagggagtttagccgcaaacaagagctctcacaagttaggatcctcatttccctccacccccagctcagacggtatgcttctcagattggaagagagactgggccagccaacgagcgccatcgcatccaatgggtatagctctcaggctgacaactgggcatcggaactcgcacaggagcaggagtcagagagggagctgcgctatgaggcggagtctcctgacgaggcagctcttgtgtatgccgcacgggcttataattgtgttctggtggaacgactgcatgaccaggtgtctgtagagctcccccacttgggtaggctgaccttcgaactgctgcacacgttgggattcgactctgtgagaaagcgcatgagcgtggtcattcgccatcccctgacagatgaaattaacgtctacacaaagggcgctgactcagtggtaatggacctgctgcaaccatgtagcagcgtcgacgctcgtgggagacatcaaaaaaagattaggtccaagacccagaactatctaaatgtctacgctgcggagggattgcgaacactgtgcatcgccaagcgagtgctgtccaaagaggagtacgcgtgctggcttcagtcccaccttgaggcggagtcatccttggagaatagcgaggagttgttgttccagtccgcgatccgtctcgagaccaacttgcatcttctcggtgctacggggattgaagaccggttgcaggacggggtgccggagaccatttctaaattgcgccaagctgggctccagatttgggtccttacgggtgataaacaggagacagcagtcaacatcgcttatgcctgcaagttactggaccacgacgaggaggtcatcaccttaaatgcaacttcacaggaagcctgcgccgctctactcgatcagtgtctgtgctatgttcagtcaaggggcctgcagcgggctccggagaaaaccaagggcaaggtgtctatgcggttctcttcactgtgtccgcctagtacctctaccgccagtggtcgccgtccatcactggtcatcgatgggagatcccttgcttacgccctcgagaaaaacctggaggataagttcctgtttctcgcgaagcaatgtcgatcagtcctgtgttgcagaagcaccccactgcaaaagagcatggtggttaagcttgttagaagcaagctcaaggcgatgaccttggcgatcggcgatggcgctaacgacgtatctatgatccaagtggccgatgttggggtggggatctctggacaggagggcatgcaggcagtcatggccagtgatttcgctgttcccaagtttagatacttggagagactgctcatccttcacggccactggtgctacagtcggctggccaacatggtcctgtacttcttctataaaaacacaatgtttgttgggctcctgttttggttccagtttttctgtggattttctgccagcactatgatcgatcagtggtacctaattttttttaacctgctcttcagtagcctgccacctctcgtgaccggagtgctcgaccgggatgttccagcaaacgtgttgctcactaaccctcagctctacaagtcgggccaaaacatggaagagtatcggccaaggacattctggtttaacatggccgacgccgcttttcagtcactcgtctgtttctccattccctacctcgcatattatgatagcaatgtcgatcttttcacatggggaacgcccatcgtgacgatcgctctgctcacattccttctgcacctagggattgaaacaaagacgtggacgtggttaaactggattacctgcggattctccgtgctcttgttcttcaccgtggcccttatatacaatgccagttgcgccacctgttaccccccttctaacccgtattggactatgcaagcactcctcggggaccctgtcttctaccttacctgcttaatgacccccgtggccgctctcctgccccgtttgttctttaggtctctccaggggagagtgttcccaacacaactgcagttggcacgccagctgacccggaaatcgccacgacggtgttccgcacctaaggagacattcgcacagggtcgtttgccaaaggatagtggcacagagcacagcagcgggcgaaccgtgaagacaagcgtcccattatctcaaccaagctggcacacccagcagcctgtatgctcactggaggcctccggagagccctcgacagtggatatgagtatgcctgttcgcgagcacacgctgttggaaggcctctccgctcccgcaccgatgagttcggcgcctggcgaagccgtccttcgatcccccggagggtgcccagaggagagtaaggtaagagcagcctcaacagggagggtgacaccgttgtcctctctatttagcctgcctacattctctctgctaaactggatctcgtcctggagtttagtgtcccgcctaggctcggtgctccagttttccaggacagagcaattagcggatgggcaggctgggagaggcttacccgtccagccacactccggaaggtctggacttcagggtccggaccacagattactaatcggcgcatcctcgcggaggtctcagtag

SEQ ID NO: 215398 - DNA, 6680 bp, Artificial Sequence
  derived and/or modified sequence
ccgcaggcggggagctcgcaccgccgcgcccgggccgcgagtgatgataacctaagaggccggcgcgggcgggcgtgagcggcggaggagccgggcgcggcgacacgcggccatggagcgggagccggcggggaccgaggagcccgggcctccgggacggcggaggcgccgagagggcaggacgcgcacggtgcgctccaacctgctgccgcccccgggcgccgaggaccctgcggctggcgcggccaagggcgagcggcgacggcggcgcgggtgtgcccagcacctggccgacaaccggctcaagactaccaagtacacgctgctgtccttcctgcccaagaacctgttcgagcagttccaccgcccggccaacgtgtactttgtcttcatcgcgctgctcaacttcgtgccggcggtgaacgccttccagcccggcctggcactggcgccggtgctcttcatcctggccatcacggccttcagggacctgtgggaggactacagccgccaccgctccgaccacaagatcaaccacctgggctgcctggtcttcagcagggaagaaaagaaatacgtgaaccgattctggaaagaaatccacgtgggagactttgtgcgtcttcgctgcaacgaaatcttccctgcggacattctgctgctctcctccagtgaccccgacgggctatgccacatcgagaccgccaacctggatggagagaccaacctgaagcggcggcaggtggtccgcggcttctcggagcttgtctccgaattcaatcctttgacgttcaccagcgtgatcgaatgcgagaagccaaacaacgacctgagtaggtttcgcggctgcatcatacatgacaacgggaaaaaggccgggctgtataaagaaaacctgctgctgaggggctgcacccttaggaacacggacgcagtcgtcggcattgtcatctacgcaggacatgaaaccaaggctctgctgaacaacagtgggccccgctacaagcgcagcaagctggagaggcagatgaactgcgacgtgctctggtgtgtcctgctccttgtttgcatgtctctgttttcagcagtcggacatggactgtggatatggcggtatcaagagaagaagtcattattttatgtccccaagtctgatggaagctccttatccccagtcacagctgcagtttactcatttttaacaatgataatagttctgcaggttttgatcccaatttccttatacgtttccattgaaattgttaaagcatgccaagtgtacttcattaaccaggacatgcagttgtatgacgaagaaacagactcgcagctgcagtgccgagctctgaacatcacggaagacttaggacagatacagtacattttctcagataaaactggcactttgacagagaataagatggttttccgaagatgcactgtgtctggtgtagaatattctcatgatgcaaatgcgcagcgtctggccaggtaccaagaggcagactcggaggaggaggaggtggtgcccagagggggctcggtgtcccagcgcggcagcatcggcagccaccagagtgtccgggtggtgcacagaacccagagcaccaagtcccaccggcgcacgggcagccgggccgaggccaagagggccagcatgctgtccaagcacacggccttcagcagccccatggagaaggatatcacgcccgacccaaagctgctggagaaggtgagtgagtgtgacaagagcctagccgtggcgaggcatcaggagcacctgctggcccacctctcgcctgagctgtctgacgtctttgatttcttcatcgcactcaccatctgcaacacagtcgtcgtcacgtccccggatcagccacgaacaaaggtgagggtgaggtttgagctgaagtccccggtgaagacgatagaagacttcctgcggaggttcacacccagctgcctgacctcaggctgcagcagcatcgggagcctggccgccaacaagtccagccacaagttgggctccagcttcccgtccaccccgtccagcgacggcatgcttctcaggctggaggagaggctgggccagcccacctcggccatcgccagcaacggctacagcagccaggcggacaactgggcctcggagcttgctcaggagcaggagtcagagcgcgagctgcggtacgaggcggagagcccggatgaggccgcactggtgtatgcggccagagcctacaactgcgtgcttgtggagcggctgcacgaccaagtgtcagtggagctgccccacctgggcaggctcaccttcgagctcctgcacacactgggtttcgattccgtccgcaagaggatgtcagtggtgatccggcacccgcttaccgatgagatcaacgtctacaccaagggggccgactcagtggtcatggatctcctgcagccctgctcttcagttgacgccagagggaggcatcaaaaaaagattcggagcaaaactcagaattacctcaacgtgtatgcggcggaaggcctgcgcaccttgtgcatcgccaagagagttctgagtaaagaagagtatgcctgctggttgcaaagccacctagaagccgaatcctccctggaaaacagcgaggagctcctcttccagtctgccattcgcctggagaccaacctgcacttgttaggtgccactgggattgaagaccgcctgcaggacggagtccctgaaactatttctaaattgcgtcaagcgggcctgcagatttgggttctcactggtgacaaacaagaaacagctgtcaacattgcatatgcctgcaaactgctggaccacgacgaggaggtcatcaccctgaatgccacctcccaggaggcgtgtgcagccctgctagaccagtgcctatgctacgtgcagtccagaggcctccagagagcccctgagaagaccaagggcaaagtgagcatgaggttctcctctctctgcccaccctccacgtccactgcctctggccgcagacccagcctcgtgatcgatgggagaagcctggcctacgctctcgagaaaaacctggaggacaaattcctcttccttgccaagcagtgccgctccgtcctctgctgtcggtcgacgcctctgcagaagagcatggtggtgaagctggtgcggagcaagctcaaggccatgaccctggccataggtgatggagccaatgatgtcagcatgatccaggtggcagatgtgggtgtgggaatctccggccaggagggtatgcaggcagtgatggccagcgactttgcagtgccgaaattccgatacctggagaggctcttgattcttcacgggcattggtgctactcccgacttgccaacatggtgctgtacttcttctacaaaaacacaatgttcgtgggcctcctgttttggttccagtttttctgtggcttctctgcatctaccatgattgaccagtggtatctaatcttctttaatctgctcttctcgtcacttcccccgctcgtgactggggtgctggacagggatgtgccagccaatgtgctgctgaccaacccgcagctctacaagagtggccagaacatggaggaataccggccacgaacgttctggtttaacatggccgacgccgccttccagagcctggtttgcttttccattccttacctggcctactatgactcgaacgtggacctgtttacctgggggacccctattgtgacaatcgcgctgctcactttcctgctccacctgggcattgaaaccaaaacctggacctggctcaactggataacgtgtggcttcagtgtccttttgtttttcaccgtggctttgatttacaatgcgtcttgtgccacgtgctatcctccgtccaacccttactggactatgcaagccttactgggtgacccagtgttttacttgacttgcctgatgacgcctgtcgctgcactgctgcccagattgtttttcagatccctccaggggagggttttccccacacaacttcagctggcacgtcagttgaccaggaagtcccccaggagatgcagtgctcccaaagagacctttgctcagggacgcctcccgaaggactcgggaaccgagcactcatcagggaggacagtcaagacctctgtgcccctgtcccagccttcttggcacacacagcagccggtctgctccctggaggccagcggggagcccagcacagtggacatgagcatgccagtgagggagcacaccctgctggaggggctgagcgcaccggcccccatgtcctctgcgccaggggaggctgtcctgaggagtccaggagggtgtcctgaggagtccaaggtgagagctgccagcaccggcagggtgacccccctgtcttccctcttcagcctgcctaccttcagcttactcaactggatttcctcctggtcgctggtcagcaggctggggagtgtcttacagttctcccggacggagcagcttgcagatggacaagcgggacgtggacttcctgtccagccccactcaggccgatcaggacttcaagggccagaccacagactacttataggagcatcttcaaggcggtcacagtgaaaaccttgaaatggccttttttaatatatataaataaatgttaatattatttatgtttattatttgcacagaagagttctagggagatgtatttctaaatgtttcccaggctaatacaggaaacaagaggtaccaaaaaagaaagtttattttttaaaattctaagtagagtatattgaaaagaaaaagaagagccttaacatatataaaagtttaaagaagagtaacacttgaaaagtgtgtttagatttattttttcatctcatttttaagaacaagcagtacgatttgttttcttcaacatgtgtgactgcgcactgagtacaaatgtgtgactgctcatggttaatgcaggcaggtgtgaacatgggggaacaatgagcagagatggcagagggcagagcacatggcccccagaggcttccagtctcactgacacaggagggctgggctccacttcatccagatgaaggaaaggaagacctcaagaaaaattcacagttgagtgcatcccagcattctgttccgggcaggcatttcaggaagaccgccttgtaggtattacatccctggtgtcgtattttgcctgttaaatcgtaacaagcaataaacaactttcactttgcaaagacagtgtgtccagttaccactggtgtatgaaatgattaatacctgacctcacagagtatgatctcagggcacttccgtaaggcaagtccttttagaggctatgaagaaaacagctgcatggcacataccaaagctgctgcacagctggccaccatggcaccctgcaccaggccatcagcaccacgtgccaaggagctcagcggtcttcaggcatttttgtaatgagccattagttctgtccctctaaaactagaaaaggaagggcaggaaatgataacaacccaaggcaatgatatggcatgtcatcttccgagcccttctttctactttgtcaaacagttcttagttgctggctctgctcggcaccgggactgtgaagggtgtactccctgctgtgtgggagggacctagggcctctttggatgctgtcttcgaggacagcaatgcagagagggcataggatctgaggacaaggaaattcctcagcatggcgtatcaggaaagcatggctcattctgcaatgagccatgagtgtgggccatcgcaagtcacagaaaatgcacctcattccagtcaagcagaaaaacaggcacaggctcagtgtaggtcccaagagagggtgcctggactcagcaactcagacctgggcttttctcccagctttcagggacagctttgtcctgagtctgcctctgttcacggggatgcttggctggagtcacccccaggacttatccatgcatcactattcagaagacacagagggcccctctctccacattccaaacagagtcctggtttcctcagcctcaccctgcatagcttgcacaacatcctcagaaccattcactggcaaatggaggggaacgtgctgactgggactcccagctggagctgggaggagaggtccacttcccttagaacacctgagctgctgcatgagtggacgtcagaagaatctctatgccctgttaaatggggagacaaaggggtggtgggggcttcagccagtgatttcggaccgaaggtgacagccgtcccaaccctgcccagcctgatgccacctcctctgttcttggaacaacgcataggaaaagaatctcctttggaaggtgacactgctccctgaattaaggtaatggttgcgagcaccaagtacaaggactagacgcatatttacctgcgtatctgagagttccagattcccagcttccagatgatccttgcacagacaacctaccttctttccagaggatgtctttctcctctggagagtagatgcttgctcttgggaaacggaatgaccttggcgctggcttcaggaatatgcatcccacagccagtttagagaaatacatgttgtaaatggcattgacagctgctctttaggatggggagtattatggaaatccacaataacaatctatggcaagcaact

SEQ ID NO: 215399 - DNA, 4500 bp, Artificial Sequence
  derived and/or modified sequence
atggagagagagcccgccggcaccgaggagcccggcccccccggcagaagaagaagaagagagggcagaaccagaaccgtgagaagcaacctgctgcccccccccggcgccgaggaccccgccgccggcgccgccaagggcgagagaagaagaagaagaggctgcgcccagcacctggccgacaacagactgaagaccaccaagtacaccctgctgagcttcctgcccaagaacctgttcgagcagttccacagacccgccaacgtgtacttcgtgttcatcgccctgctgaacttcgtgcccgccgtgaacgccttccagcccggcctggccctggcccccgtgctgttcatcctggccatcaccgccttcagagacctgtgggaggactacagcagacacagaagcgaccacaagatcaaccacctgggctgcctggtgttcagcagagaggagaagaagtacgtgaacagattctggaaggagatccacgtgggcgacttcgtgagactgagatgcaacgagatcttccccgccgacatcctgctgctgagcagcagcgaccccgacggcctgtgccacatcgagaccgccaacctggacggcgagaccaacctgaagagaagacaggtggtgagaggcttcagcgagctggtgagcgagttcaaccccctgaccttcaccagcgtgatcgagtgcgagaagcccaacaacgacctgagcagattcagaggctgcatcatccacgacaacggcaagaaggccggcctgtacaaggagaacctgctgctgagaggctgcaccctgagaaacaccgacgccgtggtgggcatcgtgatctacgccggccacgagaccaaggccctgctgaacaacagcggccccagatacaagagaagcaagctggagagacagatgaactgcgacgtgctgtggtgcgtgctgctgctggtgtgcatgagcctgttcagcgccgtgggccacggcctgtggatctggagataccaggagaagaagagcctgttctacgtgcccaagagcgacggcagcagcctgagccccgtgaccgccgccgtgtacagcttcctgaccatgatcatcgtgctgcaggtgctgatccccatcagcctgtacgtgagcatcgagatcgtgaaggcctgccaggtgtacttcatcaaccaggacatgcagctgtacgacgaggagaccgacagccagctgcagtgcagagccctgaacatcaccgaggacctgggccagatccagtacatcttcagcgacaagaccggcaccctgaccgagaacaagatggtgttcagaagatgcaccgtgagcggcgtggagtacagccacgacgccaacgcccagagactggccagataccaggaggccgacagcgaggaggaggaggtggtgcccagaggcggcagcgtgagccagagaggcagcatcggcagccaccagagcgtgagagtggtgcacagaacccagagcaccaagagccacagaagaaccggcagcagagccgaggccaagagagccagcatgctgagcaagcacaccgccttcagcagccccatggagaaggacatcacccccgaccccaagctgctggagaaggtgagcgagtgcgacaagagcctggccgtggccagacaccaggagcacctgctggcccacctgagccccgagctgagcgacgtgttcgacttcttcatcgccctgaccatctgcaacaccgtggtggtgaccagccccgaccagcccagaaccaaggtgagagtgagattcgagctgaagagccccgtgaagaccatcgaggacttcctgagaagattcacccccagctgcctgaccagcggctgcagcagcatcggcagcctggccgccaacaagagcagccacaagctgggcagcagcttccccagcacccccagcagcgacggcatgctgctgagactggaggagagactgggccagcccaccagcgccatcgccagcaacggctacagcagccaggccgacaactgggccagcgagctggcccaggagcaggagagcgagagagagctgagatacgaggccgagagccccgacgaggccgccctggtgtacgccgccagagcctacaactgcgtgctggtggagagactgcacgaccaggtgagcgtggagctgccccacctgggcagactgaccttcgagctgctgcacaccctgggcttcgacagcgtgagaaagagaatgagcgtggtgatcagacaccccctgaccgacgagatcaacgtgtacaccaagggcgccgacagcgtggtgatggacctgctgcagccctgcagcagcgtggacgccagaggcagacaccagaagaagatcagaagcaagacccagaactacctgaacgtgtacgccgccgagggcctgagaaccctgtgcatcgccaagagagtgctgagcaaggaggagtacgcctgctggctgcagagccacctggaggccgagagcagcctggagaacagcgaggagctgctgttccagagcgccatcagactggagaccaacctgcacctgctgggcgccaccggcatcgaggacagactgcaggacggcgtgcccgagaccatcagcaagctgagacaggccggcctgcagatctgggtgctgaccggcgacaagcaggagaccgccgtgaacatcgcctacgcctgcaagctgctggaccacgacgaggaggtgatcaccctgaacgccaccagccaggaggcctgcgccgccctgctggaccagtgcctgtgctacgtgcagagcagaggcctgcagagagcccccgagaagaccaagggcaaggtgagcatgagattcagcagcctgtgcccccccagcaccagcaccgccagcggcagaagacccagcctggtgatcgacggcagaagcctggcctacgccctggagaagaacctggaggacaagttcctgttcctggccaagcagtgcagaagcgtgctgtgctgcagaagcacccccctgcagaagagcatggtggtgaagctggtgagaagcaagctgaaggccatgaccctggccatcggcgacggcgccaacgacgtgagcatgatccaggtggccgacgtgggcgtgggcatcagcggccaggagggcatgcaggccgtgatggccagcgacttcgccgtgcccaagttcagatacctggagagactgctgatcctgcacggccactggtgctacagcagactggccaacatggtgctgtacttcttctacaagaacaccatgttcgtgggcctgctgttctggttccagttcttctgcggcttcagcgccagcaccatgatcgaccagtggtacctgatcttcttcaacctgctgttcagcagcctgccccccctggtgaccggcgtgctggacagagacgtgcccgccaacgtgctgctgaccaacccccagctgtacaagagcggccagaacatggaggagtacagacccagaaccttctggttcaacatggccgacgccgccttccagagcctggtgtgcttcagcatcccctacctggcctactacgacagcaacgtggacctgttcacctggggcacccccatcgtgaccatcgccctgctgaccttcctgctgcacctgggcatcgagaccaagacctggacctggctgaactggatcacctgcggcttcagcgtgctgctgttcttcaccgtggccctgatctacaacgccagctgcgccacctgctacccccccagcaacccctactggaccatgcaggccctgctgggcgaccccgtgttctacctgacctgcctgatgacccccgtggccgccctgctgcccagactgttcttcagaagcctgcagggcagagtgttccccacccagctgcagctggccagacagctgaccagaaagagccccagaagatgcagcgcccccaaggagaccttcgcccagggcagactgcccaaggacagcggcaccgagcacagcagcggcagaaccgtgaagaccagcgtgcccctgagccagcccagctggcacacccagcagcccgtgtgcagcctggaggccagcggcgagcccagcaccgtggacatgagcatgcccgtgagagagcacaccctgctggagggcctgagcgcccccgcccccatgagcagcgcccccggcgaggccgtgctgagaagccccggcggctgccccgaggagagcaaggtgagagccgccagcaccggcagagtgacccccctgagcagcctgttcagcctgcccaccttcagcctgctgaactggatcagcagctggagcctggtgagcagactgggcagcgtgctgcagttcagcagaaccgagcagctggccgacggccaggccggcagaggcctgcccgtgcagccccacagcggcagaagcggcctgcagggccccgaccacagactgctgatcggcgccagcagcagaagaagccagtag

SEQ ID NO: 215400 - protein, 538 aa, Artificial Sequence
  derived and/or modified sequence
MARELSESTALDAQSTEDQMELLVIKVEEEEAGFPSSPDLGSEGSRERFRGFRYPEAAGPREALSRLRELCRQWLQPEMHSKEQILELLVLEQFLTILPGNLQSWVREQHPESGEEVVVLLEYLERQLDEPAPQVSGVDQGQELLCCKMALLTPAPGSQSSQFQLMKALLKHESVGSQPLQDRVLQVPVLAHGGCCREDKVVASRLTPESQGLLKVEDVALTLTPEWTQQDSSQGNLCRDEKQENHGSLVSLGDEKQTKSRDLPPAEELPEKEHGKISCHLREDIAQIPTCAEAGEQEGRLQRKQKNATGGRRHICHECGKSFAQSSGLSKHRRIHTGEKPYECEECGKAFIGSSALVIHQRVHTGEKPYECEECGKAFSHSSDLIKHQRTHTGEKPYECDDCGKTFSQSCSLLEHHRIHTGEKPYQCSMCGKAFRRSSHLLRHQRIHTGDKNVQEPEQGEAWKSRMESQLENVETPMSYKCNECERSFTQNTGLIEHQKIHTGEKPYQCNACGKGFTRISYLVQHQRSHVGKNILSQ

SEQ ID NO: 215401 - protein, 178 aa, Artificial Sequence
  derived and/or modified sequence
MARELSESTALDAQSTEDQMELLVIKVEEEEAGFPSSPDLGSEGSRERFRGFRYPEAAGPREALSRLRELCRQWLQPEMHSKEQILELLVLEQFLTILPGNLQSWVREQHPESGEEVVVLLEYLERQLDEPAPQVERTGLVSERCGLFPPEIPDQSEGHSFNIQEFFISFLYREPPWQ

SEQ ID NO: 215402 - DNA, 2312 bp, Artificial Sequence
  derived and/or modified sequence
agtggcttctgtgccccgccctgcgggtggtttgctagtttcaagcactttgtgagtatggggtgaatcggcgtcggccttccactgtggggttaaatctcatcccgcggctctcctcctgtcggtcctgcagttcttttgtccccgggtagagggatcttctgcagaaatagcgctggaagctagagtgaggcctgagtactgccttggcctaggatggctagagaattaagtgaaagcacagccctggatgcccagtctacagaagaccagatggagcttctggtcataaaggtggaggaagaagaagccggttttcccagtagcccagatctgggttctgagggctcccgcgagcgcttccgaggcttccgctacccggaggctgcaggcccccgcgaggcgctgagtcggctccgagagctctgccgacagtggctgcagcctgagatgcacagcaaggagcagatcctggagctgctggtgctggagcagttcctgaccatcctgccggggaatctgcagagctgggtgcgggagcagcatccagagagcggggaggaggtggtggtgctattggagtatttggagaggcagctggatgagccggcgccgcaggtttcaggtgttgaccaggggcaagaactgctctgttgcaagatggcactattgacaccagccccagggtcacaaagtagccaatttcagctaatgaaggctctgctcaagcatgaatctgtgggatcccagcctttacaagatagagttctccaggtccccgtgcttgcccatggaggatgctgcagagaagataaagtggtagcttctaggcttactccagagtcccaggggttgttgaaagtggaagatgtggccctgaccctcacccctgaatggacacagcaggattcatctcaggggaatctctgtagagatgaaaagcaggagaaccatggcagcctggtctccctgggtgatgaaaaacagactaagagcagggacttgcctccagctgaggagcttccagaaaaggagcatgggaagatatcgtgccacctgagagaagacattgcccagattcctacatgtgcagaagctggtgaacaggagggcaggctacaaagaaagcagaaaaatgccacaggagggaggcggcacatctgccatgaatgtggaaagagttttgctcaaagctcaggcctgagtaaacacaggagaatccacactggtgagaaaccctacgaatgtgaagagtgtggcaaagccttcattgggagctctgcccttgtcattcatcagagagtccacactggtgagaagccatatgagtgtgaagaatgtggtaaggccttcagtcatagctcagaccttatcaagcatcagagaacccacactggggagaagccctatgagtgtgatgactgtgggaagaccttcagccagagctgcagcctccttgaacatcacagaatccacactggggagaagccgtatcagtgcagtatgtgtggcaaagcctttaggcgaagttcacatctcctgagacatcagaggatccatactggggataaaaatgttcaggaacctgagcagggagaggcctggaaaagtaggatggaaagccagttggaaaatgttgaaactcccatgtcttataaatgtaatgagtgtgaaagaagtttcactcagaatacaggcctcattgaacatcaaaaaatccacactggtgagaaaccctatcagtgtaatgcgtgtggaaaaggcttcacccgaatttcataccttgttcaacatcagagaagccatgtagggaaaaacatcctatcacagtgacccatgccatacatgccagagttggtgctcatttgtcactgatctgaagccactccccctggagtctcaactatagaaattgtgggctgggctttatttaccactacacattatcaggtgttagaaaatgtagactgggttagacaaattatcttctaagttctagaaggggtttgtaatcaaaacatatttgataggaggctacgggagagttgtctagaagaggtaagacctgaaactgtttgttctctcccactagaattaaatggatgtttagactggctacttgccctaaaccagcacttggtgatgtctactgggtggatggttgtgatttgggggctgcttctctgaccattctttttgactgtaatgaatcctccacagttggtcagattcataaagtcttatatccccctctgtgccttttctgcaggtgctaataaatgtttattgaatgtaaaaaaaaaaaaaaaaaa

SEQ ID NO: 215403 - DNA, 1617 bp, Artificial Sequence
  derived and/or modified sequence
atggccagagagctgagcgagagcaccgccctggacgcccagagcaccgaggaccagatggagctgctggtgatcaaggtggaggaggaggaggccggcttccccagcagccccgacctgggcagcgagggcagcagagagagattcagaggcttcagataccccgaggccgccggccccagagaggccctgagcagactgagagagctgtgcagacagtggctgcagcccgagatgcacagcaaggagcagatcctggagctgctggtgctggagcagttcctgaccatcctgcccggcaacctgcagagctgggtgagagagcagcaccccgagagcggcgaggaggtggtggtgctgctggagtacctggagagacagctggacgagcccgccccccaggtgagcggcgtggaccagggccaggagctgctgtgctgcaagatggccctgctgacccccgcccccggcagccagagcagccagttccagctgatgaaggccctgctgaagcacgagagcgtgggcagccagcccctgcaggacagagtgctgcaggtgcccgtgctggcccacggcggctgctgcagagaggacaaggtggtggccagcagactgacccccgagagccagggcctgctgaaggtggaggacgtggccctgaccctgacccccgagtggacccagcaggacagcagccagggcaacctgtgcagagacgagaagcaggagaaccacggcagcctggtgagcctgggcgacgagaagcagaccaagagcagagacctgccccccgccgaggagctgcccgagaaggagcacggcaagatcagctgccacctgagagaggacatcgcccagatccccacctgcgccgaggccggcgagcaggagggcagactgcagagaaagcagaagaacgccaccggcggcagaagacacatctgccacgagtgcggcaagagcttcgcccagagcagcggcctgagcaagcacagaagaatccacaccggcgagaagccctacgagtgcgaggagtgcggcaaggccttcatcggcagcagcgccctggtgatccaccagagagtgcacaccggcgagaagccctacgagtgcgaggagtgcggcaaggccttcagccacagcagcgacctgatcaagcaccagagaacccacaccggcgagaagccctacgagtgcgacgactgcggcaagaccttcagccagagctgcagcctgctggagcaccacagaatccacaccggcgagaagccctaccagtgcagcatgtgcggcaaggccttcagaagaagcagccacctgctgagacaccagagaatccacaccggcgacaagaacgtgcaggagcccgagcagggcgaggcctggaagagcagaatggagagccagctggagaacgtggagacccccatgagctacaagtgcaacgagtgcgagagaagcttcacccagaacaccggcctgatcgagcaccagaagatccacaccggcgagaagccctaccagtgcaacgcctgcggcaagggcttcaccagaatcagctacctggtgcagcaccagagaagccacgtgggcaagaacatcctgagccagtag

SEQ ID NO: 215404 - DNA, 537 bp, Artificial Sequence
  derived and/or modified sequence
atggccagagagctgagcgagagcaccgccctggacgcccagagcaccgaggaccagatggagctgctggtgatcaaggtggaggaggaggaggccggcttccccagcagccccgacctgggcagcgagggcagcagagagagattcagaggcttcagataccccgaggccgccggccccagagaggccctgagcagactgagagagctgtgcagacagtggctgcagcccgagatgcacagcaaggagcagatcctggagctgctggtgctggagcagttcctgaccatcctgcccggcaacctgcagagctgggtgagagagcagcaccccgagagcggcgaggaggtggtggtgctgctggagtacctggagagacagctggacgagcccgccccccaggtggagagaaccggcctggtgagcgagagatgcggcctgttcccccccgagatccccgaccagagcgagggccacagcttcaacatccaggagttcttcatcagcttcctgtacagagagcccccctggcagtag

SEQ ID NO: 215405 - DNA, 1617 bp, Artificial Sequence
  derived and/or modified sequence
atggcgcgagagctgtctgaatctacagccctagacgcacagagcacagaggatcaaatggagctgcttgtaatcaaggttgaggaagaggaggccgggttccctagttctccagatctgggatcggaagggagtcgggagaggtttcggggttttcgttatcccgaggcagcaggacccagggaggcgctgtcacggctcagggagctctgcagacagtggctccaacccgagatgcacagcaaagaacagatcctcgagctgttggtactcgaacagtttctcacaattctcccaggaaacctgcagtcctgggtcagagagcaacaccccgagagtggggaggaagtcgtggtcctgttagagtatctggagcgccagttggacgaaccggccccacaagtgtcaggagttgatcagggacaagaactactgtgctgtaaaatggccctgctgacaccagccccaggaagccagtcttcccagttccaactgatgaaagcactgcttaagcacgagagtgtgggaagccagccattacaggacagagtactgcaagtgccggtcctcgcccatggcggctgttgccgcgaggacaaagtcgtcgcttccagactgacaccagagtcacaggggctgctgaaggttgaggatgtagccctgacactgacgccggagtggacacagcaagattcctctcagggtaatctgtgtcgagatgagaagcaggagaaccacggaagtttggtcagcctgggagatgaaaaacaaacaaagtccagagacctcccgcctgctgaggaactaccggaaaaggagcacggcaagatctcttgccatttgagagaggatatcgctcagatacctacatgtgctgaagcaggagaacaggaaggacgcctccaaagaaagcagaagaatgccaccggcggcaggcgtcacatctgccacgaatgtggaaagtcttttgcacagtcgtctggactctctaaacatagacggatccacaccggagagaaaccatacgaatgtgaagagtgcggaaaagcgttcataggaagttccgctctggttatccatcagcgagtgcacaccggcgagaagccctacgaatgcgaagagtgtggcaaagctttctcccacagctccgacctaatcaagcatcagcggacccatacaggggagaaaccatatgaatgtgacgattgcggaaagacattttctcagtcttgctctctgttggagcaccacagaatccataccggagaaaagccctaccaatgttctatgtgcggaaaagctttcaggagatcatcacacctgctgcgacatcagcggattcacacgggggacaaaaatgtacaggaaccggaacagggcgaggcctggaaatcacggatggagtcccaacttgagaacgtggagactccgatgagctataaatgcaacgaatgtgaaagatccttcacacagaacacaggactaattgaacaccaaaagatccataccggcgaaaaaccctatcagtgcaacgcctgtggaaagggttttacccggatatcctatctggtgcaacatcagcgctcccatgtggggaaaaacatattatcccagtag

SEQ ID NO: 215406 - DNA, 1617 bp, Artificial Sequence
  derived and/or modified sequence
atggcccgggagctgtccgagtccactgcactcgatgcccagtccaccgaagatcagatggagctcctcgtgattaaagtcgaggaagaagaggcgggctttcccagctcaccagaccttggctctgagggaagcagggaacggttccggggattcagatacccagaagccgctgggcctcgcgaggcactctcaagactgagagagctctgccggcaatggcttcagcccgagatgcattcgaaggaacagattctggagttactggtccttgagcaatttctgactatcttgcccgggaacttgcagtcctgggttcgtgaacaacaccccgaaagtggagaggaagtcgtcgtgctgctcgaatatcttgagcgccaactggatgagccggcaccccaagtgagcggggtcgaccagggccaagagctcctgtgttgtaaaatggccctcctgactcccgcacctggcagtcagagttcccaattccagcttatgaaggccctgctgaaacatgagtcagttggttcacaacctctgcaggatcgggtgttgcaggtgcccgtgctcgcccatggtggctgctgccgtgaggacaaggtcgtggcctccaggcttacaccagaatcccaggggctgctgaaggttgaagacgtcgccttgactctcactccagaatggactcaacaagacagttcccagggcaatctttgccgggatgaaaaacaggaaaaccatggctcgctggtctcactgggagacgagaaacaaacaaaatccagagacctgccaccagcagaagagctgcctgagaaggaacacggaaaaatctcctgtcacctgcgcgaggacatcgcccaaatacctacctgtgccgaggcgggagaacaggaaggcaggctccagcggaagcaaaagaacgctacaggcggcagacggcatatctgccacgagtgtgggaagagctttgctcagagttcagggctgtcaaaacatcgccgcatacataccggggaaaaaccatacgagtgtgaggagtgtggaaaagcttttataggaagctctgccttggttattcaccagagagtgcacactggagagaaaccttacgagtgtgaggagtgcggaaaagcgttctcacactcttcagacctgatcaaacaccagcgcacacacaccggcgagaaaccatacgaatgtgatgactgtggcaagacctttagtcagtcttgctcattactcgagcaccacaggattcatacaggtgaaaagccataccagtgttcaatgtgtggcaaagcctttcgtagatcgtcacaccttttgaggcaccagaggattcacacaggcgacaaaaacgtgcaagaacctgaacagggggaggcgtggaaatctaggatggagtcccagttggaaaatgtcgagacccccatgtcttacaagtgtaatgagtgcgagaggtcgttcactcagaacaccggcctcattgaacatcagaagatccacaccggcgagaagccctaccaatgtaacgcatgcggcaaggggtttaccaggatttcctatctggtccagcaccagcgctcgcatgtgggcaagaacattctgagccagtag

SEQ ID NO: 215407 - DNA, 537 bp, Artificial Sequence
  derived and/or modified sequence
atggcccgggaactgtccgagagcacagcactcgatgcccagtcaacagaagaccaaatggagttactcgtgattaaggtcgaggaggaggaggccgggttccctagtagcccagacctcggatccgaggggtcgcgggaaaggttccgagggttccgctaccctgaggcagccggacccagggaggccctgtctagactacgggagctttgcagacagtggcttcagcccgaaatgcattccaaggaacagatccttgagcttttagtcctcgaacagttcttaaccatccttcccggaaatctgcagagctgggtgagagagcagcatcctgagtccggagaggaggtggtcgtgcttctcgagtatctagagaggcagctggatgaacctgccccgcaggtggaacggaccggcctcgtatctgaacggtgcggtctgttccccccagagatacctgaccaatctgaggggcacagctttaacatccaagagtttttcatttctttcctttatcgtgaacccccctggcagtag

SEQ ID NO: 215408 - DNA, 1617 bp, Artificial Sequence
  derived and/or modified sequence
atggcccgggagctgtctgagagcacagccctggatgcccagagcacagaggaccagatggagctgctggtgatcaaggtggaggaggaggaggccggcttccccagcagcccagacctgggcagcgagggcagccgggagcgcttccggggcttccgctacccagaggccgccggcccccgggaggccctgagccggctgcgggagctgtgccggcagtggctgcagcctgagatgcacagcaaggagcagatcctggagctgctggtgctggagcagttcctgaccatcctgcccggcaacctgcagagctgggtgcgggagcagcaccctgagagcggggaggaggtggtggtgctgctggagtacctggagcggcagctggatgagcccgccccccaggtgtctggagtggaccagggccaggagctgctgtgctgcaagatggccctgctgaccccagcccctggcagccagagcagccagttccagctgatgaaggccctgctgaagcatgagagcgtgggcagccagcccctgcaggacagagtgctgcaggtgcctgtgctggcccacggcggctgctgccgggaggacaaggtggtggccagccggctgaccccagagagccagggcctgctgaaggtggaggatgtggccctgaccctgaccccagagtggacccagcaggacagcagccagggcaacctgtgcagagatgagaagcaggagaaccacggcagcctggtgtccctgggagatgagaagcagaccaagagccgggacctgcccccagctgaggagctgcctgagaaggagcacggcaagatcagctgccacctgagagaagatattgcccagatccccacctgtgccgaggccggggagcaggagggccgcctgcagaggaagcagaagaatgccactggaggccgccgccacatctgccatgaatgtgggaagagctttgcccagagcagcggcctgagcaagcaccggcgcatccacactggagagaagccctatgaatgtgaggagtgtgggaaggccttcatcggcagcagcgccctggtgatccaccagagggtgcacactggagagaagccctatgaatgtgaggagtgtgggaaggccttcagccacagcagtgacctgatcaagcaccagaggacccacactggagagaagccctatgaatgtgatgactgtgggaagaccttcagccagagctgcagcctgctggagcaccaccgcatccacactggagagaagccctaccagtgcagcatgtgtgggaaggccttccgccgcagcagccacctgctgcggcaccagaggatccacactggagacaagaatgtgcaggagcctgagcagggcgaggcctggaagagcaggatggagagccagctggagaatgtggagacccccatgagctacaagtgcaatgaatgtgagaggagcttcacccagaacacaggcctcatcgagcaccagaagatccacactggagagaagccctaccagtgcaatgcctgtgggaagggcttcacccgcatctcctacctggtgcagcaccagaggagccacgtgggcaagaacatcctgagccagtag

SEQ ID NO: 215409 - DNA, 537 bp, Artificial Sequence
  derived and/or modified sequence
atggcccgggagctgtctgagagcacagccctggatgcccagagcacagaggaccagatggagctgctggtgatcaaggtggaggaggaggaggccggcttccccagcagcccagacctgggcagcgagggcagccgggagcgcttccggggcttccgctacccagaggccgccggcccccgggaggccctgagccggctgcgggagctgtgccggcagtggctgcagcctgagatgcacagcaaggagcagatcctggagctgctggtgctggagcagttcctgaccatcctgcccggcaacctgcagagctgggtgcgggagcagcaccctgagagcggggaggaggtggtggtgctgctggagtacctggagcggcagctggatgagcccgccccccaggtggagaggacaggcctggtgtctgagcgctgtggcctcttccccccagagatcccagaccagagcgagggccacagcttcaacatccaggagttcttcatctccttcctgtaccgggagcccccctggcagtag

SEQ ID NO: 215410 - DNA, 1617 bp, Artificial Sequence
  derived and/or modified sequence
atggcccgggagctgagcgagagcaccgccctggacgcccagagcacagaagaccagatggagctgctggtcataaaggtcgaggaagaggaagctggcttcccgagcagccctgacctgggaagcgagggaagtagagagaggtttcggggtttcagataccccgaggccgccggcccccgggaggccctctcaagattgcgagaactgtgtcgacagtggctccaacccgaaatgcactccaaagaacaaatcttggagctgttggtccttgagcagtttctcaccatcttacctggaaaccttcaaagttgggtcagagagcaacatccagagagcggcgaggaagtcgtcgtgctgttagaataccttgagcgccagcttgatgagcctgcccctcaagtatccggcgtggaccaggggcaggaactcttgtgttgtaagatggctctcctgactccagccccaggttcccagtcctcccaatttcagctaatgaaagctctgttgaaacacgagtcggttggaagccagcctctgcaggaccgggtgctgcaggtgccagtgttagcacacggtggatgttgtcgggaggacaaggtcgtggcgagccggctaactccagagagccagggtcttctgaaagtggaggatgtggccctgactcttacccctgaatggacccagcaggatagttcccagggcaacctctgtagagacgaaaagcaggaaaatcacggtagtttggtgtccttgggggatgagaagcagactaaaagtcgcgatctgcccccggctgaagagctgcccgagaaagagcacggaaaaatttcctgccatctgagggaagacattgcacaaatccccacatgtgccgaggcaggggagcaggagggaaggcttcagaggaagcagaaaaatgccaccggagggcgtcgccacatatgtcatgagtgtggtaagtccttcgcacaatcttccggattgagcaaacatcgacgaatacataccggtgagaaaccctatgagtgcgaggaatgcggcaaggcgttcattggaagttcagcactcgtgatccaccagcgcgtgcacacgggggaaaaaccttatgaatgcgaagaatgtggcaaagctttttctcactctagtgatctgatcaagcaccagagaacccacaccggggagaagccctatgagtgtgacgattgtgggaaaacattctctcagagttgcagtttgctggagcaccatcggatccacaccggtgaaaagccctatcagtgctccatgtgtggaaaagcctttcggagatcttcccatctcctgagacatcagagaatccacactggagacaaaaatgttcaggagccggagcagggggaagcctggaagtcaagaatggagtcacagctggagaacgtggagacaccgatgtcctacaaatgcaacgaatgcgagcgatcctttacccagaacactggcctaatcgagcatcagaaaattcataccggcgagaaaccttaccagtgcaacgcctgtgggaagggcttcactcggatttcctatttggtacaacaccagcggtcccatgtcgggaagaatatcctgagtcaatag

SEQ ID NO: 215411 - DNA, 1617 bp, Artificial Sequence
  derived and/or modified sequence
atggcccgggagctgagcgagagcaccgccctggacgcccagagcacagaagaccagatggaattgcttgtcatcaaggtggaagaggaagaagctgggttcccttcttctccagacctcgggagcgagggatcgcgcgaaaggtttcggggcttcaggtaccccgaagcagccggcccacgggaggcgttgagtagactacgggagctttgtcgccaatggttgcagcccgaaatgcactcgaaggagcagattctcgagcttcttgttctggaacagttcttgaccatcctccccggtaacttgcagtcctgggtcagagagcagcatccggagtctggtgaagaggtggtggtgctcttagaatacctcgaacggcaactcgacgagccagctccgcaggtctctggcgtcgatcagggacaggaactgttgtgttgcaaaatggcattgcttactccagcacccgggtcccagtcgtcacaattccagctgatgaaagccctgcttaagcacgagtcggtgggttcccagcctctgcaagatagagtgctgcaagttccagtcttagcacacggaggatgctgtcgggaagataaagtcgtggcctccagacttacgcccgaaagccaggggttgctgaaggtcgaggatgtcgcactcactctcacgcctgagtggacacagcaggactcaagtcagggaaacttatgcagggatgaaaagcaagaaaatcacggctcactggtgagcttgggcgatgagaaacaaacaaagagtagagacctacccccagccgaagagctgcctgaaaaggaacatggcaaaatttcctgccaccttagagaggacatcgcgcagatcccgacatgtgccgaggccggcgaacaggaaggcagactacagcgaaaacagaaaaacgccactggcggaaggcgacacatttgccacgagtgcggtaagagcttcgctcagtcttccggcctctcaaagcacagacggatccacaccggggagaagccttatgagtgcgaagagtgtgggaaggcatttatagggagttccgctttagttattcatcagcgtgtccatacaggcgagaaaccatatgaatgcgaagagtgtgggaaagccttttcccacagttccgacctgattaagcaccagcgtacacataccggcgagaagccatacgaatgcgacgattgtggcaagacattctctcagtcatgttcccttctagagcaccatcggatacatacgggcgagaagccatatcagtgtagcatgtgtgggaaggcctttcggagatcatcacacttgctgcggcatcagcggattcacaccggtgacaaaaatgtccaggagcctgagcagggcgaggcttggaaaagcagaatggaaagccagctcgaaaacgtggaaaccccaatgtcatataagtgtaatgagtgcgaaaggtctttcactcagaatacaggcttgattgaacaccagaagattcatactggagaaaagccctatcagtgcaacgcatgcggcaaaggattcacacggatttcgtatctcgtgcagcatcagcggtcgcatgtgggcaagaatatactatcacagtag

SEQ ID NO: 215412 - DNA, 537 bp, Artificial Sequence
  derived and/or modified sequence
atggcccgggagctgagcgagagcaccgccctggacgcccagagcactgaggaccagatggagctgctggtgatcaaggtcgaggaggaagaagctggttttccaagttccccagatctcggaagcgaagggtctagagagcgcttccgagggttccgctatcccgaagccgctggaccaagggaagccctgtcacgcctccgagagctctgccgccagtggctccagccagagatgcacagcaaggagcagattctggaattgctggttttagaacagtttctaacaatccttcccggtaatctgcagtcctgggttcgcgagcagcaccctgagtccggggaagaggtcgtggtgctgctcgaatatttggagcgccaactcgacgaacctgcccctcaagtggagcgtacaggtttagttagtgagcggtgcgggttattcccgcctgagattcccgaccagagtgaggggcatagctttaatatccaagagttctttatctcatttttgtaccgagagccgccttggcagtag

SEQ ID NO: 215413 - DNA, 1617 bp, Artificial Sequence
  derived and/or modified sequence
atggcgagggaactgtccgagtcgactgccctagacgcccagagcactgaagaccaaatggaactgttggtgattaaggtggaagaggaggaagccggttttccctcatctcctgatttaggatccgagggatcgagagaaagatttcgaggctttagatatcccgaagctgccggtccacgggaggctctgtctagactccgtgaactgtgccgacagtggttgcaaccggagatgcattccaaggaacaaattcttgagttgctcgtcctggaacagttcctaacaatactgcctggaaaccttcagagttgggtgcgcgagcaacatcccgagagcggggaggaggttgtcgtgttactggaatacctcgaacgtcagctggatgagcccgctcctcaggtctctggagtggatcaggggcaagagctcttgtgttgtaaaatggcgctactcacacctgcacccggttctcaaagttctcagtttcagcttatgaaagctctgctgaaacacgagtctgtcggcagccaacccctacaggaccgcgtgttgcaagtcccggtgttagctcacggtgggtgctgccgggaagacaaagtggtggcctcaagattaacaccggagagccagggactcttgaaagtggaggacgtggctttgactctaactccagagtggacacagcaggattcctcccagggtaacctctgccgcgacgagaagcaggaaaatcacggttctctggtgagcctaggtgatgagaaacaaacaaaatcccgggatctacccccagcagaggagctgcccgaaaaagagcacgggaaaattagttgccaccttagagaagacatcgctcagatacctacatgtgctgaggcaggagagcaggaagggaggctgcagcggaagcagaaaaatgccactggaggcaggagacacatatgtcatgagtgcgggaagtcatttgctcagtcttctggactgtccaagcacaggcgaatccataccggagagaaaccctacgaatgcgaagagtgcggcaaggcgtttatcgggtctagtgctctcgttatccaccagagggttcatacaggcgaaaaaccatacgaatgcgaagagtgtggaaaggccttttcacacagtagtgatctcattaaacaccagagaactcataccggcgagaagccctacgaatgcgatgattgtggtaaaacgttctcacagagttgctcattattggagcatcacagaatccataccggggaaaaaccctaccagtgttccatgtgcggaaaggccttcagaagaagtagccacttgttgagacatcagcggatccataccggcgataaaaatgtacaggagcctgagcagggcgaggcctggaaaagcaggatggaatcccagcttgagaacgtggagactccaatgtcatataagtgtaacgaatgcgagaggtcgttcactcaaaataccggcttaatagagcaccaaaaaatccacacaggggagaaaccctatcaatgcaatgcttgtggcaaaggtttcacccgaatttcatatctcgtccagcaccagagatctcacgtgggcaagaacatcctaagccagtag

SEQ ID NO: 215414 - DNA, 1617 bp, Artificial Sequence
  derived and/or modified sequence
atggcgcgagaactatcagaatccaccgctctcgatgcccagagtacagaagatcagatggaactacttgtcattaaggtggaagaggaagaggctggattcccttcctcccccgatcttgggagcgagggcagccgggaacggttccggggttttcgatatccggaggctgccggacccagagaggccctgagccgcctccgcgaactctgtcggcagtggttacagccagaaatgcacagtaaggagcagattttagagctcttagtgcttgagcaatttctgaccatactgcctggcaacctgcaatcttgggtccgggagcagcatcccgagtcgggcgaggaggttgtggtgctgctcgagtacctggaacggcaacttgacgagcctgctccacaggtttcgggcgtggaccagggtcaggagctgctgtgttgcaagatggccttactgaccccagccccaggatcccagagttcacagttccaactgatgaaggctcttttaaagcacgagtctgttggatctcaaccgctgcaggacagggtgttgcaggtcccagttcttgcgcatgggggatgttgtcgcgaggataaggtggttgcctcacgcctgaccccggagtctcagggcctgttgaaagtagaagacgtcgccttaaccttgaccccagagtggactcaacaggactccagccagggaaatctgtgcagagatgaaaaacaagaaaaccacggtagcctcgtgtccttgggtgatgagaaacagacaaagagcagggacctgcccccagcagaggaactccccgaaaaagaacacggtaagataagctgtcacttgagagaggacatcgctcagatacccacctgcgctgaagcgggtgagcaggaagggagactccagaggaaacagaaaaatgctactgggggacgcagacacatctgccatgaatgcggaaagagcttcgcccagagcagtgggttgagcaagcatcggcgtatccatactggtgaaaaaccatatgaatgtgaggagtgcggtaaggcattcatagggagcagtgcccttgtgatccaccagcgggttcacaccggcgagaagccttacgagtgtgaggagtgtggcaaggctttttctcactcctccgatttgatcaagcatcagagaacgcacactggggagaagccatatgaatgtgacgattgcggtaagaccttttctcagtcctgttccctcttagagcaccacaggatacacacaggagaaaaaccttatcagtgttccatgtgcggtaaagcctttaggcgttcatcacacctccttcgccaccagcgaatccacactggagataagaatgtgcaggaacctgagcagggtgaagcctggaagtcgaggatggagtctcaactcgagaacgtggagacccccatgtcctacaaatgtaacgagtgcgagcggtcctttactcagaataccgggctcatcgaacaccagaaaattcacactggcgaaaagccatatcaatgtaatgcatgcgggaaaggctttactaggatttcctatctcgtgcagcatcagcggagccacgtaggaaaaaacatcttgagtcagtag

SEQ ID NO: 215415 - DNA, 537 bp, Artificial Sequence
  derived and/or modified sequence
atggcgcgagaactcagcgaaagcaccgccctggacgctcagtccacggaggatcagatggagttgctggtaatcaaagtagaggaggaagaagcagggttcccgagctcccccgatttgggttccgaagggtctcgagaacgctttcgcggattccggtaccctgaggccgctggacccagagaggcgctgagcaggcttagagaactgtgtcggcagtggctgcagcccgagatgcacagcaaagaacagattctggagttgctggtcctcgagcagtttttgaccattctgcccggaaatctccaatcttgggtgagggaacagcatcccgagtcaggagaggaggtggtggtactactggagtacctcgaacgtcagcttgatgagcccgctccacaggttgaacggaccggcctggtgtccgaacgatgcggcttattcccgcctgaaatcccagaccagagcgagggccactcctttaatattcaggaattcttcatctcattcctctaccgggagcctccttggcagtag

SEQ ID NO: 215416 - DNA, 2294 bp, Artificial Sequence
  derived and/or modified sequence
agtggcttctgtgccccgccctgcgggtggtttgctagtttcaagcactttgtgagtatggggtgaatcggcgtcggccttccactgtggggttaaatctcatcccgcggctctcctcctgtcggtcctgcagttcttttgtccccgggtagagggatcttctgcagaaatagcgctggaagctagagtgaggcctgagtactgccttggcctaggatggctagagaattaagtgaaagcacagccctggatgcccagtctacagaagaccagatggagcttctggtcataaaggtggaggaagaagaagccggttttcccagtagcccagatctgggttctgagggctcccgcgagcgcttccgaggcttccgctacccggaggctgcaggcccccgcgaggcgctgagtcggctccgagagctctgccgacagtggctgcagcctgagatgcacagcaaggagcagatcctggagctgctggtgctggagcagttcctgaccatcctgccggggaatctgcagagctgggtgcgggagcagcatccagagagcggggaggaggtggtggtgctattggagtatttggagaggcagctggatgagccggcgccgcaggtttcaggtgttgaccaggggcaagaactgctctgttgcaagatggcactattgacaccagccccagggtcacaaagtagccaatttcagctaatgaaggctctgctcaagcatgaatctgtgggatcccagcctttacaagatagagttctccaggtccccgtgcttgcccatggaggatgctgcagagaagataaagtggtagcttctaggcttactccagagtcccaggggttgttgaaagtggaagatgtggccctgaccctcacccctgaatggacacagcaggattcatctcaggggaatctctgtagagatgaaaagcaggagaaccatggcagcctggtctccctgggtgatgaaaaacagactaagagcagggacttgcctccagctgaggagcttccagaaaaggagcatgggaagatatcgtgccacctgagagaagacattgcccagattcctacatgtgcagaagctggtgaacaggagggcaggctacaaagaaagcagaaaaatgccacaggagggaggcggcacatctgccatgaatgtggaaagagttttgctcaaagctcaggcctgagtaaacacaggagaatccacactggtgagaaaccctacgaatgtgaagagtgtggcaaagccttcattgggagctctgcccttgtcattcatcagagagtccacactggtgagaagccatatgagtgtgaagaatgtggtaaggccttcagtcatagctcagaccttatcaagcatcagagaacccacactggggagaagccctatgagtgtgatgactgtgggaagaccttcagccagagctgcagcctccttgaacatcacagaatccacactggggagaagccgtatcagtgcagtatgtgtggcaaagcctttaggcgaagttcacatctcctgagacatcagaggatccatactggggataaaaatgttcaggaacctgagcagggagaggcctggaaaagtaggatggaaagccagttggaaaatgttgaaactcccatgtcttataaatgtaatgagtgtgaaagaagtttcactcagaatacaggcctcattgaacatcaaaaaatccacactggtgagaaaccctatcagtgtaatgcgtgtggaaaaggcttcacccgaatttcataccttgttcaacatcagagaagccatgtagggaaaaacatcctatcacagtgacccatgccatacatgccagagttggtgctcatttgtcactgatctgaagccactccccctggagtctcaactatagaaattgtgggctgggctttatttaccactacacattatcaggtgttagaaaatgtagactgggttagacaaattatcttctaagttctagaaggggtttgtaatcaaaacatatttgataggaggctacgggagagttgtctagaagaggtaagacctgaaactgtttgttctctcccactagaattaaatggatgtttagactggctacttgccctaaaccagcacttggtgatgtctactgggtggatggttgtgatttgggggctgcttctctgaccattctttttgactgtaatgaatcctccacagttggtcagattcataaagtcttatatccccctctgtgccttttctgcaggtgctaataaatgtttattgaatgt

SEQ ID NO: 215417 - DNA, 2313 bp, Artificial Sequence
  derived and/or modified sequence
tcactccaggacatcctttgggaaccttactatgggattcaggtttggggtggtgtagaggattaagctgcagaaccactgaacatggagaaatttctgcagcagttccccagagatgtctctgggctcctgggcaggagagaagggactacttgcaagtttactggttaataatgatttcccacctttcagggatcttctgcagaaatagcgctggaagctagagtgaggcctgagtactgccttggcctaggatggctagagaattaagtgaaagcacagccctggatgcccagtctacagaagaccagatggagcttctggtcataaaggtggaggaagaagaagccggttttcccagtagcccagatctgggttctgagggctcccgcgagcgcttccgaggcttccgctacccggaggctgcaggcccccgcgaggcgctgagtcggctccgagagctctgccgacagtggctgcagcctgagatgcacagcaaggagcagatcctggagctgctggtgctggagcagttcctgaccatcctgccggggaatctgcagagctgggtgcgggagcagcatccagagagcggggaggaggtggtggtgctattggagtatttggagaggcagctggatgagccggcgccgcaggtttcaggtgttgaccaggggcaagaactgctctgttgcaagatggcactattgacaccagccccagggtcacaaagtagccaatttcagctaatgaaggctctgctcaagcatgaatctgtgggatcccagcctttacaagatagagttctccaggtccccgtgcttgcccatggaggatgctgcagagaagataaagtggtagcttctaggcttactccagagtcccaggggttgttgaaagtggaagatgtggccctgaccctcacccctgaatggacacagcaggattcatctcaggggaatctctgtagagatgaaaagcaggagaaccatggcagcctggtctccctgggtgatgaaaaacagactaagagcagggacttgcctccagctgaggagcttccagaaaaggagcatgggaagatatcgtgccacctgagagaagacattgcccagattcctacatgtgcagaagctggtgaacaggagggcaggctacaaagaaagcagaaaaatgccacaggagggaggcggcacatctgccatgaatgtggaaagagttttgctcaaagctcaggcctgagtaaacacaggagaatccacactggtgagaaaccctacgaatgtgaagagtgtggcaaagccttcattgggagctctgcccttgtcattcatcagagagtccacactggtgagaagccatatgagtgtgaagaatgtggtaaggccttcagtcatagctcagaccttatcaagcatcagagaacccacactggggagaagccctatgagtgtgatgactgtgggaagaccttcagccagagctgcagcctccttgaacatcacagaatccacactggggagaagccgtatcagtgcagtatgtgtggcaaagcctttaggcgaagttcacatctcctgagacatcagaggatccatactggggataaaaatgttcaggaacctgagcagggagaggcctggaaaagtaggatggaaagccagttggaaaatgttgaaactcccatgtcttataaatgtaatgagtgtgaaagaagtttcactcagaatacaggcctcattgaacatcaaaaaatccacactggtgagaaaccctatcagtgtaatgcgtgtggaaaaggcttcacccgaatttcataccttgttcaacatcagagaagccatgtagggaaaaacatcctatcacagtgacccatgccatacatgccagagttggtgctcatttgtcactgatctgaagccactccccctggagtctcaactatagaaattgtgggctgggctttatttaccactacacattatcaggtgttagaaaatgtagactgggttagacaaattatcttctaagttctagaaggggtttgtaatcaaaacatatttgataggaggctacgggagagttgtctagaagaggtaagacctgaaactgtttgttctctcccactagaattaaatggatgtttagactggctacttgccctaaaccagcacttggtgatgtctactgggtggatggttgtgatttgggggctgcttctctgaccattctttttgactgtaatgaatcctccacagttggtcagattcataaagtcttatatccccctctgtgccttttctgcaggtgcta

SEQ ID NO: 215418 - protein, 796 aa, Artificial Sequence
  derived and/or modified sequence
MSAAQVSSSRRQSCYLCDLPRMPWAMIWDFSEPVCRGCVNYEGADRIEFVIETARQLKRAHGCFQDGRSPGPPPPVGVKTVALSAKEAAAAAAAAAAAAAAAQQQQQQQQQQQQQQQQQQQQQQQQQLNHVDGSSKPAVLAAPSGLERYGLSAAAAAAAAAAAAVEQRSRFEYPPPPVSLGSSSHTARLPNGLGGPNGFPKPTPEEGPPELNRQSPNSSSAAASVASRRGTHGGLVTGLPNPGGGGGPQLTVPPNLLPQTLLNGPASAAVLPPPPPHALGSRGPPTPAPPGAPGGPACLGGTPGVSATSSSASSSTSSSVAEVGVGAGGKRPGSVSSTDQERELKEKQRNAEALAELSESLRNRAEEWASKPKMVRDTLLTLAGCTPYEVRFKKDHSLLGRVFAFDAVSKPGMDYELKLFIEYPTGSGNVYSSASGVAKQMYQDCMKDFGRGLSSGFKYLEYEKKHGSGDWRLLGDLLPEAVRFFKEGVPGADMLPQPYLDASCPMLPTALVSLSRAPSAPPGTGALPPAAPSGRGAAASLRKRKASPEPPDSAEGALKLGEEQQRQQWMANQSEALKLTMSAGGFAAPGHAAGGPPPPPPPLGPHSNRTTPPESAPQNGPSPMAALMSVADTLGTAHSPKDGSSVHSTTASARRNSSSPVSPASVPGQRRLASRNGDLNLQVAPPPPSAHPGMDQVHPQNIPDSPMANSGPLCCTICHERLEDTHFVQCPSVPSHKFCFPCSRESIKAQGATGEVYCPSGEKCPLVGSNVPWAFMQGEIATILAGDVKVKKERDP

SEQ ID NO: 215419 - DNA, 4147 bp, Artificial Sequence
  derived and/or modified sequence
cagccggagcaggagcgccgagacgcgcctccggaacgtagagtaacaatcacaaccccacattccgggcgagcgtgagcacgagcgggaagggatgcgacccgggccgaggcgccgcgcgagcgccctgcagccaacgtgagcgccgccagccgcggcggcccgggcgccggccaggcctgggggcggcgggagcctgcgtgcgtgcactcctctcctctgctctcgtgcgtcctggaagcagtggccgcggcggctccctccggggtgcaaacccagtcgccgccagcagaacggccgacgctgcggaggggagaaggtcctttctcggctgccaccccctcccccggtcctccggggaagcagcggcttcagcaagattggacccgggcaccgggtggcactgaaccctctggccctcgccccagggggcccgtcggggagaggacgcagctcgtaggggggtccccggggagaggaagagacagcccctttcgagcttccacgcaccagccactccggggagggggccaagaggcaacggcggccaccaccgggcaccctcgccccctcccctcgggccgggagcttccagcccaagtctgcagcaccaggaagaaggcgcctgagctcccctcgcgacgagtcaaccgcagtaggaggtgggggcgaagagagggctgaacccgtccgctgcccgggcggtggagcccccacggcgaggcgctgcgccggcggtggagactcgcgttccctccagcccctggggcagaactttctcgccccccctcctccctcccccgcagtcggactccctccccagccggccagtcctcccggaggagaaggcgccgcggagacagcccgggcgggggcctaccttccccagggcaggcatcatgtcggcggcgcaggtgtcctcgtcccggagacaatcttgctacctgtgcgacctgccccgcatgccctgggccatgatctgggacttctcggaacccgtatgccgcggttgcgtcaactacgagggcgctgatcgcatcgaattcgtgatcgagacagcgcgccagctgaagcgggcgcacggctgcttccaggacggccgctcccccgggccgccgccgcccgtcggggtcaagacagtggccctgtcggctaaggaagcggcggcggcggcggcagcagcggcggccgccgccgccgccgcgcaacagcaacagcaacagcagcagcagcagcagcaacagcagcagcagcagcagcagcagcagcagcaacaacagctcaaccacgttgatggttccagcaagcctgcggtgctggcggccccgtctggcctggagcgctacggcctaagcgctgccgccgccgccgccgccgccgccgccgctgcggtggaacagcgcagccgcttcgagtacccgccaccgccggtgagcctgggaagcagcagccacaccgcgcgactgcccaacggcctggggggcccaaacggcttccccaaaccaacaccagaggagggacccccagagctgaaccgtcagagccccaattcttcttcagcggcggcgtcggtggcgtctcggcgtggaacgcacggtgggctggttacggggctgcccaacccggggggtggcggaggcccccagctcaccgtgccccccaacctgctaccgcagacgctgcttaacggcccggccagcgctgcggtactccccccaccccctccccacgccctgggcagccgtgggcccccgacgcctgctcccccaggggctcctgggggccccgcttgtctcgggggtaccccgggtgtatcggccacgtcgtcctccgcgtcgtcttcgacctcttcgtcggtggcagaggtgggcgtgggtgctggtggtaagaggcccggctcggtgtcgagcacagaccaggagcgcgagttgaaggagaagcagcgcaacgccgaggccctggccgagctgagcgagagcctgcgcaaccgcgccgaggagtgggccagcaagcccaagatggtccgcgacacgctgctcacgctggcaggctgcacgccctacgaggttcgcttcaagaaggaccactcgctgctgggccgcgttttcgccttcgacgccgtctccaagcccggcatggactacgaattgaagctgttcattgagtaccccacgggctcgggcaacgtgtactccagtgcatctggtgtggccaagcagatgtatcaggactgcatgaaggacttcggccggggcctatcctcgggtttcaagtacctggagtacgaaaagaagcacggctccggggactggcgcctgcttggagacctgctccccgaagccgtgcgcttcttcaaggagggcgtgcccggcgccgacatgctgccccagccctacctggacgccagctgtcccatgctgcccactgctctggtgagtctgagccgcgcccccagcgcacccccggggaccggggccttgccgcccgccgcgccgtcgggccggggcgcagccgccagcctgcgcaagagaaaggcctctccggagcccccggactcagccgagggcgcgctgaagctgggcgaggaacagcagaggcagcagtggatggcgaaccagagcgaggcgctgaagctcaccatgtccgccgggggcttcgcggcgccggggcacgcggcggggggtccgcctccgccgcccccacctctgggaccccattccaaccggaccaccccacctgagtcagccccccagaacggtccgtcccctatggccgctctcatgtcggtggcagatactctgggcacagcgcactcgcccaaggatggcagttccgtgcactctaccactgcgtcggcgcggcgaaacagcagcagcccagtctcgccggcctccgtgccggggcagcgccgcttggcatcacgtaacggggacctgaatttacaggtggcgcccccgccgcctagcgcccacccgggcatggaccaagtgcacccccaaaacattccggattcccccatggccaacagcggacccctctgctgcaccatttgccacgaacgtttggaggatacgcatttcgttcagtgcccttccgtccccagccacaaattttgcttcccttgctctagagagagtatcaaggcccagggggccaccggcgaggtgtattgccccagcggagagaaatgccccctagtcgggtcgaatgtaccttgggccttcatgcagggcgaaatcgcgactatcttagctggggatgttaaagtgaaaaaggagagagacccttgaaccactgggcagccacctcctttgccctagaccagctcctctccaatcctgagggcccctcccccaacccaactcgaccctccctcccctcacccccaaggtgtagaattgtgaatataacgaaactgcaaaaagttagtcttatgtatagacattattttcgtcgtatgtttctatattttgaaacaaaggtatgtaacttcttcatttgaaggataagctggtttgtgttaagcagtatagtattggttgggtcatttgcatcatatcgttagcatttatttggtggcagaatgtttgcctaggtacagaattaatagcccttagcaacgactgctgctggtgtgtatttttgtaaatgttatgcactctctgaaaggaaaaacacacacaaaagaaaaagacttttttttttttttttttttttttgccaaggccagtgttgctgcctaaaaaaaaaaaaaaaaaaaaaaaaaaaaaaaaaaaatgctataaaatggtgaaagcttccttctaaactgccccaagtgttgaagtcttcactttattttgttgttttgttttgtttttctgttttgtttgcaaaatggtaagggggtgtcgggggggatggggtgtattttgttgcaagtttgtgaggggaaaatgttttggtttgtttctactgacctgaatgtgttggatctacacgtgttgttttgtttttgctttattgatgcacggatgcttttgaacagtagagcgaaatgctagacatggagaatctgctctgtttgtcctttatacatttctgtagttaacagaacactgtaatgtgccttggagcttagtaacttgtaataaattcaattgatatt

SEQ ID NO: 215420 - DNA, 2391 bp, Artificial Sequence
  derived and/or modified sequence
atgtcggccgctcaagtgagtagttctcgtcgccaatcatgttacctctgtgacctacctagaatgccatgggccatgatttgggacttcagcgagcctgtgtgccgtggctgcgtcaactatgaaggcgcagaccgtatcgaattcgtgatcgagacggcaaggcaattgaagcgggcgcacggatgcttccaggatggacgcagtccaggccctcccccaccggtaggcgtcaaaaccgttgccctgtctgcaaaggaggcagcagctgctgctgccgccgcagctgcggcagccgccgccgcccagcaacaacagcaacaacagcagcagcagcagcagcaacaacagcagcagcagcagcagcaacaacagcaacagctgaaccacgttgacggatcttctaaaccagccgtcctcgccgctcccagcggcctcgaaagatatggcctctccgccgccgccgcggccgcagccgccgctgctgccgctgtcgagcagcgttcccgcttcgagtacccacccccccctgtatccttgggatcctctagccatactgcgcggctgcccaatggcctgggcgggcccaatgggtttcctaagcctaccccagaggaaggtcctccggaactcaacaggcagagcccaaattcgagctctgcagccgcctctgtggcttccagaaggggaacccatggtggacttgtcacgggccttcccaaccccggggggggtggggggccccagctgactgtacccccaaaccttttgccccagacacttctcaacggacccgccagtgccgcggtcctgcctcccccacccccccacgcgttagggagcagggggcctccgactcctgcacctcccggcgcacccggcgggccggcatgccttggtggcactccaggggtgagcgcgaccagcagcagcgcaagttcctccacgagctcttctgttgctgaggtgggagtcggggcaggaggaaagcgacccggaagtgtcagctccacagatcaagaaagagaactgaaagaaaaacaaagaaatgctgaggccctagccgagctttctgaatccttgcgtaaccgcgcggaagagtgggcttccaagccaaaaatggtcagggatacactgctgaccctggccggctgcaccccgtacgaggtgcgctttaaaaaggaccactcactgctgggcagagtcttcgcctttgatgccgttagtaaacctggcatggattacgagctcaagttatttatcgagtaccccacggggtcgggtaacgtctactctagcgcgagcggagtcgccaagcaaatgtaccaggattgtatgaaggacttcggcagaggactgtcttcaggcttcaagtacctggagtatgaaaagaagcacgggagcggggattggagactcctcggagatttgctgcctgaagctgtcaggtttttcaaagagggcgtgcccggtgctgatatgttgcctcagccttacctcgacgcaagttgtcctatgttaccaactgctctcgtaagcctgtccagggctccgagcgcccctcctggaacaggagcccttccgccagcagccccttcagggagaggcgctgccgcctcgcttaggaaaaggaaagcctcccccgaacctcccgactctgctgagggcgccctcaagctcggggaagaacagcagagacagcagtggatggctaatcagtcagaagccctgaagctcacgatgtcggccggcggatttgctgcgcccgggcacgctgctggaggccctcctccccccccaccgcctctaggtccacactccaatagaacaacacctcccgaaagcgcaccccaaaatggcccaagtccaatggctgctctgatgtctgtcgctgataccctgggcactgcacatagtccaaaagacggttcgagcgtccattccaccactgcctccgctaggagaaactcttccagcccagtgtcacctgctagtgtccctggacagcggcggctagcttcccgcaacggagatctaaaccttcaggtggcccccccaccaccatccgctcacccaggcatggaccaggtgcatccccagaatatacctgactctccgatggcaaactccggtccactttgttgcacaatatgtcacgagaggttagaggatacacacttcgtccaatgcccatcagtgccttcccacaaattctgttttccctgcagtagagagtctattaaggctcaaggagctacgggcgaagtgtactgcccatccggcgaaaaatgccccctagtgggcagcaatgtgccatgggcctttatgcaaggcgaaattgccactatccttgcaggagacgtcaaagtgaagaaggagcgcgatccttag

SEQ ID NO: 215421 - DNA, 2391 bp, Artificial Sequence
  derived and/or modified sequence
atgtctgctgcccaggtgagcagcagccggcggcagagctgctacctgtgtgacctgcccaggatgccctgggccatgatctgggacttcagcgagcctgtgtgccggggctgtgtgaactatgaaggagctgacagaattgaatttgtgattgaaacagcccggcagctgaagagggcccacggctgcttccaggacggccgcagccctggccccccacctcctgtgggcgtgaagacagtggccctgagcgccaaggaggccgctgctgctgctgctgctgctgctgctgctgctgctgctgcccagcagcagcagcagcagcagcagcagcagcagcagcagcagcagcagcagcagcagcagcagcagcagcagcagctgaaccacgtggatggcagcagcaagccagctgtgctggccgcccccagcggcctggagagatatggcctgtctgctgctgctgctgctgctgctgctgctgctgctgctgtggagcagaggagcagatttgagtacccacctcctcctgtgtccctgggcagcagcagccacacagcccggctgcccaacggcctgggcggccccaacggcttccccaagcccaccccagaggagggccccccagagctgaaccggcagagccccaacagcagcagcgctgctgcctctgtggccagccggcggggcacccacggcggcctggtgacaggcctgcccaaccctgggggcggcggcggcccccagctgactgtgccccccaacctgctgccccagaccctgctgaatggacctgccagcgctgctgtgctgcccccacctcctcctcatgccctgggcagccggggcccccccaccccagcccctcctggggcccctgggggccctgcctgcctgggcggcaccccaggagtgtctgccaccagcagcagcgccagcagcagcaccagcagctctgtggccgaggtgggcgtgggcgccggcggcaagaggcctggctctgtgagcagcacagaccaggagcgggagctgaaggagaagcagagaaatgctgaggccctggccgagctgtctgagagcctgaggaacagagctgaggagtgggccagcaagcccaagatggtgcgggacaccctgctgaccctggccggctgcaccccctatgaggtgcgcttcaagaaggaccacagcctgctgggccgggtgtttgcctttgatgctgtgtccaagccaggcatggactatgagctgaagctgttcatcgagtaccccactggaagtggaaatgtgtacagcagcgccagcggcgtggccaagcagatgtaccaggactgcatgaaggactttggccggggcctgagcagcggcttcaagtacctggagtatgagaagaagcacggcagcggggactggaggctgctgggggacctgctgcctgaggccgtgcgcttcttcaaggagggcgtgcctggagctgacatgctgccccagccctacctggatgccagctgccccatgctgcccacagccctggtgtccctgagccgggcccccagcgcccctcctggcaccggggccctgcccccagctgcccccagcggcagaggagctgctgccagcctgaggaagaggaaggccagccctgagcccccagattctgctgagggcgccctgaagctgggggaggagcagcagaggcagcagtggatggccaaccagagcgaggccctgaagctgaccatgtctgctgggggctttgctgcccctggccacgccgccggcggccccccacctcctcctccacccctgggcccccacagcaacagaaccaccccacctgagagcgccccccagaatggccccagccccatggccgccctgatgtctgtggccgacaccctgggcacagcccacagccccaaggatggcagctctgtgcacagcaccacagccagcgcccggaggaacagcagcagccctgtgtccccagcctctgtgcccggccagaggcggctggccagcagaaatggagacctgaacctgcaggtggcccctcctcctccttctgcccaccctggcatggaccaggtgcacccccagaacatcccagacagccccatggccaacagcggccccctgtgctgcaccatctgccacgagcggctggaggacacccactttgtgcagtgccccagcgtgcccagccacaagttctgcttcccctgcagccgggagagcatcaaggcccagggcgccactggagaggtgtactgccccagcggggagaagtgccccctggtgggcagcaatgtgccctgggccttcatgcagggcgagatcgccaccatcctggccggagatgtgaaggtgaagaaggagcgggacccctag

SEQ ID NO: 215422 - DNA, 2391 bp, Artificial Sequence
  derived and/or modified sequence
atgagcgccgcccaggtgagcagcagccggcggcagagctgctacctctgcgacctacccagaatgccctgggccatgatctgggatttttccgagcccgtgtgcagaggctgtgtaaactacgagggagcagatcgcatcgaattcgtgatcgaaacagcacggcagctcaaacgcgcccacggctgtttccaagatggaaggtcgcccggacctcctccacccgttggtgtgaagaccgtggctctttccgccaaggaggccgctgcagctgccgctgccgctgcggcggccgccgccgccgcgcaacagcagcagcagcagcagcagcaacaacagcaacagcagcagcagcagcagcaacaacagcaacagcaacagctcaatcacgtcgacggaagctctaagccggctgtcttagcagctcctagcgggctggagcggtatggactgtcagcagctgctgcagcggcagctgcagctgccgctgctgtcgagcagagatccagatttgagtacccacccccaccagtgagcctcggatcgagctcccataccgctcgcctccctaacgggctggggggacccaatggattcccaaagccaacacctgaggaaggcccacccgagctgaatcgacaatctccgaattctagttctgccgcagcttccgtggcttcacggcgagggacccacggaggtctggtaaccggcctcccaaatccggggggcggcggtggcccacagctcaccgtgcctcccaacctgctcccgcagacactgctgaacggtcccgccagcgcagccgtcctgccaccgcctccaccacatgctctgggtagcagaggccctcctacacccgccccaccgggagcccctggagggcccgcttgcctgggcgggacacccggagtttccgctacgtcctcttctgcatcatcatcaacttcatccagcgtagccgaggttggcgtgggcgccggcgggaaacggcccgggtcggtctcttcgactgaccaggaacgtgagttgaaagaaaagcagagaaatgccgaagccctggccgaactttcagagagcctcaggaatcgagccgaggaatgggcgagcaaaccaaaaatggtccgcgatacactgctcaccctggccggatgcaccccttacgaggttaggttcaaaaaggaccatagcttattaggccgcgtttttgcgttcgacgctgtctcaaaacccggcatggactatgaactcaagttgttcatcgagtaccccacgggatctggaaatgtctactcatctgcaagtggtgtagcgaagcaaatgtaccaggactgtatgaaagactttggaagaggcctcagctccgggtttaaatacctggaatatgaaaagaagcatggatccggcgactggagactgctgggcgatctgcttccggaagccgtaaggttctttaaagagggggttcccggcgctgacatgcttccgcagccatatctggatgcaagttgtcccatgctgccgacggctctggtttctctctccagagccccctcagccccgcctgggacgggtgccctcccgccggctgccccctctggcagaggagccgctgcctcattgagaaagcggaaggcttcgccggagcctcccgatagtgccgaaggggcactgaagctgggggaggaacagcagagacagcagtggatggctaatcagagcgaggcgctcaagctgactatgagcgccgggggattcgctgccccaggccacgctgctggggggccgccccctcccccgccacccctggggccacacagtaataggacaacaccgccggaaagcgctccacagaacggacccagtcccatggccgccctgatgagtgtcgctgacacattaggaacagcccacagccccaaggatggttcctcggtccattccacaactgcttcagctcgaaggaactccagtagccccgtgagtccagctagcgttccgggtcagagaagactggcaagtaggaacggagaccttaaccttcaggtcgcacccccccccccaagcgcgcaccctggcatggatcaagtccaccctcaaaatatccctgacagtccaatggcaaacagcggcccgctgtgctgcacgatctgtcatgagaggctagaagatacacattttgtgcagtgtccaagcgtgccttcacacaagttctgtttcccgtgctcacgcgagtcgatcaaggctcagggcgctactggcgaagtatattgtccaagcggagaaaaatgcccattagtgggctcaaacgtgccctgggctttcatgcagggtgagattgcgactatcctagctggggatgtgaaggtaaagaaggagagagacccttag

SEQ ID NO: 215423 - DNA, 2391 bp, Artificial Sequence
  derived and/or modified sequence
atgtccgcagcacaagttagtagttctcggcgacagagctgttatttatgcgacttaccccgaatgccgtgggcgatgatctgggatttctccgagccagtgtgcagggggtgtgtcaattatgagggggctgatcggatagaattcgtgattgagacagcacgacaacttaaaagggctcatgggtgtttccaggacggacgtagccctggcccaccccctccagtgggcgtcaagaccgttgctctgtcagccaaagaggcagctgccgctgctgcggcagcagccgctgccgctgcagccgctcagcagcagcagcagcagcagcagcagcagcagcagcagcagcagcagcaacaacagcagcagcagcaacaacagctgaatcacgtggacggatcctccaagcccgctgtgctggctgccccatccggcttggaacgatatggactatctgccgctgccgctgccgcagctgccgcagcggctgcggtggaacagcgtagtagattcgagtacccccctccccctgtgtctctgggaagttcctcgcacaccgcgagactacccaacggtcttggagggccaaacggtttccccaagcccacaccagaggaaggcccaccggagttgaataggcagagccccaacagctcctccgcagctgcttccgtcgcctcccggagaggaactcacggcggacttgtcaccggacttcccaatccagggggaggtggagggcctcagttgacggttccaccaaaccttctgcctcagaccctgctgaatggtccagccagtgcagcggtcctaccaccgccacccccacatgccctggggagtagaggcccacctacacccgctccaccaggtgctccgggtggcccagcatgcctgggcggaacacccggtgtgagcgctactagtagcagtgcctcatcatctacaagctcttcggtggctgaggtcggcgtcggcgcaggaggcaaaaggccgggtagcgtgtccagcactgaccaggaaagggagctcaaggaaaagcagaggaatgctgaagccttagccgaactgagcgagtctctgcggaaccgggctgaggaatgggcatctaaaccaaaaatggtacgggatacacttctgaccttagcaggatgcacgccctatgaagtccggtttaagaaggatcactcgctgctggggagagtgtttgcattcgatgctgtcagcaagcccggtatggactacgagctgaaacttttcattgagtaccccactggttcaggcaacgtgtatagtagcgccagtggggtcgctaaacagatgtaccaggattgcatgaaggacttcggcaggggattgtcttctggttttaagtacctcgaatacgagaagaagcatggttctggcgactggaggcttctgggcgatcttctccctgaagcagtgcggttttttaaggagggagtgcccggtgcagatatgctaccacagccatacctggacgctagttgccctatgcttccaacggccttggtctccctctctagggctccctcagctccacctggcactggcgcactgcctccagctgccccatctggcaggggcgctgctgcctcccttcgtaaaagaaaagcttcgccagaacctcccgatagtgcagaaggtgcgctgaagctcggggaggagcagcagaggcagcaatggatggccaaccagtccgaggccctgaagttgacaatgtccgctggtgggttcgccgcacccggacatgccgctggaggccctccacccccacccccacccctcggcccacattccaatcgaacaactccacccgaatccgccccacagaacgggccatctcctatggccgctttaatgagcgtggcggacactttaggcacagcccattctccaaaggacggatcaagcgtccattctaccaccgcctcagcacgacgaaattcctcaagtccagtgtcacctgcttctgtgcccggacagcgcaggctggcttccagaaacggcgatctgaacttgcaggttgcacctcccccaccgtccgctcacccaggaatggatcaggttcacccccagaatatccccgactctcccatggcgaactccggacctttgtgctgtacaatttgccatgagcgtttagaggatacccacttcgtgcagtgtccctcggtcccaagccacaaattttgctttccttgcagtcgcgagagcatcaaggcccaaggggctaccggcgaagtgtactgtcccagcggggagaagtgcccgctcgtgggatccaacgttccttgggcattcatgcagggagagattgccacaatcctcgccggtgacgtgaaagtgaagaaggagcgggatccatag

SEQ ID NO: 215424 - DNA, 2391 bp, Artificial Sequence
  derived and/or modified sequence
atgagcgccgcccaggtgagcagcagcagaagacagagctgctacctgtgcgacctgcccagaatgccctgggccatgatctgggacttcagcgagcccgtgtgcagaggctgcgtgaactacgagggcgccgacagaatcgagttcgtgatcgagaccgccagacagctgaagagagcccacggctgcttccaggacggcagaagccccggcccccccccccccgtgggcgtgaagaccgtggccctgagcgccaaggaggccgccgccgccgccgccgccgccgccgccgccgccgccgccgcccagcagcagcagcagcagcagcagcagcagcagcagcagcagcagcagcagcagcagcagcagcagcagcagcagctgaaccacgtggacggcagcagcaagcccgccgtgctggccgcccccagcggcctggagagatacggcctgagcgccgccgccgccgccgccgccgccgccgccgccgccgtggagcagagaagcagattcgagtacccccccccccccgtgagcctgggcagcagcagccacaccgccagactgcccaacggcctgggcggccccaacggcttccccaagcccacccccgaggagggcccccccgagctgaacagacagagccccaacagcagcagcgccgccgccagcgtggccagcagaagaggcacccacggcggcctggtgaccggcctgcccaaccccggcggcggcggcggcccccagctgaccgtgccccccaacctgctgccccagaccctgctgaacggccccgccagcgccgccgtgctgccccccccccccccccacgccctgggcagcagaggcccccccacccccgccccccccggcgcccccggcggccccgcctgcctgggcggcacccccggcgtgagcgccaccagcagcagcgccagcagcagcaccagcagcagcgtggccgaggtgggcgtgggcgccggcggcaagagacccggcagcgtgagcagcaccgaccaggagagagagctgaaggagaagcagagaaacgccgaggccctggccgagctgagcgagagcctgagaaacagagccgaggagtgggccagcaagcccaagatggtgagagacaccctgctgaccctggccggctgcaccccctacgaggtgagattcaagaaggaccacagcctgctgggcagagtgttcgccttcgacgccgtgagcaagcccggcatggactacgagctgaagctgttcatcgagtaccccaccggcagcggcaacgtgtacagcagcgccagcggcgtggccaagcagatgtaccaggactgcatgaaggacttcggcagaggcctgagcagcggcttcaagtacctggagtacgagaagaagcacggcagcggcgactggagactgctgggcgacctgctgcccgaggccgtgagattcttcaaggagggcgtgcccggcgccgacatgctgccccagccctacctggacgccagctgccccatgctgcccaccgccctggtgagcctgagcagagcccccagcgccccccccggcaccggcgccctgccccccgccgcccccagcggcagaggcgccgccgccagcctgagaaagagaaaggccagccccgagccccccgacagcgccgagggcgccctgaagctgggcgaggagcagcagagacagcagtggatggccaaccagagcgaggccctgaagctgaccatgagcgccggcggcttcgccgcccccggccacgccgccggcggccccccccccccccccccccccctgggcccccacagcaacagaaccaccccccccgagagcgccccccagaacggccccagccccatggccgccctgatgagcgtggccgacaccctgggcaccgcccacagccccaaggacggcagcagcgtgcacagcaccaccgccagcgccagaagaaacagcagcagccccgtgagccccgccagcgtgcccggccagagaagactggccagcagaaacggcgacctgaacctgcaggtggccccccccccccccagcgcccaccccggcatggaccaggtgcacccccagaacatccccgacagccccatggccaacagcggccccctgtgctgcaccatctgccacgagagactggaggacacccacttcgtgcagtgccccagcgtgcccagccacaagttctgcttcccctgcagcagagagagcatcaaggcccagggcgccaccggcgaggtgtactgccccagcggcgagaagtgccccctggtgggcagcaacgtgccctgggccttcatgcagggcgagatcgccaccatcctggccggcgacgtgaaggtgaagaaggagagagacccctag

SEQ ID NO: 215425 - protein, 328 aa, Artificial Sequence
  derived and/or modified sequence
MSSYLEYVSCSSSGGVGGDVLSLAPKFCRSDARPVALQPAFPLGNGDGAFVSCLPLAAARPSPSPPAAPARPSVPPPAAPQYAQCTLEGAYEPGAAPAAAAGGADYGFLGSGPAYDFPGVLGRAADDGGSHVHYATSAVFSGGGSFLLSGQVDYAAFGEPGPFPACLKASADGHPGAFQTASPAPGTYPKSVSPASGLPAAFSTFEWMKVKRNASKKGKLAEYGAASPSSAIRTNFSTKQLTELEKEFHFNKYLTRARRIEIANCLHLNDTQVKIWFQNRRMKQKKREREGLLATAIPVAPLQLPLSGTTPTKFIKNPGSPSQSQEPS

SEQ ID NO: 215426 - DNA, 1991 bp, Artificial Sequence
  derived and/or modified sequence
gccgagcggagaggccgcccattggccggccagcgccacgtggccgcccccgccggtatattaggccactatttacctccggctcactcgccatgggttggagagggcagctcgggtagagagggctggcggagcggcgcagacggcggcagtcctgctcagcctctgcccggctccgtactccggccccggcctgcgccctcagaaaggtggggcccgaaccatgagctcctacctggagtacgtgtcatgcagcagcagcggcggggtcggcggcgacgtgctcagcttggcacccaagttctgccgctccgacgcccggcccgtggctctgcagcccgccttccctctgggcaacggcgacggcgccttcgtcagctgtctgcccctggccgccgcccgaccctcgccttcgcccccggccgcccccgcgcggccgtccgtaccgcctccggccgcgccccagtacgcgcagtgcaccctggagggggcctacgaacctggtgccgcacctgccgcggcagctgggggcgcggactacggcttcctggggtccgggccggcgtacgacttcccgggcgtgctggggcgggcggccgacgacggcgggtctcacgtccactacgccacctcggccgtcttctcgggcggcggctctttcctcctcagcggccaggtggattacgcggccttcggcgaacccggcccttttccggcttgtctcaaagcgtcagccgacggccaccctggtgctttccagaccgcatccccggccccaggcacctaccccaagtccgtctctcccgcctccggcctccctgccgccttcagcacgttcgagtggatgaaagtgaagaggaatgcctctaagaaaggtaaactcgccgagtatggggccgctagcccctccagcgcgatccgcacgaatttcagcaccaagcaactgacagaactggaaaaagagtttcatttcaataagtacttaactcgagcccggcgcatcgagatagccaactgcttgcacctgaatgacacgcaagtcaaaatctggttccagaaccgcaggatgaaacagaagaaaagggaacgagaagggcttctggccacggccattcctgtggctcccctccaacttcccctctctggaacaacccccactaagtttatcaagaaccccggcagcccttctcagtcccaagagccttcgtgaggccggtacttggggccgaaaaactgtggcctgcagaagtcccaggcgacccccatccctatctagacttaggagctcagtttgggatggaggtgggagaacaaaaatgaatagggatttcacttgggaaatgaagtactttagttggcttccgagttccagactatatgtccagatattaattgactgtcttgtaagccacttgtttggttatgatttgtgtcttatcagggaaaaggtgcccagctgccagcccagctccgctgctatctttgcctcacttagtcatgtgcaattcgcgttgcagagtggcagaccattagttgctgagttctgtcagcactctgatgtgctcagaagagcacctgcccaaagtttttctggttttaatttaaaggacaaggctacatatattcagctttttgagatgaccaaagctagttagggtctccttgatgtagctaagctgcttcagtgatcttcacatttgcactccagtttttttttctttaaaaaagcggtttctacctctctatgtgcctgagtgatgatacaatcgctgtttagttactagatgaacaaatccacagaatgggtaaagagtagaatctgaactatatcttgacaaatattattcaaacttgaatgtaaatatatacagtatgtatattttttaaaaagatttgcttgcaatgaccttataagtgacatttaatgtcatagcatgtaaagggttttttttgtaataaaaattatagaatctgcaaaaaaaaaaaaaaaa

SEQ ID NO: 215427 - DNA, 987 bp, Artificial Sequence
  derived and/or modified sequence
atgtccagttacctcgagtacgttagttgttcctcaagtgggggggtaggaggtgatgtcctctccctagctccgaagttctgcagaagtgatgcacgaccagtggccctgcaacctgcgttccccttgggtaatggagatggggccttcgtcagctgcttacctttggccgctgccagaccttcaccctcacctcctgccgcccccgcccgaccttccgtccccccacctgccgcccctcaatacgcccaatgcacactcgagggagcttatgagcccggcgccgcaccagcagcagcagccggtggcgcagattatggcttcctgggtagcggtcctgcctacgactttcctggagtgcttggcagggcagccgatgatggtggaagtcacgttcattacgctacgagtgccgttttcagcggtggtggttctttcttgctgtcaggccaggttgactacgccgcttttggggagcccggcccatttccagcttgcctgaaagcctcggccgatggacatcctggtgcgtttcaaaccgcttcccccgctcccgggacctaccccaagtcggtcagccccgcatcagggctgcccgccgctttttccacctttgaatggatgaaggtgaaaagaaacgcaagcaagaagggaaagttggccgagtatggagcagcttctccctcgtcagccattcgcactaatttcagcaccaaacaattgactgagctggagaaggagttccactttaacaaatatctcaccagagctcgacgcattgaaatagcgaactgtttacacctaaatgacactcaggtgaagatttggtttcagaaccgtcgcatgaagcagaagaaaagggagcgggagggactgttagcaaccgctatcccagtggctccgttgcagttgcccctgtcgggaaccacccctaccaaatttattaagaatcctggatcgccctctcagtcccaggaaccctcatag

SEQ ID NO: 215428 - DNA, 2028 bp, Artificial Sequence
  derived and/or modified sequence
gccgagcggagaggccgcccattggccggccagcgccacgtggccgcccccgccggtatattaggccactatttacctccggctcactcgccatgggttggagagggcagctcgggtagagagggctggcggagcggcgcagacggcggcagtcctgctcagcctctgcccggctccgtactccggccccggcctgcgccctcagaaaggtggggcccgaaccatgagctcctacctggagtacgtgtcatgcagcagcagcggcggggtcggcggcgacgtgctcagcttggcacccaagttctgccgctccgacgcccggcccgtggctctgcagcccgccttccctctgggcaacggcgacggcgccttcgtcagctgtctgcccctggccgccgcccgaccctcgccttcgcccccggccgcccccgcgcggccgtccgtaccgcctccggccgcgccccagtacgcgcagtgcaccctggagggggcctacgaacctggtgccgcacctgccgcggcagctgggggcgcggactacggcttcctggggtccgggccggcgtacgacttcccgggcgtgctggggcgggcggccgacgacggcgggtctcacgtccactacgccacctcggccgtcttctcgggcggcggctctttcctcctcagcggccaggtggattacgcggccttcggcgaacccggcccttttccggcttgtctcaaagcgtcagccgacggccaccctggtgctttccagaccgcatccccggccccaggcacctaccccaagtccgtctctcccgcctccggcctccctgccgccttcagcacgttcgagtggatgaaagtgaagaggaatgcctctaagaaaggcaaactcgccgagtatggggccgctagcccctccagcgcgatccgcacgaatttcagcaccaagcaactgacagaactggaaaaagagtttcatttcaataagtacttaactcgagcccggcgcatcgagatagccaactgcttgcacctgaatgacacgcaagtcaaaatctggttccagaaccgcaggatgaaacagaagaaaagggaacgagaagggcttctggccacggccattcctgtggctcccctccaacttcccctctctggaacaacccccactaagtttatcaagaaccccggcagcccttctcagtcccaagagccttcgtgaggccggtacttggggccgaaaaactgtggcctgcagaagtcccaggcgacccccatccctatctagacttaggagctcagtttgggatggaggtgggagaacaaaaatgaatagggatttcacttgggaaatgaagtactttagttggcttccgagttccagactatatgtccagatattaattgactgtcttgtaagccacttgtttggttatgatttgtgtcttatcagggaaaaggtgcccagctgccagcccagctccgctgctatctttgcctcacttagtcatgtgcaattcgcgttgcagagtggcagaccattagttgctgagttctgtcagcactctgatgtgctcagaagagcacctgcccaaagtttttctggttttaatttaaaggacaaggctacatatattcagctttttgagatgaccaaagctagttagggtctccttgatgtagctaagctgcttcagtgatcttcacatttgcactccagtttttttttctttaaaaaagcggtttctacctctctatgtgcctgagtgatgatacaatcgctgtttagttactagatgaacaaatccacagaatgggtaaagagtagaatctgaactatatcttgacaaatattattcaaacttgaatgtaaatatatacagtatgtatattttttaaaaagatttgcttgcaatgaccttataagtgacatttaatgtcatagcatgtaaagggttttttttgtaataaaaattatagaatctgctgctctctgcttttcttacactctttaataatgattctctttctttaaagttg

SEQ ID NO: 215429 - DNA, 987 bp, Artificial Sequence
  derived and/or modified sequence
atgagcagctacctggagtatgtgtcctgcagcagcagtggaggagtgggcggagatgtgctgagcctggcccccaagttctgccgcagtgatgcccggcctgtggccctgcagcctgccttccccctgggcaatggagatggagcctttgtgtcctgcctgcccctggccgccgcccggcccagccccagccccccagctgccccagcccggcccagcgtgcccccacctgctgccccccagtatgcccagtgcaccctggagggcgcctatgagcctggagctgccccagctgctgctgctggaggagctgactatggcttcctgggcagcggccctgcctatgacttccctggggtgctgggccgggctgctgatgatggcggcagccacgtgcactacgccaccagcgctgtgttttctgggggcggcagcttcctgctgagcggccaggtggactatgctgcctttggagagcccggccccttccctgcctgcctgaaggccagcgcagatggccaccctggggccttccagacagccagccctgcccctggcacctaccccaagtctgtgtccccagccagcggcctgcctgctgccttcagcacctttgagtggatgaaggtgaagagaaatgccagcaagaagggcaagctggccgagtatggagctgccagccccagcagcgccatccgcaccaacttcagcaccaagcagctgacagagctggagaaggagttccacttcaacaagtacctgacccgggcccggcgcatcgagatcgccaactgcctgcacctgaatgacacccaggtgaagatctggttccagaacagaaggatgaagcagaagaagcgggagcgggagggcctgctggccacagccatccctgtggcccccctgcagctgcccctgagcggcaccacccccaccaagttcatcaagaaccctggcagccccagccagagccaggagcccagctag

SEQ ID NO: 215430 - DNA, 987 bp, Artificial Sequence
  derived and/or modified sequence
atgagcagctacctggagtacgtgagctgcagcagcagcggcggcgtaggcggcgatgtccttagccttgcccccaagttttgtcgctctgacgcaagaccggttgcgctgcagccggctttccctctggggaatggggatggggctttcgtgtcttgtctgccactggccgctgcccgtcctagcccgtccccacctgccgcccccgctcgcccgtccgtgccacctcccgccgctccccaatacgctcaatgcaccctcgagggggcttacgagcctggggccgcacctgcagccgctgccggtggtgccgattacggcttcctgggatccggccccgcctatgactttccgggagtcctcggcagggctgccgatgacggggggagtcatgtgcactacgccaccagcgcagttttcagcggcgggggttcatttcttcttagcggccaagttgactatgcggcattcggagagcccggcccctttcctgcttgccttaaggccagtgccgatggacaccccggcgcattccagacggccagccccgctcctggcacataccccaagtctgtatcacctgcttcgggcctccctgccgctttcagcacctttgaatggatgaaagtgaagaggaatgcctccaaaaagggaaaactggccgagtacggcgccgccagccctagctcagccattcgcacaaatttcagcaccaaacagctgacggaactcgaaaaagaatttcatttcaacaagtacctcacaagagcgcggagaattgaaattgcgaactgcttgcatctgaacgacactcaagtgaaaatttggtttcagaacaggcgaatgaaacaaaagaagagggaaagggaagggctgctagctaccgcaatacccgtggctcctttacaactgcccctaagtggtaccaccccaacaaagtttataaaaaaccctggcagcccaagtcaatcccaggagccttcttag

SEQ ID NO: 215431 - DNA, 987 bp, Artificial Sequence
  derived and/or modified sequence
atgtccagttatctggaatatgtgagttgctcctcatccgggggagtagggggagacgtgctctctctggccccaaagttctgcaggtctgacgccagaccagttgctctccagcctgcattcccactgggtaacggggacggcgcttttgttagttgtttacctcttgctgccgctcgtcccagcccctcaccgccagccgcacctgcaagacctagcgtacctcctccggcagcccctcagtacgcacagtgcacgctggaaggcgcttatgaaccaggagcagcccctgcagctgctgctggcggagccgattacggatttctcggttccgggccagcctacgattttccaggggtgcttggtagggccgcagatgatgggggatcgcacgttcactacgctacaagtgctgtcttctccggaggcggaagtttcctgctcagtgggcaggtggactacgcagcatttggggagcctggtcccttccctgcatgcctgaaggcatccgccgacggacatccgggagcatttcagacggcctcccccgctcctggtacatatccaaaatcagtcagccctgcctccggacttcctgctgcattctccactttcgagtggatgaaggtgaagagaaacgcttccaagaaaggcaagctggcggagtatggggcagcttctcctagcagtgctatcagaacaaacttttccacaaagcaactgacagagctcgaaaaagagtttcatttcaacaaatacctcacaagggcccgtcgcatagagattgctaactgcctacaccttaacgacacacaggtgaaaatctggtttcagaacaggcgcatgaagcagaagaaaagggaaagggagggcttgctggcaaccgccattcccgtcgcaccactgcagctgcccctgtccggcacaacgcccacaaagtttatcaagaatcccggatctcccagccagagccaggagccatcctag

SEQ ID NO: 215432 - DNA, 987 bp, Artificial Sequence
  derived and/or modified sequence
atgagcagctacctggagtacgtgagctgcagcagcagcggcggcgtgggcggcgacgtgctgagcctggcccccaagttctgcagaagcgacgccagacccgtggccctgcagcccgccttccccctgggcaacggcgacggcgccttcgtgagctgcctgcccctggccgccgccagacccagccccagcccccccgccgcccccgccagacccagcgtgcccccccccgccgccccccagtacgcccagtgcaccctggagggcgcctacgagcccggcgccgcccccgccgccgccgccggcggcgccgactacggcttcctgggcagcggccccgcctacgacttccccggcgtgctgggcagagccgccgacgacggcggcagccacgtgcactacgccaccagcgccgtgttcagcggcggcggcagcttcctgctgagcggccaggtggactacgccgccttcggcgagcccggccccttccccgcctgcctgaaggccagcgccgacggccaccccggcgccttccagaccgccagccccgcccccggcacctaccccaagagcgtgagccccgccagcggcctgcccgccgccttcagcaccttcgagtggatgaaggtgaagagaaacgccagcaagaagggcaagctggccgagtacggcgccgccagccccagcagcgccatcagaaccaacttcagcaccaagcagctgaccgagctggagaaggagttccacttcaacaagtacctgaccagagccagaagaatcgagatcgccaactgcctgcacctgaacgacacccaggtgaagatctggttccagaacagaagaatgaagcagaagaagagagagagagagggcctgctggccaccgccatccccgtggcccccctgcagctgcccctgagcggcaccacccccaccaagttcatcaagaaccccggcagccccagccagagccaggagcccagctag

SEQ ID NO: 215433 - protein, 571 aa, Artificial Sequence
  derived and/or modified sequence
MALPRPSEAVPQDKVCYPPESSPQNLAAYYTPFPSYGHYRNSLATVEEDFQPFRQLEAAASAAPAMPPFPFRMAPPLLSPGLGLQREPLYDLPWYSKLPPWYPIPHVPREVPPFLSSSHEYAGASSEDLGHQIIGGDNESGPCCGPDTLIPPPPADASLLPEGLRTSQLLPCSPSKQSEDGPKPSNQEGKSPARFQFTEEDLHFVLYGVTPSLEHPASLHHAISGLLVPPDSSGSDSLPQTLDKDSLQLPEGLCLMQTVFGEVPHFGVFCSSFIAKGVRFGPFQGKVVNASEVKTYGDNSVMWEIFEDGHLSHFIDGKGGTGNWMSYVNCARFPKEQNLVAVQCQGHIFYESCKEIHQNQELLVWYGDCYEKFLDIPVSLQVTEPGKQPSGPSEESAEGYRCERCGKVFTYKYYRDKHLKYTPCVDKGDRKFPCSLCKRSFEKRDRLRIHILHVHEKHRPHKCSTCGKCFSQSSSLNKHMRVHSGDRPYQCVYCTKRFTASSILRTHIRQHSGEKPFKCKYCGKSFASHAAHDSHVRRSHKEDDGCSCSICGKIFSDQETFYSHMKFHEDY

SEQ ID NO: 215434 - protein, 100 aa, Artificial Sequence
  derived and/or modified sequence
MALPRPSEAVPQDKVCYPPESSPQNLAAYYTPFPSYGHYRNSLATVEEDFQPFRQLEAAASAAPAMPPFPFRMAPPLLSPGLGLQREPLYDLPWYSKLPP

SEQ ID NO: 215435 - DNA, 2221 bp, Artificial Sequence
  derived and/or modified sequence
aattccctaccctcgacctgtcgatgccccgcggccccgcccgccctcttaagcctggctcagccctcagggcccgcccgaagtctaccgagcccgagtggcctaccgagcccgagtggccccgcagcgtccaggaggcgcccgctccgcggtggcgctcttggaggtggtgtcggagagccgccgagcgtgcggtcccgggatggctctaccccggccaagtgaggccgtgcctcaggacaaggtgtgctacccgccggagagcagcccgcagaacctggccgcgtactacacgcctttcccgtcctatggacactacagaaacagcctggccaccgtggaggaagacttccaacctttccggcagctggaggccgcagcgtctgctgcccccgccatgccccccttccccttccggatggcgcctcccttgctgagcccgggtctgggcctacagagggagcctctctacgatctgccctggtacagcaagctgccaccgtggtacccaattccccacgtccccagggaagtgccgcccttcctgagcagcagccacgagtacgcgggtgccagcagtgaagatctgggccaccaaatcattggtggcgacaacgagagtggcccgtgttgtggacctgacactttaattccaccgccccctgcggatgcttctctgttacctgaggggctgaggacctcccagttattaccttgctcacccagcaagcagtcagaggatggtcccaaaccctccaaccaagaagggaagtcccctgctcggttccagttcacggaggaggacctgcacttcgttctgtacggggtcactcccagcctggagcacccagccagcctgcaccatgcgatttcaggcctcctggtccccccagacagctctggatctgattctcttcctcaaactctggataaagactcccttcaacttccagaaggtctatgcctcatgcagacggtgtttggtgaagtcccacattttggtgtgttctgcagtagttttatcgccaaaggagtcaggtttgggccctttcaaggtaaagtggtcaatgccagtgaagtgaagacctacggagacaattctgtgatgtgggagatctttgaagatggtcatttgagccactttatagatggaaaaggaggtacggggaactggatgtcctatgtcaactgtgcccgcttccccaaggagcagaacctagttgctgtgcagtgtcaagggcatatattttatgagagctgcaaagagatccatcagaaccaagagctccttgtgtggtatggagactgctatgagaaatttctggatattcctgtgagccttcaggtcacagagccggggaagcagccatctgggccctctgaagagtctgcagaaggctacagatgtgaaagatgtgggaaggtatttacctacaaatattacagagataagcacctcaagtacaccccctgtgtggacaagggcgataggaaatttccctgttctctctgcaaacgatcctttgagaagcgggaccggcttcggatccacattcttcatgttcatgagaagcaccggcctcacaagtgttctacatgtgggaaatgtttctctcaatcttccagcctaaacaaacacatgcgagtccactctggagacagaccataccagtgtgtgtattgtactaagaggttcacagcctccagcatactccgcacacacatcaggcagcactccggggagaagcccttcaaatgcaagtactgtggtaaatcttttgcatcccatgctgcccatgacagccatgtccggcgttcacacaaggaggatgatggctgctcatgcagcatctgtgggaaaatcttctcagatcaagaaacattctactcccacatgaagtttcatgaagactactagccctgccaggcacaatgactcacgcctgtaatcccagcactttgggaggcagaggtgggtggatcactcaagtccaggagttcgagaccagcctgggcaacatggtgaaatcctgtctctaccaaaaaaatacaaaaatcagctgggggtggtggcacatgcctgtggttccagccactcaggaggtcgaggtggcaggatggtttgagcacaggagacggaggttgctgtgagctgagatcgccccactgcttttcaacctgggtgacagaaccagaccctgtctcaaaaaaaaaaaaaaaa

SEQ ID NO: 215436 - DNA, 1716 bp, Artificial Sequence
  derived and/or modified sequence
atggccctgccacgccccagcgaagcagtcccccaagacaaagtttgctatccacctgagtcgagtccccagaatttagcagcctactacactcccttcccctcatacggccactatcgaaactcattagcaacagtcgaggaagattttcagccattcagacaactagaggccgccgctagcgctgcacccgctatgccgccctttccgttccggatggccccccctctacttagtccgggacttggcctccagcgcgagcctctgtatgacctgccctggtattctaagctgccaccgtggtacccaattcctcacgtgccccgggaggtgccacctttcctgagctcaagtcacgaatatgcaggggcatccagcgaggatttgggtcaccagattattgggggagacaacgaatccggtccttgttgcggtcccgacaccctgatccctccccctcctgctgatgcatctctgcttcccgaaggactacgtacaagtcaattgctgccatgctctccctctaagcaatccgaggatggcccaaaacctagtaaccaggaaggcaaatcccccgcccggttccagttcaccgaggaggatcttcacttcgtgctgtatggggtcaccccttctctggaacacccagcttctctgcatcatgctatctccggactgttggttccccctgatagcagtgggtctgactctctgccccaaactttggataaggatagtctgcagctacctgaagggctttgccttatgcagactgtttttggtgaagtgccacactttggagtgttctgcagcagttttatcgccaagggggtgcgatttggtccttttcagggaaaggttgtaaacgccagtgaggtgaaaacttatggtgacaattccgtgatgtgggagatctttgaggatggccatttgtcccatttcattgatggaaaagggggcaccggcaactggatgagttacgtgaactgcgcgagattccccaaggaacagaacctggtcgcagtgcagtgccagggacacatcttctacgaaagctgtaaagaaattcaccaaaatcaggagctactggtgtggtacggagattgctatgaaaagttcctggacataccagtgtctttgcaagtgactgagccggggaagcaaccatctggaccctccgaggagtccgcagaaggctacaggtgcgaacgctgcgggaaggtgttcacatataaatattatagggataaacacctcaaatacactccatgcgtggacaaaggtgaccgcaaatttccttgttcgctctgcaagcgaagtttcgagaagagggataggctccggatccacattctacacgtgcatgaaaaacacagaccacataaatgctctacctgtggcaagtgcttttcccagtctagtagcctgaacaagcacatgagagtacattctggcgacagaccctaccagtgcgtttattgcacaaagcgctttactgcctcctctatcctccgcactcatatccggcaacattccggagagaagccatttaagtgcaagtattgcggaaaatcattcgcttcccacgcagcacatgatagtcatgtgcgcaggtctcataaggaggacgatggctgcagctgctcaatctgcggtaaaatcttttcagatcaggaaactttctatagccacatgaaattccatgaagattattag

SEQ ID NO: 215437 - DNA, 303 bp, Artificial Sequence
  derived and/or modified sequence
atggcactgcctagacccagcgaagcagtgccgcaggataaggtgtgctaccctcccgaatcttcgccacagaacctcgcagcctattacaccccctttccgtcttacggacattaccgcaattctctggcaacagttgaggaagacttccagccctttagacagctggaagcagctgcctcagcggcccccgctatgcccccgttcccctttaggatggctccccctcttctcagtccagggctgggcctgcagcgagaacctctgtacgacctgccatggtattctaagctgcctccttag

SEQ ID NO: 215438 - DNA, 1716 bp, Artificial Sequence
  derived and/or modified sequence
atggccctgccccggcccagcgaggccgtgccccaggacaaggtgtgctacccacctgagagcagcccccagaacctggccgcctactacacccccttccccagctatggccactacagaaacagcctggccaccgtggaggaggacttccagcccttccggcagctggaggccgccgccagcgctgccccagccatgccacccttccccttcaggatggccccacccctgctgagccctggcctgggcctgcagcgggagcccctgtatgacctgccctggtacagcaagctgcccccctggtaccccatcccccacgtgccccgggaggtgccccccttcctgagcagcagccatgaatatgctggggccagcagcgaggacctgggccaccagatcatcggcggggacaatgaaagtggcccctgctgcggccctgacaccctcatccccccacctccagcagatgccagcctgctgcctgagggcctgcggaccagccagctgctgccctgcagccccagcaagcagagtgaagatggccccaagcccagcaaccaggagggcaagagccctgcccgcttccagttcacagaggaggacctgcactttgtgctgtatggagtgacccccagcctggagcacccagccagcctgcaccacgccatcagcggcctgctggtgcccccagacagcagcggcagtgacagcctgccccagaccctggacaaggacagcctgcagctgcctgagggcctgtgcctgatgcagacagtgtttggagaggtgccccactttggagtcttctgcagcagcttcatcgccaagggcgtgcgcttcggccccttccagggcaaggtggtgaatgccagcgaggtgaagacctacggggacaacagcgtgatgtgggagatctttgaagatggccacctgagccacttcattgatggcaagggcggcactggaaactggatgtcctatgtgaactgtgcccgcttccccaaggagcagaacctggtggccgtgcagtgccagggccacatcttctatgagagctgcaaggagatccaccagaaccaggagctgctggtgtggtacggggactgctatgagaagttcctggacatccctgtgtccctgcaggtgacagagcccgggaagcagcccagcggccccagcgaggagagcgctgagggctaccgctgtgagcgctgtgggaaggtgttcacctacaagtactacagagacaagcacctgaagtacaccccctgtgtggacaagggggacaggaagttcccctgcagcctgtgcaagaggagctttgagaagagggaccggctgcgcatccacatcctgcacgtgcatgagaagcaccggccccacaagtgcagcacctgtgggaagtgcttcagccagagcagcagcctgaacaagcacatgagggtgcacagcggggaccggccctaccagtgtgtgtactgcaccaagcgcttcaccgccagcagcatcctgcggacccacatccggcagcacagcggggagaagcccttcaagtgcaagtactgtgggaagagctttgccagccacgccgcccatgacagccacgtgagaagaagccacaaggaggatgatggctgcagctgcagcatctgtgggaagatcttcagtgaccaggagaccttctacagccacatgaagttccacgaggactactag

SEQ ID NO: 215439 - DNA, 303 bp, Artificial Sequence
  derived and/or modified sequence
atggccctgccccggcccagcgaggccgtgccccaggacaaggtgtgctacccacctgagagcagcccccagaacctggccgcctactacacccccttccccagctatggccactacagaaacagcctggccaccgtggaggaggacttccagcccttccggcagctggaggccgccgccagcgctgccccagccatgccacccttccccttcaggatggccccacccctgctgagccctggcctgggcctgcagcgggagcccctgtatgacctgccctggtacagcaagctgcccccatag

SEQ ID NO: 215440 - DNA, 1716 bp, Artificial Sequence
  derived and/or modified sequence
atggccctgccccggcccagcgaggccgtgccccaggacaaggtgtgctatccccctgagtcttctccacaaaacctggctgcatattatacacccttcccatcctacggccattacagaaattccctggcaaccgtggaagaagattttcagccatttcgccagctagaagcagccgcaagtgcagcacctgccatgccccctttcccttttcggatggcgcctccattgctttccccgggactgggactgcagcgcgaaccactttatgacttgccctggtacagtaagcttcctccctggtaccccatccctcacgtcccacgagaggtacctccatttctgtctagttcacatgagtacgctggggcatcttccgaagacctgggacatcagatcattggcggagataacgagagcggcccatgttgcggccctgacacactgatccctcctcctccggccgacgcaagcctgcttccagaaggcctgagaacttcacagctgctcccttgtagtccttcaaagcaatccgaggacggcccgaagccttccaaccaggaaggcaaatcacccgcccgttttcagttcactgaagaagacctccattttgtgttgtacggtgttactccttcactggagcatccggcctccttgcaccacgcgatatcagggctcctcgtgcccccggattccagcggcagtgacagcctacctcagacgcttgacaaagattccttacaactgcccgagggtctgtgtcttatgcagacggtgtttggggaggtcccacatttcggagtcttttgctcttcatttattgccaaaggagtgaggttcgggccgtttcagggtaaggtggtgaatgcctcggaggtgaagacttacggcgataattcggttatgtgggagatcttcgaggatggtcatctgtcccattttatagacgggaagggcggcacaggcaactggatgtcttacgtgaattgtgctagattccccaaggaacagaacttggtggccgtccagtgtcagggccacattttttatgagtcctgtaaggagatccaccagaaccaagaattgctcgtatggtacggggattgctatgaaaagttcctggacatccccgtgtcattacaggttacagaaccaggaaaacagccttccggacccagcgaggagtccgctgagggatatcgctgtgaacgctgtggcaaggtcttcacctataaatattaccgcgacaaacacctgaaatacaccccctgcgtggataagggtgaccgaaaattcccttgcagcctttgcaagcgatccttcgagaaacgagacagactgagaatccacatccttcatgttcacgagaaacatcgaccccataagtgttcaacctgcggcaaatgtttttcccagtcgtcttccctcaacaagcatatgcgagtgcacagcggggacaggccctaccagtgcgtctattgcaccaagagatttacagcttcgtccattctgcgtacacatattagacagcacagtggcgagaaaccttttaagtgcaagtattgcggaaaaagtttcgctagccacgcagctcatgactcacacgtcagaagatctcacaaggaggatgatggctgctcttgctcaatttgcgggaagatattttcggaccaggaaaccttctactcccatatgaagttccacgaagattactag

SEQ ID NO: 215441 - DNA, 303 bp, Artificial Sequence
  derived and/or modified sequence
atggccctgccccggcccagcgaggccgtgccccaggacaaggtgtgttatccccctgaatcctcccctcagaatctcgccgcctactacactcccttcccatcctacgggcattataggaattcattagctaccgttgaggaggatttccaaccttttcggcagctggaggccgcggccagtgctgctccagctatgcctccgtttcccttcaggatggcaccaccccttctctcccctggtctgggcctgcagagggaaccactttacgatttgccgtggtactccaaattacccccatag

SEQ ID NO: 215442 - DNA, 2344 bp, Artificial Sequence
  derived and/or modified sequence
aattccctaccctcgacctgtcgatgccccgcggccccgcccgccctcttaagcctggctcagccctcagggcccgcccgaagtctaccgagcccgagtggcctaccgagcccgagtggccccgcagcgtccaggaggcgcccgctccgcggtggcgctcttggaggtggtgtcggagagccgccgagcgtgcggtcccgggatggctctaccccggccaagtgaggccgtgcctcaggacaaggtgtgctacccgccggagagcagcccgcagaacctggccgcgtactacacgcctttcccgtcctatggacactacagaaacagcctggccaccgtggaggaagacttccaacctttccggcagctggaggccgcagcgtctgctgcccccgccatgccccccttccccttccggatggcgcctcccttgctgagcccgggtctgggcctacagagggagcctctctacgatctgccctggtacagcaagctgccaccgtggtacccaattccccacgtccccagggaagtgccgcccttcctgagcagcagccacgagtacgcgggtgccagcagtgaagatctgggccaccaaatcattggtggcgacaacgagagtggcccgtgttgtggacctgacactttaattccaccgccccctgcggatgcttctctgttacctgaggggctgaggacctcccagttattaccttgctcacccagcaagcagtcagaggatggtcccaaaccctccaaccaagaagggaagtcccctgctcggttccagttcacggaggaggacctgcacttcgttctgtacggggtcactcccagcctggagcacccagccagcctgcaccatgcgatttcaggcctcctggtccccccagacagctctggatctgattctcttcctcaaactctggataaagactcccttcaacttccagaaggtctatgcctcatgcagacggtgtttggtgaagtcccacattttggtgtgttctgcagtagttttatcgccaaaggagtcaggtttgggccctttcaaggtaaagtggtcaatgccagtgaagtgaagacctacggagacaattctgtgatgtgggagatctttgaagatggtcatttgagccactttatagatggaaaaggaggtacggggaactggatgtcctatgtcaactgtgcccgcttccccaaggagcagaacctagttgctgtgcagtgtcaagggcatatattttatgagagctgcaaagagatccatcagaaccaagagctccttgtgtggtatggagactgctatgagaaatttctggatattcctgtgagccttcaggtcacagagccggggaagcagccatctgggccctctgaagagtctgcagaaggctacagatgtgaaagatgtgggaaggtatttacctacaaatattacagagataagcacctcaagtacaccccctgtgtggacaagggcgataggaaatttccctgttctctctgcaaacgatcctttgagaagcgggaccggcttcggatccacattcttcatgttcatgagaagcaccggcctcacaagtgttctacatgtgggaaatgtttctctcaatcttccagcctaaacaaacacatgcgagtccactctggagacagaccataccagtgtgtgtattgtactaagaggttcacagcctccagcatactccgcacacacatcaggcagcactccggggagaagcccttcaaatgcaagtactgtggtaaatcttttgcatcccatgctgcccatgacagccatgtccggcgttcacacaaggaggatgatggctgctcatgcagcatctgtgggaaaatcttctcagatcaagaaacattctactcccacatgaagtttcatgaagactactagccctgccaggcacaatgactcacgcctgtaatcccagcactttgggaggcagaggtgggtggatcactcaagtccaggagttcgagaccagcctgggcaacatggtgaaatcctgtctctaccaaaaaaatacaaaaatcagctgggggtggtggcacatgcctgtggttccagccactcaggaggtcgaggtggcaggatggtttgagcacaggagacggaggttgctgtgagctgagatcgccccactgcttttcaacctgggtgacagaaccagaccctgtctcaaaacaaaacaaaacaaaaaaaatgagtagccctcaagagtgtggagacaatgtaaaaacaagagattcggattctctctatttccttttatgggttatagaagtccctgcagttggctgtgtgtggtggctcacgcct

SEQ ID NO: 215443 - DNA, 422 bp, Artificial Sequence
  derived and/or modified sequence
acgccgccttcgggcaggctgggatcttccgaactgggagcggagagtaaggggctcgaccccgggacgcgagtccggccttctggactccggttcaggagccgccgagcgtgcggtcccgggatggctctaccccggccaagtgaggccgtgcctcaggacaaggtgtgctacccgccggagagcagcccgcagaacctggccgcgtactacacgcctttcccgtcctatggacactacagaaacagcctggccaccgtggaggaagacttccaacctttccggcagctggaggccgcagcgtctgctgcccccgccatgccccccttccccttccggatggcgcctcccttgctgagcccgggtctgggcctacagagggagcctctctacgatctgccctggtacagcaagctgccacc

SEQ ID NO: 215444 - DNA, 1716 bp, Artificial Sequence
  derived and/or modified sequence
atggccttgccaagaccttctgaggctgtacctcaggataaggtgtgctacccaccggagagctctcctcaaaacttggccgcttattataccccttttcctagttacggtcactatcggaattccctggcaactgtggaagaggacttccaaccatttaggcagctggaagccgctgccagtgcagcgcctgctatgcctccctttcccttcagaatggccccacccctactatctcccggactagggctgcaaagagagccgctctacgacttgccatggtacagcaaactgccaccgtggtaccccattccgcatgtacccagagaggtcccaccctttctgagcagctcacatgagtacgcgggtgcaagctcagaggatttaggccaccaaattatcggcggagacaacgagtccgggccttgctgcggacctgacactctaatccccccaccccctgctgatgcaagcttgctcccagagggactccgcacatcccagctcctcccctgctccccttctaagcagtccgaagacggtcccaagccgagcaaccaggaaggcaaaagcccagctagattccaatttactgaagaggacctgcattttgtgttgtacggcgtgacaccgagtctagaacacccagcctctctgcatcacgcaatttcaggattgctggtccccccagactcaagcggctctgatagcttaccacaaacactggataaagactccctccaattgcccgaaggcctgtgcctgatgcagaccgtgttcggcgaagtcccacactttggcgttttttgctcttcattcatagccaagggcgtacggttcggcccattccagggtaaggtcgtaaacgcttccgaggtgaagacgtatggcgacaactcagtcatgtgggagatatttgaggatgggcatctgtctcatttcatagacggcaagggaggaactgggaactggatgagctacgtcaactgcgcacgctttccgaaagaacagaatctagtggccgtccagtgccagggccatattttttacgaatcttgtaaagagatacaccaaaatcaggaactgcttgtatggtatggcgactgttatgaaaagttcctggatatccctgttagcctgcaggttacagaacccggaaagcaaccgagcggcccaagcgaagagagtgccgaagggtatcgatgcgaaaggtgcgggaaggtgttcacctataaatactatcgggataagcacctcaagtacacaccgtgtgtcgacaagggggaccggaaattcccctgcagcctttgtaaacgctcattcgagaagcgtgatcgcctccgtattcacatcctgcatgtgcatgagaagcacaggccccacaagtgcagcacctgcggcaaatgcttctcacaaagtagctcactcaacaagcacatgagagtgcactctggcgaccgaccctatcagtgcgtctattgtactaagcggtttaccgcgtcttcgatactgcggacccatatccgccagcatagtggcgaaaaaccattcaagtgtaaatattgtgggaagtcttttgctagccatgccgctcacgatagccatgtcaggaggagtcacaaagaggacgacggctgttcctgcagcatatgcgggaaaatcttttcggaccaagaaaccttctattctcatatgaaattccacgaagattattag

SEQ ID NO: 215445 - DNA, 303 bp, Artificial Sequence
  derived and/or modified sequence
atggcgctgcccagaccaagtgaggcagtgcctcaggacaaggtgtgttaccctcctgaatcctccccccagaatctggcagcctactataccccctttccgagttatgggcactacagaaactctctcgctacagtcgaagaggacttccagcccttccggcagctggaggcggctgccagtgccgcacctgccatgcccccttttccatttagaatggccccaccactcctatcccctggcctgggcctgcagcgagagccattgtacgatctgccctggtatagcaagcttccaccctag

SEQ ID NO: 215446 - DNA, 1716 bp, Artificial Sequence
  derived and/or modified sequence
atggccctgcccagacccagcgaggccgtgccccaggacaaggtgtgctacccccccgagagcagcccccagaacctggccgcctactacacccccttccccagctacggccactacagaaacagcctggccaccgtggaggaggacttccagcccttcagacagctggaggccgccgccagcgccgcccccgccatgccccccttccccttcagaatggccccccccctgctgagccccggcctgggcctgcagagagagcccctgtacgacctgccctggtacagcaagctgcccccctggtaccccatcccccacgtgcccagagaggtgccccccttcctgagcagcagccacgagtacgccggcgccagcagcgaggacctgggccaccagatcatcggcggcgacaacgagagcggcccctgctgcggccccgacaccctgatcccccccccccccgccgacgccagcctgctgcccgagggcctgagaaccagccagctgctgccctgcagccccagcaagcagagcgaggacggccccaagcccagcaaccaggagggcaagagccccgccagattccagttcaccgaggaggacctgcacttcgtgctgtacggcgtgacccccagcctggagcaccccgccagcctgcaccacgccatcagcggcctgctggtgccccccgacagcagcggcagcgacagcctgccccagaccctggacaaggacagcctgcagctgcccgagggcctgtgcctgatgcagaccgtgttcggcgaggtgccccacttcggcgtgttctgcagcagcttcatcgccaagggcgtgagattcggccccttccagggcaaggtggtgaacgccagcgaggtgaagacctacggcgacaacagcgtgatgtgggagatcttcgaggacggccacctgagccacttcatcgacggcaagggcggcaccggcaactggatgagctacgtgaactgcgccagattccccaaggagcagaacctggtggccgtgcagtgccagggccacatcttctacgagagctgcaaggagatccaccagaaccaggagctgctggtgtggtacggcgactgctacgagaagttcctggacatccccgtgagcctgcaggtgaccgagcccggcaagcagcccagcggccccagcgaggagagcgccgagggctacagatgcgagagatgcggcaaggtgttcacctacaagtactacagagacaagcacctgaagtacaccccctgcgtggacaagggcgacagaaagttcccctgcagcctgtgcaagagaagcttcgagaagagagacagactgagaatccacatcctgcacgtgcacgagaagcacagaccccacaagtgcagcacctgcggcaagtgcttcagccagagcagcagcctgaacaagcacatgagagtgcacagcggcgacagaccctaccagtgcgtgtactgcaccaagagattcaccgccagcagcatcctgagaacccacatcagacagcacagcggcgagaagcccttcaagtgcaagtactgcggcaagagcttcgccagccacgccgcccacgacagccacgtgagaagaagccacaaggaggacgacggctgcagctgcagcatctgcggcaagatcttcagcgaccaggagaccttctacagccacatgaagttccacgaggactactag

SEQ ID NO: 215447 - DNA, 303 bp, Artificial Sequence
  derived and/or modified sequence
atggccctgcccagacccagcgaggccgtgccccaggacaaggtgtgctacccccccgagagcagcccccagaacctggccgcctactacacccccttccccagctacggccactacagaaacagcctggccaccgtggaggaggacttccagcccttcagacagctggaggccgccgccagcgccgcccccgccatgccccccttccccttcagaatggccccccccctgctgagccccggcctgggcctgcagagagagcccctgtacgacctgccctggtacagcaagctgcccccctag

SEQ ID NO: 215448 - protein, 765 aa, Artificial Sequence
  derived and/or modified sequence
MNTSGDPAQTGPEGCRGTMSAEEDARWLRWVTQQFKTIAGEDGEISLQEFKAALHVKESFFAERFFALFDSDRSGTITLQELQEALTLLIHGSPMDKLKFLFQVYDIDVCARQGASAGTEWGAGAGPHWASSPLGTGSGSIDPDELRTVLQSCLRESAISLPDEKLDQLTLALFESADADGNGAITFEELRDELQRFPGVMENLTISAAHWLTAPAPRPRPRRPRQLTRAYWHNHRSQLFCLATYAGLHVLLFGLAASAHRDLGASVMVAKGCGQCLNFDCSFIAVLMLRRCLTWLRATWLAQVLPLDQNIQFHQLMGYVVVGLSLVHTVAHTVNFVLQAQAEASPFQFWELLLTTRPGIGWVHGSASPTGVALLLLLLLMFICSSSCIRRSGHFEVFYWTHLSYLLVWLLLIFHGPNFWKWLLVPGILFFLEKAIGLAVSRMAAVCIMEVNLLPSKVTHLLIKRPPFFHYRPGDYLYLNIPTIARYEWHPFTISSAPEQKDTIWLHIRSQGQWTNRLYESFKASDPLGRGSKRLSRSVTMRKSQRSSKGSEILLEKHKFCNIKCYIDGPYGTPTRRIFASEHAVLIGAGIGITPFASILQSIMYRHQKRKHTCPSCQHSWIEGVQDNMKLHKVDFIWINRDQRSFEWFVSLLTKLEMDQAEEAQYGRFLELHMYMTSALGKNDMKAIGLQMALDLLANKEKKDSITGLQTRTQPGRPDWSKVFQKVAAEKKGKVQVFFCGSPALAKVLKGHCEKFGFRFFQENF

SEQ ID NO: 215449 - DNA, 2298 bp, Artificial Sequence
  derived and/or modified sequence
atgaatacatccggtgaccctgcccagaccggtccggagggttgcaggggaactatgtccgctgaggaggatgcccggtggttgagatgggttactcagcaatttaaaacaattgctggagaagatggagagatcagcctgcaggagttcaaggccgcactccacgttaaggagtcttttttcgctgagcgattcttcgcactgtttgacagcgatcgctccggaacaataacgctccaagaactccaggaggctcttacgctgttgatacacgggagtcctatggacaagctgaaattcctgttccaggtgtacgatatagacgtttgcgcccgccagggtgctagtgcaggaaccgagtggggagcaggggctggaccccactgggcaagctcacctttaggtaccgggtccgggagtattgacccagacgaattacgaacggtactacagagctgcctgcgggagtcagctatctcgctgccagacgagaaactcgaccagctgactcttgccctttttgaaagtgcggacgctgacgggaacggagctattacttttgaggagttgagggatgaactgcaaaggtttcccggagtcatggagaatctcactatctccgccgcacactggctgacagcgcctgctccacgcccacgcccgaggagacctagacagcttactcgggcgtactggcacaaccacaggtcccagctgttctgcctggcgacatacgctgggcttcatgtcttactttttggtcttgccgcctctgcacaccgggacctgggagcatcggtcatggtggctaagggttgcggccagtgtctgaacttcgattgttccttcatcgctgtgctcatgctcaggcggtgtctgacctggctgcgggctacatggctcgctcaggtgctacccctagaccagaatatacagtttcaccagctgatgggctacgtcgtggtggggttgtctcttgtgcatacagtggcccacaccgtgaactttgtcctgcaggcccaggccgaagcttccccctttcagttttgggagctactgctgacgacccgcccggggataggatgggtccatggctcagcatcgcctactggagtggctttactgttgctactgctcctgatgttcatttgctcttccagttgcatacggcggtcaggacattttgaagtgttttattggactcatctgtcatacctgctggtgtggctgcttttgattttccacggccctaacttctggaagtggctgctggtcccggggattctattcttcctcgaaaaggctatcggcctggctgttagtaggatggccgccgtgtgtataatggaggtaaatcttttaccctcaaaggttacgcacttattaattaaaagaccgccgttctttcactatcggcccggagactatctttatctgaatataccaactattgccagatatgagtggcatccattcaccatctcttccgctcctgagcagaaagataccatatggctacacatcagatcccaaggacagtggacaaacagattatacgagagctttaaggcttccgatccattagggcgcggcagtaaacggctgtcaagaagcgtcaccatgaggaaatctcagaggtcatcaaagggttccgaaattctccttgagaaacataagttttgcaatataaagtgttacatagacggcccttatggtaccccaacccggcgcatcttcgcctcagaacacgctgttttaatcggcgctgggattgggatcacaccatttgcgtccattctgcagagcatcatgtaccggcaccagaagaggaaacatacatgtcctagttgccagcactcatggatcgaaggcgttcaggataacatgaaactccataaggtggactttatttggattaaccgggatcagaggtctttcgaatggttcgtcagtttactcaccaaactggagatggatcaggcagaggaagcccagtacggccgcttcctggagctccacatgtacatgacttctgcgctaggaaaaaatgatatgaaggcaataggtctgcaaatggcactggatctgctggccaacaaggagaaaaaggactcaatcaccggacttcagacaaggactcaaccaggcaggcccgattggagtaaagtttttcaaaaagtggctgctgaaaagaagggcaaggtgcaggtcttcttttgcggatctcctgcgctcgctaaagtgctcaaggggcattgcgaaaagtttggcttcaggttctttcaggaaaacttctag

SEQ ID NO: 215450 - DNA, 2298 bp, Artificial Sequence
  derived and/or modified sequence
atgaacaccagcggggaccctgcccagacaggccctgagggctgccggggcaccatgtctgcagaagaagatgcccgctggctgcgctgggtgacccagcagttcaagaccatcgctggagaagatggagagatcagcctgcaggagttcaaggccgccctgcacgtgaaggagagcttctttgctgagcgcttctttgccctgtttgacagcgacaggagcggcaccatcaccctgcaggagctgcaggaggccctgaccctgctgattcatggcagccccatggacaagctgaagttcctgttccaggtgtatgacattgatgtgtgtgcccggcagggcgccagcgctggaacagagtggggcgctggggccggcccccactgggccagcagccccctgggcaccggcagcggcagcattgatcctgatgagctgaggacagtgctgcagagctgcctgcgggagagcgccatcagcctgcctgatgagaagctggaccagctgaccctggccctgtttgagagcgcagatgctgatggaaatggagccatcacctttgaggagctgagagatgagctgcagcgcttccctggggtgatggagaacctgaccatctctgctgcccactggctgacagccccagccccccggccccggccccggcggccccggcagctgacccgggcctactggcacaaccacaggagccagctgttctgcctggccacctacgccggcctgcacgtgctgctgtttggcctggccgccagcgcccaccgggacctgggcgcctctgtgatggtggccaagggctgcggccagtgcctgaactttgactgcagcttcatcgctgtgctgatgctgcggcgctgcctgacctggctgcgggccacctggctggcccaggtgctgcccctggaccagaacatccagttccaccagctgatgggctacgtggtggtgggcctgagcctggtgcacacagtggcccacacagtgaactttgtgctgcaggcccaggccgaggccagccccttccagttctgggagctgctgctgaccacccggcccggcatcggctgggtgcacggcagcgccagccccaccggggtggccctgctgctgctgctgctgctgatgttcatctgcagcagcagctgcatccgccgcagcggccactttgaggtgttctactggacccacctgagctacctgctggtgtggctgctgctgatcttccacggccccaacttctggaagtggctgctggtgcccggcatcctcttcttcctggagaaggccatcggcctggccgtgtccaggatggctgctgtgtgcatcatggaggtgaacctgctgcccagcaaggtgacccacctgctgatcaagaggcctcccttcttccactacagacctggggactacctgtacctgaacatccccaccatcgcccgctatgagtggcaccccttcaccatcagcagcgcccctgagcagaaggacaccatctggctgcacatccgcagccagggccagtggaccaaccggctgtatgagagcttcaaggccagtgaccccctgggccggggcagcaagaggctgagccgctctgtgaccatgaggaagagccagaggagcagcaaaggaagtgagatcctgctggagaagcacaagttctgcaacatcaagtgctacattgatggcccctacggcacccccacccggcgcatctttgccagcgagcacgctgtgctgattggagctggcatcggcatcaccccatttgccagcatcctgcagagcatcatgtaccgccaccagaagaggaagcacacctgccccagctgccagcacagctggattgagggcgtgcaggacaacatgaagctgcacaaggtggacttcatctggatcaacagagaccagaggagctttgagtggtttgtgtccctgctgaccaagctggagatggaccaggccgaggaggcccagtatggccgcttcctggagctgcacatgtacatgaccagcgccctgggcaagaatgacatgaaggccatcggcctgcagatggccctggacctgctggccaacaaggagaagaaggacagcatcaccggcctgcagaccaggacccagcccggccgcccagactggagcaaggtgttccagaaggtggccgctgagaagaagggcaaggtgcaggtgttcttctgtggcagccctgccctggccaaggtgctgaagggccactgtgagaagtttggcttccgcttcttccaggagaacttctag

SEQ ID NO: 215451 - DNA, 2804 bp, Artificial Sequence
  derived and/or modified sequence
agcagtctttctgggacctgtgatctagaagacaggagaagatgaacacatctggagacccagcccagacgggccctgaaggctgtagaggcaccatgagtgccgaggaggatgccaggtggctccggtgggtgactcagcagtttaagaccattgcaggagaagatggggagatcagcctgcaagaattcaaagcagctctgcatgtgaaagagtccttctttgcagagcgattctttgccctatttgactccgatagaagtggcaccatcaccctccaggagctgcaggaggcactgaccctgctcatccatggcagccccatggacaaactcaaattcctcttccaggtgtatgacatcgatgtgtgtgcacggcagggggcgtctgcaggtacagagtggggtgctggggcaggcccgcactgggcttcatccccactcgggacaggcagtggctccattgacccggatgagctgcgcactgtgctgcagtcgtgtctgcgcgagagcgccatctcgctgcctgacgagaagctggaccagctgacgctggcgctcttcgaatcggccgacgcggacggcaacggggccatcaccttcgaggagctccgggacgagctgcagcgcttccccggagtcatggagaacctgaccatcagcgctgcccactggctgacggcccccgccccccgcccacgcccgcgccggccgcgccagctgacccgcgcctactggcacaaccaccgcagccagctgttctgcctggccacctatgcaggcctccacgtgctgctcttcgggctggcggccagcgcgcaccgggacctcggcgccagcgtcatggtggccaagggctgcggccagtgcctcaacttcgactgcagcttcatcgcggtgctgatgctcagacgctgcctcacctggctgcgggccacgtggctggctcaagtcctaccactggaccagaacatccagttccaccagcttatgggctacgtggtagtggggctgtccctcgtgcacaccgtggctcacactgtgaactttgtactccaggctcaggcggaggccagccctttccagttctgggagctgctgctcaccacgaggcctggcattggctgggtacacggttcggcctccccgacaggtgtcgctctgctgctgctgctcctcctcatgttcatctgctccagttcctgcatccgcaggagtggccactttgaggtgttctattggactcacctgtcctacctcctcgtgtggcttctgctcatctttcatgggcccaacttctggaagtggctgctggtgcctggaatcttgtttttcctggagaaggccatcggactggcagtgtcccgcatggcagccgtgtgcatcatggaagtcaacctcctcccctccaaggtcactcatctcctcatcaagcggccccctttttttcactatagacctggtgactacttgtatctgaacatccccaccattgctcgctatgagtggcaccccttcaccatcagcagtgctcctgagcagaaagacactatctggctgcacattcggtcccaaggccagtggacaaacaggctgtatgagtccttcaaggcatcagacccactgggccgtggttctaagaggctgtcgaggagtgtgacaatgagaaagagtcaaaggtcgtccaagggctctgagatacttttggagaaacacaaattctgtaacatcaagtgctacatcgatgggccttatgggacccccacccgcaggatctttgcctctgagcatgccgtgctcatcggggcaggcatcggcatcaccccctttgcttccattctgcagagtatcatgtacaggcaccagaaaagaaagcatacttgccccagctgccagcactcctggatcgaaggtgtccaagacaacatgaagctccataaggtggactttatctggatcaacagagaccagcggtctttcgagtggtttgtgagcctgctgactaaactggagatggaccaggccgaggaggctcaatacggccgcttcctggagctgcatatgtacatgacatctgcactgggcaagaatgacatgaaggccattggcctgcagatggcccttgacctcctggccaacaaggagaagaaagactccatcacggggctgcagacgcgcacccagcctgggcggcctgactggagcaaggtgttccagaaagtggctgctgagaagaagggcaaggtgcaggtcttcttctgtggctccccagctctggccaaggtgctgaagggccattgtgagaagttcggcttcagatttttccaagagaatttctagcctcacctctccaagctctgccccaagtccacaccatgggtctgcttcattgcattagtataaatgcccccacagggaccagcctcagatgacccacccaataagacaaagcctagggaccccctaatcctgctcaacagagagaacaggagaccccaaggggcagatgaacttcctctagaacccaggggaagggacagtgccttgttcagtctgctgtagattctggggtttctgtgaaagtgagggaaccagaggctggtcacgggagcttgggggtggggttcgagggggcagagggcaaccactcctccaaacattttccgacggagccttcccccacatccatggtcccaaacctgcccaatcatcacagtcatttggaagcttatttctccggcatcttataaaattgttcaaacctacaaaaagtgagaagaatcatacagtgaacagtgttaccta

SEQ ID NO: 215452 - DNA, 2298 bp, Artificial Sequence
  derived and/or modified sequence
atgaacaccagcggcgaccccgcccagaccggccccgagggctgccgggggactatgagcgcagaggaggacgcacgctggctacgctgggttacgcagcagttcaaaacaatcgctggagaagacggcgaaatctcactacaggagttcaaagcagccctccacgtcaaggagtccttcttcgctgagaggtttttcgcactttttgacagcgatcgttcaggcaccataacacttcaggagcttcaggaagcacttactctcctgattcatgggagccctatggataagttgaaatttctattccaggtgtatgatattgacgtatgcgctcgccagggggcttccgcgggaaccgaatggggggccggcgcaggccctcattgggcttccagtcccctagggactgggagcggctcaattgatccggatgagctgcgcacagtcctgcagtcctgtcttcgagagtccgcaatttctttaccagacgagaagcttgatcagctgacactcgccctgtttgagtctgctgacgccgacgggaacggggcgataacctttgaggagttacgtgatgagctgcagcggttcccaggcgtcatggaaaaccttaccatttccgctgcccactggttaacggcccctgcccctcgtccaaggccccgcaggccaaggcagctgacccgggcctattggcataaccaccgctcccagttattttgtctcgccacatatgccggcctgcatgtgcttctgtttgggctggctgcttccgcacatcgggatctgggcgccagtgttatggtggcaaaggggtgtggccagtgtctcaactttgactgttcctttatcgcagtgctcatgctaagaaggtgcctgacctggctgagggctacctggctcgctcaggtcttgccgttggaccagaatattcagtttcaccagcttatgggctacgtggttgtaggcctgtcattggtccatacggtggctcatacagttaactttgtgctccaagcccaagcagaggcaagcccattccagttctgggagctcctgctgactaccaggcctggcatcggttgggtccacggaagtgcctctccaactggtgtggcccttctgttgttgctccttcttatgttcatttgtagctcttcttgtattagaaggtctggtcactttgaagttttttattggactcacctttcctacctcctcgtctggcttctcctgattttccatggccctaacttctggaaatggttgttggtgcctgggattcttttcttcttggaaaaggccatcggtcttgcagtaagtagaatggcagcagtgtgcatcatggaggtgaaccttctcccctccaaagtcacccatctgctgatcaaaagacctccgttctttcactaccgccctggtgattatttgtatcttaatatccccaccatcgcacgctacgaatggcaccccttcacaatatcatccgcccctgaacagaaagacacaatctggttgcacatccgatcacagggacaatggaccaataggctgtatgaaagcttcaaagcctcagatcccctaggccggggctcaaagcgcttgtcacgatccgtcaccatgcgcaaatcccaacgaagctctaaggggagtgagatccttcttgaaaagcataagttttgcaatatcaagtgttacatcgacggtccatacggaacaccaacccggagaatctttgcatctgaacatgccgtgctgattggcgctgggattgggatcactccctttgcttcgattctccagtccatcatgtaccgccatcaaaagaggaaacatacttgcccatcctgccaacacagctggatcgagggagtgcaagataacatgaaactgcacaaggtagatttcatctggataaatagggatcagcggagttttgaatggtttgtgagcctcttaaccaagcttgagatggaccaggcagaagaggcccagtacggaaggtttcttgagttacatatgtacatgacatctgccctgggaaagaatgatatgaaagccatcggccttcagatggcattggacttactcgccaataaggagaagaaggactcgatcaccggactgcaaacaagaacgcagcctgggcggccagattggagcaaggtgttccagaaggtggcagcagagaagaagggaaaggtccaggtgttcttttgtggatcacccgcactggccaaggtgcttaagggccattgcgagaaatttggcttccggttttttcaggaaaatttctag

SEQ ID NO: 215453 - DNA, 2298 bp, Artificial Sequence
  derived and/or modified sequence
atgaatacatccggagaccccgcacagaccggaccagagggttgtcggggtactatgtccgccgaggaggatgcccgatggctgcggtgggtgactcagcaatttaagaccatcgccggagaggacggggaaatatcactgcaagaatttaaggctgctttacatgtcaaagaatcattctttgcagagagattctttgccctgttcgactcagatcggtccggcacgatcacgctgcaggagctgcaggaagcgttaacgctgctcatccatggatctccaatggacaaactgaagttcctatttcaggtgtatgacattgatgtgtgtgctcgacaaggcgcttccgcagggactgaatggggtgcaggagctggcccacactgggcctcgtcacccctagggaccggatctggctcaatcgaccctgacgaactccgcacagtgctccagtcctgtcttagggaaagcgccatttctttgccagatgaaaaactcgaccagctcactctggccctgtttgagagcgctgatgcggacgggaatggggcaatcacatttgaagaacttcgcgacgaactccagagattccccggagtcatggaaaaccttaccatcagtgccgctcactggttaacggcccctgccccacgtcccagaccgaggaggccacggcagcttaccagggcctactggcacaatcatagaagccaactattttgtcttgctacatatgccggactgcacgtgctcttgtttggactggccgcatccgcacaccgcgacctgggcgcaagtgtcatggtggccaaaggctgtggccagtgtctgaacttcgattgtagtttcatcgctgtgctgatgctcagacgctgcttaacatggctaagggctacttggctcgcccaggtcctgccattggatcagaatattcagttccaccagctgatgggctacgtggtggttggtctgtccctggttcatacggttgcccataccgtcaacttcgttctccaggcgcaagctgaggcctcgccctttcagttctgggagctgctgttgaccacaaggcctgggatcgggtgggtgcatggatcagcgagtcccacaggcgtggctttgttactgttactccttctgatgttcatctgctccagctcttgcatcagacgctctggacatttcgaggtgttctactggacacatctctcatacttgcttgtctggctgcttctgatctttcacgggccaaatttttggaaatggctgctcgtccccggaatcttgttttttttagagaaggctataggactggcagtgagtcgtatggctgctgtctgcatcatggaagtgaatctcctgccatctaaagtgactcatcttctgataaagcgtccacctttcttccattacagacctggcgactacttgtatctgaacattcctacaatagctcgatacgagtggcatccttttacaatcagctctgcccctgagcagaaggatacgatttggctccatattcgatcccagggccagtggacaaacaggctttacgagagttttaaagcaagtgatcctctgggtcgcggttctaaaaggctatcacgctcggttaccatgagaaagagccagcgatcctcaaaggggtccgaaatattgctcgaaaaacataagttttgtaatattaagtgctatatagacgggccatacgggacgcctacgcgccgaatatttgcgtctgaacatgccgttcttattggagcaggaataggaataaccccttttgcatctatcctgcagtccatcatgtaccgacatcaaaagcgtaaacatacttgcccttcctgccagcacagctggatagaaggtgtgcaggacaatatgaagctacataaggtagatttcatctggatcaacagagaccagcgttcctttgaatggttcgtgagtctcctgacaaagctggagatggaccaggcagaagaggctcagtatgggaggtttcttgaattgcacatgtatatgacctctgccctagggaagaatgacatgaaggccattgggctgcagatggccctagatttgttggccaataaagagaagaaagactctattactggcctgcaaacaaggacacaaccaggacgccctgattggagcaaggtctttcagaaggtggccgctgaaaagaagggtaaggtgcaggtgtttttctgcgggagccctgccctcgccaaggtgcttaaggggcactgcgagaaatttggtttccgcttttttcaggagaatttttag

SEQ ID NO: 215454 - DNA, 2298 bp, Artificial Sequence
  derived and/or modified sequence
atgaacaccagcggcgaccccgcccagaccggccccgagggctgcagaggcaccatgagcgccgaggaggacgccagatggctgagatgggtgacccagcagttcaagaccatcgccggcgaggacggcgagatcagcctgcaggagttcaaggccgccctgcacgtgaaggagagcttcttcgccgagagattcttcgccctgttcgacagcgacagaagcggcaccatcaccctgcaggagctgcaggaggccctgaccctgctgatccacggcagccccatggacaagctgaagttcctgttccaggtgtacgacatcgacgtgtgcgccagacagggcgccagcgccggcaccgagtggggcgccggcgccggcccccactgggccagcagccccctgggcaccggcagcggcagcatcgaccccgacgagctgagaaccgtgctgcagagctgcctgagagagagcgccatcagcctgcccgacgagaagctggaccagctgaccctggccctgttcgagagcgccgacgccgacggcaacggcgccatcaccttcgaggagctgagagacgagctgcagagattccccggcgtgatggagaacctgaccatcagcgccgcccactggctgaccgcccccgcccccagacccagacccagaagacccagacagctgaccagagcctactggcacaaccacagaagccagctgttctgcctggccacctacgccggcctgcacgtgctgctgttcggcctggccgccagcgcccacagagacctgggcgccagcgtgatggtggccaagggctgcggccagtgcctgaacttcgactgcagcttcatcgccgtgctgatgctgagaagatgcctgacctggctgagagccacctggctggcccaggtgctgcccctggaccagaacatccagttccaccagctgatgggctacgtggtggtgggcctgagcctggtgcacaccgtggcccacaccgtgaacttcgtgctgcaggcccaggccgaggccagccccttccagttctgggagctgctgctgaccaccagacccggcatcggctgggtgcacggcagcgccagccccaccggcgtggccctgctgctgctgctgctgctgatgttcatctgcagcagcagctgcatcagaagaagcggccacttcgaggtgttctactggacccacctgagctacctgctggtgtggctgctgctgatcttccacggccccaacttctggaagtggctgctggtgcccggcatcctgttcttcctggagaaggccatcggcctggccgtgagcagaatggccgccgtgtgcatcatggaggtgaacctgctgcccagcaaggtgacccacctgctgatcaagagaccccccttcttccactacagacccggcgactacctgtacctgaacatccccaccatcgccagatacgagtggcaccccttcaccatcagcagcgcccccgagcagaaggacaccatctggctgcacatcagaagccagggccagtggaccaacagactgtacgagagcttcaaggccagcgaccccctgggcagaggcagcaagagactgagcagaagcgtgaccatgagaaagagccagagaagcagcaagggcagcgagatcctgctggagaagcacaagttctgcaacatcaagtgctacatcgacggcccctacggcacccccaccagaagaatcttcgccagcgagcacgccgtgctgatcggcgccggcatcggcatcacccccttcgccagcatcctgcagagcatcatgtacagacaccagaagagaaagcacacctgccccagctgccagcacagctggatcgagggcgtgcaggacaacatgaagctgcacaaggtggacttcatctggatcaacagagaccagagaagcttcgagtggttcgtgagcctgctgaccaagctggagatggaccaggccgaggaggcccagtacggcagattcctggagctgcacatgtacatgaccagcgccctgggcaagaacgacatgaaggccatcggcctgcagatggccctggacctgctggccaacaaggagaagaaggacagcatcaccggcctgcagaccagaacccagcccggcagacccgactggagcaaggtgttccagaaggtggccgccgagaagaagggcaaggtgcaggtgttcttctgcggcagccccgccctggccaaggtgctgaagggccactgcgagaagttcggcttcagattcttccaggagaacttctag

SEQ ID NO: 215455 - protein, 163 aa, Artificial Sequence
  derived and/or modified sequence
MSSCPVHDCPSWDPERLEPVETGSRGALRLRGGAPGSAAGFRASIWGPAGYPSPVGLGHPASLPRPAYSPRCPEPDARHGWGSGSNAGYRGPDRAGTPCPAQDREGRSSSPVPPPRLKAMTSQARKQNGGALIDTVDWTREAPDSDPVMSMQKTQKPQTTVGQ

SEQ ID NO: 215456 - protein, 1478 aa, Artificial Sequence
  derived and/or modified sequence
MASTNAESQLQRIIRDLQDAVTELSKEFQEAGEPITDDSTSLHKFSYKLEYLLQFDQKEKATLLGNKKDYWDYFCACLAKVKGANDGIRFVKSISELRTSLGKGRAFIRYSLVHQRLADTLQQCFMNTKVTSDWYYARSPFLQPKLSSDIVGQLYELTEVQFDLASRGFDLDAAWPTFARRTLTTGSSAYLWKPPSRSSSMSSLVSSYLQTQEMVSNFDLNSPLNNEALEGFDEMRLELDQLEVREKQLRERMQQLDRENQELRAAVSQQGEQLQTERERGRTAAEDNVRLTCLVAELQKQWEVTQATQNTVKELQTCLQGLELGAAEKEEDYHTALRRLESMLQPLAQELEATRDSLDKKNQHLASFPGWLAMAQQKADTASDTKGRQEPIPSDAAQEMQELGEKLQALERERTKVEEVNRQQSAQLEQLVKELQLKEDARASLERLVKEMAPLQEELSGKGQEADQLWRRLQELLAHTSSWEEELAELRREKKQQQEEKELLEQEVRSLTRQLQFLETQLAQVSQHVSDLEEQKKQLIQDKDHLSQQVGMLERLAGPPGPELPVAGEKNEALVPVNSSLQEAWGKPEEEQRGLQEAQLDDTKVQEGSQEEELRQANRELEKELQNVVGRNQLLEGKLQALQADYQALQQRESAIQGSLASLEAEQASIRHLGDQMEASLLAVRKAKEAMKAQMAEKEAILQSKEGECQQLREEVEQCQQLAEARHRELRALESQCQQQTQLIEVLTAEKGQQGVGPPTDNEARELAAQLALSQAQLEVHQGEVQRLQAQVVDLQAKMRAALDDQDKVQSQLSMAEAVLREHKTLVQQLKEQNEALNRAHVQELLQCSEREGALQEERADEAQQREEELRALQEELSQAKCSSEEAQLEHAELQEQLHRANTDTAELGIQVCALTVEKERVEEALACAVQELQDAKEAASREREGLERQVAGLQQEKESLQEKLKAAKAAAGSLPGLQAQLAQAEQRAQSLQEAAHQELNTLKFQLSAEIMDYQSRLKNAGEECKSLRGQLEEQGRQLQAAEEAVEKLKATQADMGEKLSCTSNHLAECQAAMLRKDKEGAALREDLERTQKELEKATTKIQEYYNKLCQEVTNRERNDQKMLADLDDLNRTKKYLEERLIELLRDKDALWQKSDALEFQQKLSAEERWLGDTEANHCLDCKREFSWMVRRHHCRICGRIFCYYCCNNYVLSKHGGKKERCCRACFQKLSEGPGSPDSSGSGTSQGEPSPALSPASPGPQATGGQGANTDYRPPDDAVFDIITDEELCQIQESGSSLPETPTETDSLDPNAAEQDTTSTSLTPEDTEDMPVGQDSEICLLKSGELMIKVPLTVDEIASFGEGSRELFVRSSTYSLIPITVAEAGLTISWVFSSDPKSISFSVVFQEAEDTPLDQCKVLIPTTRCNSHKENIQGQLKVRTPGIYMLIFDNTFSRFVSKKVFYHLTVDRPVIYDGSDFL

SEQ ID NO: 215457 - protein, 267 aa, Artificial Sequence
  derived and/or modified sequence
  misc_feature (1)..(1): Xaa can be any naturally occurring amino acid
XSKHGGKKERCCRACFQKLSEGPGSPDSSGSGTSQGEPSPALSPASPGPQATGGQGANTDYRPPDDAVFDIITDEELCQIQESGSSLPETPTETDSLDPNAAEQDTTSTSLTPEDTEDMPVGQDSEICLLKSGELMIKVPLTVDEIASFGEGSRELFVRSSTYSLIPITVAEAGLTISWVFSSDPKSISFSVVFQEAEDTPLDQCKVLIPTTRCNSHKENIQGQLKVRTPGIYMLIFDNTFSRFVSKKVFYHLTVDRPVIYDGSDFL

SEQ ID NO: 215458 - protein, 1498 aa, Artificial Sequence
  derived and/or modified sequence
MASTNAESQLQRIIRDLQDAVTELSKEFQEAGEPITDDSTSLHKFSYKLEYLLQFDQKEKATLLGNKKDYWDYFCACLAKVKGANDGIRFVKSISELRTSLGKGRAFIRYSLVHQRLADTLQQCFMNTKVTSDWYYARSPFLQPKLSSDIVGQLYELTEVQFDLASRGFDLDAAWPTFARRTLTTGSSAYLWKPPSRSSSMSSLVSSYLQTQEMVSNFDLNSPLNNEALEGFDEMRLELDQLEVREKQLRERMQQLDRENQELRAAVSQQGEQLQTERERGRTAAEDNVRLTCLVAELQKQWEVTQATQNTVKELQTCLQGLELGAAEKEEDYHTALRRLESMLQPLAQELEATRDSLDKKNQHLASFPGWLAMAQQKADTASDTKGRQEPIPSDAAQEMQELGEKLQALERERTKVEEVNRQQSAQLEQLVKELQLKEDARASLERLVKEMAPLQEELSGKGQEADQLWRRLQELLAHTSSWEEELAELRREKKQQQEEKELLEQEVRSLTRQLQFLETQLAQVSQHVSDLEEQKKQLIQDKDHLSQQVGMLERLAGPPGPELPVAGEKNEALVPVNSSLQEAWGKPEEEQRGLQEAQLDDTKVQEGSQEEELRQANRELEKELQNVVGRNQLLEGKLQALQADYQALQQRESAIQGSLASLEAEQASIRHLGDQMEASLLAVRKAKEAMKAQMAEKEAILQSKEGECQQLREEVEQCQQLAEARHRELRALESQCQQQTQLIEVLTAEKGQQGVGPPTDNEARELAAQLALSQAQLEVHQGEVQRLQAQVVDLQAKMRAALDDQDKVQSQLSMAEAVLREHKTLVQQLKEQNEALNRAHVQELLQCSEREGALQEERADEAQQREEELRALQEELSQAKCSSEEAQLEHAELQEQLHRANTDTAELGIQVCALTVEKERVEEALACAVQELQDAKEAASREREGLERQVAGLQQEKESLQEKLKAAKAAAGSLPGLQAQLAQAEQRAQSLQEAAHQELNTLKFQLSAEIMDYQSRLKNAGEECKSLRGQLEEQGRQLQAAEEAVEKLKATQADMGEKLSCTSNHLAECQAAMLRKDKEGAALREDLERTQKELEKATTKIQEYYNKLCQEVTNRERNDQKMLADLDDLNRTKKYLEERLIELLRDKDALWQKSDALEFQQKLSAEERWLGDTEANHCLDCKREFSWMVRRHHCRICGRIFCYYCCNNYVLSKHGGKKERCCRACFQKLSEGPGSPDSSGSGTSQGEPSPALSPASPGPQATGGQGANTDYRPPDDAVFDIITDEELCQIQESGSSLPETPTETDSLDPNAAEQASVGASKGLGNLLCESSACRDTTSTSLTPEDTEDMPVGQDSEICLLKSGELMIKVPLTVDEIASFGEGSRELFVRSSTYSLIPITVAEAGLTISWVFSSDPKSISFSVVFQEAEDTPLDQCKVLIPTTRCNSHKENIQGQLKVRTPGIYMLIFDNTFSRFVSKKVFYHLTVDRPVIYDGSDFL

SEQ ID NO: 215459 - DNA, 8504 bp, Artificial Sequence
  derived and/or modified sequence
gtgtgcgcgtcatggccgtcagcaccgcgttcccgtcctcttccgcttggccccagaaagtttcggttctgcccggcggtggacccacgagcgcgtgccaccatggagtctgaccactgctgagcagacagccaccgagggccgaaattctgagccttcctctggacccaggcaggagacatacagacaagaaaggcaaactcaccatggcctccaccaatgcagagagccagctccagagaatcatccgagacttgcaagatgctgtgacagaactaagcaaagaatttcaggaagcaggggaacccatcacggatgacagcaccagcttgcataaattttcttataaacttgagtatctcctgcaatttgatcagaaagagaaggccaccctcctgggcaacaagaaggactactgggattacttctgtgcctgcctggccaaggtgaaaggagccaatgatgggatccgctttgtcaagtctatctcagagctccgaacatccttggggaaaggaagagcatttattcgctactccttggtgcaccagaggttggcagacaccttacagcagtgcttcatgaacaccaaagtgaccagtgactggtactatgcaagaagcccctttctgcagccaaagctgagctcggacattgtgggccaactctatgagctgactgaggttcagtttgacctggcgtcgaggggctttgacttggatgctgcctggccaacatttgccaggaggacgctgaccactggctcttctgcttacctgtggaaaccccctagccgcagctccagcatgagcagcttggtgagcagctacctgcagactcaagagatggtgtccaactttgacctgaacagccccctaaacaacgaggcattggagggctttgatgagatgcgactagagctggaccagttggaggtgcgggagaagcagctacgggagcgcatgcagcagctggacagagagaaccaggagctgagggcagctgtcagccagcaaggggagcaactgcagacagagagggagagggggcgcactgcagcggaggacaacgttcgcctcacttgcttggtagctgagctccagaagcagtgggaggtcacccaggccacccagaacactgtgaaggagctgcagacatgcctgcagggcctggagctaggagcagcagagaaggaggaggactaccacacagccctgcggcggctggagtccatgctgcagcccttggcacaggagcttgaggccacacgggactcactggacaagaaaaaccagcatttagccagcttcccaggctggctagccatggctcagcagaaggcagatacggcatcagacacaaagggccggcaagaacctattcccagtgatgcggcccaggagatgcaggagctaggggagaagcttcaagccctagaaagggagagaaccaaggtcgaggaggtcaacagacagcagagtgcccaactggaacagctggtcaaggagcttcagctgaaagaggatgcccgggccagcctggagcgcctggtgaaggagatggccccactccaggaggagttgtctgggaagggacaggaggcagaccagctctggcgacggctgcaggagttgctggcccacacgagctcctgggaggaggagctagcagagttgaggcgggagaaaaaacagcaacaggaggagaaggagctgctggagcaggaggtcaggtctctgacccggcagctgcagttcctggagacccagctggcacaggtgagccaacatgtgagtgacctggaggagcagaagaagcagctcattcaggacaaagaccacctcagccagcaggtgggtatgctcgagcggcttgctgggccgcctggcccagaactgccagtggcaggtgagaagaatgaggccctggtccctgtgaactccagtctgcaagaggcctgggggaagccagaggaggagcagaggggcctgcaggaggcacagttagacgataccaaggtgcaagagggcagccaggaggaagagctccggcaggccaacagggagctggagaaggagctacagaatgtggtcgggcgtaaccagctcctggagggcaagctgcaagccctgcaggccgattaccaggctttgcagcagcgggaatcagccatccagggctccttggcctccctggaggccgagcaggccagcatccggcacttgggtgaccagatggaggcgagcttgctggctgtaaggaaggccaaggaggccatgaaagcccagatggcagagaaggaggccattctacagagcaaggagggcgagtgtcagcagctgcgggaggaggtggagcagtgccagcaactggcagaagcccggcacagagagcttagggctctcgagagccagtgccagcagcagacccagctgattgaggtcctcacagcagagaaaggccaacagggagttggcccacccactgacaatgaagcccgtgagctggctgcccagctagccctgtctcaggcgcagctggaagtccatcagggggaggtccaacggctgcaggctcaggtggtggacctccaggccaagatgcgggcagccctggatgaccaggacaaggtgcagagccagctaagcatggctgaggccgtcctgagggagcacaaaacccttgtgcagcagctgaaggagcagaatgaagcccttaacagagcccatgtccaggagctgctgcaatgctcggagcgtgaaggggcactgcaggaggagagggccgatgaggcccagcagagggaggaggagctgcgggccctgcaggaggagctgtcccaggccaaatgcagctccgaggaagcacagctggagcacgctgagctgcaagagcagctgcaccgggccaacacagacacagctgagctgggcatccaggtttgcgcactgaccgtggaaaaggagcgagtggaggaggcactggcctgtgctgtccaggagctccaggacgccaaagaggcagcctcaagggagcgagagggcctggagcgccaagtagctgggctgcagcaagagaaggagagcttgcaggagaagctgaaggcggccaaggcagcagccggctcactgcctggcctgcaggcccagctcgcccaggcagagcagcgggcccagagcctccaagaggctgcacaccaggagctcaacaccctcaagttccagctgagtgctgaaatcatggactaccagagcagacttaagaatgctggtgaagagtgcaagagcctcaggggccagcttgaggagcaaggccggcagctgcaggctgctgaggaagctgtggagaagctgaaggccacccaagcagacatgggagagaagctgagctgcactagcaaccatcttgcagagtgccaggcggccatgctgaggaaggacaaggagggggctgccctgcgtgaagacctagaaaggacccagaaggaactcgaaaaagccacaacaaaaatccaagagtattacaacaaactctgccaggaggtgacaaatcgtgagaggaatgaccagaagatgcttgctgacctggatgacctcaacagaaccaagaagtatctcgaggagcggctgatagagctgctcagggacaaggatgctctctggcagaagtcagatgccctggaattccagcagaagctcagtgctgaggagagatggctcggagacacagaggcaaaccactgcctcgactgtaagcgggagttcagctggatggtgcggcggcaccactgcaggatatgtggccgcatcttctgttactactgctgcaacaactacgtcctgagcaagcacggtggcaaaaaggagcgctgctgccgagcctgtttccagaagctcagtgaaggccctggctcccctgatagcagtggctcaggcactagccagggagagcccagccctgcactgtcaccagcctcacctgggccccaggccacaggaggccaaggagcaaatacagactacaggccaccggacgacgctgtgtttgatatcatcacagatgaggaattgtgccagatacaggagtccggctcctctttgcctgaaacacccactgaaactgattctctcgacccaaatgcggctgaacaggatactacatcaacctcgctaacgcctgaggacactgaagacatgcccgtggggcaggattcggaaatctgcctgctgaagtctggagaactgatgatcaaagtacccctcacagtggatgagatcgccagcttcggggagggtagcagggagctgtttgtgaggtccagcacctacagcctgatccccatcactgtggccgaggcaggcctcaccatcagctgggtcttctcctctgaccccaagagcatctccttcagtgtggtcttccaggaggccgaggacacaccgctggatcagtgtaaggtcctcattcccacgacccgatgcaactcccacaaggagaacatccagggccagctcaaggttcgcacacccggcatctacatgctcatcttcgacaataccttctcaaggtttgtctctaaaaaggtattttatcacttgacggttgatcggcctgtgatctacgatggaagtgatttcctgtagcttcagcacctcagtaacttcacttcatccacaggaaacactgctcttcctcacctgtcacataaagcatttttttaaaaagtcagctgctccaaaatcatcaactcagcccctgggctgcccctcagaggcggtgtctggggaggactttgtgctcagcactctgcaccggccactcttagcccccgaggcgttgaagggctcaggcaatgtttccattaagtagagactcagctgttgtcacacccaaagggatgctctgccaaaggtttaaacacccaggagaccatcagcctctcctgggagcacagttggctacaggcctcttgtggagagtttcacgggcaggggtgattccaacttctgcctgtggagagattttctgccctgccccaccagggccctgcatgttggagactgagctgggtgcactggccatgccctgtgaatcctcaggctgtgacgccctcaggtactcctgggaaaaggaggtacacagccatcatgcgagtcggtgccaggggaccccccggagatcctgaccagctcctccagtcatgctcttgtccctcactgccccagtaagctggaggctgctccagaactcagcagtgttggaggggcctctaagctgcactctctttctggcccttttgtctgggtgattctgtcctcaaataaagcccttcactcagccagacctctccacagctcaaagcattgccctaagaatcagaagtaaagataatccaagagcaaaacccactgtacttggggcctgcaatggctgtgtgtacactacatctaatgcccaaatgccagccagtgtggatgttgtgaccacagagcaggattgtgcattggctttagagctactcctcagctgatggcccacttttgtttatataaataagagcttctgccccacctgcagacatgtttactaatgatcatagccaggattagaaccactttcaaacattggggccttcttaacaaaagtctttgataacttaagaaccaaagtaacagagtaaacagaggcatgatggatccctgggccccactcccctcctgacaggttccccaacagcccatttgcccacttcccactgctcagcccacaccagacctccaggagacatccccccttgaggcagagagatcctgttccctattcccagacaagaattatttaatcttccctgttctctgtggtccttttcttccccaacaacagatagctcaccttggacagctcttcgtcccttgttcatggaaccagctgcctgcagtcaggccccaggttcttccatgggtgaacagagcatctgacaaaaggtcccagtttggccaggggtgagggagagagcaccagacaggctatccgagaatctgagagctgggcccggcagttcctccagctacccttgtgacctaagtccagtcacacatttcccaaagtttctctttgtcataaccctggtctggctggttttgagggcttgagaatgggtcagggactccaggccaagtccaacagagaccccaaacccaccacacaccagcagccacaacctcaccaccaacaaagaggacttttgtggggccacaagtaagaggtcatttctggaatggactcagacctttaaacaggagagttgagcacttccagtcagtttttaagcaaggcatggggaacagggaatagaacctttcaaagaggttgcccagagaaaagctgggcctcttgcattcggcttccttggagcagcctcttctggcagaaagccatcaggtgctcaatcatcttctcctggccaaggctctgaccatgcttagtactggaatagaggtggccaggcccccagcgactcttcttggcctgatgtttgtcctcacaggcatgccacgtggcctgagatgattcagaacaaatcatgctaactttgaatccatccagccacttgcaaatgataatcagaagtcagcttgttcactgttagaaagaaactaacaaaagagaacccagagcaatctagaatctttgagtgcttggctttccaaggatactgcggagactctggccaagctgatgaccttctgaagtgtcactggcaccatatgcaacaagaaccaccattcactgagtagctaatgggtttggggcctgggacattccatctgaggtccttcctgaacatgtcactccacagcagaggaccggttgcagcttacccagaaccactcctccaggagagctggatgttttgcgtgcaacaccttgagcactgactgctattgttcaaaaaaagcctttgctgcattcggaggactgccccgtgccctgaggtgacttcctaactatgtggtttcattagcgaatttattttttgtgctgggtggacatttgtattttgttaggttgctgtttaagctcaagtttgctgtgctctctgcagctacaaaacatcttggcatatttaagagtggcttttataaatagctttattctgatattaatcagattcccaactttactgagaattaaggactggggtactttaaagaaatgcaaatagcaattgaagaaccactgctgcaggtggtagccctggctagactgaattacactagaaatcagccagaaggaagcgtccttgggatcccagatcactctttttttttttttttaaaaggggcagccccttgatggctcatctctctgaataacagttacgtcttcatatcgataccagatgccttcttcatcatgccactgaagccactcaccaccttcaagaacatgccaacctctgtcagattcacttacccacaaacaaggaggcacgtttggcacaaagtgttgtcctccaggtccaagtggactctacagagtgcttgacctcaacacactggattccaggtggactggaccaagagcaggcaaagacacgggaactgaaaaactccacagggtttggagaatagaaatgaaaagccacgtcatataactcaagaataaatggtgttttggaaattttaaaattatcatcgaaggtggtgaaactatttcaggcccaaatgaaaggaaatcgccagttggggatgaaatcacagagcctgtgttttatgatatggttggatgtccactgatgaaattttaaaggagtttcagttttaaaagtgcgcatgattctacatatgagaattctttaggccaagaaactgtccttggctcagaggtgttgggaattaaagcagagagaagccattcgtgatgcttagaaccaaggatggtcatgtacacaaagaccatcgagacggccattcttgtttacaaaacacttaccaagaaagcactttgtaggggaactttagtaagttcttctcatttcattatgtttcttccaaggaaacaggagagactgaattaataattctctctttcctcttaagcacttttaaaataataaagtacatcttgaaatttggggaggcatctctgatttaaaaaaagaaaaaggctgcttgatgtatgttatgcagagacactctgcctctggtggctgcagagcaatacccaagcctcatttggaaggctcaacatttggaattgcactttaattgattaatcctcaattcatgtggccttacgggatggtgggtctgggaccccaattcattcttatctgccaaagaattatctagaagcacatcaaataccagcaccccacctgctcaatgggggtggaaaacttttgtatccctaagcatattattttatagtgtctgccatgccatgtggaaatactttatttttaacctcaggatttaaataaagtaaacactatgacattt

SEQ ID NO: 215460 - DNA, 4317 bp, Artificial Sequence
  derived and/or modified sequence
tgagcaagcacggtggcaaaaaggagcgctgctgccgagcctgtttccagaagctcagtgaaggccctggctcccctgatagcagtggctcaggcactagccagggagagcccagccctgcactgtcaccagcctcacctgggccccaggccacaggaggccaaggagcaaatacagactacaggccaccggacgacgctgtgtttgatatcatcacagatgaggaattgtgccagatacaggagtccggctcctctttgcctgaaacacccactgaaactgattctctcgacccaaatgcggctgaacaggatactacatcaacctcgctaacgcctgaggacactgaagacatgcccgtggggcaggattcggaaatctgcctgctgaagtctggagaactgatgatcaaagtacccctcacagtggatgagatcgccagcttcggggagggtagcagggagctgtttgtgaggtccagcacctacagcctgatccccatcactgtggccgaggcaggcctcaccatcagctgggtcttctcctctgaccccaagagcatctccttcagtgtggtcttccaggaggccgaggacacaccgctggatcagtgtaaggtcctcattcccacgacccgatgcaactcccacaaggagaacatccagggccagctcaaggttcgcacacccggcatctacatgctcatcttcgacaataccttctcaaggtttgtctctaaaaaggtattttatcacttgacggttgatcggcctgtgatctacgatggaagtgatttcctgtagcttcagcacctcagtaacttcacttcatccacaggaaacactgctcttcctcacctgtcacataaagcatttttttaaaaagtcagctgctccaaaatcatcaactcagcccctgggctgcccctcagaggcggtgtctggggaggactttgtgctcagcactctgcaccggccactcttagcccccgaggcgttgaagggctcaggcaatgtttccattaagtagagactcagctgttgtcacacccaaagggatgctctgccaaaggtttaaacacccaggagaccatcagcctctcctgggagcacagttggctacaggcctcttgtggagagtttcacgggcaggggtgattccaacttctgcctgtggagagattttctgccctgccccaccagggccctgcatgttggagactgagctgggtgcactggccatgccctgtgaatcctcaggctgtgacgccctcaggtactcctgggaaaaggaggtacacagccatcatgcgagtcggtgccaggggaccccccggagatcctgaccagctcctccagtcatgctcttgtccctcactgccccagtaagctggaggctgctccagaactcagcagtgttggaggggcctctaagctgcactctctttctggcccttttgtctgggtgattctgtcctcaaataaagcccttcactcagccagacctctccacagctcaaagcattgccctaagaatcagaagtaaagataatccaagagcaaaacccactgtacttggggcctgcaatggctgtgtgtacactacatctaatgcccaaatgccagccagtgtggatgttgtgaccacagagcaggattgtgcattggctttagagctactcctcagctgatggcccacttttgtttatataaataagagcttctgccccacctgcagacatgtttactaatgatcatagccaggattagaaccactttcaaacattggggccttcttaacaaaagtctttgataacttaagaaccaaagtaacagagtaaacagaggcatgatggatccctgggccccactcccctcctgacaggttccccaacagcccatttgcccacttcccactgctcagcccacaccagacctccaggagacatccccccttgaggcagagagatcctgttccctattcccagacaagaattatttaatcttccctgttctctgtggtccttttcttccccaacaacagatagctcaccttggacagctcttcgtcccttgttcatggaaccagctgcctgcagtcaggccccaggttcttccatgggtgaacagagcatctgacaaaaggtcccagtttggccaggggtgagggagagagcaccagacaggctatccgagaatctgagagctgggcccggcagttcctccagctacccttgtgacctaagtccagtcacacatttcccaaagtttctctttgtcataaccctggtctggctggttttgagggcttgagaatgggtcagggactccaggccaagtccaacagagaccccaaacccaccacacaccagcagccacaacctcaccaccaacaaagaggacttttgtggggccacaagtaagaggtcatttctggaatggactcagacctttaaacaggagagttgagcacttccagtcagtttttaagcaaggcatggggaacagggaatagaacctttcaaagaggttgcccagagaaaagctgggcctcttgcattcggcttccttggagcagcctcttctggcagaaagccatcaggtgctcaatcatcttctcctggccaaggctctgaccatgcttagtactggaatagaggtggccaggcccccagcgactcttcttggcctgatgtttgtcctcacaggcatgccacgtggcctgagatgattcagaacaaatcatgctaactttgaatccatccagccacttgcaaatgataatcagaagtcagcttgttcactgttagaaagaaactaacaaaagagaacccagagcaatctagaatctttgagtgcttggctttccaaggatactgcggagactctggccaagctgatgaccttctgaagtgtcactggcaccatatgcaacaagaaccaccattcactgagtagctaatgggtttggggcctgggacattccatctgaggtccttcctgaacatgtcactccacagcagaggaccggttgcagcttacccagaaccactcctccaggagagctggatgttttgcgtgcaacaccttgagcactgactgctattgttcaaaaaaagcctttgctgcattcggaggactgccccgtgccctgaggggcagccccttgatggctcatctctctgaataacagttacgtcttcatatcgataccagatgccttcttcatcatgccactgaagccactcaccaccttcaagaacatgccaacctctgtcagattcacttacccacaaacaaggaggcacgtttggcacaaagtgttgtcctccaggtccaagtggactctacagagtgcttgacctcaacacactggattccaggtggactggaccaagagcaggcaaagacacgggaactgaaaaactccacagggtttggagaatagaaatgaaaagccacgtcatataactcaagaataaatggtgttttggaaattttaaaattatcatcgaaggtggtgaaactatttcaggcccaaatgaaaggaaatcgccagttggggatgaaatcacagagcctgtgttttatgatatggttggatgtccactgatgaaattttaaaggagtttcagttttaaaagtgcgcatgattctacatatgagaattctttaggccaagaaactgtccttggctcagaggtgttgggaattaaagcagagagaagccattcgtgatgcttagaaccaaggatggtcatgtacacaaagaccatcgagacggccattcttgtttacaaaacacttaccaagaaagcactttgtaggggaactttagtaagttcttctcatttcattatgtttcttccaaggaaacaggagagactgaattaataattctctctttcctcttaagcacttttaaaataataaagtacatcttgaaatttggggaggcatctctgatttaaaaaaagaaaaaggctgcttgatgtatgttatgcagagacactctgcctctggtggctgcagagcaatacccaagcctcatttggaaggctcaacatttggaattgcactttaattgattaatcctcaattcatgtggccttacgggatggtgggtctgggaccccaattcattcttatctgccaaagaattatctagaagcacatcaaataccagcaccccacctgctcaatgggggtggaaaacttttgtatccctaagcatattattttatagtgtctgccatgccatgtggaaatactttatttttaacctcaggatttaaataaagtaaacactatgacattt

SEQ ID NO: 215461 - DNA, 4635 bp, Artificial Sequence
  derived and/or modified sequence
gagcagacagccaccgagggccgaaattctgagccttcctctggacccaggcaggagacatacagacaagaaaggcaaactcaccatggcctccaccaatgcagagagccagctccagagaatcatccgagacttgcaagatgctgtgacagaactaagcaaagaatttcaggaagcaggggaacccatcacggatgacagcaccagcttgcataaattttcttataaacttgagtatctcctgcaatttgatcagaaagagaaggccaccctcctgggcaacaagaaggactactgggattacttctgtgcctgcctggccaaggtgaaaggagccaatgatgggatccgctttgtcaagtctatctcagagctccgaacatccttggggaaaggaagagcatttattcgctactccttggtgcaccagaggttggcagacaccttacagcagtgcttcatgaacaccaaagtgaccagtgactggtactatgcaagaagcccctttctgcagccaaagctgagctcggacattgtgggccaactctatgagctgactgaggttcagtttgacctggcgtcgaggggctttgacttggatgctgcctggccaacatttgccaggaggacgctgaccactggctcttctgcttacctgtggaaaccccctagccgcagctccagcatgagcagcttggtgagcagctacctgcagactcaagagatggtgtccaactttgacctgaacagccccctaaacaacgaggcattggagggctttgatgagatgcgactagagctggaccagttggaggtgcgggagaagcagctacgggagcgcatgcagcagctggacagagagaaccaggagctgagggcagctgtcagccagcaaggggagcaactgcagacagagagggagagggggcgcactgcagcggaggacaacgttcgcctcacttgcttggtagctgagctccagaagcagtgggaggtcacccaggccacccagaacactgtgaaggagctgcagacatgcctgcagggcctggagctaggagcagcagagaaggaggaggactaccacacagccctgcggcggctggagtccatgctgcagcccttggcacaggagcttgaggccacacgggactcactggacaagaaaaaccagcatttagccagcttcccaggctggctagccatggctcagcagaaggcagatacggcatcagacacaaagggccggcaagaacctattcccagtgatgcggcccaggagatgcaggagctaggggagaagcttcaagccctagaaagggagagaaccaaggtcgaggaggtcaacagacagcagagtgcccaactggaacagctggtcaaggagcttcagctgaaagaggatgcccgggccagcctggagcgcctggtgaaggagatggccccactccaggaggagttgtctgggaagggacaggaggcagaccagctctggcgacggctgcaggagttgctggcccacacgagctcctgggaggaggagctagcagagttgaggcgggagaaaaaacagcaacaggaggagaaggagctgctggagcaggaggtcaggtctctgacccggcagctgcagttcctggagacccagctggcacaggtgagccaacatgtgagtgacctggaggagcagaagaagcagctcattcaggacaaagaccacctcagccagcaggtgggtatgctcgagcggcttgctgggccgcctggcccagaactgccagtggcaggtgagaagaatgaggccctggtccctgtgaactccagtctgcaagaggcctgggggaagccagaggaggagcagaggggcctgcaggaggcacagttagacgataccaaggtgcaagagggcagccaggaggaagagctccggcaggccaacagggagctggagaaggagctacagaatgtggtcgggcgtaaccagctcctggagggcaagctgcaagccctgcaggccgattaccaggctttgcagcagcgggaatcagccatccagggctccttggcctccctggaggccgagcaggccagcatccggcacttgggtgaccagatggaggcgagcttgctggctgtaaggaaggccaaggaggccatgaaagcccagatggcagagaaggaggccattctacagagcaaggagggcgagtgtcagcagctgcgggaggaggtggagcagtgccagcaactggcagaagcccggcacagagagcttagggctctcgagagccagtgccagcagcagacccagctgattgaggtcctcacagcagagaaaggccaacagggagttggcccacccactgacaatgaagcccgtgagctggctgcccagctagccctgtctcaggcgcagctggaagtccatcagggggaggtccaacggctgcaggctcaggtggtggacctccaggccaagatgcgggcagccctggatgaccaggacaaggtgcagagccagctaagcatggctgaggccgtcctgagggagcacaaaacccttgtgcagcagctgaaggagcagaatgaagcccttaacagagcccatgtccaggagctgctgcaatgctcggagcgtgaaggggcactgcaggaggagagggccgatgaggcccagcagagggaggaggagctgcgggccctgcaggaggagctgtcccaggccaaatgcagctccgaggaagcacagctggagcacgctgagctgcaagagcagctgcaccgggccaacacagacacagctgagctgggcatccaggtttgcgcactgaccgtggaaaaggagcgagtggaggaggcactggcctgtgctgtccaggagctccaggacgccaaagaggcagcctcaagggagcgagagggcctggagcgccaagtagctgggctgcagcaagagaaggagagcttgcaggagaagctgaaggcggccaaggcagcagccggctcactgcctggcctgcaggcccagctcgcccaggcagagcagcgggcccagagcctccaagaggctgcacaccaggagctcaacaccctcaagttccagctgagtgctgaaatcatggactaccagagcagacttaagaatgctggtgaagagtgcaagagcctcaggggccagcttgaggagcaaggccggcagctgcaggctgctgaggaagctgtggagaagctgaaggccacccaagcagacatgggagagaagctgagctgcactagcaaccatcttgcagagtgccaggcggccatgctgaggaaggacaaggagggggctgccctgcgtgaagacctagaaaggacccagaaggaactcgaaaaagccacaacaaaaatccaagagtattacaacaaactctgccaggaggtgacaaatcgtgagaggaatgaccagaagatgcttgctgacctggatgacctcaacagaaccaagaagtatctcgaggagcggctgatagagctgctcagggacaaggatgctctctggcagaagtcagatgccctggaattccagcagaagctcagtgctgaggagagatggctcggagacacagaggcaaaccactgcctcgactgtaagcgggagttcagctggatggtgcggcggcaccactgcaggatatgtggccgcatcttctgttactactgctgcaacaactacgtcctgagcaagcacggtggcaaaaaggagcgctgctgccgagcctgtttccagaagctcagtgaaggccctggctcccctgatagcagtggctcaggcactagccagggagagcccagccctgcactgtcaccagcctcacctgggccccaggccacaggaggccaaggagcaaatacagactacaggccaccggacgacgctgtgtttgatatcatcacagatgaggaattgtgccagatacaggagtccggctcctctttgcctgaaacacccactgaaactgattctctcgacccaaatgcggctgaacaggcgtctgtcggggccagcaagggtctgggaaacctgctctgtgaatcatctgcttgcagggatactacatcaacctcgctaacgcctgaggacactgaagacatgcccgtggggcaggattcggaaatctgcctgctgaagtctggagaactgatgatcaaagtacccctcacagtggatgagatcgccagcttcggggagggtagcagggagctgtttgtgaggtccagcacctacagcctgatccccatcactgtggccgaggcaggcctcaccatcagctgggtcttctcctctgaccccaagagcatctccttcagtgtggtcttccaggaggccgaggacacaccgctggatcagtgtaaggtcctcattcccacgacccgatgcaactcccacaaggagaacatccagggccagctcaaggttcgcacacccggcatctacatgctcatcttcgacaataccttctcaaggtttgtctctaaaaaggtattttatcacttgacggttgatcggcctgtgatctacgatggaagtgatttcctgtagcttcagcacctcagtaacttcacttcatccacaggaaacactgctcttcctca

SEQ ID NO: 215462 - DNA, 4437 bp, Artificial Sequence
  derived and/or modified sequence
atggcctctaccaacgctgagtcccagctccaacgcatcatccgagacttgcaagatgctgtgacagagctgagtaaggaattccaggaagcgggtgagccaataaccgatgattctacctccctccacaagttttcttataagctcgaatatctgctccagtttgatcagaaagaaaaggcaaccctcctcggcaataaaaaggactactgggactacttctgcgcctgtctggccaaggtgaaaggagctaatgatggaattcggtttgtgaagagtatctctgagctacgaaccagtttaggaaaaggccgcgcctttatcaggtactcgctcgtacaccaaaggctggcagatacactgcaacagtgcttcatgaacaccaaagtcacttccgattggtattatgcccgaagcccctttctgcagcctaaactaagttccgacatcgttggacagctgtatgagctgacagaagtccagtttgatctcgccagcagaggtttcgatttagacgccgcgtggccgacgttcgctaggaggaccctgacgactggaagtagtgcttacctttggaaaccccccagccgatctagctctatgtcatccttggtatcctcttatctgcagacccaggagatggtctcaaatttcgacctgaattctccccttaataatgaggcattggaagggttcgacgagatgcgactcgagctggatcagcttgaggtccgtgaaaagcagctgcgagaaaggatgcagcaactggacagagagaatcaggagctccgagcagctgtaagccaacagggagaacagttgcagacagagagagaacgcgggcgtaccgcggccgaagataatgtcaggcttacatgcttggtagctgaactccaaaagcagtgggaagttacccaggccacccaaaacaccgtgaaagagttacagacttgcctgcaagggttggagctgggagccgctgagaaagaggaggattaccacacagccctacgtcgcctggaaagcatgcttcagcccctggcacaggagctcgaggcaaccagggacagtttggacaagaaaaatcagcacctggccagctttcccggctggctagctatggcccagcagaaagcagacaccgccagcgacacaaagggtagacaagaaccgattccctctgacgccgcccaagagatgcaggaattgggagagaaactccaggccctcgagcgggagagaacaaaagtggaagaggtgaaccgccaacaatcagcccagctcgaacagctggttaaggaactgcagctgaaggaagatgcacgtgcatcgctagagaggcttgtgaaggaaatggcccccctgcaagaagagttgtccggcaagggacaggaagccgatcagttgtggcgccgactccaggagctgctcgcccatacaagttcttgggaagaagaacttgccgagctgcgtagagagaagaaacaacagcaagaagaaaaagagctgctcgaacaggaggttagatcccttacacggcagttacagttcctcgagacccaattagcccaagtgagccagcacgtctctgacctcgaggagcaaaagaagcagttgattcaagataaagaccacctctcgcagcaggtcggaatgcttgaaagactggctgggcctcctggccccgaactccctgttgccggggagaaaaatgaggcgctggttccagtgaatagctctctccaggaggcatggggaaaacctgaagaggaacagaggggactgcaagaggcacaactggacgatactaaggtgcaagaaggaagccaagaagaagaactgcggcaagctaaccgagagctagagaaggagcttcaaaacgtcgtgggccgaaaccaacttttggagggcaaactccaagcccttcaggctgactatcaggctctgcagcaacgagaatcagccatccaaggcagccttgcatccctcgaagctgagcaggctagcatacgccatctaggtgaccaaatggaggctagcctgctggccgtccggaaggccaaggaggccatgaaagctcagatggcagagaaagaagctatcctgcagagcaaggaaggggagtgtcaacagcttcgggaggaagttgaacagtgtcagcagttagccgaggccagacaccgcgagctgagggctttggaatcgcaatgtcagcagcagactcagctcattgaagtgctgaccgctgaaaagggccagcagggggtggggccacccacagataatgaagccagggaactcgcagcacagctggccctaagtcaggcacaactcgaggtacaccaaggagaagtccagcgtctccaggcacaggtcgtggatctacaggcaaagatgcgggccgccctggatgatcaagacaaggtgcagagtcagctgtccatggccgaggccgtgcttcgcgaacataagaccctggtccagcagttgaaggagcaaaatgaagccctcaatagagcccacgtgcaggaactcttacagtgtagtgaaagggagggggcgctacaggaagagagggcagacgaagctcagcagagggaggaggagcttagggccttacaggaggaattatcccaggccaaatgctccagtgaagaggcccaactggaacatgcagaactgcaggagcagctccaccgcgctaacaccgacaccgccgagttgggcatacaggtgtgcgccctgaccgttgaaaaggaaagggtggaggaggccctggcctgcgcagtccaagagctgcaggatgccaaggaggccgccagtcgcgagagggagggactggagagacaggtggcaggactgcagcaggaaaaagaaagcttgcaggagaagctaaaagcagccaaagctgcagccggtagcctgcccggcctgcaggcccaactggcgcaggctgagcagagagcacaatcactccaggaagccgcacaccaggagttaaatacactcaaattccaactttcagctgaaatcatggattaccaatctcgcttgaagaacgccggagaagagtgcaaatccttgcgggggcagctcgaagagcagggaaggcaacttcaggccgccgaggaggctgtggaaaaactgaaggctactcaagcagatatgggtgagaagctctcctgcacctcaaatcatctcgccgaatgccaggcagccatgctcaggaaggataaggagggtgctgctttgcgcgaagacctggaaaggactcagaaagagttagaaaaggcgacgactaagatacaggagtattataacaagctgtgccaagaggtaacaaaccgtgagcgtaatgaccagaaaatgctggctgacttggatgatctgaaccgtacgaagaaatacctggaagaacgacttattgaactgctgagggacaaagacgccctatggcagaagtcggacgccctcgaattccagcagaagttatctgccgaggagcgctggctcggggatacagaggccaaccactgtttagattgcaagagagaattctcctggatggtgaggagacaccattgtcgtatctgcggccgaatattctgctactattgttgtaacaactatgtcctcagtaaacacggcgggaaaaaggaacgttgctgcagggcatgcttccagaagttatcagaagggccgggttcccccgactctagcgggtcgggaacaagtcaaggggaaccctcacctgcattgagccctgcttcgcctgggccgcaggccaccggaggtcaaggtgctaacactgattacagaccacctgatgatgctgtgtttgatataattacagatgaagaactgtgccagattcaggagtcaggcagtagtttaccagagacgccgactgaaaccgattctctcgatcccaatgccgctgagcaggacacgacatctacctcacttacgcctgaagatacggaggacatgcccgtgggtcaggactcagagatctgtctcctgaagagtggagaactgatgatcaaggtgccactcacagtcgatgagatcgcgtcctttggagagggatctcgagagctatttgtccgaagtagcacttactcactgattcctatcacagtggccgaggcagggctcacaatatcttgggtgttcagcagcgacccaaagtcaattagctttagcgttgtgttccaggaggcagaagatacgcccctggaccaatgtaaagtcctgattcccactactcgatgcaactcccataaagaaaatattcaggggcaattgaaggtcagaactcccggaatttacatgttgatcttcgataacacgtttagcaggtttgttagtaagaaggtattttaccacttaacagtggataggcctgtaatctatgacggctcagactttctgtag

SEQ ID NO: 215463 - DNA, 804 bp, Artificial Sequence
  derived and/or modified sequence
tgatctaagcacggcggcaagaaggaaagatgctgtagggcgtgtttccagaagctcagcgagggccccgggtcgccggacagcagcggcagcgggacatcacagggtgagcccagtccagcgctgagccccgccagccctgggcctcaggcaaccgggggccagggagcaaacacggattataggccacccgatgacgccgtgttcgacattataaccgacgaggaactgtgccaaatccaagagagcgggagctctctgcctgagacccctaccgagacagattctcttgaccctaatgcagctgagcaggatacaacatctactagtctgacaccagaggataccgaggacatgcctgtcggtcaggatagcgagatttgcctgctcaagtctggagagttgatgatcaaagtcccgctcactgtggacgagatagcgtcgtttggggagggatctcgggagctgttcgttcggtcttccacctatagcctgatccccatcaccgtggctgaagccggactgacgattagctgggtgttctcttctgatccaaagtcaatctccttcagtgtagtgttccaggaggcggaggacacccctctggatcagtgtaaggtgctgattcctaccactagatgcaactctcacaaggaaaacattcagggacagctcaaggtgcgcactcccgggatttacatgcttattttcgacaacactttcagccgtttcgtctcaaagaaagtcttttatcatttaaccgtcgaccgacctgtcatatatgacgggtcagattttctctag

SEQ ID NO: 215464 - DNA, 4497 bp, Artificial Sequence
  derived and/or modified sequence
atggcctcgactaatgccgaatcccagctgcaaaggatcatccgagacttgcaggacgccgtgaccgaactgtcaaaggagtttcaagaggcaggtgagcctattaccgatgactcgactagtctgcacaaattctcttacaaactggagtacttgcttcagtttgaccagaaagagaaggccactttgcttggaaacaaaaaagactattgggactatttctgtgcctgcttggccaaagtgaagggcgcgaacgacggtatacggttcgtcaagtcaattagcgaactacgaacctctctcggcaaggggcgtgcattcattagatacagcctggtgcaccagcgcctggcagacaccctgcaacagtgcttcatgaacaccaaggtgactagtgattggtactacgctcggagccccttccttcaacctaaactgtcttccgacattgtaggacaactttatgaactcactgaagtccagtttgacttagcatcgagaggattcgatcttgatgctgcttggccgacattcgcccgcaggaccctgacaaccggcagctctgcatacctgtggaagcctccatcccgctcatccagtatgagttcgttggtatcaagctacctgcagacacaggagatggtgtcgaactttgatctcaactcccctctcaataatgaggcactcgaaggattcgacgaaatgaggttggaacttgaccagctggaggtgcgggaaaaacagttgcgtgagagaatgcagcaactggacagggagaatcaggagctccgtgcagccgttagccagcaaggagaacagctccagaccgaaagggagcgtgggcgcaccgctgcagaagataatgtcagactgacttgtcttgtggctgagctgcagaaacaatgggaggtcactcaggccacacagaatacagtcaaggaactgcaaacatgtctacagggccttgaactgggcgccgccgagaaggaagaggattaccacaccgctcttcggagacttgaatcgatgctccaaccgctggcccaggaactggaagcaactcgagattccctggataaaaagaaccagcacttagctagctttccaggttggttggccatggcgcagcagaaggctgacacagcctctgacacaaagggtagacaggagcctataccctcagacgcagcccaagagatgcaggaactgggagagaagctccaggctctcgagcgcgaacgaactaaggttgaagaggtcaacagacagcaaagcgcccagttagagcaactggtcaaagagctgcaattaaaggaagatgcgagggctagtttagagaggctggtcaaagagatggcgccactgcaagaagaactgtccgggaagggccaggaagccgatcagctatggaggcgcctccaggagcttctggctcacaccagctcctgggaggaagagcttgccgagttaagaagagagaagaagcagcagcaagaggaaaaggagcttctggaacaggaggtacggtctttgacccgacagctgcagttcttggagactcagctggctcaggtttcacagcacgtaagcgatctcgaggagcaaaaaaagcaactaatccaggacaaagatcacctgtcccagcaggttggcatgctagagcgcctggcaggaccccctggccctgagctcccagtggcaggggagaagaatgaagctctggtaccagtaaactcctctctccaggaggcatggggcaagcccgaagaagagcagcggggcctgcaggaagctcagctcgacgacacaaaggtgcaggagggcagtcaggaagaggagttaagacaggccaatcgcgagctcgagaaggaactgcagaatgtcgtggggagaaaccagctcctggaaggcaagttgcaagcactgcaggcagactatcaggccctgcaacagcgagagtctgctattcaagggtccttagctagcctggaggccgagcaggcctcaattagacaccttggcgaccagatggaggcttctctcctagccgtgaggaaagccaaggaggctatgaaagcgcagatggccgagaaggaagctatcttacagtcaaaagaaggggaatgtcaacagctccgggaagaggtggaacaatgtcagcaactggcagaagcccggcaccgagagctccgggctttagaatctcagtgtcagcagcagacacagctgatagaggtcttgaccgcagagaaggggcagcaaggagtggggccgcccacagacaatgaagcccgtgagctggccgctcagctggctctctctcaggcgcaactggaagtgcatcagggagaagtgcaaagactacaggcgcaggtggtcgacttgcaggccaagatgcgcgcagctcttgacgaccaggataaggtccagagccaactctccatggcagaggcagtacttcgcgaacacaagacactggtacagcagctaaaggaacagaatgaggccctgaatcgggcccacgtgcaggagttgctgcagtgttctgagagagagggggctctgcaggaggaacgagccgacgaggctcagcagcgagaggaggagctgagggcattacaggaggagctctcccaggctaagtgttcctcagaagaagcccagcttgaacatgccgagcttcaggagcagctgcaccgagccaacaccgatactgctgagctgggtattcaagtgtgtgccctcaccgtggaaaaagagagagtcgaggaggctctggcttgtgcagttcaggagctgcaggacgcaaaggaagctgcttcaagagagagggaggggctggaaaggcaagttgcgggactgcagcaagaaaaggaatcccttcaggaaaagctcaaagccgctaaagcggccgctggatccttgcctgggctccaggcccagctcgcccaagcagagcaaagggcacagagtctgcaggaagctgcgcatcaagagctgaacaccctcaagtttcagctgtccgcagagattatggattaccaaagtcgcctgaaaaatgctggggaagagtgtaagtcattaaggggacagctggaagaacagggaaggcaacttcaggccgccgaagaggcagtggagaagctaaaagctacgcaggcggatatgggtgaaaaactcagttgtacctcgaatcacctcgccgaatgccaggcggccatgcttaggaaggacaaggagggcgcggctctgcgcgaggatctagaaaggactcagaaagagttagagaaagccacaactaaaatacaagagtactacaacaagctctgtcaagaggtgaccaatagagagaggaatgatcagaaaatgctggcggacttagatgacctgaaccgcaccaaaaagtacctggaggaacggcttattgagctgctccgagacaaagacgccctctggcagaagagcgatgctcttgagttccagcagaaacttagtgcagaggagcgctggttgggagacaccgaagccaaccattgcctggactgcaagcgggaattttcctggatggtgcgacgacatcattgccggatttgcggcaggatcttctgttactattgctgtaacaattacgtgctgtccaagcacggtggcaaaaaggaaagatgttgtcgggcttgtttccagaaactgtcagaaggacccgggtccccagatagcagtggctccggaacttcccagggagagccttctccagccctgtctcccgccagccccggaccacaggcaacaggcggccaaggtgctaatactgactacaggcctcccgatgacgccgtcttcgatatcattactgacgaggagttgtgtcagatccaggagtccggtagttccttacctgaaacccctaccgaaacggattctctggacccgaacgcagctgagcaagctagcgttggcgccagcaaaggactcggtaatctcctgtgcgaatcgtccgcctgccgcgacacaaccagtacatcgctcacaccagaagacactgaggacatgccggtcgggcaagactctgagatttgtttgcttaagagtggggagctgatgattaaagtgcctctcactgtcgacgagatcgcttccttcggagaaggcagtcgcgaactcttcgtccgtagttctacatattctcttataccaatcaccgtggctgaggcagggctcactatttcttgggtgttttcctctgatcctaagtccatatccttttctgtggtgtttcaggaggctgaggacaccccactggatcagtgtaaagtcctgatccccacaacgcggtgtaactctcataaggagaacatccagggccaattgaaagttcggaccccaggcatatacatgctgatcttcgataacaccttcagtagatttgttagcaagaaagtcttttatcacctaacagtggaccgccctgtgatttatgacggaagtgattttctttag

SEQ ID NO: 215465 - DNA, 4437 bp, Artificial Sequence
  derived and/or modified sequence
atggccagcaccaatgctgagagccagctgcagaggatcatccgggacctgcaggatgctgtgacagagctgagcaaggagttccaggaggccggggagcccatcacagatgacagcaccagcctgcacaagttctcctacaagctggagtacctgctgcagtttgaccagaaggagaaggccaccctgctgggcaacaagaaggactactgggactacttctgtgcctgcctggccaaggtgaagggggccaatgatggcatccgctttgtgaagagcatcagcgagctgcggaccagcctgggcaagggccgggccttcatccgctacagcctggtgcaccagaggctggccgacaccctgcagcagtgcttcatgaacaccaaggtgaccagtgactggtactatgcccggagccccttcctgcagcccaagctgagcagtgacatcgtgggccagctgtatgagctgacagaggtgcagtttgacctggccagccggggctttgacctggatgctgcctggcccacctttgcccggaggaccctgaccaccggcagcagcgcctacctgtggaagccacccagccgcagcagctccatgagcagcctggtgtcctcctacctgcagacccaggagatggtgagcaactttgacctgaacagccccctgaacaatgaggccctggagggctttgatgagatgaggctggagctggaccagctggaggtgcgggagaagcagctgcgggagaggatgcagcagctggaccgggagaaccaggagctgcgggctgctgtgtcccagcagggcgagcagctgcagacagagcgggagcggggccgcacagctgctgaggacaacgtgcggctgacctgcctggtggccgagctgcagaagcagtgggaggtgacccaggccacccagaacacagtgaaggagctgcagacctgcctgcagggcctggagctgggcgctgctgagaaggaggaggactaccacacagccctgcggcggctggagagcatgctgcagcccctggcccaggagctggaggccacccgggacagcctggacaagaagaaccagcacctggccagcttccctggctggctggccatggcccagcagaaggctgacacagccagtgacaccaagggccggcaggagcccatccccagtgatgctgcccaggagatgcaggagctgggggagaagctgcaggccctggagcgggagaggaccaaggtggaggaggtgaaccggcagcagagcgcccagctggagcagctggtgaaggagctgcagctgaaggaggatgcccgggccagcctggagcggctggtgaaggagatggcccccctgcaggaggagctgagcggcaagggccaggaggccgaccagctgtggaggcggctgcaggagctgctggcccacaccagctcctgggaggaggagctggccgagctgcggcgggagaagaagcagcagcaggaggagaaggagctgctggagcaggaggtgcgcagcctgacccggcagctgcagttcctggagacccagctggcccaggtgtcccagcacgtgtctgacctggaggagcagaagaagcagctgatccaggacaaggaccacctgagccagcaggtgggcatgctggagcggctggccggccccccaggccctgagctgcctgtggccggggagaagaatgaggccctggtgcctgtgaacagcagcctgcaggaggcctggggcaagccagaggaggagcagaggggcctgcaggaggcccagctggatgacaccaaggtgcaggagggcagccaggaggaggagctgcggcaggccaaccgggagctggagaaggagctgcagaatgtggtgggcaggaaccagctgctggagggcaagctgcaggccctgcaggccgactaccaggccctgcagcagcgggagagcgccatccagggcagcctggccagcctggaggccgagcaggccagcatccgccacctgggggaccagatggaggccagcctgctggccgtgaggaaggccaaggaggccatgaaggcccagatggccgagaaggaggccatcctgcagagcaaggagggggagtgccagcagctgcgggaggaggtggagcagtgccagcagctggccgaggcccggcaccgggagctgcgggccctggagagccagtgccagcagcagacccagctgattgaggtgctgacagctgagaagggccagcagggcgtgggccccccaacagacaatgaggcccgggagctggccgcccagctggccctgagccaggcccagctggaggtgcaccagggcgaggtgcagaggctgcaggcccaggtggtggacctgcaggccaagatgagagctgccctggatgaccaggacaaggtgcagagccagctgtccatggccgaggccgtgctgcgggagcacaagaccctggtgcagcagctgaaggagcagaatgaggccctgaacagagcccacgtgcaggagctgctgcagtgcagcgagcgggagggcgccctgcaggaggagcgggcagatgaggcccagcagcgggaggaggagctgcgggccctgcaggaggagctgagccaggccaagtgcagcagcgaggaggcccagctggagcacgccgagctgcaggagcagctgcaccgggccaacacagacacagctgagctgggcatccaggtgtgtgccctgactgtggagaaggagcgggtggaggaggccctggcctgtgctgtgcaggagctgcaggatgccaaggaggccgccagccgggagcgggagggcctggagcggcaggtggccggcctgcagcaggagaaggagagcctgcaggagaagctgaaggccgccaaggctgctgctggcagcctgcccggcctgcaggcccagctggcccaggccgagcagagggcccagagcctgcaggaggccgcccaccaggagctgaacaccctgaagttccagctgtctgctgagatcatggactaccagagccggctgaagaatgctggggaggagtgcaagagcctgcggggccagctggaggagcagggccggcagctgcaggccgctgaggaggccgtggagaagctgaaggccacccaggccgacatgggagagaagctgagctgcaccagcaaccacctggccgagtgccaggccgccatgctgaggaaggacaaggagggcgccgccctgcgggaggacctggagaggacccagaaggagctggagaaggccaccaccaagatccaggagtactacaacaagctgtgccaggaggtgaccaaccgggagagaaatgaccagaagatgctggccgacctggatgacctgaacagaaccaagaagtacctggaggagcggctcatcgagctgctgcgggacaaggatgccctgtggcagaagagtgatgccctggagttccagcagaagctgtctgctgaggagcgctggctgggggacacagaggccaaccactgcctggactgcaagcgggagttctcctggatggtgagaagacaccactgccgcatctgtggccgcatcttctgctactactgctgcaacaactacgtgctgagcaagcatggaggcaagaaggagcgctgctgccgggcctgcttccagaagctgtctgagggccctggcagcccagacagcagcggcagcggcaccagccagggcgagcccagccctgccctgagccctgccagccctggcccccaggccactggaggccagggcgccaacacagactaccggcccccagatgatgctgtgtttgacatcatcacagatgaggagctgtgccagatccaggagagcggcagcagcctgcctgagacccccacagaaacagacagcctggaccccaatgctgctgagcaggacaccaccagcaccagcctgaccccagaggacacagaggacatgcctgtgggccaggacagcgagatctgcctgctgaagtctggagagctgatgatcaaggtgcccctgactgtggatgaaattgccagctttggagagggcagccgggagctgtttgtgcgcagcagcacctacagcctcatccccatcaccgtggccgaggccggcctgaccatctcctgggtgttcagcagtgaccccaagagcatctccttctctgtggtgttccaggaggccgaggacacccccctggaccagtgcaaggtgctgatccccaccacccgctgcaacagccacaaggagaacatccagggccagctgaaggtgaggaccccaggcatctacatgctgatctttgacaacaccttcagcagatttgtgtccaagaaggtgttctaccacctgactgtggacaggcctgtgatctatgatggcagtgacttcctgtag

SEQ ID NO: 215466 - DNA, 804 bp, Artificial Sequence
  derived and/or modified sequence
tgaagcaagcacggcggcaagaaggagcgctgctgccgggcctgcttccagaagctgtctgagggccctggcagcccagacagcagcggcagcggcaccagccagggcgagcccagccctgccctgagccctgccagccctggcccccaggccaccggcggccagggcgccaacacagactacagacctccagatgatgctgtgtttgacatcatcacagatgaggagctgtgccagatccaggagagcggcagcagcctgcctgagacccccacagaaacagacagcctggaccccaatgctgctgagcaggacaccaccagcaccagcctgaccccagaggacacagaggacatgcctgtgggccaggacagcgagatctgcctgctgaagagcggggagctgatgatcaaggtgcccctgactgtggatgagatcgccagctttggagagggcagccgggagctgtttgtgcgcagcagcacctacagcctcatccccatcaccgtggccgaggccggcctgaccatctcctgggtgttcagcagtgaccccaagagcatctccttctctgtggtgttccaggaggccgaggacacccccctggaccagtgcaaggtgctgatccccaccacccgctgcaacagccacaaggagaacatccagggccagctgaaggtgaggaccccaggcatctacatgctgatctttgacaacaccttcagcagatttgtgtccaagaaggtgttctaccacctgactgtggacaggcctgtgatctatgatggcagtgacttcctgtag

SEQ ID NO: 215467 - DNA, 4497 bp, Artificial Sequence
  derived and/or modified sequence
atggccagcaccaatgctgagagccagctgcagaggatcatccgggacctgcaggatgctgtgacagagctgagcaaggagttccaggaggccggggagcccatcacagatgacagcaccagcctgcacaagttctcctacaagctggagtacctgctgcagtttgaccagaaggagaaggccaccctgctgggcaacaagaaggactactgggactacttctgtgcctgcctggccaaggtgaagggggccaatgatggcatccgctttgtgaagagcatcagcgagctgcggaccagcctgggcaagggccgggccttcatccgctacagcctggtgcaccagaggctggccgacaccctgcagcagtgcttcatgaacaccaaggtgaccagtgactggtactatgcccggagccccttcctgcagcccaagctgagcagtgacatcgtgggccagctgtatgagctgacagaggtgcagtttgacctggccagccggggctttgacctggatgctgcctggcccacctttgcccggaggaccctgaccaccggcagcagcgcctacctgtggaagccacccagccgcagcagctccatgagcagcctggtgtcctcctacctgcagacccaggagatggtgagcaactttgacctgaacagccccctgaacaatgaggccctggagggctttgatgagatgaggctggagctggaccagctggaggtgcgggagaagcagctgcgggagaggatgcagcagctggaccgggagaaccaggagctgcgggctgctgtgtcccagcagggcgagcagctgcagacagagcgggagcggggccgcacagctgctgaggacaacgtgcggctgacctgcctggtggccgagctgcagaagcagtgggaggtgacccaggccacccagaacacagtgaaggagctgcagacctgcctgcagggcctggagctgggcgctgctgagaaggaggaggactaccacacagccctgcggcggctggagagcatgctgcagcccctggcccaggagctggaggccacccgggacagcctggacaagaagaaccagcacctggccagcttccctggctggctggccatggcccagcagaaggctgacacagccagtgacaccaagggccggcaggagcccatccccagtgatgctgcccaggagatgcaggagctgggggagaagctgcaggccctggagcgggagaggaccaaggtggaggaggtgaaccggcagcagagcgcccagctggagcagctggtgaaggagctgcagctgaaggaggatgcccgggccagcctggagcggctggtgaaggagatggcccccctgcaggaggagctgagcggcaagggccaggaggccgaccagctgtggaggcggctgcaggagctgctggcccacaccagctcctgggaggaggagctggccgagctgcggcgggagaagaagcagcagcaggaggagaaggagctgctggagcaggaggtgcgcagcctgacccggcagctgcagttcctggagacccagctggcccaggtgtcccagcacgtgtctgacctggaggagcagaagaagcagctgatccaggacaaggaccacctgagccagcaggtgggcatgctggagcggctggccggccccccaggccctgagctgcctgtggccggggagaagaatgaggccctggtgcctgtgaacagcagcctgcaggaggcctggggcaagccagaggaggagcagaggggcctgcaggaggcccagctggatgacaccaaggtgcaggagggcagccaggaggaggagctgcggcaggccaaccgggagctggagaaggagctgcagaatgtggtgggcaggaaccagctgctggagggcaagctgcaggccctgcaggccgactaccaggccctgcagcagcgggagagcgccatccagggcagcctggccagcctggaggccgagcaggccagcatccgccacctgggggaccagatggaggccagcctgctggccgtgaggaaggccaaggaggccatgaaggcccagatggccgagaaggaggccatcctgcagagcaaggagggggagtgccagcagctgcgggaggaggtggagcagtgccagcagctggccgaggcccggcaccgggagctgcgggccctggagagccagtgccagcagcagacccagctgattgaggtgctgacagctgagaagggccagcagggcgtgggccccccaacagacaatgaggcccgggagctggccgcccagctggccctgagccaggcccagctggaggtgcaccagggcgaggtgcagaggctgcaggcccaggtggtggacctgcaggccaagatgagagctgccctggatgaccaggacaaggtgcagagccagctgtccatggccgaggccgtgctgcgggagcacaagaccctggtgcagcagctgaaggagcagaatgaggccctgaacagagcccacgtgcaggagctgctgcagtgcagcgagcgggagggcgccctgcaggaggagcgggcagatgaggcccagcagcgggaggaggagctgcgggccctgcaggaggagctgagccaggccaagtgcagcagcgaggaggcccagctggagcacgccgagctgcaggagcagctgcaccgggccaacacagacacagctgagctgggcatccaggtgtgtgccctgactgtggagaaggagcgggtggaggaggccctggcctgtgctgtgcaggagctgcaggatgccaaggaggccgccagccgggagcgggagggcctggagcggcaggtggccggcctgcagcaggagaaggagagcctgcaggagaagctgaaggccgccaaggctgctgctggcagcctgcccggcctgcaggcccagctggcccaggccgagcagagggcccagagcctgcaggaggccgcccaccaggagctgaacaccctgaagttccagctgtctgctgagatcatggactaccagagccggctgaagaatgctggggaggagtgcaagagcctgcggggccagctggaggagcagggccggcagctgcaggccgctgaggaggccgtggagaagctgaaggccacccaggccgacatgggagagaagctgagctgcaccagcaaccacctggccgagtgccaggccgccatgctgaggaaggacaaggagggcgccgccctgcgggaggacctggagaggacccagaaggagctggagaaggccaccaccaagatccaggagtactacaacaagctgtgccaggaggtgaccaaccgggagagaaatgaccagaagatgctggccgacctggatgacctgaacagaaccaagaagtacctggaggagcggctcatcgagctgctgcgggacaaggatgccctgtggcagaagagtgatgccctggagttccagcagaagctgtctgctgaggagcgctggctgggggacacagaggccaaccactgcctggactgcaagcgggagttctcctggatggtgagaagacaccactgccgcatctgtggccgcatcttctgctactactgctgcaacaactacgtgctgagcaagcatggaggcaagaaggagcgctgctgccgggcctgcttccagaagctgtctgagggccctggcagcccagacagcagcggcagcggcaccagccagggcgagcccagccctgccctgagccctgccagccctggcccccaggccactggaggccagggcgccaacacagactaccggcccccagatgatgctgtgtttgacatcatcacagatgaggagctgtgccagatccaggagagcggcagcagcctgcctgagacccccacagaaacagacagcctggaccccaatgctgctgagcaggcctctgtgggcgccagcaagggcctgggcaacctgctgtgtgagagcagcgcctgccgggacaccaccagcaccagcctgaccccagaggacacagaggacatgcctgtgggccaggacagcgagatctgcctgctgaagtctggagagctgatgatcaaggtgcccctgactgtggatgaaattgccagctttggagagggcagccgggagctgtttgtgcgcagcagcacctacagcctcatccccatcaccgtggccgaggccggcctgaccatctcctgggtgttcagcagtgaccccaagagcatctccttctctgtggtgttccaggaggccgaggacacccccctggaccagtgcaaggtgctgatccccaccacccgctgcaacagccacaaggagaacatccagggccagctgaaggtgaggaccccaggcatctacatgctgatctttgacaacaccttcagcagatttgtgtccaagaaggtgttctaccacctgactgtggacaggcctgtgatctatgatggcagtgacttcctgtag

SEQ ID NO: 215468 - DNA, 4437 bp, Artificial Sequence
  derived and/or modified sequence
atggccagcaccaacgccgagagccagctgcagcggatcatccgggacctgcaggacgccgttacagagttgtcaaaggaattccaggaagcgggagagcccattacagatgacagcacatcactccacaagttctcatataagctcgaatatttactgcaatttgaccagaaggagaaagccactttactggggaataaaaaggactattgggactacttctgcgcctgtctggctaaagtgaagggtgcgaacgatggcatccggtttgtaaaatcgattagtgaacttcgcacctccctcggaaaagggcgtgctttcatcaggtattctctcgtgcatcagaggctcgcggatactctccagcagtgcttcatgaacacaaaggttactagtgattggtactacgctagatctcccttcctgcagcctaagctctcatccgatattgtgggccagctctacgaactcacggaagtccaattcgaccttgcttcacgggggtttgacctcgacgcagcttggcccaccttcgccaggagaaccctgaccactggatcatccgcatacctgtggaagcccccatccaggtctagctcaatgtcaagtttggtgagctcatacctgcagacccaggagatggtctcgaacttcgatttgaattccccactgaacaacgaggctcttgaagggtttgacgagatgcgactggaattggaccagttagaagtacgggaaaagcagctgcgagagcgcatgcagcagttggaccgggaaaatcaagaactgagggccgcggttagccagcagggcgagcaactgcaaactgaacgggaacgaggacggacggctgcggaggacaatgtcagactgacgtgcctggtggctgaactccaaaaacaatgggaggtgacacaggctactcaaaacactgtaaaggaactgcagacatgtctccagggtcttgagctaggggcagcggaaaaggaagaggattatcataccgctctaaggagactggaatcgatgctccagccccttgctcaggagcttgaggcaacgcgcgattccttggataaaaaaaaccaacacctggctagtttccctgggtggttagctatggcccagcagaaagccgatactgcatccgacacaaaaggacgccaagagcccattccctctgacgccgcccaagagatgcaggagctcggagagaagttgcaggctctggagcgcgaaaggacaaaagtcgaggaggtcaatagacaacagtctgcccagctggaacagctggtcaaggagttacagctgaaagaagacgctcgggctagtctcgaacggctggttaaagagatggctccccttcaggaggagctctctggcaagggacaggaggcagaccagctgtggcgccgcttgcaggagttattagcacatacctctagctgggaagaagaactcgccgagctgcggagagaaaagaagcaacagcaggaggagaaggagctgctggaacaggaagtacggtcacttacccgccagctgcaatttctcgagacccagctggcacaggtttcacaacacgtgtccgatctggaggaacagaaaaaacagctgattcaggataaggatcacctgtcgcaacaggttgggatgctggaacgcctggccgggccccctggacctgaactgcctgtggcgggagagaagaacgaagctttggtgcccgtcaatagctcactccaggaagcctggggcaagccggaggaggaacaaaggggcttgcaggaggcccaactagatgatactaaggtacaggaggggtcccaagaagaggaattacggcaggccaatcgtgaactggagaaagagctgcagaatgttgttggtcgcaatcaacttctcgaaggtaaactacaggctctgcaggcagactatcaggcgttgcaacagagggagtccgctattcagggctcgctcgctagtttggaagccgagcaggcttccatcaggcatctgggcgatcagatggaggcatcactgctggcagtgcggaaggcaaaggaagctatgaaggctcagatggcagaaaaggaggccatacttcaaagcaaggaaggcgagtgtcaacagctccgcgaggaggttgagcaatgtcagcagctggcagaggcccgacatagggagctgcgcgctctggaaagccagtgccagcagcaaacccaactgattgaagtgctcaccgccgagaaaggccaacagggagtgggcccccctaccgataatgaagcgcgggaacttgctgcacaattggcgctctctcaggcgcaactggaggtccatcagggcgaggtccagcgcttacaggcccaagtggtggaccttcaggctaagatgcgggccgcactcgacgatcaggataaggttcagagccagttgtccatggctgaagcggttttaagagaacacaagacactggtacagcagttgaaagagcagaatgaagcactgaatcgcgcgcacgtgcaggagctcctacagtgttctgaaagggaaggtgcacttcaggaggagcgagccgacgaggcccagcaacgagaggaagaactcagagccctccaagaggagctgagccaggccaaatgctccagtgaggaggctcagctggagcacgccgagctccaggagcagctgcatagggccaacactgatacagccgagctaggtatccaggtgtgtgcccttaccgtagaaaaggagagagtggaagaggccctggcttgcgcggtgcaggaactacaggatgcaaaggaggcggcgtcacgcgagagagagggcctggagaggcaagtggctggcctccaacaagagaaagagtccctccaggaaaaactgaaagccgcgaaggctgcggccgggagtctccctggattgcaagcacaactcgcccaggccgagcagagagcgcagagcctgcaggaggccgcccaccaggaattgaatacactgaagtttcaactgtccgccgagattatggactaccagtctcgcctgaagaatgccggcgaggagtgcaagtcactgcgaggccagttggaagagcagggtcgacagttgcaggcagctgaggaggccgtggagaagctgaaagctacccaagcagacatgggggagaagctttcatgcactagcaatcatctggccgagtgccaggccgccatgctccgcaaggacaaagaaggtgccgccctgagagaggacctcgagcggacacaaaaggagctggaaaaagccaccaccaaaattcaagaatactataataagctgtgccaggaagtgaccaaccgagagcgcaacgatcagaaaatgttggccgacctggacgacctgaacaggactaaaaaatatctcgaagaacgcctgatcgagttgttgcgcgataaggatgctctctggcaaaaatctgatgcactggagtttcagcagaaactcagcgcagaagaacgatggctgggagatactgaagcgaatcattgtctggactgcaaaagagaattcagttggatggtccgcagacatcactgcagaatatgtggccgcatcttctgctattattgttgcaacaattatgtgctctccaagcacggaggcaaaaaagagcgttgttgtagggcctgttttcaaaagctctcagaaggacccggaagtccagatagctctggttccgggacaagtcagggcgagcccagccctgcactgtccccggccagcccagggccgcaggccaccggcggtcagggagcaaataccgattaccggcctcctgatgacgcagttttcgatataataactgatgaggagctgtgccagatccaggagtcagggtcatctctgccagaaacacctaccgagactgacagcctggacccaaatgctgccgaacaagatacaacttcgacaagccttacccccgaggacactgaggacatgcctgttggacaggattcagagatctgtctgctgaaaagtggggagcttatgatcaaagtgcctctcactgttgatgaaattgctagcttcggcgagggctcgagggagttattcgtgaggagcagtacatactctctcatccccatcaccgtggcggaggcggggttaaccatctcttgggtgttctcttctgatcccaaatctatcagcttcagcgtggtgttccaagaggctgaggatacccccctcgaccagtgtaaggtgctcattccaactactcgctgtaactcacacaaggagaacatacaggggcaactgaaagtgcgaactcccgggatctacatgcttatcttcgacaataccttcagcagatttgtgtccaagaaggtgttctaccatctgactgtcgaccgaccagttatttatgacggctccgacttcctttag

SEQ ID NO: 215469 - DNA, 804 bp, Artificial Sequence
  derived and/or modified sequence
tgaagcaagcacggcggcaagaaggagcggtgctgccgggcctgctttcagaagcttagtgagggacctggttccccagacagctctggctccggcacatctcagggagagccatcacccgcactttctccagccagtccaggcccgcaggcaacgggggggcagggcgctaacactgactacaggccacccgatgatgccgtgtttgacatcattactgacgaagagctgtgccaaatacaggaatctggtagttccctcccagagacgcctaccgaaactgattctctggacccaaatgccgctgaacaggatacaaccagcacctctctaacacccgaggataccgaagatatgccggtggggcaggactcggagatctgccttctgaaatccggagaactaatgatcaaggtgccgctcacagtggatgagatcgcgagctttggtgagggatcccgcgagctctttgtgcgtagctccacttactccctgattcccattacagtcgcggaggctggcctgaccatatcttgggtgttttcttccgatccgaaatcgataagcttcagcgtggtgtttcaggaggccgaggacaccccgctggatcagtgcaaagtgctgatacccacaacacgctgcaattcacacaaggagaacattcagggccagctgaaggtccgtaccccaggcatttacatgctgatcttcgacaatacattttcccggttcgtgagcaagaaggttttttatcacctgaccgtggataggcctgtgatttatgacggctcggattttctgtag

SEQ ID NO: 215470 - DNA, 4497 bp, Artificial Sequence
  derived and/or modified sequence
atggccagcaccaacgccgagagccagctgcagcggatcatccgggatctccaggacgcggtcacagagctgtcgaaggagttccaggaagcgggagagccaataacagatgactccacgtctcttcacaagttctcttataagttggagtatctgctgcagttcgatcagaaggagaaggccacactcctcgggaataaaaaagattactgggattatttttgtgcctgtttagccaaagtcaaaggtgctaacgacggtatcagatttgtgaaatcaatctccgagttgagaacttcactcggtaagggacgggcctttatcagatactccctggtccaccagcggctggcagacacacttcagcagtgtttcatgaacacaaaggtgacgagtgattggtactatgccagatctccatttctccagcccaaactgtcttcagacattgttggccagctatatgagctgactgaagtccagttcgacctggctagcaggggctttgatttggatgccgcctggccaacatttgcacgccgcaccttaacaaccgggtcctctgcctacctgtggaagcccccctcaagaagttcctcgatgtcgagtctggtgtcttcctacttacagacccaggaaatggtgagcaatttcgatctaaactcaccactgaataacgaggctctggaaggttttgatgaaatgcgccttgagcttgaccaactcgaagttagggaaaaacaattgagggaacggatgcagcaactggacagggaaaaccaggagttgcgggccgcggtgagccagcagggagagcagctgcagacagaaagggaaagaggaaggactgctgcagaagacaatgtgcgattaacatgcctcgtggctgagctgcagaaacaatgggaggttacacaggccactcagaacacagttaaggagctgcagacgtgcctgcaaggcctggaattgggtgccgccgagaaagaagaggattaccacactgctctaagacggttggaatccatgctccaacctctcgctcaggaacttgaggccaccagggattcactcgacaagaagaaccagcatttggcctccttccctggctggctcgcgatggcccagcaaaaagcagacactgccagtgatactaaaggacggcaagaacccatcccctccgatgccgcacaggagatgcaggaactgggggagaaactacaggctctcgagagggagcgaactaaggtagaggaggtgaatcgccaacaaagcgcccagttagagcaactggtgaaggaactccaactgaaagaggatgcgcgcgcttcgctggagcgcctggtcaaggagatggcccctctgcaagaggagctctccgggaaaggccaggaagccgatcagttgtggcggaggctacaggagctcttggcccacacgtcgtcttgggaggaagaattagccgagctaagaagggagaaaaaacagcaacaagaagaaaaagagctgctagaacaggaggtcagaagcctaaccaggcagctgcagttcctggaaacgcagctcgcccaggtgtctcagcatgtgagcgacctcgaggagcagaagaaacaactcatccaagacaaggatcacttgtctcagcaggtcgggatgctcgagaggctagccggccctcctggacccgagttgcccgtggcaggtgaaaagaatgaggctctggtccctgtgaactcatcccttcaggaggcttggggcaagcctgaggaagaacagcgcgggctacaggaggcacagctggacgacaccaaggttcaggaggggagtcaggaagaagaacttaggcaggcaaatcgtgagttagagaaagagcttcagaacgtcgtgggtcggaaccaactcctggaaggaaaactgcaggcactacaggcagactaccaggccctgcaacagcgtgagtccgcaatccagggcagcctggcgagtctagaagcagaacaggccagtatacggcatttgggggatcagatggaggcctcactgctcgcggtccgaaaggcgaaagaggcgatgaaagcccagatggctgagaaggaagccattctgcagtccaaggagggggaatgtcaacaattgcgcgaagaagtggaacagtgccagcagctggcagaagcccgacatcgtgagctgcgggcactggaatcccagtgccagcagcagacacaactgattgaggtgcttaccgctgaaaagggccagcagggcgtcggtcctcctaccgacaacgaggctcgcgaattggcggctcagctggccctctcgcaggcacagctcgaggtacatcaaggcgaggtacagcggctccaggctcaggttgttgacctacaggccaaaatgcgtgcagcacttgatgatcaggacaaggtgcagtcacaactcagcatggcggaggccgtacttagagaacacaaaactcttgttcagcagctgaaggaacaaaatgaggcattgaacagggcccatgtgcaagagctactgcagtgcagtgagcgggagggagcgctgcaggaagagagggccgatgaggcccagcaacgggaggaagagctgcgggctctccaggaggaactgtcccaggcaaaatgcagcagtgaggaggctcagctcgagcacgccgagttgcaggagcaacttcatcgagcaaacaccgacacggctgaactggggattcaggtgtgtgctcttaccgtagaaaaggaaagggttgaggaagcacttgcatgcgctgtgcaagagctgcaagatgctaaggaggcggcttccagggagcgcgaagggctggaacggcaggtagcaggccttcaacaggaaaaggagtccttacaggaaaagctgaaggcagccaaggctgccgctgggtctctccccggactccaagctcagctggcgcaggccgagcagcgtgcccagagccttcaggaggcagcccaccaggaactcaatacgcttaaatttcagctgtctgccgaaatcatggactatcaaagccgattaaagaatgccggggaagagtgtaagagcctcagagggcagctggaagagcagggccggcagctgcaggccgcagaagaagctgtcgaaaagcttaaagccacgcaggctgatatgggggagaagttgtcatgcacaagcaaccatctggcagaatgccaggccgctatgctccggaaggacaaggaaggcgcagctcttcgcgaggatctcgaacgtacccaaaaagaattagaaaaagcgacaacgaagattcaagagtattacaataaactttgtcaggaggtgactaacagggagcggaacgatcaaaaaatgctggctgacctcgatgacctcaaccgaaccaaaaaataccttgaagaacgtctgatcgaactcttacgcgataaggatgcactttggcagaaaagtgacgcactggagttccagcagaagttgagcgccgaagaaagatggctcggagacacagaagctaatcactgcctcgactgtaaaagagagttctcttggatggtgcgccgtcaccactgtaggatctgtgggcgaatcttctgttactattgttgtaacaactatgtgctgtcgaaacacggaggcaaaaaggagcgttgttgtagagcttgttttcaaaaactgtccgagggccctgggtcacccgatagttcgggcagcgggacaagccaaggagaaccatcaccagcactgtcgcctgcctcaccagggccccaagccaccggaggtcagggggccaacacggattatagaccaccagatgatgcagttttcgatatcattactgacgaggagttgtgtcagatccaagaatccgggtctagcctgcctgagactcctaccgaaactgatagcttagatccaaatgcggccgagcaggccagcgtgggagcttccaagggactgggcaacctgctatgtgaatcctccgcgtgccgtgacaccacaagcacctctttgacccccgaggataccgaggacatgcccgtgggccaggactccgagatctgcctcctaaagagtggtgaacttatgattaaagttccattgaccgtcgatgagattgcaagtttcggtgaaggctcccgtgagctgtttgtccggagttcaacctatagcctgattcctatcaccgtagctgaggcaggactcacaatctcctgggttttttcgagcgaccccaaaagtatctccttcagcgttgtgtttcaggaagccgaggatactcctttagaccagtgcaaggttctgatcccgacaacaagatgcaattctcataaggagaacattcaggggcagctgaaggttagaacacccggcatttacatgttgatattcgacaacaccttctctcgtttcgtgtcaaagaaagtgttctaccatcttacagtagaccgtcccgtcatctacgatggttcagatttcttgtag

SEQ ID NO: 215471 - DNA, 4437 bp, Artificial Sequence
  derived and/or modified sequence
atggcatctacaaacgccgagtcccagttacagcgtataatacgcgacctccaggatgctgtcacggaactctcaaaagagttccaggaggcaggcgagcctattacggatgacagcacgagcctgcataagtttagctataaactggagtatctgctccagttcgaccaaaaagaaaaagccaccttactcggtaacaaaaaagattactgggattacttctgtgcgtgcttagctaaggttaagggtgcaaacgacggcatccggttcgtgaagtcaatttccgaactgcgcacgtcgcttggtaaagggagagcctttatccgatattccctggtgcaccagaggcttgccgatacactccaacagtgcttcatgaacacaaaggtcactagtgactggtattatgctcggagtcctttcctgcagcccaagctttcatctgacatcgtcgggcagctatatgaactgaccgaggtacaatttgatctcgcctcaagagggttcgaccttgatgccgcatggccaacgtttgccagacgcaccctgactacaggctcctcagcttatctttggaagccccctagccgatcatcttcgatgtcttctctggtaagttcttatttacagacccaggagatggtctctaacttcgacctgaacagtccgctgaataacgaagctctggaaggcttcgacgaaatgaggctggagctcgatcagctcgaagtgcgagagaaacaacttagggagcgcatgcagcagctggacagggagaaccaagagctgcgggctgctgtatctcagcagggcgaacagctgcagaccgagcgcgagaggggcagaaccgccgcagaagacaacgttagattaacttgcctcgtggccgaacttcagaagcagtgggaagtcacacaagccacgcagaacacagtgaaagaactacaaacctgcctgcaaggcctcgaactgggagcagccgaaaaggaagaagattaccacacggcacttaggagactcgagtccatgctgcaacccctcgctcaagaacttgaagctacgcgcgattcactcgacaaaaaaaaccagcacctggcgtccttcccgggatggcttgcgatggctcagcaaaaggccgataccgcttccgatactaaaggacgccaagagcccattccttccgatgcagcgcaggaaatgcaggagcttggagaaaagctccaggccctggaacgggagagaacgaaggttgaagaggtgaatcggcagcaatccgcacagctggagcagctggtcaaagaactccaactgaaggaggatgccagagccagtcttgagcgcctggtgaaggagatggcaccattacaagaggaactgtcaggaaaagggcaggaggcagaccagctgtggcggaggctgcaagaactactggcacatacttctagttgggaagaagaattggccgaactgcgacgtgagaaaaagcagcaacaggaagagaaggaacttcttgaacaggaagtgaggtcattaaccaggcaacttcaatttctggagacacagcttgcccaggtaagccagcacgttagcgacctcgaagagcagaagaagcagcttatacaagacaaggaccatctgtcccagcaggtggggatgttggaaagactggcaggtcccccagggcctgaattacccgtggcaggcgaaaagaatgaagccttagtccccgtgaactcaagtctccaggaggcctggggaaaacctgaggaggagcagcgtgggctccaggaggcccagctcgatgacaccaaggtgcaggaaggaagtcaagaggaggaattgaggcaggcaaaccgcgagttagagaaggaactccagaatgtcgtaggtagaaaccaacttctggagggaaaactacaggcactgcaggccgattatcaggctctccagcagcgagagagcgctattcagggcagtttggcctcactggaggccgaacaggcgagcattcgtcatctaggagaccagatggaggcttctctgctggcagtacgcaaagccaaagaggcgatgaaagcacagatggcagagaaggaagccattcttcagagcaaggagggtgagtgccagcagctgagagaggaggtggagcagtgtcagcagctggctgaagcgagacaccgagaactgcgcgctctggagtcacaatgccagcaacagacacaactcatcgaagtcctgactgctgagaagggccaacagggagtgggaccgcctacagataacgaggctcgcgagctggccgctcaactggccctcagccaggctcagcttgaagtgcaccagggggaggtgcagcggctacaagctcaggtggtggatctgcaggccaagatgcgcgcagccttggacgaccaggataaggtacagagccagctgtctatggcggaagcagtgctccgtgaacacaaaacccttgtgcagcagctgaaagaacagaacgaggccttaaaccgcgctcacgtacaggaactgctgcaatgttcagaacgcgagggagcactacaggaagagcgagcagacgaagcccagcaaagggaggaggaactcagagcgcttcaggaggaacttagtcaggctaagtgctctagcgaggaggcacagctggagcatgcggagctgcaagagcagttgcaccgggctaatactgataccgccgaacttggtatccaggtgtgcgcactgacagttgaaaaagaaagggtggaagaggccctggcctgtgccgtgcaggagttgcaagatgctaaagaagctgcgtctagggaaagagaaggcctcgaacggcaggtggcaggcctccagcaggagaaggagtctcttcaagaaaagctcaaggccgctaaagctgctgccggttcccttcctggtctacaggcccagcttgcccaggcagaacagcgagcccaatccttgcaggaggctgcccatcaagagctaaacactctcaagttccagctttcggccgaaatcatggactatcagtctcgactgaaaaacgcgggagaagagtgcaagtccctgcgagggcagttggaggaacaggggaggcagcttcaggccgctgaggaggctgtcgagaaactgaaggccactcaagccgacatgggggagaaactttcctgcacctccaatcacctggccgagtgtcaggcagccatgctgaggaaagacaaggagggtgctgcactaagagaggatctcgagcggactcagaaagagcttgagaaagccaccactaaaatccaggagtattacaataagctgtgccaggaggtgaccaaccgggagcgcaatgaccagaaaatgctggccgatctggatgacctgaatagaacaaaaaagtatcttgaagagaggttaattgaattactgcgggataaagatgccttatggcagaagtccgacgctttagagttccaacaaaagctaagcgccgaagagcgttggctgggcgataccgaggcaaaccattgtttagattgtaagcgggaattttcatggatggtgcgacggcatcattgccgaatctgcggtagaatcttctgttattattgctgtaacaactacgtcctcagtaagcacggcggtaagaaggaacggtgttgcagagcttgttttcaaaaactgtccgagggtccgggatcacctgactcctccggctcggggaccagtcagggtgagccatcccctgccctgtcccccgctagccctggaccacaagctaccggtggacaaggggcaaacaccgattataggccacctgacgatgcagtattcgatattatcaccgatgaagagctctgccaaatccaggagtctggatctagtttgcccgaaactcctactgaaaccgattcacttgatccaaatgccgcagagcaagacactacatctacaagcctgaccccagaggacacagaggatatgcccgttgggcaggacagtgagatttgcctcttaaaatccggtgagctcatgatcaaggtgcccttaacagttgacgagatcgcctcgttcggtgagggatctcgggagctcttcgtcaggtcaagcacctactcactgatccctatcacagttgcagaggctggtctcacaatcagttgggtgttctctagtgatcctaagtctatcagtttcagtgtggtgtttcaggaagcagaagacacacccctagatcaatgcaaggtgcttataccaacgactcggtgcaacagtcacaaagaaaacatccaggggcagttaaaggttcggactccaggcatttatatgctgatcttcgacaataccttcagccggtttgtttctaagaaggtcttctatcatcttacagtagatcgaccagttatctacgacggcagcgacttcctgtag

SEQ ID NO: 215472 - DNA, 804 bp, Artificial Sequence
  derived and/or modified sequence
tgatccaagcacggtggcaagaaggagcgttgttgtcgcgcttgttttcagaaactgtccgagggccctggatcacccgactcatctgggagtggcacatcccaaggagagccatctccggctttgagcccagcaagccccggacctcaggctaccgggggacaaggagcgaacaccgattatcggccaccagacgacgccgtttttgacatcatcacagacgaggagttgtgccaaattcaagaatccggctcctcattaccagagacacccactgaaacagattcgcttgacccgaacgccgcagagcaggacaccacatctacaagtctgacaccggaagacaccgaggatatgccggtgggtcaagattctgaaatttgtctccttaaaagtggtgagttgatgataaaggtacccttgactgtagacgagatcgctagctttggcgagggctcccgtgaactttttgttcggagctctacttattccctcattcctatcactgttgccgaagcaggccttaccatcagttgggtttttagcagtgaccctaagagcatttcctttagtgttgtcttccaagaggcagaggacacccccttggaccagtgtaaggttctgattcccacaacgcgttgtaactcacataaggaaaatatacagggccagctgaaggtaaggacacccggtatctatatgttaattttcgacaataccttctcccgcttcgtcagcaagaaggtcttctaccatctgaccgttgaccgcccagtgatctatgatggctcagacttcctgtag

SEQ ID NO: 215473 - DNA, 4497 bp, Artificial Sequence
  derived and/or modified sequence
atggccagtacaaacgctgagtcccagctacagcggattattcgcgaccttcaggacgccgttactgagctttcaaaagaatttcaggaggccggagaacccatcaccgatgattcaacctccttacacaagttttcctacaaactggagtatttactccagttcgaccagaaggagaaagccaccctattgggtaataagaaggactactgggactacttctgtgcctgcctagctaaagtgaagggagccaacgatggcatcagattcgtcaaaagcatttctgagcttaggacctccttggggaaaggaagggccttcataagatactctctagtgcaccagcgtctggcagacacgcttcaacagtgtttcatgaacaccaaggtgacttcagactggtactatgcgagatccccatttctccagccgaagctatcatccgacatcgtggggcaattgtacgagcttacagaggtgcaattcgacctggcctctcgcggattcgacctggacgctgcatggcctacttttgcccgaagaactttgaccacaggttcgtctgcatacttgtggaagccgccatcaagatcctccagcatgtcatctctggtgtcaagttatctgcagacacaggaaatggtgtcaaatttcgacttgaattcaccattgaataatgaagcgcttgagggctttgacgaaatgcgactggaacttgaccagctcgaggtcagggagaagcagttgcgggagagaatgcagcagcttgatagggaaaatcaagagctgagagccgctgtgagtcagcagggcgaacagctgcaaactgaacgcgaacgcggtcgaacagctgcagaggacaatgtacgacttacctgtttggtggcagagttacaaaagcagtgggaagtcacacaggccactcagaatactgtgaaagaactgcagacgtgcctccagggccttgagctgggagcagccgaaaaagaggaggactaccatactgccctgcgccgactggaatcaatgctgcagcccttggcacaagaacttgaagctacaagggattcactggataagaaaaaccagcacctggcttcatttcctggctggctcgctatggcccaacaaaaagccgacaccgcctcagatacgaagggtcgacaggaacccatcccttccgatgcagcccaagagatgcaggagttaggagaaaaactgcaagccctagagagagagcgaactaaggtcgaagaggtgaaccgccagcaatccgcacagttggagcaactggtaaaagaactgcagctcaaggaggacgccagagccagcctggagcgcttagttaaagagatggctcccctgcaggaggagcttagcggtaaggggcaagaagctgatcagctctggcgacggttgcaggagttgctggcccacactagctcctgggaggaagaacttgccgagctgcgtcgcgagaaaaagcagcagcaagaggagaaagaactgctcgagcaggaagtgcgcagcctgacacggcagctccagttccttgaaactcaacttgctcaggtgagtcagcacgtgagcgatctcgaggagcagaagaaacagctgattcaggacaaagaccacttatcccaacaggtaggcatgctggaacgcctggcgggacccccaggaccagaactccctgtggcaggagaaaaaaacgaagcgttagtgcccgtcaattcatccctgcaagaggcttggggtaaacccgaggaagaacaacgcggtctccaggaggcccagctggatgatacaaaggtccaagagggcagtcaggaagaagaactcagacaggcaaacagagagctcgaaaaggagctccaaaacgtggtgggtcgcaaccagctgctggagggcaaactccaggctctgcaggcagattaccaggccctccaacaacgcgaatccgccattcaaggtagcctggcaagcttggaggccgagcaggcctccatcaggcacttaggcgatcaaatggaagcatcactcttggcagttaggaaagcgaaagaggcaatgaaagctcaaatggcggaaaaagaagcgatcctgcaatcaaaagagggggaatgccagcagctgagggaagaggtcgagcagtgtcagcagctagctgaggcgaggcacagggagctgcgagcattggagagtcaatgtcaacaacaaacacaactcattgaagtcctgaccgccgagaaggggcagcaaggagtcggcccaccgacggataacgaagcgagagagcttgctgctcagctggccctgtcacaggcccagttggaggtgcatcagggcgaggttcagcgcctgcaggcacaagtagtggacttgcaggcaaagatgagggcagcgctggacgaccaggacaaagttcagtcccaactgagcatggctgaggcggttctgagagagcataaaacactcgttcagcagctcaaggagcagaacgaggccctcaaccgtgcccacgttcaggagcttttacagtgctccgagagggagggagcccttcaagaagagagggccgatgaggcccagcagagggaggaggagctgagagcactgcaggaggaactcagccaggccaaatgctcaagcgaagaagcccagttagaacacgccgaacttcaggaacagttacaccgcgctaatacagatacagccgagttaggaattcaggtgtgcgccctaactgttgaaaaggaaagggtggaagaggcactagcatgtgctgtccaggagttgcaggatgccaaagaggccgcttctagggagcgagaagggctggagcgacaggtggcagggctgcaacaggagaaagagtctttgcaagagaagctgaaggccgcaaaagctgctgcagggagcctgcctgggctccaggcacagctggctcaggctgaacaaagggcccagtctcttcaggaagcagcccatcaggaactgaataccttgaagttccagctctccgccgaaattatggactatcagagcaggttaaagaatgccggagaggagtgtaagtcattgagaggtcagttagaggaacagggcaggcagctccaggctgccgaagaagcggtcgaaaagctgaaggccacgcaggccgatatgggtgagaaactttcatgcacctctaaccacttggcggagtgccaagccgctatgctgaggaaggataaagaaggtgctgcgctgagggaagacctggagagaacacagaaggaactggagaaagcaacaacaaagattcaagagtattacaataaactatgtcaggaggtgaccaatagagagagaaacgaccagaagatgctagccgatttggatgatcttaacaggaccaagaagtacttagaagaaaggctaatcgagctgctacgcgacaaagacgctctctggcagaagtcagacgccctggaatttcagcagaagctaagcgccgaagaaaggtggctgggcgatactgaggctaaccattgccttgactgtaagcgtgaattcagttggatggtgcgcagacaccactgtcggatctgcggccgtatcttttgttactactgctgcaataactacgtgttgagtaaacacggaggaaagaaggaaaggtgttgccgcgcttgtttccagaagctgtcagaagggcctggctcccccgactctagcgggtccggcacttcccagggggagccaagccccgcactctcgcccgcttctccaggccctcaggccacaggagggcagggagcgaacaccgattatcgacccccagacgacgccgtcttcgatattataactgatgaagagctttgtcaaattcaggaaagcggttccagcctgccagagacccctacagagactgattcactcgatcctaatgctgctgaacaggcctccgtcggcgctagtaagggacttggaaacctactgtgcgaaagctcagcgtgccgagacaccacaagcacatccctaaccccagaggataccgaggatatgccggtgggccaagacagcgagatatgcctccttaagagcggggaattaatgattaaagtgccgctcaccgtggacgaaatcgcgagttttggagagggtagtagagagttgttcgttcgttcctctacttattccctcattcccattacagtcgccgaggcgggtctgaccatctcttgggttttttcaagcgatccaaagagcatttccttttccgttgtgttccaggaagcagaagacactcctcttgaccagtgtaaagtgctcattccaacaacgaggtgtaactcacataaagagaacattcagggtcaacttaaggttcggaccccaggaatatacatgcttatctttgacaatacatttagcagattcgttagcaagaaggtgttctatcacctcacggtggacagaccagtgatttatgacggctccgatttcctgtag

SEQ ID NO: 215474 - DNA, 4437 bp, Artificial Sequence
  derived and/or modified sequence
atggccagcaccaacgccgagagccagctgcagagaatcatcagagacctgcaggacgccgtgaccgagctgagcaaggagttccaggaggccggcgagcccatcaccgacgacagcaccagcctgcacaagttcagctacaagctggagtacctgctgcagttcgaccagaaggagaaggccaccctgctgggcaacaagaaggactactgggactacttctgcgcctgcctggccaaggtgaagggcgccaacgacggcatcagattcgtgaagagcatcagcgagctgagaaccagcctgggcaagggcagagccttcatcagatacagcctggtgcaccagagactggccgacaccctgcagcagtgcttcatgaacaccaaggtgaccagcgactggtactacgccagaagccccttcctgcagcccaagctgagcagcgacatcgtgggccagctgtacgagctgaccgaggtgcagttcgacctggccagcagaggcttcgacctggacgccgcctggcccaccttcgccagaagaaccctgaccaccggcagcagcgcctacctgtggaagccccccagcagaagcagcagcatgagcagcctggtgagcagctacctgcagacccaggagatggtgagcaacttcgacctgaacagccccctgaacaacgaggccctggagggcttcgacgagatgagactggagctggaccagctggaggtgagagagaagcagctgagagagagaatgcagcagctggacagagagaaccaggagctgagagccgccgtgagccagcagggcgagcagctgcagaccgagagagagagaggcagaaccgccgccgaggacaacgtgagactgacctgcctggtggccgagctgcagaagcagtgggaggtgacccaggccacccagaacaccgtgaaggagctgcagacctgcctgcagggcctggagctgggcgccgccgagaaggaggaggactaccacaccgccctgagaagactggagagcatgctgcagcccctggcccaggagctggaggccaccagagacagcctggacaagaagaaccagcacctggccagcttccccggctggctggccatggcccagcagaaggccgacaccgccagcgacaccaagggcagacaggagcccatccccagcgacgccgcccaggagatgcaggagctgggcgagaagctgcaggccctggagagagagagaaccaaggtggaggaggtgaacagacagcagagcgcccagctggagcagctggtgaaggagctgcagctgaaggaggacgccagagccagcctggagagactggtgaaggagatggcccccctgcaggaggagctgagcggcaagggccaggaggccgaccagctgtggagaagactgcaggagctgctggcccacaccagcagctgggaggaggagctggccgagctgagaagagagaagaagcagcagcaggaggagaaggagctgctggagcaggaggtgagaagcctgaccagacagctgcagttcctggagacccagctggcccaggtgagccagcacgtgagcgacctggaggagcagaagaagcagctgatccaggacaaggaccacctgagccagcaggtgggcatgctggagagactggccggcccccccggccccgagctgcccgtggccggcgagaagaacgaggccctggtgcccgtgaacagcagcctgcaggaggcctggggcaagcccgaggaggagcagagaggcctgcaggaggcccagctggacgacaccaaggtgcaggagggcagccaggaggaggagctgagacaggccaacagagagctggagaaggagctgcagaacgtggtgggcagaaaccagctgctggagggcaagctgcaggccctgcaggccgactaccaggccctgcagcagagagagagcgccatccagggcagcctggccagcctggaggccgagcaggccagcatcagacacctgggcgaccagatggaggccagcctgctggccgtgagaaaggccaaggaggccatgaaggcccagatggccgagaaggaggccatcctgcagagcaaggagggcgagtgccagcagctgagagaggaggtggagcagtgccagcagctggccgaggccagacacagagagctgagagccctggagagccagtgccagcagcagacccagctgatcgaggtgctgaccgccgagaagggccagcagggcgtgggcccccccaccgacaacgaggccagagagctggccgcccagctggccctgagccaggcccagctggaggtgcaccagggcgaggtgcagagactgcaggcccaggtggtggacctgcaggccaagatgagagccgccctggacgaccaggacaaggtgcagagccagctgagcatggccgaggccgtgctgagagagcacaagaccctggtgcagcagctgaaggagcagaacgaggccctgaacagagcccacgtgcaggagctgctgcagtgcagcgagagagagggcgccctgcaggaggagagagccgacgaggcccagcagagagaggaggagctgagagccctgcaggaggagctgagccaggccaagtgcagcagcgaggaggcccagctggagcacgccgagctgcaggagcagctgcacagagccaacaccgacaccgccgagctgggcatccaggtgtgcgccctgaccgtggagaaggagagagtggaggaggccctggcctgcgccgtgcaggagctgcaggacgccaaggaggccgccagcagagagagagagggcctggagagacaggtggccggcctgcagcaggagaaggagagcctgcaggagaagctgaaggccgccaaggccgccgccggcagcctgcccggcctgcaggcccagctggcccaggccgagcagagagcccagagcctgcaggaggccgcccaccaggagctgaacaccctgaagttccagctgagcgccgagatcatggactaccagagcagactgaagaacgccggcgaggagtgcaagagcctgagaggccagctggaggagcagggcagacagctgcaggccgccgaggaggccgtggagaagctgaaggccacccaggccgacatgggcgagaagctgagctgcaccagcaaccacctggccgagtgccaggccgccatgctgagaaaggacaaggagggcgccgccctgagagaggacctggagagaacccagaaggagctggagaaggccaccaccaagatccaggagtactacaacaagctgtgccaggaggtgaccaacagagagagaaacgaccagaagatgctggccgacctggacgacctgaacagaaccaagaagtacctggaggagagactgatcgagctgctgagagacaaggacgccctgtggcagaagagcgacgccctggagttccagcagaagctgagcgccgaggagagatggctgggcgacaccgaggccaaccactgcctggactgcaagagagagttcagctggatggtgagaagacaccactgcagaatctgcggcagaatcttctgctactactgctgcaacaactacgtgctgagcaagcacggcggcaagaaggagagatgctgcagagcctgcttccagaagctgagcgagggccccggcagccccgacagcagcggcagcggcaccagccagggcgagcccagccccgccctgagccccgccagccccggcccccaggccaccggcggccagggcgccaacaccgactacagaccccccgacgacgccgtgttcgacatcatcaccgacgaggagctgtgccagatccaggagagcggcagcagcctgcccgagacccccaccgagaccgacagcctggaccccaacgccgccgagcaggacaccaccagcaccagcctgacccccgaggacaccgaggacatgcccgtgggccaggacagcgagatctgcctgctgaagagcggcgagctgatgatcaaggtgcccctgaccgtggacgagatcgccagcttcggcgagggcagcagagagctgttcgtgagaagcagcacctacagcctgatccccatcaccgtggccgaggccggcctgaccatcagctgggtgttcagcagcgaccccaagagcatcagcttcagcgtggtgttccaggaggccgaggacacccccctggaccagtgcaaggtgctgatccccaccaccagatgcaacagccacaaggagaacatccagggccagctgaaggtgagaacccccggcatctacatgctgatcttcgacaacaccttcagcagattcgtgagcaagaaggtgttctaccacctgaccgtggacagacccgtgatctacgacggcagcgacttcctgtag

SEQ ID NO: 215475 - DNA, 804 bp, Artificial Sequence
  derived and/or modified sequence
tgaagcaagcacggcggcaagaaggagagatgctgcagagcctgcttccagaagctgagcgagggccccggcagccccgacagcagcggcagcggcaccagccagggcgagcccagccccgccctgagccccgccagccccggcccccaggccaccggcggccagggcgccaacaccgactacagaccccccgacgacgccgtgttcgacatcatcaccgacgaggagctgtgccagatccaggagagcggcagcagcctgcccgagacccccaccgagaccgacagcctggaccccaacgccgccgagcaggacaccaccagcaccagcctgacccccgaggacaccgaggacatgcccgtgggccaggacagcgagatctgcctgctgaagagcggcgagctgatgatcaaggtgcccctgaccgtggacgagatcgccagcttcggcgagggcagcagagagctgttcgtgagaagcagcacctacagcctgatccccatcaccgtggccgaggccggcctgaccatcagctgggtgttcagcagcgaccccaagagcatcagcttcagcgtggtgttccaggaggccgaggacacccccctggaccagtgcaaggtgctgatccccaccaccagatgcaacagccacaaggagaacatccagggccagctgaaggtgagaacccccggcatctacatgctgatcttcgacaacaccttcagcagattcgtgagcaagaaggtgttctaccacctgaccgtggacagacccgtgatctacgacggcagcgacttcctgtag

SEQ ID NO: 215476 - DNA, 4497 bp, Artificial Sequence
  derived and/or modified sequence
atggccagcaccaacgccgagagccagctgcagagaatcatcagagacctgcaggacgccgtgaccgagctgagcaaggagttccaggaggccggcgagcccatcaccgacgacagcaccagcctgcacaagttcagctacaagctggagtacctgctgcagttcgaccagaaggagaaggccaccctgctgggcaacaagaaggactactgggactacttctgcgcctgcctggccaaggtgaagggcgccaacgacggcatcagattcgtgaagagcatcagcgagctgagaaccagcctgggcaagggcagagccttcatcagatacagcctggtgcaccagagactggccgacaccctgcagcagtgcttcatgaacaccaaggtgaccagcgactggtactacgccagaagccccttcctgcagcccaagctgagcagcgacatcgtgggccagctgtacgagctgaccgaggtgcagttcgacctggccagcagaggcttcgacctggacgccgcctggcccaccttcgccagaagaaccctgaccaccggcagcagcgcctacctgtggaagccccccagcagaagcagcagcatgagcagcctggtgagcagctacctgcagacccaggagatggtgagcaacttcgacctgaacagccccctgaacaacgaggccctggagggcttcgacgagatgagactggagctggaccagctggaggtgagagagaagcagctgagagagagaatgcagcagctggacagagagaaccaggagctgagagccgccgtgagccagcagggcgagcagctgcagaccgagagagagagaggcagaaccgccgccgaggacaacgtgagactgacctgcctggtggccgagctgcagaagcagtgggaggtgacccaggccacccagaacaccgtgaaggagctgcagacctgcctgcagggcctggagctgggcgccgccgagaaggaggaggactaccacaccgccctgagaagactggagagcatgctgcagcccctggcccaggagctggaggccaccagagacagcctggacaagaagaaccagcacctggccagcttccccggctggctggccatggcccagcagaaggccgacaccgccagcgacaccaagggcagacaggagcccatccccagcgacgccgcccaggagatgcaggagctgggcgagaagctgcaggccctggagagagagagaaccaaggtggaggaggtgaacagacagcagagcgcccagctggagcagctggtgaaggagctgcagctgaaggaggacgccagagccagcctggagagactggtgaaggagatggcccccctgcaggaggagctgagcggcaagggccaggaggccgaccagctgtggagaagactgcaggagctgctggcccacaccagcagctgggaggaggagctggccgagctgagaagagagaagaagcagcagcaggaggagaaggagctgctggagcaggaggtgagaagcctgaccagacagctgcagttcctggagacccagctggcccaggtgagccagcacgtgagcgacctggaggagcagaagaagcagctgatccaggacaaggaccacctgagccagcaggtgggcatgctggagagactggccggcccccccggccccgagctgcccgtggccggcgagaagaacgaggccctggtgcccgtgaacagcagcctgcaggaggcctggggcaagcccgaggaggagcagagaggcctgcaggaggcccagctggacgacaccaaggtgcaggagggcagccaggaggaggagctgagacaggccaacagagagctggagaaggagctgcagaacgtggtgggcagaaaccagctgctggagggcaagctgcaggccctgcaggccgactaccaggccctgcagcagagagagagcgccatccagggcagcctggccagcctggaggccgagcaggccagcatcagacacctgggcgaccagatggaggccagcctgctggccgtgagaaaggccaaggaggccatgaaggcccagatggccgagaaggaggccatcctgcagagcaaggagggcgagtgccagcagctgagagaggaggtggagcagtgccagcagctggccgaggccagacacagagagctgagagccctggagagccagtgccagcagcagacccagctgatcgaggtgctgaccgccgagaagggccagcagggcgtgggcccccccaccgacaacgaggccagagagctggccgcccagctggccctgagccaggcccagctggaggtgcaccagggcgaggtgcagagactgcaggcccaggtggtggacctgcaggccaagatgagagccgccctggacgaccaggacaaggtgcagagccagctgagcatggccgaggccgtgctgagagagcacaagaccctggtgcagcagctgaaggagcagaacgaggccctgaacagagcccacgtgcaggagctgctgcagtgcagcgagagagagggcgccctgcaggaggagagagccgacgaggcccagcagagagaggaggagctgagagccctgcaggaggagctgagccaggccaagtgcagcagcgaggaggcccagctggagcacgccgagctgcaggagcagctgcacagagccaacaccgacaccgccgagctgggcatccaggtgtgcgccctgaccgtggagaaggagagagtggaggaggccctggcctgcgccgtgcaggagctgcaggacgccaaggaggccgccagcagagagagagagggcctggagagacaggtggccggcctgcagcaggagaaggagagcctgcaggagaagctgaaggccgccaaggccgccgccggcagcctgcccggcctgcaggcccagctggcccaggccgagcagagagcccagagcctgcaggaggccgcccaccaggagctgaacaccctgaagttccagctgagcgccgagatcatggactaccagagcagactgaagaacgccggcgaggagtgcaagagcctgagaggccagctggaggagcagggcagacagctgcaggccgccgaggaggccgtggagaagctgaaggccacccaggccgacatgggcgagaagctgagctgcaccagcaaccacctggccgagtgccaggccgccatgctgagaaaggacaaggagggcgccgccctgagagaggacctggagagaacccagaaggagctggagaaggccaccaccaagatccaggagtactacaacaagctgtgccaggaggtgaccaacagagagagaaacgaccagaagatgctggccgacctggacgacctgaacagaaccaagaagtacctggaggagagactgatcgagctgctgagagacaaggacgccctgtggcagaagagcgacgccctggagttccagcagaagctgagcgccgaggagagatggctgggcgacaccgaggccaaccactgcctggactgcaagagagagttcagctggatggtgagaagacaccactgcagaatctgcggcagaatcttctgctactactgctgcaacaactacgtgctgagcaagcacggcggcaagaaggagagatgctgcagagcctgcttccagaagctgagcgagggccccggcagccccgacagcagcggcagcggcaccagccagggcgagcccagccccgccctgagccccgccagccccggcccccaggccaccggcggccagggcgccaacaccgactacagaccccccgacgacgccgtgttcgacatcatcaccgacgaggagctgtgccagatccaggagagcggcagcagcctgcccgagacccccaccgagaccgacagcctggaccccaacgccgccgagcaggccagcgtgggcgccagcaagggcctgggcaacctgctgtgcgagagcagcgcctgcagagacaccaccagcaccagcctgacccccgaggacaccgaggacatgcccgtgggccaggacagcgagatctgcctgctgaagagcggcgagctgatgatcaaggtgcccctgaccgtggacgagatcgccagcttcggcgagggcagcagagagctgttcgtgagaagcagcacctacagcctgatccccatcaccgtggccgaggccggcctgaccatcagctgggtgttcagcagcgaccccaagagcatcagcttcagcgtggtgttccaggaggccgaggacacccccctggaccagtgcaaggtgctgatccccaccaccagatgcaacagccacaaggagaacatccagggccagctgaaggtgagaacccccggcatctacatgctgatcttcgacaacaccttcagcagattcgtgagcaagaaggtgttctaccacctgaccgtggacagacccgtgatctacgacggcagcgacttcctgtag

SEQ ID NO: 215477 - protein, 501 aa, Artificial Sequence
  derived and/or modified sequence
MWKLWRAEEGAAALGGALFLLLFALGVRQLLKQRRPMGFPPGPPGLPFIGNIYSLAASSELPHVYMRKQSQVYGEIFSLDLGGISTVVLNGYDVVKECLVHQSEIFADRPCLPLFMKMTKMGGLLNSRYGRGWVDHRRLAVNSFRYFGYGQKSFESKILEETKFFNDAIETYKGRPFDFKQLITNAVSNITNLIIFGERFTYEDTDFQHMIELFSENVELAASASVFLYNAFPWIGILPFGKHQQLFRNAAVVYDFLSRLIEKASVNRKPQLPQHFVDAYLDEMDQGKNDPSSTFSKENLIFSVGELIIAGTETTTNVLRWAILFMALYPNIQGQVQKEIDLIMGPNGKPSWDDKCKMPYTEAVLHEVLRFCNIVPLGIFHATSEDAVVRGYSIPKGTTVITNLYSVHFDEKYWRDPEVFHPERFLDSSGYFAKKEALVPFSLGRRHCLGEHLARMEMFLFFTALLQRFHLHFPHELVPDLKPRLGMTLQPQPYLICAERR

SEQ ID NO: 215478 - DNA, 1506 bp, Artificial Sequence
  derived and/or modified sequence
atgtggaaactctggagagccgaggaaggggccgctgccctgggcggcgcattgttcctccttttgtttgccctcggtgttcgacagttactgaagcaaaggaggcctatggggttccctccaggccctcctgggttaccctttatcggaaacatttactccctggctgcaagttccgagctgccccatgtctacatgcggaagcagtcacaagtctacggagagatcttttccttggatctcggagggatcagcaccgtggtactgaacggatatgatgtggttaaagagtgtctggtccaccaatcagaaatcttcgctgatcgcccatgcctcccgctgttcatgaagatgaccaagatgggcggcctcttgaactctaggtacgggcgtggttgggtggaccaccggagactggccgtgaacagtttccggtacttcggctacggacagaaatccttcgagtccaagattctcgaggaaacaaaatttttcaatgacgccattgaaacatacaaaggccgacccttcgacttcaagcaactaatcacgaatgctgtgtctaacataacgaacttaatcatttttggtgaacgcttcacctatgaagacactgattttcaacacatgattgagttgttcagtgaaaacgttgagctcgcagcaagcgcttccgtgtttctgtacaatgcctttccttggatcggtattctcccgttcggaaagcatcaacagctctttcgtaatgcagccgtagtctacgattttctgtcacgactgattgagaaggcgtccgttaacagaaaaccccagttaccacagcattttgttgacgcctatttagacgagatggatcagggaaagaatgacccttcatcaacattttcaaaagagaatctgatattcagcgtgggggagctgatcattgctggaaccgaaacaacaactaatgttctaagatgggcaattctgtttatggcactgtacccgaacatccagggacaggtccaaaaggagatagatcttattatgggcccgaatggaaaaccctcctgggacgacaagtgcaagatgccttacacagaggcagtgctgcacgaggtcctgcggttctgtaatattgtgccccttggtatttttcacgccacaagtgaggacgcagtcgtacgcggctattcaattcccaaaggcactaccgtgattactaacctgtattctgtccatttcgatgagaagtactggagagatcctgaggttttccacccggagaggtttttggattcttccgggtactttgccaagaaagaggccctggtgccttttagcttgggtcgtaggcactgtctcggggagcacttggctagaatggagatgttccttttctttaccgccctcctgcagcggtttcacctgcacttccctcatgaactcgtgcctgacctcaagccccgcctcgggatgacactgcagcctcaaccctacttaatttgtgcggaacgccgctag

SEQ ID NO: 215479 - DNA, 1506 bp, Artificial Sequence
  derived and/or modified sequence
atgtggaagctgtggagggctgaggagggcgccgccgccctgggcggggccctcttcctgctgctgtttgccctgggcgtgcggcagctgctgaagcagaggcggcccatgggcttccccccaggccccccaggcctgcccttcatcggcaacatctacagcctggccgccagcagcgagctgccccacgtgtacatgaggaagcagagccaggtgtatggagagatcttcagcctggacctgggcggcatcagcacagtggtgctgaatggctatgatgtggtgaaggaatgtctggtgcaccagagcgagatctttgctgaccggccctgcctgcccctcttcatgaagatgaccaagatgggcggcctgctgaacagccgctatggccggggctgggtggaccaccggcggctggccgtgaacagcttccgctacttcggctacggccagaagagctttgagagcaagatcctggaggagaccaagttcttcaatgatgccatcgagacctacaagggccggccctttgacttcaagcagctgatcaccaatgctgtgagcaacatcaccaacctgatcatctttggagagcgcttcacctatgaggacacagacttccagcacatgattgagctgttctctgaaaatgtggagctggccgccagcgcctctgtgttcctgtacaatgccttcccctggattggcatcctgccctttgggaagcaccagcagctgttcagaaatgctgctgtggtgtatgacttcctgagccggctgattgagaaggcctctgtgaacaggaagccccagctgccccagcactttgtggatgcctacctggatgagatggaccagggcaagaatgaccccagcagcaccttcagcaaggagaacctgatcttctctgtgggggagctgatcatcgccggcacagagaccaccaccaacgtgctgcgctgggccatcctcttcatggccctgtaccccaacatccagggccaggtgcagaaggagattgacctgatcatgggccccaacgggaagcccagctgggatgacaagtgcaagatgccctacacagaagctgtgctgcacgaggtgctgcgcttctgcaacatcgtgcccctgggcatcttccacgccaccagtgaagatgctgtggtgcggggctacagcatccccaagggcaccaccgtcatcaccaacctgtacagcgtgcactttgatgagaagtactggagggaccctgaggtgttccaccctgagcgcttcctggacagcagcggctactttgccaagaaggaggccctggtgcccttcagcctgggcagaagacactgcctgggggagcacctggccaggatggagatgttcctgttcttcaccgccctgctgcagcgcttccacctgcacttcccccatgagctggtgcctgacctgaagccccggctgggcatgaccctgcagccccagccctacctgatctgtgccgagaggaggtag

SEQ ID NO: 215480 - DNA, 1506 bp, Artificial Sequence
  derived and/or modified sequence
atgtggaagctgtggcgggccgaggagggcgccgccgccctgggcggtgcgctttttctgctgttattcgccctgggggtacggcaattgttgaaacagcggaggcctatgggcttccccccaggcccacccggactcccatttattggcaatatctattctttggccgcatccagtgagctccctcacgtgtatatgaggaaacagagccaagtctacggcgaaatctttagtttagatctgggtggcattagcaccgttgtgctcaatggatacgatgtggtcaaagaatgcctggtgcaccagagcgagatttttgcagatagaccttgcctacccctatttatgaaaatgaccaagatgggaggtctgcttaacagccggtacggacggggatgggtagaccacagaaggctcgctgtgaatagttttaggtatttcggatatggtcaaaaatcttttgaatctaaaatcctggaggaaaccaagtttttcaatgatgccattgagacctataaaggtcggccctttgattttaagcagctgataacgaacgccgtaagtaacattaccaacctgatcatctttggagaacgctttacttatgaggacactgatttccaacacatgattgagttgttcagcgagaatgtggagcttgccgcatccgcgtccgtctttctgtataatgcattcccttggattggcattttacctttcgggaagcaccagcagctgttcagaaatgccgccgttgtctatgacttcttgtctagactgatagagaaagccagcgtgaatcggaagcctcagcttccgcaacacttcgttgatgcctatttagatgagatggatcagggcaagaacgacccgtcatctaccttttctaaggagaatctcattttttctgtcggtgaattaattatagctggaaccgaaacaacaactaatgtgctgagatgggccatattgttcatggcactctaccccaacatccaggggcaggtgcagaaagagatcgaccttatcatgggaccaaatggaaaaccatcctgggatgacaagtgcaaaatgccatacaccgaagcagtgctccatgaagtcctgcggttttgcaatattgtcccgctgggcatcttccacgctaccagcgaggatgctgtggttaggggctactccattcctaagggaacgacggtgatcacaaatctctacagtgtgcatttcgatgaaaagtactggcgtgatcctgaagttttccatccagaacgctttcttgactctagcggatactttgccaaaaaagaggccttggtcccattctctctcggccgtagacactgtcttggggaacaccttgccagaatggagatgttcctgttctttactgcccttctgcagaggttccatctgcactttccacatgaactggtgcccgatcttaaaccccggcttgggatgactctccagccccagccctacctgatttgtgccgagcgtagatag

SEQ ID NO: 215481 - DNA, 1506 bp, Artificial Sequence
  derived and/or modified sequence
atgtggaagctttggcgtgccgaagaaggggctgccgctctcggcggtgcccttttcctgctcctctttgctctgggagtaagacagttgttaaaacaacgaagacccatggggttcccacctggacccccaggactgccatttattgggaatatatactccctggctgcgtcttcagaactgccacacgtttatatgaggaaacagtcacaggtatacggggagatcttttccttagacctggggggtatctctacagtggttctgaatggctacgacgtggtgaaagaatgtctggtacaccagtccgagatatttgccgaccggccatgtctgcctctcttcatgaagatgacgaagatgggtgggcttctcaatagccgttatgggaggggatgggtggaccatagacgactcgctgtcaactctttccgctacttcggatacgggcaaaagagcttcgagtctaagatacttgaagagacaaagttcttcaacgacgccatagagacctacaaaggtcgcccatttgattttaaacagcttattactaacgcagtgagtaatattaccaatttaataatcttcggcgagcgatttacttatgaggacaccgacttccagcacatgatcgagctgtttagcgaaaatgtcgagttagctgcatcggcgtctgtctttctttataatgccttcccatggattggcattctccccttcgggaaacaccaacaactgttccgtaacgcagccgtagtgtacgattttctgtcgcgccttattgaaaaagcttcagtcaatcgaaagccacagctgcctcagcacttcgtcgacgcatatctggacgaaatggaccaggggaagaacgacccgagcagcacatttagcaaagagaacctgatcttctcagttggagagctcattatcgccggaacagagacaaccactaacgttctgagatgggccatccttttcatggccctctacccaaacatccagggacaagtgcagaaggagattgatctgattatgggacccaacggtaaaccgagctgggacgacaagtgcaaaatgccctatacggaggccgtgctccacgaggtattaaggttctgcaacattgtccccttaggcatatttcacgcgacaagcgaggatgcagtagtgcgcggatactctataccaaagggtacaaccgtcatcacgaatctgtattcagtgcatttcgacgagaaatactggcgcgatccagaggtcttccatccagagagattcctggattcgtcaggatatttcgccaagaaggaggctctcgttccattttccctgggacggaggcattgccttggagagcacttggccagaatggaaatgttcttattctttacagctctgctccagcgcttccacctgcattttccccatgaactggtgccagatctcaaacctcgcctcggaatgaccctgcagccccaaccctatctgatttgcgccgagaggcggtag

SEQ ID NO: 215482 - DNA, 1613 bp, Artificial Sequence
  derived and/or modified sequence
cctgggtctcagggctgctgtggagttcgcacctccagctcgggccgatgtggaagctttggagagctgaagagggcgcggcggcgctcggcggcgcgctcttcctgctgctcttcgcgctaggggtccgccagctgctgaagcagaggcggccgatgggcttccccccggggccgccggggctgccatttatcggcaacatctattccctggcagcctcatccgagcttccccatgtctacatgagaaagcagagccaggtgtacggagagatcttcagtttagatcttggaggcatatcaactgtggttctaaatggctatgatgtagtaaaggaatgccttgttcatcaaagcgaaatttttgcagacagaccatgccttcctttattcatgaagatgacaaaaatgggaggcttactcaattccagatatggccgaggatgggttgatcacagacgattagctgtaaacagttttcgatattttggatatggccaaaagtcttttgaatctaaaatcttggaagaaaccaaatttttcaatgatgctattgaaacatacaaaggtagaccttttgactttaaacagttaataacgaatgctgtttcaaacataaccaatctgatcatttttggagaacgattcacttatgaagacaccgattttcagcacatgattgagttatttagtgaaaatgtggaactagctgccagtgcctcagtcttcttgtataatgcctttccatggattggcatcctgccttttggaaaacatcaacagctgtttagaaatgcagctgtagtctatgattttctctccagactcattgaaaaagcttcagtcaacagaaagcctcagctacctcagcattttgttgatgcttatttagatgagatggatcaaggtaaaaatgacccatcatctactttctccaaagaaaacctaattttctcagtgggtgaactcatcattgctggaactgaaactacaaccaatgtgctacggtgggcgattcttttcatggccctttatcctaatattcaaggacaagttcagaaagagattgatttaattatgggccctaatgggaagccttcttgggacgacaaatgcaaaatgccttatactgaggcagttttgcatgaagttttaagattctgtaatatagttccattagggattttccatgcaacctctgaagatgcagttgtacgtggttattccattcctaaaggcacaacagtaattacaaatctttattctgtacactttgatgaaaagtactggagagacccagaagtgttccatcctgagcgatttctggacagcagtggatattttgccaagaaggaagctttggttcctttttccctaggaagaagacattgtcttggagaacacttggctcggatggaaatgttcttgttttttacagcattgcttcagaggtttcatttgcattttccacatgaactagttccagatctgaagcccaggttaggcatgacattgcagccccaaccctacctcatctgtgctgaaagacgctgaaactgcctgggatgttttcgggaacaagaatgtatatttgccttatccctgaacttggtt

SEQ ID NO: 215483 - DNA, 1506 bp, Artificial Sequence
  derived and/or modified sequence
atgtggaagctgtggagagccgaggagggcgccgccgccctgggcggcgccctgttcctgctgctgttcgccctgggcgtgagacagctgctgaagcagagaagacccatgggcttcccccccggcccccccggcctgcccttcatcggcaacatctacagcctggccgccagcagcgagctgccccacgtgtacatgagaaagcagagccaggtgtacggcgagatcttcagcctggacctgggcggcatcagcaccgtggtgctgaacggctacgacgtggtgaaggagtgcctggtgcaccagagcgagatcttcgccgacagaccctgcctgcccctgttcatgaagatgaccaagatgggcggcctgctgaacagcagatacggcagaggctgggtggaccacagaagactggccgtgaacagcttcagatacttcggctacggccagaagagcttcgagagcaagatcctggaggagaccaagttcttcaacgacgccatcgagacctacaagggcagacccttcgacttcaagcagctgatcaccaacgccgtgagcaacatcaccaacctgatcatcttcggcgagagattcacctacgaggacaccgacttccagcacatgatcgagctgttcagcgagaacgtggagctggccgccagcgccagcgtgttcctgtacaacgccttcccctggatcggcatcctgcccttcggcaagcaccagcagctgttcagaaacgccgccgtggtgtacgacttcctgagcagactgatcgagaaggccagcgtgaacagaaagccccagctgccccagcacttcgtggacgcctacctggacgagatggaccagggcaagaacgaccccagcagcaccttcagcaaggagaacctgatcttcagcgtgggcgagctgatcatcgccggcaccgagaccaccaccaacgtgctgagatgggccatcctgttcatggccctgtaccccaacatccagggccaggtgcagaaggagatcgacctgatcatgggccccaacggcaagcccagctgggacgacaagtgcaagatgccctacaccgaggccgtgctgcacgaggtgctgagattctgcaacatcgtgcccctgggcatcttccacgccaccagcgaggacgccgtggtgagaggctacagcatccccaagggcaccaccgtgatcaccaacctgtacagcgtgcacttcgacgagaagtactggagagaccccgaggtgttccaccccgagagattcctggacagcagcggctacttcgccaagaaggaggccctggtgcccttcagcctgggcagaagacactgcctgggcgagcacctggccagaatggagatgttcctgttcttcaccgccctgctgcagagattccacctgcacttcccccacgagctggtgcccgacctgaagcccagactgggcatgaccctgcagccccagccctacctgatctgcgccgagagaagatag

SEQ ID NO: 215484 - protein, 254 aa, Artificial Sequence
  derived and/or modified sequence
MSLARGHGDTAASTAAPLSEEGEVTSGLQALAVEDTGGPSASAGKAEDEGEGGREETEREGSGGEEAQGEVPSAGGEEPAEEDSEDWCVPCSDEEVELPADGQPWMPPPSEIQRLYELLAAHGTLELQAEILPRRPPTPEAQSEEERSDEEPEAKEEEEEKPHMPTEFDFDDEPVTPKDSLIDRRRTPGSSARSQKREARLDKVLSDMKRHKKLEEQILRTGRDLFSLDSEDPSPASPPLRSSGSSLFPRQRKY

SEQ ID NO: 215485 - DNA, 765 bp, Artificial Sequence
  derived and/or modified sequence
atgtcgctggcaagaggtcatggcgatactgctgcctctaccgcagctcctctgagcgaagagggtgaagtgacaagtgggctgcaggccctagccgtggaggatacaggaggcccctcagccagcgccggcaaagcagaagatgaaggggagggtggacgggaagaaacagaacgcgaggggtctggtggagaggaagctcagggagaggtgccaagcgctggaggcgaagaaccagcagaggaagattcggaggattggtgcgtgccttgttcggatgaggaggtcgaactaccagcagacggccagccttggatgccccccccttctgaaatccagcgactctacgagctcctggctgctcacggtactttggagctgcaggccgagatcctgccacgaagaccgccaacccctgaagcgcaatccgaggaggagcggtcagatgaagagcccgaggcaaaagaggaggaggaggaaaaacctcacatgccaaccgagttcgacttcgatgatgagcccgtaacccctaaagattcgctcattgaccgcagacggaccccaggttcatcggccaggagtcagaagcgcgaggcaagattggacaaagttctgtctgacatgaaacggcataagaaattggaggaacagattcttcggaccggtcgcgacctgttttctttagactctgaagacccatctcctgcctccccccctttgagatcgagcggctcctcactatttccccgccagaggaaatattag

SEQ ID NO: 215486 - DNA, 765 bp, Artificial Sequence
  derived and/or modified sequence
atgagcctggcccggggccatggagacacagctgccagcacagctgcccccctgtctgaggagggggaggtgaccagcggcctgcaggccctggccgtggaggacaccggcggccccagcgccagcgctgggaaggcagaagatgaaggagagggcggccgggaggagacagagcgggagggcagcggcggggaggaggcccagggcgaggtgcccagcgctggaggagaggagcctgctgaggaggacagcgaggactggtgtgtgccctgcagtgatgaggaggtggagctgcctgcagatggccagccctggatgcccccacccagcgagatccagaggctgtatgagctgctggccgcccacggcaccctggagctgcaggccgagatcctgccccggcggccccccaccccagaggcccagagcgaggaggagaggagtgatgaggagcctgaggccaaggaggaggaggaggagaagccccacatgcccacagaatttgattttgatgatgagcctgtgacccccaaggacagcctgattgacagaagaaggaccccaggcagcagcgcccggagccagaagcgggaggcccggctggacaaggtgctgagtgacatgaagaggcacaagaagctggaggagcagatcctgaggacaggccgggacctcttcagcctggacagcgaggaccccagccctgccagcccccccctgcggagcagcggcagcagcctcttcccccggcagaggaagtactag

SEQ ID NO: 215487 - DNA, 765 bp, Artificial Sequence
  derived and/or modified sequence
atgagcctggcccggggccacggcgacaccgccgccagcaccgccgcaccactgtccgaggagggcgaagtgacaagcggactgcaggccctggccgtggaagatactggcggaccatctgccagtgccgggaaggccgaggacgaaggagagggagggagggaagagacggaaagagagggttctgggggtgaggaggctcagggcgaagtccccagtgccggtggggaggaaccagccgaggaagactctgaagactggtgcgtaccctgctctgatgaagaagtggaactccccgctgacggccagccctggatgcccccacccagcgaaatccagcgcctgtatgaactactcgcagcccatggtacgctggaactgcaggccgaaatcctaccgcgaaggccaccaactccagaggcgcagtcagaggaggaaaggagtgatgaggaacccgaggctaaagaggaggaagaggagaagccccatatgcctaccgaatttgatttcgacgacgaacccgtgacacccaaggattcactaattgatagaagaaggactcctgggtccagcgcaaggagccagaaacgggaggctagactggacaaagtgctctcggacatgaaaagacacaagaagctggaggaacaaatcctcaggacagggcgcgatctctttagcctcgattcagaggatccaagcccagcttccccaccgctgcgttcatcaggcagctctctgtttcctcggcaaagaaagtactag

SEQ ID NO: 215488 - DNA, 765 bp, Artificial Sequence
  derived and/or modified sequence
atgtctctcgccagaggtcacggggacacagctgccagcacagccgctcccctgtcagaggagggagaggtgactagcggacttcaggccctggccgtggaggacactgggggaccctcagcttctgcaggcaaggcagaggatgagggggaaggcggacgggaagaaactgaacgggaaggaagcgggggagaagaagcccagggagaagtgccttccgccggaggcgaggaacctgcagaggaagacagtgaagactggtgtgtgccatgctctgacgaagaggtggagttgccagccgatggtcagccgtggatgccgccaccatcagagatccagagattatacgaactgttggcagcccacgggacactggagctgcaagcggagattctgccacgaaggcctccaacaccagaggcccagtccgaagaagaacggtctgacgaggagccggaggctaaggaggaggaagaggaaaagccacatatgcccacagaattcgacttcgatgacgaaccagttacccccaaagactccctcatcgatcgccgaagaacgcccggttcctcagctcggtcacagaagcgcgaggctcgactagataaagtccttagcgacatgaagaggcacaagaaattggaagagcagatactgaggactggcagggacctgttttcacttgattctgaggatcccagtcctgcttctcccccactgaggtccagcggatccagcctattcccgaggcagcgcaagtactag

SEQ ID NO: 215489 - DNA, 2011 bp, Artificial Sequence
  derived and/or modified sequence
tatacgcatgcgacttcccggtggccatctttactgtgggctgaagcctgtgcgcttactcgcgcatgtgcaagccttccctcgctttcctcttccaagtagccttgcctagagcggagcctcccgcgccatttctgtgcgcctgcgtagcgtgaccctgcgcagcctgggaggcgggtcttagctccaggtgcgtacggcatctgacttgacgtggcccacaactgaaaggtctggggagaaggcgccgtgtccgggtgtggagaggggcgtcgtggaagcgagaagagtggcccgtccctctcctccccctttccctctttcggaaagtggtttctgcggggcccgggagcctcggagtaccgaacctcgatctccggggcggggtccttggtggggactgagcgccccctcccggggacgggcggtctggccgcggagtcccctgcgggagcgtgattggctggaaacggtcccgaacccccaggggagcccgatccctgggggaccctggcttcggactccagtatctgtcgtcgcagggtccctgccctagtggcctatgtcccttgctcggggccatggagacactgcggccagtacggcggcgcctctgtctgaagaaggggaagtgacctccggcctccaggctctggccgtggaggataccggaggcccctctgcctcggccggtaaggccgaggacgagggggaaggaggccgagaggagaccgagcgtgaggggtccgggggcgaggaggcgcagggagaagtccccagcgctgggggagaagagcctgccgaggaggactccgaggactggtgcgtgccctgcagcgacgaggaggtggagctgcctgcggatgggcagccctggatgcccccgccctccgaaatccagcggctctatgaactgctggctgcccacggtactctggagctgcaagccgagatcctgccccgccggcctcccacgccggaggcccagagcgaagaggagagatccgatgaggagccggaggccaaagaagaggaagaggaaaaaccacacatgcccacggaatttgattttgatgatgagccagtgacaccaaaggactccctgattgaccggagacgcaccccaggaagctcagcccggagccagaaacgggaggcccgcctggacaaggtgctgtcggacatgaagagacacaagaagctggaggagcagatccttcgtaccgggagggacctcttcagcctggactcggaggaccccagccccgccagccccccactccgatcctccgggagtagtctcttccctcggcagcggaaatactgattcccactgctcctgcctctagggtgcagtgtccgtacctgctggagcctgggccctccttccccagcccagacattgagaaacttgggaagaagagagaaacctcaagctcccaaacagcacgttgcgggaaagaggaagagagagtgtgagtgtgtgtgtgtgttttttctattgaacacctgtagagtgtgtgtgtgtgttttctattgaacacctatagagagagtgtgtgtgttttctattgaacatctatatagagagagtgtgtgagtgtgtgttttctattgaacacctattcagagacctggactgaattttctgagtctgaaataaaagatgcagagctatcatctcttaaaaggaggggctgtagctgtagctcaacagttaggccccacttgaagggagaggcagaattgtactcacccagattggaaaatgaaagccagatgggtagaggtgccctcagttagcacctgtcccatctcgggccctccaactcctcccagtcccactccagtgcagccagctggctccaaggtagaaacccatgagcactcagggagcagtgtgccttcagctgcagcagaagcagcccggaggataaaatgagaaccagctgcacacgggccctttaactcccaagccccacccctgggcttggcctgccttgccctgccg

SEQ ID NO: 215490 - DNA, 765 bp, Artificial Sequence
  derived and/or modified sequence
atgagcctggccagaggccacggcgacaccgccgccagcaccgccgcccccctgagcgaggagggcgaggtgaccagcggcctgcaggccctggccgtggaggacaccggcggccccagcgccagcgccggcaaggccgaggacgagggcgagggcggcagagaggagaccgagagagagggcagcggcggcgaggaggcccagggcgaggtgcccagcgccggcggcgaggagcccgccgaggaggacagcgaggactggtgcgtgccctgcagcgacgaggaggtggagctgcccgccgacggccagccctggatgcccccccccagcgagatccagagactgtacgagctgctggccgcccacggcaccctggagctgcaggccgagatcctgcccagaagaccccccacccccgaggcccagagcgaggaggagagaagcgacgaggagcccgaggccaaggaggaggaggaggagaagccccacatgcccaccgagttcgacttcgacgacgagcccgtgacccccaaggacagcctgatcgacagaagaagaacccccggcagcagcgccagaagccagaagagagaggccagactggacaaggtgctgagcgacatgaagagacacaagaagctggaggagcagatcctgagaaccggcagagacctgttcagcctggacagcgaggaccccagccccgccagcccccccctgagaagcagcggcagcagcctgttccccagacagagaaagtactag

SEQ ID NO: 215491 - protein, 169 aa, Artificial Sequence
  derived and/or modified sequence
MAAAASPAILPRLAILPYLLFDWSGTGRADAHSLWYNFTIIHLPRHGQQWCEVQSQVDQKNFLSYDCGSDKVLSMGHLEEQLYATDAWGKQLEMLREVGQRLRLELADTELEDFTPSGPLTLQVRMSCECEADGYIRGSWQFSFDGRKFLLFDSNNRKWTVVHAGLGTS

SEQ ID NO: 215492 - protein, 244 aa, Artificial Sequence
  derived and/or modified sequence
MAAAASPAILPRLAILPYLLFDWSGTGRADAHSLWYNFTIIHLPRHGQQWCEVQSQVDQKNFLSYDCGSDKVLSMGHLEEQLYATDAWGKQLEMLREVGQRLRLELADTELEDFTPSGPLTLQVRMSCECEADGYIRGSWQFSFDGRKFLLFDSNNRKWTVVHAGARRMKEKWEKDSGLTTFFKMVSMRDCKSWLRDFLMHRKKRLEPTAPPTMAPGLAQPKAIATTLSPWSFLIILCFILPGI

SEQ ID NO: 215493 - protein, 130 aa, Artificial Sequence [sequence omitted]

SEQ ID NO: 215494 - DNA, 510 bp, Artificial Sequence
  derived and/or modified sequence
atggccgccgccgccagccccgccatcctgcccagactggccatcctgccctacctgctgttcgactggagcggcaccggcagagccgacgcccacagcctgtggtacaacttcaccatcatccacctgcccagacacggccagcagtggtgcgaggtgcagagccaggtggaccagaagaacttcctgagctacgactgcggcagcgacaaggtgctgagcatgggccacctggaggagcagctgtacgccaccgacgcctggggcaagcagctggagatgctgagagaggtgggccagagactgagactggagctggccgacaccgagctggaggacttcacccccagcggccccctgaccctgcaggtgagaatgagctgcgagtgcgaggccgacggctacatcagaggcagctggcagttcagcttcgacggcagaaagttcctgctgttcgacagcaacaacagaaagtggaccgtggtgcacgccggcctgggcaccagctag

SEQ ID NO: 215495 - DNA, 735 bp, Artificial Sequence
  derived and/or modified sequence
atggccgccgccgccagccccgccatcctgcccagactggccatcctgccctacctgctgttcgactggagcggcaccggcagagccgacgcccacagcctgtggtacaacttcaccatcatccacctgcccagacacggccagcagtggtgcgaggtgcagagccaggtggaccagaagaacttcctgagctacgactgcggcagcgacaaggtgctgagcatgggccacctggaggagcagctgtacgccaccgacgcctggggcaagcagctggagatgctgagagaggtgggccagagactgagactggagctggccgacaccgagctggaggacttcacccccagcggccccctgaccctgcaggtgagaatgagctgcgagtgcgaggccgacggctacatcagaggcagctggcagttcagcttcgacggcagaaagttcctgctgttcgacagcaacaacagaaagtggaccgtggtgcacgccggcgccagaagaatgaaggagaagtgggagaaggacagcggcctgaccaccttcttcaagatggtgagcatgagagactgcaagagctggctgagagacttcctgatgcacagaaagaagagactggagcccaccgccccccccaccatggcccccggcctggcccagcccaaggccatcgccaccaccctgagcccctggagcttcctgatcatcctgtgcttcatcctgcccggcatctag

SEQ ID NO: 215496 - DNA, 393 bp, Artificial Sequence
  derived and/or modified sequence
atggccgccgccgccagccccgccatcctgcccagactggccatcctgccctacctgctgttcgactggagcggcaccggcagagccgaggagcagctgtacgccaccgacgcctggggcaagcagctggagatgctgagagaggtgggccagagactgagactggagctggccgacaccgagctggaggacttcacccccagcggccccctgaccctgcaggtgagaatgagctgcgagtgcgaggccgacggctacatcagaggcagctggcagttcagcttcgacggcagaaagttcctgctgttcgacagcaacaacagaaagtggaccgtggtgcacgccggcgccagaagaatgaaggagaagtgggagaagagccacctggagtag

SEQ ID NO: 215497 - DNA, 510 bp, Artificial Sequence
  derived and/or modified sequence
atggcagcagcagcctcccctgcaatccttccccgactcgcgatcttgccctacctccttttcgactggagcgggactggcagggctgatgcccatagcctgtggtataatttcacaatcatacacctgccccgacacggacagcaatggtgcgaggtgcagtctcaggtggaccagaaaaattttctgtcgtacgactgtggttctgacaaggttctgtctatgggacatctagaggagcagctgtacgctaccgatgcgtgggggaagcaattggaaatgttgcgcgaagtgggtcagaggctcaggctcgaactggcggacaccgagctggaggattttaccccaagtggcccactgaccctccaagtgcggatgagctgcgaatgtgaggccgatggatacattcgagggagctggcagttttcatttgatgggaggaaattcctcctttttgactccaataatcgtaagtggactgtggtccacgctgggctcgggaccagttag

SEQ ID NO: 215498 - DNA, 735 bp, Artificial Sequence
  derived and/or modified sequence
atggcggcagcagcttcaccagccatccttcccagactggccatcctgccgtacttgctctttgactggagtggcaccggtcgggctgatgctcattccctatggtataacttcactatcatccacctcccaagacatggccagcagtggtgtgaggttcagagccaggttgaccagaaaaacttcctttcctatgattgcgggagcgacaaagtgcttagcatgggtcacctcgaagagcagctgtatgctaccgacgcctgggggaaacagctcgagatgctcagggaggtagggcagcggttgaggttagagctggccgatacagaactggaagatttcacaccgagcggacccctgacactgcaggtcaggatgtcatgtgagtgcgaagccgatggctacatcagagggtcatggcaattctcctttgatggcaggaagtttctgttgttcgatagcaataacagaaagtggaccgtagtgcacgcgggggcccgaagaatgaaagaaaagtgggagaaggattccggcttaactactttttttaaaatggttagtatgagggattgcaagtcctggctgcgcgattttctaatgcacagaaagaagaggctggaaccaacagccccaccaaccatggcaccagggctagctcagcctaaagccatcgccacgacactctctccctggagcttcctgatcatcctgtgtttcatcttgcccggaatctag

SEQ ID NO: 215499 - DNA, 393 bp, Artificial Sequence
  derived and/or modified sequence
atggccgctgccgcctccccagctattctgccccggctggcgatccttccctacctcttgtttgactggtctggcactgggagggcagaagagcagctttacgcaactgatgcttgggggaaacaacttgaaatgctgcgggaagttggtcagcggttgcggcttgaactggccgatacggagctggaagacttcaccccatcaggtcctctaaccctccaggttagaatgtcatgcgaatgcgaagctgacggatatattcggggaagctggcagtttagctttgacgggagaaagtttctgttgtttgattccaacaacagaaagtggacagtcgtgcatgcaggagcacggagaatgaaggagaagtgggaaaagtcccacctggaatag

SEQ ID NO: 215500 - DNA, 735 bp, Artificial Sequence
  derived and/or modified sequence
atggcagcagccgcatcaccagccatacttcctcgcctggccattctgccctacctgctgtttgactggagcgggacaggccgtgcagatgcccattccttgtggtataatttcactataattcatctgccaaggcatgggcagcagtggtgcgaagttcagtcacaggttgatcagaagaacttcctatcttacgactgcggctcagataaagtcttatcaatggggcacttagaggagcagctgtacgcaaccgacgcctggggaaagcagctggagatgctgcgagaggtggggcagcggctccgacttgagctggcggataccgagttggaggacttcacacctagtggcccgctcacactgcaggtgagaatgagttgcgaatgtgaagccgacgggtatatcagggggagttggcagttcagtttcgatgggcgcaaatttttgctgttcgactccaacaaccgtaaatggactgtggtccacgccggcgctcggagaatgaaagagaagtgggagaaggattcgggcttgaccactttcttcaagatggtgtctatgcgcgactgcaaatcatggcttcgggacttcctcatgcaccgcaagaaaaggctggagcctaccgcacctcctaccatggcccccggtctggctcagccaaaagccattgcaaccaccttatcaccttggtcattcctgatcatactgtgttttattctccccggaatctag

SEQ ID NO: 215501 - DNA, 510 bp, Artificial Sequence
  derived and/or modified sequence
atggctgctgctgccagccctgccatcctgccccggctggccatcctgccctacctgctgtttgactggagcggcaccggccgggcagatgcccacagcctgtggtacaacttcaccatcatccacctgcccaggcatggccagcagtggtgtgaggtgcagagccaggtggaccagaagaacttcctgtcctatgactgtggcagtgacaaggtgctgtccatgggccacctggaggagcagctgtatgccacagatgcctggggcaagcagctggagatgctgcgggaggtgggccagaggctgcggctggagctggccgacacagagctggaggacttcaccccatctggccccctgaccctgcaggtgaggatgagctgtgaatgtgaggctgatggctacatccggggctcctggcagttctcctttgatggcaggaagttcctgctgtttgacagcaacaacaggaagtggacagtggtgcacgccggcctgggcaccagctag

SEQ ID NO: 215502 - DNA, 735 bp, Artificial Sequence
  derived and/or modified sequence
atggctgctgctgccagccctgccatcctgccccggctggccatcctgccctacctgctgtttgactggagcggcaccggccgggcagatgcccacagcctgtggtacaacttcaccatcatccacctgcccaggcatggccagcagtggtgtgaggtgcagagccaggtggaccagaagaacttcctgtcctatgactgtggcagtgacaaggtgctgtccatgggccacctggaggagcagctgtatgccacagatgcctggggcaagcagctggagatgctgcgggaggtgggccagaggctgcggctggagctggccgacacagagctggaggacttcaccccatctggccccctgaccctgcaggtgaggatgagctgtgaatgtgaggctgatggctacatccggggctcctggcagttctcctttgatggcaggaagttcctgctgtttgacagcaacaacaggaagtggacagtggtgcacgccggggcccggaggatgaaggagaagtgggagaaggacagcggcctgaccaccttcttcaagatggtgtccatgagggactgcaagtcctggctgcgggacttcctgatgcacaggaagaagaggctggagcccacagccccacccaccatggcccctggcctggcccagcccaaggccatcgccaccaccctgagcccctggagcttcctgatcatcctgtgcttcatcctgcccggcatctag

SEQ ID NO: 215503 - DNA, 393 bp, Artificial Sequence
  derived and/or modified sequence
atggctgctgctgccagccctgccatcctgccccggctggccatcctgccctacctgctgtttgactggagcggcaccggccgggcagaggagcagctgtatgccacagatgcctggggcaagcagctggagatgctgcgggaggtgggccagaggctgcggctggagctggccgacacagagctggaggacttcacccccagcggccccctgaccctgcaggtgaggatgagctgtgaatgtgaggctgatggctacatccggggctcctggcagttctcctttgatggcaggaagttcctgctgtttgacagcaacaacaggaagtggacagtggtgcatgctggggcccggaggatgaaggagaagtgggagaagagccacctggagtag

SEQ ID NO: 215504 - DNA, 510 bp, Artificial Sequence
  derived and/or modified sequence
atggccgccgccgccagccccgccatcctgccccggctggccatcctgccctacctcttatttgattggtccgggactggccgggccgacgctcatagcttgtggtataattttactattatccatctcccaaggcacggacagcagtggtgcgaagtgcagtctcaggttgaccagaagaatttcctctcatatgattgcgggtccgataaggttctctccatgggacacctcgaagagcagctctacgccaccgacgcttggggtaaacagttagagatgctcagagaagtcggacagcggttgcggttggagctggcggataccgagttagaggattttactccgtctggccctctgacactgcaagtaagaatgtcttgcgagtgcgaggctgacggttatatccggggctcttggcagttctcctttgatggaaggaagttcctgctgtttgacagcaataatagaaagtggactgtcgtgcatgctgggctggggacttcctag

SEQ ID NO: 215505 - DNA, 735 bp, Artificial Sequence
  derived and/or modified sequence
atggccgccgccgccagccccgccatcctgccccggctggccatcctcccctatctcctgttcgactggtctgggacaggcagggctgacgctcatagcttatggtacaattttacaatcatccacttacctagacacggccaacagtggtgcgaagtccagagccaggtcgaccaaaaaaacttcttgtcttatgattgcggaagtgacaaggtgctctctatgggtcacttggaagagcaactttacgcaaccgacgcctgggggaaacagctggaaatgctccgtgaggtcggacagcgcctgaggttagagctcgccgacactgaattagaggatttcacccctagcggtccactgacactgcaagtcaggatgtcctgcgagtgcgaggccgacggctacattcgggggtcctggcagttttcatttgatggcagaaaatttctgctgtttgattccaataatcggaaatggacggttgtccacgccggcgctagaaggatgaaagagaagtgggagaaagatagcggattgacaacctttttcaagatggtttctatgcgggattgcaaatcatggctacgtgacttcctgatgcaccggaaaaagcgcttggaacccacagccccccctaccatggctcctggactggctcagcccaaggcaattgcaactactctgagtccctggtctttcctcatcattctgtgtttcattctgcccggcatctag

SEQ ID NO: 215506 - DNA, 393 bp, Artificial Sequence
  derived and/or modified sequence
atggccgccgccgccagccccgccatcctgccccggctggccatcctcccatacctgctgttcgattggtctgggacgggcagagccgaagaacagttgtacgcaacggacgcgtggggcaaacagctcgaaatgctgcgtgaggtgggtcagcgcttacggctcgagctagccgacactgaactggaggactttacccccagcggaccattaacgttacaagtgcgaatgtcttgcgaatgcgaggctgatggttacattcgcgggtcttggcagttctccttcgacggaaggaagtttctgctgttcgacagcaacaaccggaaatggaccgtcgtccacgccggcgcacggcgcatgaaggaaaaatgggaaaagtcacatctcgagtag

SEQ ID NO: 215507 - DNA, 735 bp, Artificial Sequence
  derived and/or modified sequence
atggccgccgccgccagccccgccatcctgccccggctggccatcctaccatatctgttgtttgattggtcaggcaccggccgcgcagatgcccattcgctgtggtacaacttcacgatcattcacttgccaagacacggccagcagtggtgcgaagtacagagtcaggttgatcagaagaacttcctgagttacgattgcggcagcgacaaagtcctctctatgggtcacctggaagagcagctatatgccacggacgcctgggggaaacagcttgagatgctcagggaagtaggccaacgcctcaggcttgaactcgctgacacagaactggaggatttcacgccctcaggacctctgactctgcaggttagaatgtcttgcgaatgcgaggctgacgggtatattcgaggctcgtggcaattcagttttgacgggcgtaagttcctattattcgactctaacaaccggaaatggactgtcgtccacgctggagctagacgcatgaaggaaaagtgggagaaggactcaggcttgacaaccttcttcaagatggtgagcatgagggactgcaagagctggctgagagactttcttatgcaccggaagaaacgactagagcccacagcccctccgacaatggcccccgggctcgcacagcccaaagcaatcgccactaccttatccccatggtctttcctcattatactgtgctttatcttgcctgggatttag

SEQ ID NO: 215508 - DNA, 510 bp, Artificial Sequence
  derived and/or modified sequence
atggcagctgcagcttcccctgcgattctgccccgtctcgctatactgccgtacctcctgtttgactggtctggaactggcagggctgatgcacactctctttggtataactttaccatcatccacctgcccagacacggtcaacagtggtgtgaggttcagtcacaggttgaccaaaaaaattttctctcttacgactgtggttcagataaggtactgtcaatgggacatctagaagagcagctttacgcgaccgacgcatgggggaaacaactggagatgctgcgggaagtgggtcagagactcagactggagctagcggataccgagctggaagattttactccaagcggccctttaaccctgcaagttcgtatgtcttgcgagtgcgaggcagatggatacatccggggatcttggcagttcagcttcgatgggaggaaatttctgctcttcgacagcaataatcggaaatggaccgtggtccacgccggtctggggactagctag

SEQ ID NO: 215509 - DNA, 735 bp, Artificial Sequence
  derived and/or modified sequence
atggccgctgcagcttctcccgctatcctaccaagattagctatcttgccctacctgctgtttgactggtcagggacaggacgagccgacgcccactccttatggtataatttcaccattattcacctgccaaggcacggccagcagtggtgtgaagtgcagtcacaggtggatcaaaaaaacttcctgtcgtacgactgtgggagtgacaaagtcctgtccatgggacacctcgaggaacaattgtacgctactgatgcttgggggaaacagctggaaatgctgcgcgaggtgggtcaaagactcagactggaactcgcagacacggaactggaagacttcacacccagcggtcctctgaccctgcaagtacgtatgtcgtgtgagtgtgaagctgacgggtacattagaggctcttggcagttttccttcgacgggcgtaaatttctgctgttcgactctaacaatcggaaatggacagtggtgcacgctggggctcgacgtatgaaggagaagtgggaaaaagatagtggtctgaccacttttttcaaaatggtttcaatgagggattgtaaaagttggctccgcgacttcctcatgcacaggaaaaagcggttggaacctaccgcaccacctactatggcccctggtctcgcacagcccaaggccatcgccactaccctttcaccctggtcctttctgattatactgtgcttcatcctgcctggcatatag

SEQ ID NO: 215510 - DNA, 393 bp, Artificial Sequence
  derived and/or modified sequence
atggccgctgccgcaagcccagcgatcctgcctagacttgccatcctgccctaccttctgttcgattggtctgggacaggccgtgcagaggagcagctgtacgcaacagacgcatgggggaaacaattggagatgctgagagaagtgggacagcgtctccgtttggaactggcagacaccgaattagaggacttcaccccaagtgggcctctgaccctccaggttcgcatgagctgcgaatgcgaggcagacggatatatccggggttcatggcaattttccttcgacggaaggaagttcctcctcttcgactcaaataatcgtaagtggacagtcgtgcatgcaggtgcacgccgaatgaaggagaagtgggaaaaatctcatctggagtag

SEQ ID NO: 215511 - DNA, 735 bp, Artificial Sequence
  derived and/or modified sequence
atggctgctgctgcctctcctgccatcctgccccgactcgcgatactgccctacctgctgttcgactggtctggaaccggccgtgccgacgcccattcgctctggtacaatttcacaatcattcatttgcctcggcacggccagcaatggtgcgaggtacagtctcaggtggatcagaaaaactttctctcctacgattgtggctccgacaaggtgctgtccatgggacatctagaagagcaactctacgcaacagatgcatggggcaaacaactggaaatgttgcgagaggttggtcagcggctgcgcttagaactagccgacactgaactagaggactttactccaagcggtcccctgactttgcaggtacgaatgtcctgcgagtgcgaggccgacggttacatccgcggaagttggcaattttcttttgacggtcgtaaattcctgctgttcgactccaacaacagaaaatggaccgttgtgcacgccggagccagacggatgaaagaaaagtgggagaaggactctggactgacaacctttttcaagatggtgtcaatgcgagactgtaagagctggctccgtgactttttgatgcatcgaaagaagagactggagcctaccgctccacccacaatggccccaggattagcccagcctaaggcaattgccacaaccctctccccgtggagttttctgataattctgtgcttcattcttccgggaatatag

SEQ ID NO: 215512 - DNA, 949 bp, Artificial Sequence
  derived and/or modified sequence
atacgctggtctccacatcgactgcgccttgtgtcccgggcgctcctggtctacaatggcagcggccgccagccccgcgatccttccgcgcctcgcgattcttccgtacctgctattcgactggtccgggacggggcgggccgacgctcactctctctggtataacttcaccatcattcatttgcccagacatgggcaacagtggtgtgaggtccagagccaggtggatcagaagaattttctctcctatgactgtggcagtgacaaggtcttatctatgggtcacctagaagagcagctgtatgccacagatgcctggggaaaacaactggaaatgctgagagaggtggggcagaggctcagactggaactggctgacactgagctggaggatttcacacccagtggacccctcacgctgcaggtcaggatgtcttgtgagtgtgaagccgatggatacatccgtggatcttggcagttcagcttcgatggacggaagttcctcctctttgactcaaacaacagaaagtggacagtggttcacgctggcttagggacttcctgatgcacaggaagaagaggctggaacccacagcaccacccaccatggccccaggcttagctcaacccaaagccatagccaccaccctcagtccctggagcttcctcatcatcctctgcttcatcctccctggcatctgagaagagtcatttagagtgacaggtggaaggtgatatcaagaagcctctgttagcctggtctggttcctgctctcccttcagggaggccgcctgtctactcaccactgtgcctttctggaaagcaggagttcaagccttagcaagcccagaggcccccagcagatgatgaggacattgtcggctcaacatctcaggccactcattaccttcgctcatgatcccagcagccatttttcttttttttttt

SEQ ID NO: 215513 - DNA, 966 bp, Artificial Sequence
  derived and/or modified sequence
ccttgtgtcccgggcgctcctggtctacaatggcagcggccgccagccccgcgatccttccgcgcctcgcgattcttccgtacctgctattcgactggtccgggacggggcgggccgacgctcactctctctggtataacttcaccatcattcatttgcccagacatgggcaacagtggtgtgaggtccagagccaggtggatcagaagaattttctctcctatgactgtggcagtgacaaggtcttatctatgggtcacctagaagagcagctgtatgccacagatgcctggggaaaacaactggaaatgctgagagaggtggggcagaggctcagactggaactggctgacactgagctggaggatttcacacccagtggacccctcacgctgcaggtcaggatgtcttgtgagtgtgaagccgatggatacatccgtggatcttggcagttcagcttcgatggacggaagttcctcctctttgactcaaacaacagaaagtggacagtggttcacgctggagccaggcggatgaaagagaagtgggagaaggatagcggactgaccaccttcttcaagatggtctcaatgagagactgcaagagctggcttagggacttcctgatgcacaggaagaagaggctggaacccacagcaccacccaccatggccccaggcttagctcaacccaaagccatagccaccaccctcagtccctggagcttcctcatcatcctctgcttcatcctccctggcatctgagtggaaggtgatatcaagaagcctctgttagcctggtctggttcctgctctcccttcagggaggccgcctgtctactcaccactgtgcctttctggaaagcaggagttcaagccttagcaagcccagaggcccccagcagatgatgaggacattgtcggctcaacatctcaggccactcattaccttcgctcatgatcccag

SEQ ID NO: 215514 - DNA, 1598 bp, Artificial Sequence
  derived and/or modified sequence
atacgctggtctccacatcgactgcgccttgtgtcccgggcgctcctggtctacaatggcagcggccgccagccccgcgatccttccgcgcctcgcgattcttccgtacctgctattcgactggtccgggacggggcgggccgaagagcagctgtatgccacagatgcctggggaaaacaactggaaatgctgagagaggtggggcagaggctcagactggaactggctgacactgagctggaggatttcacacccagtggacccctcacgctgcaggtcaggatgtcttgtgagtgtgaagccgatggatacatccgtggatcttggcagttcagcttcgatggacggaagttcctcctctttgactcaaacaacagaaagtggacagtggttcacgctggagccaggcggatgaaagagaagtgggagaagagtcatttagagtgacaggtggaaggtgatatcaagaagcctctgttagcctggtctggttcctgctctcccttcagggaggccgcctgtctactcaccactgtgcctttctggaaagcaggagttcaagccttagcaagcccagaggcccccagcagatgatgaggacattgtcggctcaacatctcaggccactcattaccttcgctcatgatcccagcagccatttttctttttttttttttgtttttttttttttttgagacggagtctcgctctgtcgcccaggccggactgcggactgcagtggcgcaatctcggctcactgcaagctccgcttcccgggttcacgccattctcctgcctcagcctcccgagtagctgggactacaggcacccgccaccgcgcccggctaattttttgtatttttagtagagacagggtttcaccttgttagccaggatggtctcgatctcctgacctcatgatccacctgcctcggcctcccagagtgctgggattacaggcgtgagccaccgcgcccggccagccatttttcttaacaccttctgccactttctctcggtgctaatggatggaattcctgcacaagttttaactgaacaagaaatcccagcaaaaggcattttctttctacttctttgattgtggaaaagcagacatttctctgaagcatgaccttattcttcgaaacggtattgctagtaaaatagcatgcaggacttcagacctcagggatcctttccatgcactgaccaagaattgtattaatcctttttatcattatagtttttttacattttctcattctgtcaaccatattggagtgaagtggcatagtcatcactcactgtaatctccaactcctgggctcaagtgatcctctagactcagcctctagagtagctgggactacaggcgcatgccaccatgcctggcaaattgttttatatttaggtagagattgggtcttcctatgttgcgcaggtaataaaactgtgaaaatcctggaatataagctaagaaataccaatgtggacatagggcctggcaaagatttcatgaagaagacactaaaaacaattgtaacaaaaacaaaaattgacaaatgggacctcattaaactaaagagcttctgcacag

SEQ ID NO: 215515 - DNA, 735 bp, Artificial Sequence
  derived and/or modified sequence
atggcagcggccgccagccccgcgatccttccgcgcctcgcgattcttccgtacctgctattcgactggtccgggacggggcgggccgacgctcactctctctggtataacttcaccatcattcatttgcccagacatgggcaacagtggtgtgaggtccagagccaggtggatcagaagaattttctctcctatgactgtggcagtgacaaggtcttatctatgggtcacctagaagagcagctgtatgccacagatgcctggggaaaacaactggaaatgctgagagaggtggggcagaggctcagactggaactggctgacactgagctggaggatttcacacccagtggacccctcacgctgcaggtcaggatgtcttgtgagtgtgaagccgatggatacatccgtggatcttggcagttcagcttcgatggacggaagttcctcctctttgactcaaacaacagaaagtggacagtggttcacgctggagccaggcggatgaaagagaagtgggagaaggatagcggactgaccaccttcttcaagatggtctcaatgagagactgcaagagctggcttagggacttcctgatgcacaggaagaagaggctggaacccacagcaccacccaccatggccccaggcttagctcaacccaaagccatagccaccaccctcagtccctggagcttcctcatcatcctctgcttcatcctccctggcatctga

SEQ ID NO: 215516 - protein, 291 aa, Artificial Sequence
  derived and/or modified sequence
MALAARLLPQFLHSRSLPCGAVRLRTPAVAEVRLPSATLCYFCRCRLGLGAALFPRSARALAASALPAQGSRWPVLSSPGLPAAFASFPACPQRSYSTEEKPQQHQKTKMIVLGFSNPINWVRTRIKAFLIWAYFDKEFSITEFSEGAKQAFAHVSKLLSQCKFDLLEELVAKEVLHALKEKVTSLPDNHKNALAANIDEIVFTSTGDISIYYDEKGRKFVNILMCFWYLTSANIPSETLRGASVFQVKLGNQNVETKQLLSASYEFQREFTQGVKPDWTIARIEHSKLLE

SEQ ID NO: 215517 - DNA, 1495 bp, Artificial Sequence
  derived and/or modified sequence
agttcccagctgtccgaaaggtcttcggaacttcggctctaaagcgttcctcagcgccatccgcccggaaacacgagcgacagagaaaaggtccgcgaggccggcagactccagagtggctgggtccgagcgcggggcgggttgccgaagggcctcggcctgggctgcgtgctggagagcggggacggggccgactcaccagaggctgcagcaacaggtccactttgctctccagtctctttctccgacaccgctgaggcggtttcccaccgacttcctttccatacagcaccggcaggcaccggtgtgaagggtcataaaaatggcgctggccgctcgtttgctaccccagttcctgcactctcggtcgctgccctgcggggccgtccgactccggactcctgctgtggccgaggtgaggctgccgtcggccacactttgctacttctgccgctgtcgcctcggcttgggagcggcgttatttccacgaagcgctagggccttggcagcctcggcgctacctgcccagggctcccggtggccagtgctcagcagcccgggactccccgcagccttcgcttctttccctgcctgccctcagcgcagctacagcacggaggagaagccccagcagcaccagaaaaccaagatgatcgtcctgggattctccaaccccatcaactgggttaggactcgaattaaggccttccttatctgggcctatttcgacaaagagttcagcatcacagagttctccgagggagcgaagcaggcttttgctcatgtatccaagttgctgtcacagtgtaaatttgatctgttggaagaacttgtggccaaagaggtgctacatgcattgaaagaaaaggttacttcactacctgacaaccataaaaatgcccttgctgctaacatagatgaaattgtatttacatcaacaggagacatctccatttactatgatgagaaaggaaggaagtttgttaacatcctgatgtgcttttggtatctaaccagtgccaacatccccagtgaaactttaagaggagccagtgtattccaggttaagttggggaatcagaatgtggaaactaaacaacttcttagtgcaagctatgagtttcagagggagttcacacaaggagtaaagcctgactggaccattgcacggattgaacactcaaaattattagaataattttcttggaaaaatcagcttatggactttagcagttgctgtgaaaaactaaggaagaaaaattttggggtcatttgatcttcacttaatctaagtctgtgaattacttttatattattttgaaatactccttgcagtatattggcatgatacagtaaaagcattttccacagattgttatcaccttctttaaaagaagtcaaaatttaaaaaatacaatagcacgttgttggtgtcatattcaataacatttccaatgctacatataattttatagacataataaagaaggtattg

SEQ ID NO: 215518 - DNA, 1386 bp, Artificial Sequence
  derived and/or modified sequence
cgagcgcggggcgggttgccgaagggcctcggcctgggctgcgtgctggagagcggggacggggccgactcaccagaggctgcagcaacaggtccactttgctctccagtctctttctccgacaccgctgaggcggtttcccaccgacttcctttccatacagcaccggcaggcaccggtgtgaagggtcataaaaatggcgctggccgctcgtttgctaccccagttcctgcactctcggtcgctgccctgcggggccgtccgactccggactcctgctgtggccgaggtgaggctgccgtcggccacactttgctacttctgccgctgtcgcctcggcttgggagcggcgttatttccacgaagcgctagggccttggcagcctcggcgctacctgcccagggctcccggtggccagtgctcagcagcccgggactccccgcagccttcgcttctttccctgcctgccctcagcgcagctacagcacggaggagaagccccagcagcaccagaaaaccaagatgatcgtcctgggattctccaaccccatcaactgggttaggactcgaattaaggccttccttatctgggcctatttcgacaaagagttcagcatcacagagttctccgagggagcgaagcaggcttttgctcatgtatccaagttgctgtcacagtgtaaatttgatctgttggaagaacttgtggccaaagaggtgctacatgcattgaaagaaaaggttacttcactacctgacaaccataaaaatgcccttgctgctaacatagatgaaattgtatttacatcaacaggagacatctccatttactatgatgagaaaggaaggaagtttgttaacatcctgatgtgcttttggtatctaaccagtgccaacatccccagtgaaactttaagaggagccagtgtattccaggttaagttggggaatcagaatgtggaaactaaacaacttcttagtgcaagctatgagtttcagagggagttcacacaaggagtaaagcctgactggaccattgcacggattgaacactcaaaattattagaataattttcttggaaaaatcagcttatggactttagcagttgctgtgaaaaactaaggaagaaaaattttggggtcatttgatcttcacttaatctaagtctgtgaattacttttatattattttgaaatactccttgcagtatattggcatgatacagtaaaagcattttccacagattgttatcaccttctttaaaagaagtcaaaatttaaaaaatacaatagcacgttgttggtgtcatattcaataacatttccaatgctacatataattttatagacataataaagaaggtattgaaaaaactacttacaaa

SEQ ID NO: 215519 - DNA, 876 bp, Artificial Sequence
  derived and/or modified sequence
atggccctggccgccagactgctgccccagttcctgcacagcagaagcctgccctgcggcgccgtgagactgagaacccccgccgtggccgaggtgagactgcccagcgccaccctgtgctacttctgcagatgcagactgggcctgggcgccgccctgttccccagaagcgccagagccctggccgccagcgccctgcccgcccagggcagcagatggcccgtgctgagcagccccggcctgcccgccgccttcgccagcttccccgcctgcccccagagaagctacagcaccgaggagaagccccagcagcaccagaagaccaagatgatcgtgctgggcttcagcaaccccatcaactgggtgagaaccagaatcaaggccttcctgatctgggcctacttcgacaaggagttcagcatcaccgagttcagcgagggcgccaagcaggccttcgcccacgtgagcaagctgctgagccagtgcaagttcgacctgctggaggagctggtggccaaggaggtgctgcacgccctgaaggagaaggtgaccagcctgcccgacaaccacaagaacgccctggccgccaacatcgacgagatcgtgttcaccagcaccggcgacatcagcatctactacgacgagaagggcagaaagttcgtgaacatcctgatgtgcttctggtacctgaccagcgccaacatccccagcgagaccctgagaggcgccagcgtgttccaggtgaagctgggcaaccagaacgtggagaccaagcagctgctgagcgccagctacgagttccagagagagttcacccagggcgtgaagcccgactggaccatcgccagaatcgagcacagcaagctgctggagtag

SEQ ID NO: 215520 - DNA, 876 bp, Artificial Sequence
  derived and/or modified sequence
atggcactcgccgcgcggctacttccccaatttttacactcgagatccctgccttgcggcgcagtccgcctgcggactcccgccgtggccgaggtgcgcctcccctcagcgaccctctgttacttttgtcgctgtcggctaggactgggcgccgcgctgttccctcgttcagcgcgggcactggccgcatccgcgctgcccgcacagggctcacgctggccagtgctgtctagtcctggcctacccgctgctttcgcctcattccccgcctgtcctcagagaagctatagtactgaggaaaagcctcagcagcatcagaaaaccaagatgatagtgctgggtttcagcaaccccattaattgggtcaggactcggattaaggccttcctgatatgggcgtactttgataaggaattctctatcacagaattctcagaaggcgcaaagcaagcctttgcccatgtgtcaaaactcctctcccagtgcaaattcgatctcctggaggagctcgtggcaaaggaggtgctacatgcactgaaagagaaggtgactagcttgcctgataatcacaagaacgccctggccgcaaacatagacgagatcgtgttcacaagcacaggtgatatctctatctactacgatgagaaggggcgcaaatttgtgaacatactgatgtgcttttggtacttgacatccgccaacataccttctgagaccctgagaggggcatccgtgttccaggtgaagctgggaaaccagaacgtggaaaccaagcaactcctttcagcgtcttatgagtttcagcgcgagtttacccagggggtgaagcctgattggaccatcgctaggatcgaacactccaagctgttggagtag

SEQ ID NO: 215521 - DNA, 876 bp, Artificial Sequence
  derived and/or modified sequence
atggcactcgcagcacggctgctccctcaatttttgcactctcgctcattaccctgtggagccgtcagactccggactccagctgtcgccgaggtacgcctgccttccgcaaccctgtgctatttctgtagatgcagactggggctgggcgccgctctgtttccccgcagtgcccgcgccttggctgcttccgcactgccagcccagggttccaggtggcctgtgctgagcagccccggtctgcccgcggctttcgcatcgttccccgcgtgtccgcagcggtcttatagtaccgaagaaaaaccccaacagcatcagaagaccaagatgatagtgctgggattttcgaatccaattaactgggtgcgcactcgcattaaggcttttctgatctgggcgtatttcgataaggagttttccataacggagtttagcgaaggcgctaaacaggccttcgctcacgtatccaaactgctttcacagtgtaagttcgaccttctggaggagctggtagctaaagaagtattgcacgctctaaaggagaaggttacttctctccctgacaaccacaagaatgctctggccgcaaatatcgacgagattgtttttacgagcaccggtgacatctccatctactatgacgagaaggggcgcaagtttgtgaacattttgatgtgcttttggtacctgaccagcgcaaatattccctccgagactctgaggggcgctagcgtgttccaggtgaagctgggtaatcagaacgtggagaccaaacagctcttgtcagcctcttacgaattccagagagaattcacccagggggtcaaacctgactggactattgccagaatcgaacactccaagttgcttgaatag

SEQ ID NO: 215522 - DNA, 876 bp, Artificial Sequence
  derived and/or modified sequence
atggccctggccgcccggctgctgccccagttcctgcacagccgcagcctgccctgtggggctgtgcggctgcggaccccagctgtggccgaggtgcggctgcccagcgccaccctgtgctacttctgccgctgccgcctgggcctgggcgccgccctcttccccaggtctgcccgggccctggccgccagcgccctgcctgcccagggcagccgctggcctgtgctgagcagccctggcctgcctgctgcctttgccagcttccctgcctgcccccagaggagctacagcacagaggagaagccccagcagcaccagaagaccaagatgattgtgctgggcttcagcaaccccatcaactgggtgaggacccgcatcaaggccttcctgatctgggcctactttgacaaggagttcagcatcacagagttcagcgagggcgccaagcaggcctttgcccacgtgtccaagctgctgagccagtgcaagtttgacctgctggaggagctggtggccaaggaggtgctgcacgccctgaaggagaaggtgaccagcctgcctgacaaccacaagaatgccctggccgccaacattgatgaaattgtgttcaccagcactggagacatcagcatctactatgatgagaagggcaggaagtttgtgaacatcctgatgtgcttctggtacctgaccagcgccaacatccccagcgagaccctgcggggggccagcgtcttccaggtgaagctgggcaaccagaatgtggagaccaagcagctgctgagcgccagctatgagttccagcgggagttcacccagggcgtgaagccagactggaccatcgcccgcatcgagcacagcaagctgctggagtag

SEQ ID NO: 215523 - DNA, 876 bp, Artificial Sequence
  derived and/or modified sequence
atggccctggccgcccggctgctgccccagttcctgcacagccggtcattaccatgtggggccgtcaggctccgcacccctgccgtggcggaagtgcgtctgccctccgcgacgttgtgctacttctgcaggtgtcgactcggactcggggccgcactattccctcggagcgcacgggccctggctgccagtgccctgcctgcacagggatcccgctggcccgttttgagctctccaggccttcctgccgccttcgcctccttccccgcgtgcccccagagaagttattccactgaagaaaaacctcagcagcatcagaaaacaaagatgattgtgctcggcttcagcaatcctatcaactgggtaagaacccgtatcaaagccttcctgatttgggcctacttcgataaagaatttagcatcacagagttctccgaaggtgctaaacaggctttcgctcacgtctccaagctgctgtcccagtgtaaattcgatctgcttgaggagctagtggccaaagaagtcttgcacgccctcaaggagaaggtcacctccctgcctgataaccataagaatgctctggctgctaatattgacgagatcgtttttacatcaaccggagacattagcatttattacgatgaaaaaggccggaaatttgttaatattttaatgtgtttctggtacctgacttccgcaaatattccctcagagaccctgaggggggcttccgtgttccaggtgaaacttggtaatcagaatgtggagaccaagcagctattgagcgcttcttatgaattccagcgggagttcactcagggtgtgaaacccgattggacaatagcccgcattgaacactcaaagctgctggagtag

SEQ ID NO: 215524 - DNA, 876 bp, Artificial Sequence
  derived and/or modified sequence
atggccctggccgcccggctgctgccccagttcctgcacagccggtctcttccatgtggcgccgtgaggctgcgcacaccggcagttgctgaggtgcgtctgccttcagcaaccctgtgctatttctgtcggtgtcggctgggcctgggggctgctctgttccctagaagtgctagagcactagcagcaagcgctcttcccgcacagggatctcggtggccagttctttcgtctcccggcttgcctgccgctttcgccagtttccctgcctgcccacagcgctcatactccacagaagaaaagcctcaacagcatcaaaagactaaaatgatcgtactggggttttccaacccaatcaattgggtccggactagaattaaggcattcctgatctgggcctattttgacaaagagttctctattaccgagtttagtgaaggcgccaagcaagctttcgctcacgtgtccaagctcctctctcaatgtaaattcgatctcctggaggagctcgtcgccaaggaggtgttacatgcccttaaagagaaagtcacctccctaccggataaccacaagaatgcccttgctgcaaacatcgacgagatcgtatttacctccactggcgatatctctatttattacgatgagaaggggcgcaagtttgttaatatcttaatgtgcttttggtacctcacaagtgcaaacattccaagtgaaacactgagaggcgcgtccgtattccaagtgaaactcggcaaccagaatgtggagactaaacagctgttgtcggcatcatatgaattccaacgggaatttacacagggggtgaagcccgattggacaatcgccagaatagaacattcaaagttgttggagtag

SEQ ID NO: 215525 - DNA, 876 bp, Artificial Sequence
  derived and/or modified sequence
atggcattagctgctaggttactgccacagttcctgcatagtcggtcgctaccctgtggagccgtccgattaagaacacctgctgtagcggaggtcaggcttccaagcgccactttgtgttacttctgccgatgtcgactcggcttgggcgctgctctttttccaaggagcgcaagggcgctcgccgcaagtgccttacccgcacaaggaagccgatggccagttttatcatctcctggcctcccggctgcgttcgccagttttcctgcatgccctcagcgcagttacagcacagaagaaaagcctcagcaacatcagaaaacaaagatgatcgtgctggggttctctaaccctatcaattgggtaaggacaaggataaaagcatttctgatctgggcatactttgataaggagttcagtatcaccgaattttccgagggggcaaaacaggcgttcgctcatgtgagcaagcttcttagtcaatgcaagtttgatttactggaggaattggtagcgaaagaggtgctgcacgctctgaaggaaaaagtgacatcccttccagataatcataagaacgcccttgcagcaaacattgacgaaattgtatttacgtcaaccggcgatattagcatatattacgatgagaaaggcaggaagtttgtcaatattctgatgtgcttttggtatcttacatcggctaatatccctagcgagacactccggggagcctcagtcttccaggtgaaactgggaaaccagaatgtggagacaaaacagctcttgtcagcatcctatgagtttcagcgcgaatttactcagggggttaagcccgattggactatcgccaggattgagcacagcaagctgctcgaatag

SEQ ID NO: 215526 - DNA, 876 bp, Artificial Sequence
  derived and/or modified sequence
atggctctggcagcccgactgctcccccagtttttacattcacgctcgttaccatgtggcgcagtgcgcttaagaacacccgcagttgccgaggtgaggctgcccagcgctacgctgtgttacttttgccgatgccgcctgggcctgggcgcagccctgtttccacgttctgctcgggctcttgccgcatccgccctgccggcacagggcagccgatggccagtgttgagctcacctggcctgcccgctgcgtttgccagctttcctgcttgtccccaacgcagctactcaactgaggagaagcctcaacaacaccagaaaactaaaatgatcgtgcttggtttctcgaacccaataaactgggtgcgcacacgcattaaagcattcctcatctgggcctacttcgataaagagtttagtatcacggagtttagcgagggcgcaaagcaagcttttgctcatgtgagcaagctgctcagtcagtgtaagttcgacctgctggaagagttggtggcgaaagaagtactccacgcgttaaaggagaaagtgacttctttgccagacaaccacaaaaacgcgctggccgctaatatagacgagattgtctttacctctactggtgacatttccatatactacgatgaaaaaggacgcaagttcgtgaacatcctcatgtgcttctggtatctgacctccgccaacatcccttccgaaacactgcgcggtgcctcagtgtttcaggtgaaattgggcaaccagaatgtagaaacgaagcagctgctgagcgcatcctatgaatttcaacgggagtttacgcagggcgtgaagccggattggaccatcgcgagaatcgagcacagcaaattactggagtag

SEQ ID NO: 215527 - protein, 775 aa, Artificial Sequence
  derived and/or modified sequence
MEKFGMNFGGGPSKKDLLETIETQKKQLLQYQARLKDVVRAYKSLLKEKEALEASIKVLSVSHEADVGLAGVQLPGLTFPDSVDDRCSTHSEDSTGTATSLDTAASLTSTKGEFGVEDDRPARGPPPPKSEEASWSESGVSSSSGDGPFAGGEVDKRLHQLKTQLATLTSSLATVTQEKSRMEASYLADKKKMKQDLEDASNKAEEERARLEGELKGLQEQIAETKARLITQQHDRAQEQSDHALMLRELQKLLQEERTQRQDLELRLEETREALAGRAYAAEQMEGFELQTKQLTREVEELKSELQAIRDEKNQPDPRLQELQEEAARLKSHFQAQLQQEMRKTALAEDQLRQQSQVEEQRVAALENQISEVSELLGTYEKAKQKDQLAIQKLKERILQLDLENKTLALAASSRSPLDSHGEESSLDVNVLKDKMEKLKRLLQVAARKSQVTLDVEKLCDLEIMPSSEAADGEKATALYYQQELKQLKEEFERYKMRAQVVLKSKNTKDGNLGKELEAAQEQLAELKEKYISLRLSCEELEHQHQQEADDWKQELARLQQLHRQELERCQLDFRDRTLKLEEELHKQRDRALAVLTEKDLELEQLRSVALASGLPGRRSPVGGGGPGDPADTSSSDSLTQALQLAAANEPTFFLYAEQLARKEVEITSLRKQKHRLEVEVHQLQDRLLEEGERHREEVAALQSHIEKNIRDQSREGANLEYLKNIIYRFLTLPDSLGRQQTLTAILTILHFSPEEKQVIMRLPTSASWWPSGKR

SEQ ID NO: 215528 - DNA, 2328 bp, Artificial Sequence
  derived and/or modified sequence
atggagaagtttgggatgaactttggggggggcccttcaaagaaggatcttctggagaccattgagacccagaagaaacagctcctccagtaccaagctcgcctgaaggacgtcgtgagagcatacaaatctttgcttaaagagaaagaagctctagaagcgtcaatcaaagtgctgagcgtctcccatgaggctgacgtgggtctggccggggtgcagttgcccggactcacatttccggactccgtggacgacagatgctctacccattctgaggattctacaggcactgcaactagcctcgacactgctgcaagtctgacatcaacgaagggagagtttggagtcgaggacgaccggccagcacgtgggcccccccccccaaaaagtgaagaagcgagttggagtgagtcgggagtcagctcaagcagcggcgacgggccctttgctggcggcgaggtggacaagcgactgcaccagctgaaaacccagcttgcaactttgaccagcagcctggcaaccgttactcaggaaaaatcccgaatggaagcttcatatcttgcagacaaaaagaagatgaagcaggacctagaggacgccagcaataaagctgaggaagagcgggctagactcgagggagagctcaagggactgcaggaacagatcgcagaaactaaagcaaggctcatcacgcagcagcacgatagggcccaggagcagtccgaccatgcgctgatgctcagggagctgcagaagctcttgcaggaggaaaggacccaacgccaggatttagaactgagactcgaggagacgcgagaggccctcgctgggcgcgcctacgccgctgagcaaatggaaggcttcgaactccagaccaagcagctaactagggaggtggaagagttaaagtctgaactgcaggctattcgggacgaaaagaaccagcctgacccaagactgcaggagttgcaggaggaagccgcgcggctcaagagccactttcaggcacagttacaacaagaaatgagaaagacagctctggccgaggatcagctaagacagcagagtcaggtcgaagagcagagggtggctgccttagaaaaccaaatcagcgaggtttctgaactgcttggcacatacgagaaagctaaacaaaaagaccagttggccattcagaagctcaaggagcggatcctccaattagatctggagaacaagactttagctttggccgccagtagccggagccccctcgacagtcacggcgaggagtcctctctcgacgtcaacgtcttgaaggacaagatggagaaacttaaacggctactccaagttgccgcccggaagagccaggtgaccctcgacgtagaaaagctgtgtgatctggaaataatgccctcatcagaagcagcagacggcgaaaaagcgacagctctgtactatcagcaggagcttaaacagctcaaggaggagttcgaacggtataagatgagagcccaggttgtactgaagagtaagaatactaaggacggtaacctggggaaggaattggaggcagcacaggaacaactggctgagctaaaggagaaatacattagtttgagattatcctgtgaggaactagaacaccagcatcaacaagaggctgacgattggaagcaggaactggctagattacagcagctccaccgccaggaactagaaagatgtcagctggatttcagggaccgtaccctgaagctcgaagaggaactccacaaacagagagacagagccctcgctgtgctgacagagaaagacctggagctggaacagctgagatctgtggcgttggcgtcaggacttccaggacggcgaagccctgtgggcggcggaggcccgggagatccggccgacacaagctcttcggattcgctgacgcaggcactgcagctagcagctgccaatgaacccactttttttctctacgccgagcagttggcacggaaggaggtcgaaataacctcactgagaaagcagaagcatcgcctcgaggtcgaagtacaccagttgcaagatcggcttctggaagagggtgaaaggcatagagaggaggtcgctgcattgcaaagtcatattgagaaaaacattagagatcagtcccgcgaaggtgccaatctggagtacctaaaaaatatcatttataggtttctgacattacctgattctctcggccgccaacagacattgaccgcaatcctgaccattctgcacttttcccccgaggaaaagcaggtgataatgaggctgcccacgtccgctagctggtggccctctggaaagcgatag

SEQ ID NO: 215529 - DNA, 4149 bp, Artificial Sequence
  derived and/or modified sequence
acggaagcgccgttgtcggcaggcagctttagttaggatgtcgtgatgggaccgagctcagcgtaaccctctggccgacgtgggccgagggggccggcccgggctgctgtggcccagacgagcggagagtgcggagcggcttctgggccagcgctaacgagccctggcagtgcgcacctctggtgccagtgtcgccccgcctccggggtagaatccgccccagccctccgggcctgggaccgggcggccgctttcgccagtccgtccggccgttccgcattaggtccgggataactaggtggagtaggtgtgcggcccgccgccggacagcccgctcgctgtttctttaagcccccgcctgcgtcttcacggccctctcccgttctgctggaaagctgacgtggggcaatccgttcagaccctccatggagaagtttgggatgaatttcgggggcggcccgagcaagaaggacttgctggagactatagagacccagaagaagcagcttctccagtaccaggcacggctcaaggatgtggtccgtgcctataaaagcctgctgaaggagaaagaggcattagaggccagcatcaaggtgctgtcggtatcccacgaggcagatgtgggcctcgcaggtgtccagcttccaggcctcacctttcctgactctgtggatgaccggtgctccactcacagcgaggatagcactgggaccgccactagcttggatactgcggccagtctcaccagcaccaagggtgagtttggggtagaagatgacagaccggcccgtggaccaccacctccaaagtccgaagaggccagttggtccgagagtggcgttagcagtagcagtggggatgggccatttgcaggtggggaggtggacaaaagactgcaccagctgaagactcagttggctactttgaccagttctttggctacagtcactcaggagaagtcccgcatggaggcttcttacttggctgacaagaaaaagatgaaacaggacttagaggatgccagtaacaaggcggaggaggagagggcccgcctggagggagaattgaaggggctgcaggagcaaatagcagaaaccaaagcccggcttatcacgcagcagcatgatcgggcccaagagcagagtgaccatgccttgatgctgcgtgagctccagaagctgctgcaggaggagaggacccagcgccaggacttggagcttaggttagaagagacccgagaagccttggcaggacgagcatatgcagctgaacagatggaaggatttgaactgcagaccaagcagctgacccgtgaggtggaggagctgaaaagtgaactgcaggccattcgagatgagaagaatcagccagatccccggctgcaagaacttcaggaagaggctgcccgccttaagagccatttccaggctcagttacagcaggaaatgagaaagacagctcttgcagaggatcaactccgtcagcaatctcaggtagaagaacagagggtggcagccctggagaatcaaatatccgaggtgtctgagctgctaggcacctacgagaaagccaagcagaaggaccagctggccattcagaagctgaaggagcgcattctgcagctggacctggagaacaagacactggctctagcagcctccagcaggtcccctttagacagccatggagaggagtccagtctggatgtcaatgtcctgaaagataagatggagaagctgaagaggctgctgcaggttgcggccaggaaaagccaggtgaccctggatgtggagaagctctgtgacctggagataatgcccagctcggaggctgctgatggggagaaggctactgcactctattaccaacaggagctgaaacagctgaaggaagagtttgagaggtacaagatgagagcccaggttgtcctcaaaagcaagaataccaaagatggtaacctgggaaaggagctggaggcagcccaggaacagcttgcagagctgaaggagaagtatatttccctgcggctctcctgcgaggagctggagcaccaacaccagcaggaggctgatgactggaagcaggagctggcccggctgcagcagctccaccggcaggagctggagcggtgccagctggacttcagggaccgcacactgaaactggaggaggagctgcacaagcagcgggatcgtgccctagctgtgctcaccgagaaggacttggaactggagcaactgcgttctgtggccttggcctctgggctgccaggacgcagaagtcctgtgggtggtggcggtcctggggacccagctgacacatcatcctctgatagcctgacccaagcattacaacttgcagcggccaatgagcccactttctttctgtacgctgagcaactggcccgcaaggaggtggagatcacatcactgaggaagcagaagcacaggctggaggtcgaggtgcatcagctgcaggatcggctgctggaggagggcgaacggcatcgtgaggaggttgcagccctgcagagccacatcgaaaagaacatcagggaccagagcagggagggagccaatctggagtacctcaaaaacatcatctaccgcttcctgaccttacctgactccctgggccgccagcagactctcacagccatactgactatcttgcacttcagtccagaggagaaacaagtgataatgcgactcccaaccagtgccagctggtggccttctggcaagagatgatgccattttcatgaattcctggaatttctgtgcctcttttatgtgggaaagggcaggctctggtttctgctgcctcttctcttacattgtcatttatttcttcactgtgttgagctgggaggagtcttcaatgtgggaagggattttctgccaaatgccattaatgctgctttatccttaggccctagagatactgaaagtcctggggcagtatcttctgatggtgtgcatgtgaggagaagatgaggttaggactgagaagtgcagaagttggaacagtggtaaggctgttttaaaataagatgttttgttttaataatatgctcctggcacaaagctaggagtaaatgtgactccaaagggagttcagttaatctctgaaatgcacaaaacctagctattttctccctctcatcacagtctgagtctggtccattgctaccccaattctctggggacataaaaccaggctggaaagggaccaggaagtttgaaatagtgacatatcatccactagtcccaagggctaaggaatagtgagtttattctggaaggaactgggaagcttagtctaattagtgcctggggatgacctatgcaatcacaccgcttatgaccatcctagagagggccctgagcaccagcttgatcttagggatttccaaagtaacctgctttttgcctggatagggttaaaatagacctttcttgcctatccttgccttaacctatctgcctgaggttggcctgagattgtgagtcaacgactttgctatcttttcctcagtgttgaactttcattaagaaataaagtcctagcttcttacagagaggggtccaaatggtgaatgctcatcctgcctggattcaaggaattagctcagagattggcccctagcttttctgcctttgtagggacagcaaaaggggaaaatttgctgcagaaaattccaaaagattgctgtagctctcacagggaagtggtaaagatcagctaaacctgggttggggtgctttctgcccagtgggtcttggcataagtagattaatcctgctcttttaagaaaaggcaacttattcaggcagtctggaaagggggttctcagaaaactcagtttctttattccttcttttctcccaactactgttactggttatagaggtctttggactctaaagaccaatgtttggccactaactggactaatatgtatctttctgtgatttcatcatagaggtctgttttgtgagggtttggggtgcagaaaactttgattaaatcttaatgggaggctgggtgacctggattatctacagtgagcagacttaaatggaacagaagtttatgtgtccaaatgatggaatcattaaacctgagtgacttgacctgtgtggt

SEQ ID NO: 215530 - DNA, 2328 bp, Artificial Sequence
  derived and/or modified sequence
atggagaagtttggcatgaactttggaggcggccccagcaagaaggacctgctggagaccatcgagacccagaagaagcagctgctgcagtaccaggcccggctgaaggatgtggtgcgggcctacaagagcctgctgaaggagaaggaggccctggaggccagcatcaaggtgctgtctgtgtcccatgaagcagatgtgggcctggccggcgtgcagctgcccggcctgaccttcccagacagcgtggatgaccgctgcagcacccacagcgaggacagcactggaacagccaccagcctggacacagctgccagcctgaccagcaccaagggggagtttggagtggaggatgacaggcctgcccggggccccccaccacccaagtctgaggaggcctcctggagcgagagcggcgtgagcagcagcagtggagatggcccctttgctggaggagaggtggacaagaggctgcaccagctgaagacccagctggccaccctgaccagcagcctggccaccgtgacccaggagaagagcaggatggaggccagctacctggccgacaagaagaagatgaagcaggacctggaggatgccagcaacaaggccgaggaggagcgggcccggctggagggggagctgaagggcctgcaggagcagattgctgagaccaaggcccggctcatcacccagcagcacgaccgggcccaggagcagagcgaccacgccctgatgctgcgggagctgcagaagctgctgcaggaggagaggacccagaggcaggacctggagctgcggctggaggagacccgggaggccctggccggccgggcctatgctgctgagcagatggagggctttgagctgcagaccaagcagctgacccgggaggtggaggagctgaagtctgagctgcaggccatcagagatgagaagaaccagcctgacccccggctgcaggagctgcaggaggaggccgcccggctgaagagccacttccaggcccagctgcagcaggagatgaggaagacagccctggccgaggaccagctgcggcagcagagccaggtggaggagcagagggtggccgccctggagaaccagatcagcgaggtgtctgagctgctgggcacctatgagaaggccaagcagaaggaccagctggccatccagaagctgaaggagcgcatcctgcagctggacctggagaacaagaccctggccctggccgccagcagccgcagccccctggacagccatggagaggagagcagcctggatgtgaatgtgctgaaggacaagatggagaagctgaagaggctgctgcaggtggccgccaggaagagccaggtgaccctggatgtggagaagctgtgtgacctggagatcatgcccagcagcgaggccgcagatggagagaaggccacagccctgtactaccagcaggagctgaagcagctgaaggaggagtttgagcgctacaagatgagggcccaggtggtgctgaagagcaagaacaccaaggatggcaacctgggcaaggagctggaggccgcccaggagcagctggccgagctgaaggagaagtacatcagcctgcggctgagctgtgaggagctggagcaccagcaccagcaggaggctgatgactggaagcaggagctggcccggctgcagcagctgcaccggcaggagctggagcgctgccagctggacttccgggacaggaccctgaagctggaggaggagctgcacaagcagagggaccgggccctggccgtgctgacagagaaggacctggagctggagcagctgcggtctgtggccctggccagcggcctgcccggccgccgcagccctgtgggcggcggcggccctggggaccctgctgacaccagcagcagtgacagcctgacccaggccctgcagctggccgccgccaatgagcccaccttcttcctgtatgcagagcagctggccaggaaggaggtggagatcaccagcctgaggaagcagaagcaccggctggaggtggaggtgcaccagctgcaggaccggctgctggaggagggggagcggcaccgggaggaggtggccgccctgcagagccacatcgagaagaacatccgggaccagagccgggagggcgccaacctggagtacctgaagaacatcatctaccgcttcctgaccctgcctgacagcctgggccggcagcagaccctgacagccatcctgaccatcctgcacttcagccctgaggagaagcaggtgatcatgaggctgcccaccagcgcctcctggtggcccagcggcaagaggtag

SEQ ID NO: 215531 - DNA, 2328 bp, Artificial Sequence
  derived and/or modified sequence
atggagaagttcggcatgaacttcggcggcggccccagcaagaaggacctgcttgagacaatagaaacccagaaaaagcagttattacaatatcaggctaggttgaaggacgttgtgagggcctacaaaagcctactgaaagagaaagaggcactggaagccagtattaaagtgctgtccgtgagccacgaagctgatgtgggactcgctggagtgcagctcccggggctgacattccctgactcggtggacgaccggtgcagtacgcactctgaggactcgactgggactgcaacaagcttagacaccgctgcatcattgacaagcacaaagggcgagttcggcgtggaagatgataggcccgcacgcgggcccccgccgcctaaatctgaggaagcctcatggtctgaaagtggtgtgtcaagtagcagcggcgacggaccttttgccggaggcgaggtggataagcggctgcatcagcttaagacacagctggccacactgacgtcctcccttgcgacggtgacgcaggagaaatctcggatggaggcctcatacctcgccgacaaaaagaagatgaaacaggacctcgaggatgcctcgaacaaggccgaagaagagagggcacggcttgagggtgagctcaaaggcctgcaagagcagatcgctgaaactaaggcccgcctaattactcagcaacatgatcgtgcccaggagcagtcagatcacgccctgatgttgcgcgagttgcagaaacttttacaggaagaaagaacccagagacaagaccttgagctaagactggaggagactcgtgaagcattggcgggtcgcgcatacgcagccgagcagatggagggctttgagctgcagaccaaacagctgaccagggaagtggaggaactgaagagcgaacttcaggccatccgagatgaaaagaaccagccggatccccggctccaagagctacaggaggaagctgccaggctcaaaagtcatttccaggcccaactgcaacaagaaatgcggaagactgccttggccgaggatcaactccggcaacagtcccaagtcgaggaacagagggtcgccgcattagagaatcaaatctcagaagtcagcgaattgctagggacctacgaaaaagcaaaacaaaaggaccaactggccatacagaagctcaaagaaagaatcctgcagttagaccttgagaacaaaactctggcgctggctgcgagctcgcggtcccccctggactctcacggagaggagagcagtctggatgtcaacgtcctgaaggacaagatggagaagctgaagaggctgctgcaggtggctgcacgaaaatctcaggtgaccctggatgtggagaaactgtgtgacttagaaataatgccctcttccgaggccgctgatggggagaaagctaccgccctctactatcagcaggaactaaagcagcttaaagaagaattcgaaaggtataagatgcgcgcgcaggtagtcttgaagtcgaagaacaccaaagacggcaatctaggaaaggaactggaggctgctcaggaacaactggctgagcttaaggagaaatatatctccctccgtctgagctgcgaggagctggagcatcagcatcaacaggaggcagatgactggaaacaggagcttgcgagactccagcagttgcacagacaggagctcgagcggtgtcagctggattttcgggaccgcaccttaaagctggaagaagagctccataagcagcgggacagggctttggctgttctaacagaaaaagacctggagctggagcagttgcggagcgtggctctcgcgagtggcctgcctggccggaggagtccggtcggtgggggaggacctggcgaccctgctgatactagtagtagtgattccctcactcaggccctgcagctggccgctgctaacgaacccacattctttctgtacgcggaacagttggcacgaaaggaagttgaaattacgagcctgagaaagcagaagcaccgcctggaagtggaagtgcaccagctacaggatcgcctactcgaagaaggggagcgccaccgagaagaagtcgctgcactgcaaagccacatcgaaaagaatattcgggatcagagtagagagggggccaatctggagtatctcaaaaacattatttaccggtttctgacactcccagactccctcggtcgccagcagaccttgaccgccattttaaccatactgcatttctctcctgaagagaagcaggtgatcatgcggctgccaacctccgcttcttggtggcctagtgggaagcgctag

SEQ ID NO: 215532 - DNA, 2328 bp, Artificial Sequence
  derived and/or modified sequence
atggagaaattcggtatgaacttcggcggtggaccctctaaaaaagatctgctagagaccattgaaacgcagaagaaacagctgctacagtatcaggctcgcctgaaagacgtcgtacgggcttataaaagcctgctgaaggagaaggaggcgctagaggcatctataaaggtgctgagcgtctcgcacgaagctgatgtgggcctcgctggtgtacagctgcccggactcacattccctgactccgtggacgatcgctgcagcacccacagtgaagacagtacaggcaccgccacatcattggacaccgctgcttccctgactagtacgaaaggagagttcggcgttgaggatgatagacctgcacggggtcctccaccacccaagagtgaggaggccagctggagtgaatcaggcgtctcttcgtcaagcggcgacggtcctttcgctggcggagaagtggacaagagacttcaccagctgaagacgcagctcgctactcttacctcatcactggcaacagttacccaagagaagtctcgtatggaggcctcatatttggccgacaaaaagaaaatgaagcaggatctggaagacgcttctaataaagctgaggaggagcgcgctcgcttggaaggggagttgaaaggccttcaggagcagatcgctgagaccaaggcaaggctcatcacgcagcagcatgacagggctcaggaacaaagcgaccacgccctcatgctccgtgaactgcaaaaattgcttcaagaggaaaggactcagagacaggacctggaactgcgtctggaggaaaccagggaggctctggctggacgcgcatacgccgcagaacagatggaaggctttgaactgcagaccaaacagctcacacgtgaagtcgaagaactcaaaagtgagttgcaggccataagggacgagaagaatcagccggacccaagacttcaagagctgcaggaggaagcagccaggttaaagagccattttcaggcacaacttcagcaggagatgagaaaaaccgcgctcgctgaagaccaactcaggcagcaatcccaggtggaggaacagcgtgtcgcagctttggagaatcaaatctccgaagtcagcgagcttttgggcacatatgaaaaagctaaacagaaagaccagctggccatacagaagttgaaggagcggattctgcaattagatctcgaaaacaagaccttagccctagcggcatcctcaagaagtcctctggatagtcatggcgaagagtcaagcctggatgtgaatgtgctcaaggataagatggaaaaactcaagaggctgctgcaggttgcagcccgtaaatcccaagtaacactggatgtcgagaagctgtgtgacctggaaataatgccctcttctgaggcagcagatggggaaaaggctaccgcactatactatcagcaggaacttaaacagctcaaagaggagtttgagagatataagatgcgtgctcaggtagtacttaagtctaagaacactaaggacggtaatctggggaaagaacttgaggctgcacaggaacagttagcggaactaaaggagaaatatatctccctgagactgagttgtgaagagctggagcatcaacaccaacaggaggccgacgattggaaacaagaactcgcccgactccagcagctgcatcgccaggaacttgagcggtgtcaactagattttagagaccgcacgttgaagctcgaagaggagctccataaacagagggaccgcgcactggctgtgttgactgagaaggatttggaactggagcaacttcgctctgtcgcattggcctccggcctgcctggccgtcgctcacccgtcggagggggtggtcctggtgaccctgcagataccagctcaagcgacagtctaacccaggccctacagctggctgctgccaacgaaccaacctttttcctttatgctgaacaactggccaggaaggaagtagagattacctcactcagaaaacagaaacaccgcctcgaggtggaggtgcaccagctccaagaccgcctgctggaggagggcgagcgccatagggaggaagtggccgctttgcagtctcacatcgagaaaaacatacgggatcagtctcgcgagggagccaacctggagtatctgaagaacatcatctatcggttcctcactctgccagactctctcggcaggcaacaaacactaaccgccatcctgacaattttgcatttttctcctgaggaaaagcaggtgatcatgcggctaccgacctctgcgtcatggtggcccagcgggaaacgttag

SEQ ID NO: 215533 - DNA, 2328 bp, Artificial Sequence
  derived and/or modified sequence
atggagaagttcggcatgaacttcggcggcggccccagcaagaaggacctgctggagaccatcgagacccagaagaagcagctgctgcagtaccaggccagactgaaggacgtggtgagagcctacaagagcctgctgaaggagaaggaggccctggaggccagcatcaaggtgctgagcgtgagccacgaggccgacgtgggcctggccggcgtgcagctgcccggcctgaccttccccgacagcgtggacgacagatgcagcacccacagcgaggacagcaccggcaccgccaccagcctggacaccgccgccagcctgaccagcaccaagggcgagttcggcgtggaggacgacagacccgccagaggcccccccccccccaagagcgaggaggccagctggagcgagagcggcgtgagcagcagcagcggcgacggccccttcgccggcggcgaggtggacaagagactgcaccagctgaagacccagctggccaccctgaccagcagcctggccaccgtgacccaggagaagagcagaatggaggccagctacctggccgacaagaagaagatgaagcaggacctggaggacgccagcaacaaggccgaggaggagagagccagactggagggcgagctgaagggcctgcaggagcagatcgccgagaccaaggccagactgatcacccagcagcacgacagagcccaggagcagagcgaccacgccctgatgctgagagagctgcagaagctgctgcaggaggagagaacccagagacaggacctggagctgagactggaggagaccagagaggccctggccggcagagcctacgccgccgagcagatggagggcttcgagctgcagaccaagcagctgaccagagaggtggaggagctgaagagcgagctgcaggccatcagagacgagaagaaccagcccgaccccagactgcaggagctgcaggaggaggccgccagactgaagagccacttccaggcccagctgcagcaggagatgagaaagaccgccctggccgaggaccagctgagacagcagagccaggtggaggagcagagagtggccgccctggagaaccagatcagcgaggtgagcgagctgctgggcacctacgagaaggccaagcagaaggaccagctggccatccagaagctgaaggagagaatcctgcagctggacctggagaacaagaccctggccctggccgccagcagcagaagccccctggacagccacggcgaggagagcagcctggacgtgaacgtgctgaaggacaagatggagaagctgaagagactgctgcaggtggccgccagaaagagccaggtgaccctggacgtggagaagctgtgcgacctggagatcatgcccagcagcgaggccgccgacggcgagaaggccaccgccctgtactaccagcaggagctgaagcagctgaaggaggagttcgagagatacaagatgagagcccaggtggtgctgaagagcaagaacaccaaggacggcaacctgggcaaggagctggaggccgcccaggagcagctggccgagctgaaggagaagtacatcagcctgagactgagctgcgaggagctggagcaccagcaccagcaggaggccgacgactggaagcaggagctggccagactgcagcagctgcacagacaggagctggagagatgccagctggacttcagagacagaaccctgaagctggaggaggagctgcacaagcagagagacagagccctggccgtgctgaccgagaaggacctggagctggagcagctgagaagcgtggccctggccagcggcctgcccggcagaagaagccccgtgggcggcggcggccccggcgaccccgccgacaccagcagcagcgacagcctgacccaggccctgcagctggccgccgccaacgagcccaccttcttcctgtacgccgagcagctggccagaaaggaggtggagatcaccagcctgagaaagcagaagcacagactggaggtggaggtgcaccagctgcaggacagactgctggaggagggcgagagacacagagaggaggtggccgccctgcagagccacatcgagaagaacatcagagaccagagcagagagggcgccaacctggagtacctgaagaacatcatctacagattcctgaccctgcccgacagcctgggcagacagcagaccctgaccgccatcctgaccatcctgcacttcagccccgaggagaagcaggtgatcatgagactgcccaccagcgccagctggtggcccagcggcaagagatag

SEQ ID NO: 215534 - protein, 1226 aa, Artificial Sequence
  derived and/or modified sequence
MDREERKTINQGQEDEMEIYGYNLSRWKLAIVSLGVICSGGFLLLLLYWMPEWRVKATCVRAAIKDCEVVLLRTTDEFKMWFCAKIRVLSLETYPVSSPKSMSNKLSNGHAVCLIENPTEENRHRISKYSQTESQQIRYFTHHSVKYFWNDTIHNFDFLKGLDEGVSCTSIYEKHSAGLTKGMHAYRKLLYGVNEIAVKVPSVFKLLIKEVLNPFYIFQLFSVILWSTDEYYYYALAIVVMSIVSIVSSLYSIRKQYVMLHDMVATHSTVRVSVCRVNEEIEEIFSTDLVPGDVMVIPLNGTIMPCDAVLINGTCIVNESMLTGESVPVTKTNLPNPSVDVKGIGDELYNPETHKRHTLFCGTTVIQTRFYTGELVKAIVVRTGFSTSKGQLVRSILYPKPTDFKLYRDAYLFLLCLVAVAGIGFIYTIINSILNEVQVGVIIIESLDIITITVPPALPAAMTAGIVYAQRRLKKIGIFCISPQRINICGQLNLVCFDKTGTLTEDGLDLWGIQRVENARFLSPEENVCNEMLVKSQFVACMATCHSLTKIEGVLSGDPLDLKMFEAIGWILEEATEEETALHNRIMPTVVRPPKQLLPESTPAGNQEMELFELPATYEIGIVRQFPFSSALQRMSVVARVLGDRKMDAYMKGAPEAIAGLCKPETVPVDFQNVLEDFTKQGFRVIALAHRKLESKLTWHKVQNISRDAIENNMDFMGLIIMQNKLKQETPAVLEDLHKANIRTVMVTGDSMLTAVSVARDCGMILPQDKVIIAEALPPKDGKVAKINWHYADSLTQCSHPSAIDPEAIPVKLVHDSLEDLQMTRYHFAMNGKSFSVILEHFQDLVPKLMLHGTVFARMAPDQKTQLIEALQNVDYFVGMCGDGANDCGALKRAHGGISLSELEASVASPFTSKTPSISCVPNLIREGRAALITSFCVFKFMALYSIIQYFSVTLLYSILSNLGDFQFLFIDLAIILVVVFTMSLNPAWKELVAQRPPSGLISGALLFSVLSQIIICIGFQSLGFFWVKQQPWYEVWHPKSDACNTTGSGFWNSSHVDNETELDEHNIQNYENTTVFFISSFQYLIVAIAFSKGKPFRQPCYKNYFFVFSVIFLYIFILFIMLYPVASVDQVLQIVCVPYQWRVTMLIIVLVNAFVSITVEESVDRWGKCCLPWALGCRKKTPKAKYMYLAQELLVDPEWPPKPQTTTEAKALVKENGSCQIITIT

SEQ ID NO: 215535 - protein, 47 aa, Artificial Sequence
  derived and/or modified sequence
MDREERKTINQGQEDEMEIYGYNLSRWKLAIVSLGVICSGGFLLLLL

SEQ ID NO: 215536 - DNA, 3681 bp, Artificial Sequence
  derived and/or modified sequence
atggacagagaggagagaaagaccatcaaccagggccaggaggacgagatggagatctacggctacaacctgagcagatggaagctggccatcgtgagcctgggcgtgatctgcagcggcggcttcctgctgctgctgctgtactggatgcccgagtggagagtgaaggccacctgcgtgagagccgccatcaaggactgcgaggtggtgctgctgagaaccaccgacgagttcaagatgtggttctgcgccaagatcagagtgctgagcctggagacctaccccgtgagcagccccaagagcatgagcaacaagctgagcaacggccacgccgtgtgcctgatcgagaaccccaccgaggagaacagacacagaatcagcaagtacagccagaccgagagccagcagatcagatacttcacccaccacagcgtgaagtacttctggaacgacaccatccacaacttcgacttcctgaagggcctggacgagggcgtgagctgcaccagcatctacgagaagcacagcgccggcctgaccaagggcatgcacgcctacagaaagctgctgtacggcgtgaacgagatcgccgtgaaggtgcccagcgtgttcaagctgctgatcaaggaggtgctgaaccccttctacatcttccagctgttcagcgtgatcctgtggagcaccgacgagtactactactacgccctggccatcgtggtgatgagcatcgtgagcatcgtgagcagcctgtacagcatcagaaagcagtacgtgatgctgcacgacatggtggccacccacagcaccgtgagagtgagcgtgtgcagagtgaacgaggagatcgaggagatcttcagcaccgacctggtgcccggcgacgtgatggtgatccccctgaacggcaccatcatgccctgcgacgccgtgctgatcaacggcacctgcatcgtgaacgagagcatgctgaccggcgagagcgtgcccgtgaccaagaccaacctgcccaaccccagcgtggacgtgaagggcatcggcgacgagctgtacaaccccgagacccacaagagacacaccctgttctgcggcaccaccgtgatccagaccagattctacaccggcgagctggtgaaggccatcgtggtgagaaccggcttcagcaccagcaagggccagctggtgagaagcatcctgtaccccaagcccaccgacttcaagctgtacagagacgcctacctgttcctgctgtgcctggtggccgtggccggcatcggcttcatctacaccatcatcaacagcatcctgaacgaggtgcaggtgggcgtgatcatcatcgagagcctggacatcatcaccatcaccgtgccccccgccctgcccgccgccatgaccgccggcatcgtgtacgcccagagaagactgaagaagatcggcatcttctgcatcagcccccagagaatcaacatctgcggccagctgaacctggtgtgcttcgacaagaccggcaccctgaccgaggacggcctggacctgtggggcatccagagagtggagaacgccagattcctgagccccgaggagaacgtgtgcaacgagatgctggtgaagagccagttcgtggcctgcatggccacctgccacagcctgaccaagatcgagggcgtgctgagcggcgaccccctggacctgaagatgttcgaggccatcggctggatcctggaggaggccaccgaggaggagaccgccctgcacaacagaatcatgcccaccgtggtgagaccccccaagcagctgctgcccgagagcacccccgccggcaaccaggagatggagctgttcgagctgcccgccacctacgagatcggcatcgtgagacagttccccttcagcagcgccctgcagagaatgagcgtggtggccagagtgctgggcgacagaaagatggacgcctacatgaagggcgcccccgaggccatcgccggcctgtgcaagcccgagaccgtgcccgtggacttccagaacgtgctggaggacttcaccaagcagggcttcagagtgatcgccctggcccacagaaagctggagagcaagctgacctggcacaaggtgcagaacatcagcagagacgccatcgagaacaacatggacttcatgggcctgatcatcatgcagaacaagctgaagcaggagacccccgccgtgctggaggacctgcacaaggccaacatcagaaccgtgatggtgaccggcgacagcatgctgaccgccgtgagcgtggccagagactgcggcatgatcctgccccaggacaaggtgatcatcgccgaggccctgccccccaaggacggcaaggtggccaagatcaactggcactacgccgacagcctgacccagtgcagccaccccagcgccatcgaccccgaggccatccccgtgaagctggtgcacgacagcctggaggacctgcagatgaccagataccacttcgccatgaacggcaagagcttcagcgtgatcctggagcacttccaggacctggtgcccaagctgatgctgcacggcaccgtgttcgccagaatggcccccgaccagaagacccagctgatcgaggccctgcagaacgtggactacttcgtgggcatgtgcggcgacggcgccaacgactgcggcgccctgaagagagcccacggcggcatcagcctgagcgagctggaggccagcgtggccagccccttcaccagcaagacccccagcatcagctgcgtgcccaacctgatcagagagggcagagccgccctgatcaccagcttctgcgtgttcaagttcatggccctgtacagcatcatccagtacttcagcgtgaccctgctgtacagcatcctgagcaacctgggcgacttccagttcctgttcatcgacctggccatcatcctggtggtggtgttcaccatgagcctgaaccccgcctggaaggagctggtggcccagagaccccccagcggcctgatcagcggcgccctgctgttcagcgtgctgagccagatcatcatctgcatcggcttccagagcctgggcttcttctgggtgaagcagcagccctggtacgaggtgtggcaccccaagagcgacgcctgcaacaccaccggcagcggcttctggaacagcagccacgtggacaacgagaccgagctggacgagcacaacatccagaactacgagaacaccaccgtgttcttcatcagcagcttccagtacctgatcgtggccatcgccttcagcaagggcaagcccttcagacagccctgctacaagaactacttcttcgtgttcagcgtgatcttcctgtacatcttcatcctgttcatcatgctgtaccccgtggccagcgtggaccaggtgctgcagatcgtgtgcgtgccctaccagtggagagtgaccatgctgatcatcgtgctggtgaacgccttcgtgagcatcaccgtggaggagagcgtggacagatggggcaagtgctgcctgccctgggccctgggctgcagaaagaagacccccaaggccaagtacatgtacctggcccaggagctgctggtggaccccgagtggccccccaagccccagaccaccaccgaggccaaggccctggtgaaggagaacggcagctgccagatcatcaccatcacctag

SEQ ID NO: 215537 - DNA, 2151 bp, Artificial Sequence
  derived and/or modified sequence
atggtggccacccacagcaccgtgagagtgagcgtgtgcagagtgaacgaggagatcgaggagatcttcagcaccgacctggtgcccggcgacgtgatggtgatccccctgaacggcaccatcatgccctgcgacgccgtgctgatcaacggcacctgcatcgtgaacgagagcatgctgaccggcgagagcgtgcccgtgaccaagaccaacctgcccaaccccagcgtggacgtgaagggcatcggcgacgagctgtacaaccccgagacccacaagagacacaccctgttctgcggcaccaccgtgatccagaccagattctacaccggcgagctggtgaaggccatcgtggtgagaaccggcttcagcaccagcaagggccagctggtgagaagcatcctgtaccccaagcccaccgacttcaagctgtacagagacgcctacctgttcctgctgtgcctggtggccgtggccggcatcggcttcatctacaccatcatcaacagcatcctgaacgaggtgcaggtgggcgtgatcatcatcgagagcctggacatcatcaccatcaccgtgccccccgccctgcccgccgccatgaccgccggcatcgtgtacgcccagagaagactgaagaagatcggcatcttctgcatcagcccccagagaatcaacatctgcggccagctgaacctggtgtgcttcgacaagaccggcaccctgaccgaggacggcctggacctgtggggcatccagagagtggagaacgccagattcctgagccccgaggagaacgtgtgcaacgagatgctggtgaagagccagttcgtggcctgcatggccacctgccacagcctgaccaagatcgagggcgtgctgagcggcgaccccctggacctgaagatgttcgaggccatcggctggatcctggaggaggccaccgaggaggagaccgccctgcacaacagaatcatgcccaccgtggtgagaccccccaagcagctgctgcccgagagcacccccgccggcaaccaggagatggagctgttcgagctgcccgccacctacgagatcggcatcgtgagacagttccccttcagcagcgccctgcagagaatgagcgtggtggccagagtgctgggcgacagaaagatggacgcctacatgaagggcgcccccgaggccatcgccggcctgtgcaagcccgagaccgtgcccgtggacttccagaacgtgctggaggacttcaccaagcagggcttcagagtgatcgccctggcccacagaaagctggagagcaagctgacctggcacaaggtgcagaacatcagcagagacgccatcgagaacaacatggacttcatgggcctgatcatcatgcagaacaagctgaagcaggagacccccgccgtgctggaggacctgcacaaggccaacatcagaaccgtgatggtgaccggcgacagcatgctgaccgccgtgagcgtggccagagactgcggcatgatcctgccccaggacaaggtgatcatcgccgaggccctgccccccaaggacggcaaggtggccaagatcaactggcactacgccgacagcctgacccagtgcagccaccccagcgccatcgaccccgaggccatccccgtgaagctggtgcacgacagcctggaggacctgcagatgaccagataccacttcgccatgaacggcaagagcttcagcgtgatcctggagcacttccaggacctggtgcccaagctgatgctgcacggcaccgtgttcgccagaatggcccccgaccagaagacccagctgatcgaggccctgcagaacgtggactacttcgtgggcatgtgcggcgacggcgccaacgactgcggcgccctgaagagagcccacggcggcatcagcctgagcgagctggaggccagcgtggccagccccttcaccagcaagacccccagcatcagctgcgtgcccaacctgatcagagagggcagagccgccctgatcaccagcttctgcgagctggccctgttcagcatcgtgacctacagcctggaccacttcatcatcagcatcctgatcagcaacatgctggtgctgttcttcagcgacttccacaactgcgccttctacagcctggtgtag

SEQ ID NO: 215538 - DNA, 3681 bp, Artificial Sequence
  derived and/or modified sequence
atggatagagaggaacgtaaaacaataaatcagggacaggaggatgagatggaaatttatgggtacaacctgagcagatggaagcttgccatcgtgtcattaggggttatctgttccggtggcttcctgctgctgttactttattggatgcccgaatggcgggtgaaggccacttgcgtgcgggcagccatcaaagactgcgaggtcgtcttgctgagaacaacagatgaattcaaaatgtggttttgcgccaaaattcgcgtgctttccctagaaacgtatcctgtgtcttcacctaagtctatgtctaataaactgtctaatggacatgcagtctgcctgatcgagaatccaaccgaggagaaccgccacaggatcagcaagtactctcagactgagagccagcagattcgctatttcacccaccacagtgtcaagtacttctggaatgacacaatccataactttgatttcctcaaaggacttgacgaaggggtgtcatgcacatctatctatgaaaagcactccgccggattgacaaaaggtatgcatgcctatcgcaagctgctttacggggtcaatgagatcgccgttaaagtcccttctgtgttcaagctgttgataaaggaggttttgaaccctttctacatcttccagctgtttagcgtgatcctgtggagtaccgatgagtactactattacgccttggctatcgtcgtgatgagcatcgtaagcattgtgtcttcactgtattccatccgtaagcagtacgtcatgctccacgatatggtcgccacacactccactgtccgcgtatcagtttgcagggtgaatgaggagattgaagaaatcttttctacggacttggtcccaggggacgtgatggtgattccactcaacgggaccatcatgccatgtgacgctgtgctgataaacggcacttgcatcgttaacgagtccatgcttaccggagagagcgtacccgtcactaaaactaatctgccgaatccatcagtagacgtcaaaggaataggggacgagctctataatcccgaaacgcataagcgccatacattgttttgtggtacaactgttatccagactcgcttctacacaggcgaacttgtcaaagccatcgtggtgcggaccgggttttctaccagtaagggccagctggttcggagcatattgtacccgaagccgacagatttcaagctgtacagggacgcatatctgttcctcttgtgtttggtcgctgtggccggaataggcttcatttacaccatcatcaactccattctgaatgaggtgcaggttggagtcatcattatcgagagcctggacataattacaatcacagtgcctccagccttacctgcggccatgaccgccggcattgtatacgcccagcggaggctgaagaaaatagggatcttttgtatttcgccacagcgtataaatatttgcggccagctgaacctagtttgtttcgataagacaggcactcttaccgaggatggactggatctctggggcatacaaagagtagaaaatgctaggttcctttctcctgaggaaaatgtctgcaatgaaatgttggtaaaatcacagtttgtggcgtgcatggctacgtgtcattcactgaccaaaatcgaaggagtcctcagcggcgaccctctggatctgaaaatgttcgaagctatcggttggatactggaggaggccacagaagaggagactgctttgcacaacaggataatgcctactgtggtgagaccaccaaaacagctactgcccgaaagtacccccgcaggcaaccaagaaatggaattgttcgaattgccagcaacctacgagatcggcatcgtacgccaatttccattttcctcagccttgcaaaggatgtcggtagttgcacgagtcttgggggacaggaagatggatgcatacatgaagggcgcgcctgaggctatcgctgggctctgtaagcccgagacagtgcccgttgactttcaaaatgtgctggaggacttcaccaaacagggattccgtgtgattgccttagcccatcgcaaactggaaagcaagctcacttggcacaaggtgcagaacatatcacgggatgctatagaaaacaatatggactttatgggtctgattattatgcagaacaaattgaagcaagagaccccggccgtgttggaggatctccacaaagccaacatcagaacagtaatggttactggcgacagcatgctcaccgccgtttccgtggctagggattgcggaatgattcttccccaagataaggtcataatcgccgaagcactccctcccaaagatggcaaggtcgcgaaaattaactggcattacgccgatagcctgacacaatgttcacaccctagtgcgattgaccctgaagctatccctgtgaagctagtccatgatagcctcgaggatctgcaaatgacccggtaccatttcgcaatgaacgggaagtcctttagtgtaatcctggagcacttccaggatcttgtacccaaactgatgctccacgggacggtctttgctcgtatggcgcccgaccagaaaacccaattaatcgaggccctccaaaatgtggactactttgtcggaatgtgcggcgacggcgcaaatgactgtggcgccctgaagagagcgcatggaggcatcagtttaagtgaactggaggcatctgtggcctccccttttactagcaagacaccatctatttcttgtgtccctaacctcataagagagggtagggccgccctaataacttccttctgtgtatttaagttcatggcattatactctatcatccaatatttttcagtgactttactctactccatcctgagcaatttaggcgactttcagttcctgtttatcgacctcgccatcattctcgttgtagtcttcacaatgagcctcaatccagcttggaaagaactcgtcgcacagaggcctcctagtgggctcatttctggcgccctccttttttctgtgctgtctcagatcatcatctgcatagggtttcaatccttgggcttcttctgggtgaaacagcagccttggtatgaggtatggcaccctaaaagcgacgcctgcaacacaaccggctcaggcttctggaattccagccatgtggataacgaaaccgagctggatgagcacaatatccagaactacgagaacacaacggtattctttattagtagctttcagtacttaattgtggcaatcgccttctccaaaggaaaaccatttagacagccatgctataagaactatttcttcgttttcagtgttatcttcctatacatcttcatcctttttatcatgctgtatcccgttgcgtccgttgaccaggtcctgcagatcgtgtgtgtgccttatcagtggcgcgtgacaatgctaattatcgtcctcgtcaatgcatttgtttccataacggtagaagagagtgtggataggtggggcaaatgctgcctaccatgggctttgggctgtcgaaaaaagactccgaaggccaaatatatgtatttggctcaggaacttctcgtagaccctgaatggccacccaagccacagactacaacggaggctaaagcactcgtgaaagagaatgggtcttgccagataatcaccattacatag

SEQ ID NO: 215539 - DNA, 2151 bp, Artificial Sequence
  derived and/or modified sequence
atggttgctacacattccactgtgagggtcagcgtttgcagagtgaatgaagaaatcgaggaaatattttccaccgatctggtgccgggcgatgtgatggttatccctttaaacggtactatcatgccttgtgacgcagtcttgataaacgggacgtgcattgtcaacgagtccatgcttactggagagtctgttccggtgacgaagacaaatctgcctaacccttctgtggatgttaaagggatcggagatgaactgtacaatccggagacccataagaggcataccctcttttgtggcactacagtgattcagacccggttttacacaggggagttggtcaaggccatcgtggtgaggaccgggttttctaccagcaagggacagttggtgcgctcaattctgtatccgaagcccaccgatttcaaactctaccgcgacgcttatttgtttctgctctgccttgtggctgtggccgggattgggtttatatacacaattattaacagcattctgaacgaagtgcaagtcggcgtgatcataatcgagtccctggatattattacaattacagtcccacccgcattgccagccgctatgaccgccggaatcgtgtacgcccagagacgactaaagaaaattgggattttctgtattagcccccagcgaataaacatttgtggacagctcaacttggtatgttttgacaagacaggaactcttacagaggatggcctcgatctgtggggaatccaacgggtcgagaacgcccgattcttatcccccgaagagaacgtatgtaacgaaatgctcgtgaaaagtcaattcgtggcatgcatggcaacttgccattctttgacaaagattgaaggggtcctgtccggggatccacttgatctgaaaatgttcgaagccatcggatggatcctggaggaagccaccgaggaggaaactgctctacataacagaatcatgccaacggtcgtgaggccaccaaagcagttgctcccggagtccaccccggctggcaaccaggagatggaactgttcgaattgccagcaacctacgagatcggtatcgtaaggcagtttccgttttcatctgcattacagaggatgtctgtcgtggctagggtcctcggagatagaaagatggatgcatatatgaaaggtgctcctgaggctatcgcgggtctttgtaagcctgaaactgtccctgtcgattttcagaatgtactggaggactttactaagcaggggttcagagtgattgcccttgcacaccgcaagctcgaatctaaacttacctggcataaggtgcaaaacatctcccgtgacgccattgagaacaacatggactttatgggcctgataattatgcaaaataaactgaaacaggagacaccggccgtcctggaagacctgcataaggctaatattaggactgtgatggtcaccggggattccatgctgacagccgtgagcgttgcaagagattgtggtatgatcctgcctcaggataaagtgatcatcgctgaggccctgcccccaaaagatggaaaggtagctaaaatcaactggcactatgccgattctctaactcagtgctcacatccctctgccatagatcctgaagcgattcctgttaaactggtacacgactctctggaagacttgcaaatgacacggtaccacttcgcaatgaatggaaagtcgttctctgtgattctggagcactttcaggacctggtacctaagctcatgctgcatggtaccgtgtttgccagaatggcaccagatcaaaagacccagctcattgaggcgttgcaaaatgttgattacttcgtgggaatgtgcggcgacggggccaatgactgtggggcgctgaaaagggcccacgggggcatttctctgtccgagctcgaagcctcagtcgccagtccatttacttccaagacaccctccatttcctgtgtaccgaacctgattagggaggggagggcggctcttattacttcattctgcgaactggccctattcagcattgtgacatattctttagatcacttcattatctccattcttatcagtaacatgctggtcctgttcttttccgattttcacaattgtgctttttattcactggtctag

SEQ ID NO: 215540 - DNA, 3681 bp, Artificial Sequence
  derived and/or modified sequence
atggatagagaggagagaaagaccatcaatcaaggccaagaagacgaaatggagatatacggatataacctctcccgttggaaacttgcaattgtctcgctgggagtgatctgctctggagggtttctgcttctgctgctctactggatgccagaatggcgtgtgaaggccacctgcgtgagagccgctatcaaagactgcgaagtggtgctcctgcgaacaaccgatgagtttaagatgtggttttgtgccaaaataagagttctctcgctggaaacctaccccgtgtctagtccgaagtctatgagtaataaactgtcgaacggacacgccgtctgtctgattgagaaccccaccgaggagaacagacaccggatctccaagtatagccaaaccgaatcccagcagattagatattttacacaccacagtgtgaaatacttttggaatgataccatacataattttgacttcttaaaaggactggacgaaggagtgtcttgcacctcgatctacgaaaagcacagcgcgggccttactaagggtatgcacgcctaccggaagttgttgtatggggttaacgaaattgccgtaaaagtccccagcgtttttaagctgctgattaaagaggttttaaatcccttctacatattccaactgttcagcgtgatcctgtggtccactgatgagtactactattacgccctggccattgtggtgatgtctatcgttagcatcgtttcttctctctactctattcgtaagcaatacgtgatgttgcacgacatggtggccacccactcgactgttagagtgtcagtgtgccgagtcaatgaggaaatcgaagaaatattctcaactgacctggtccccggagacgttatggttattcctcttaatgggacaattatgccatgcgatgcagtgttgattaatgggacctgtattgtgaatgagagcatgctcacaggcgagtccgtgcccgtgactaagactaacctccctaacccctccgtggacgtcaaggggattggtgatgaattatacaaccctgagacccataaaagacatacgctgttctgtgggaccaccgtgatccagactaggttttacactggggaactcgttaaagcaatcgtcgtaaggactggcttcagcacgtcgaaaggacagctggtacggagcattctttaccccaaacccaccgactttaagctgtaccgggatgcttatctatttttgctctgtctcgtggcagttgctggcatcggttttatctatactataattaatagcatactcaacgaagttcaggtcggggtgatcatcatcgagtctctggacataataaccatcaccgtccctcctgcgctgccagctgcgatgactgccggcatcgtgtacgcccaaaggcgactaaaaaaaattggcattttttgtattagccctcagcgcattaatatctgcggacaactcaatcttgtctgtttcgataaaaccggcactctcacagaggacggactggatctttgggggatacagcgggttgagaacgctcgattcctgtcccctgaggagaacgtctgcaatgagatgctagtaaaaagtcagttcgtagcctgcatggctacatgtcacagtctgaccaagatagagggagtcctgtctggagatccgctcgacctgaagatgttcgaggcaattggttggatcctggaggaagctacggaggaagagaccgctttgcataatcgcataatgccaaccgttgtgaggccacctaaacaactgctgccggagagcacacctgccggcaaccaggaaatggagctcttcgaactgcctgccacctacgagattggaatcgtcagacaatttccgttcagctctgcactgcagaggatgagcgtggtcgcacgcgtcctgggcgaccgaaagatggatgcttacatgaaaggcgctccggaagccatcgctgggctctgtaaacctgagacagtgccagtggatttccagaatgtgcttgaagatttcaccaagcagggttttagagttatcgccctggcccaccgcaagctggagagcaaactcacctggcataaggtccaaaatatctcaagagacgccatagaaaataacatggacttcatggggctcataattatgcagaacaagttaaaacaggaaacacctgccgtgttagaagatttacataaggctaatatccggacagttatggttacaggagactcaatgcttaccgctgtcagcgtcgctcgagattgcgggatgatcctcccccaggataaggtgattattgcggaagccttaccccctaaagatgggaaggtagcgaagataaattggcactatgcggatagcctcactcagtgctcacaccctagcgctatcgatcctgaggcaattccagtcaagcttgtacacgactctttggaagacctgcagatgactcggtaccattttgcgatgaacggaaagtcatttagtgtaatccttgagcactttcaggaccttgtgcccaaactaatgctgcatggcacagtcttcgccagaatggcaccagatcaaaagacccagttaatcgaggccctccagaacgtggattattttgtggggatgtgtggcgatggtgcgaatgattgtggagctttgaagcgggcccatggcgggatctcccttagcgaactggaagccagcgtggcttcaccttttacttctaaaactccttcaatttcctgtgtgcctaacctcatcagagagggacgggccgctctgatcactagtttctgtgtcttcaaatttatggctttatatagcatcatccagtatttctctgtcactctgctttacagcatcctttctaatttaggtgattttcaatttttatttattgatttggccataatcctggtagtcgtgtttactatgtccttaaacccggcctggaaggaacttgtcgcgcagcggcctccttcaggactcataagtggcgctctactctttagcgtcttgagtcaaattattatttgtatcggattccaaagtctcggtttcttttgggtgaaacagcagccttggtatgaggtgtggcatcccaaatctgacgcgtgtaatacaaccggatctggcttctggaattcctcacacgtagataatgaaacagagctggacgaacataatattcagaactacgaaaacacaacagtgttctttatttcttcgtttcaatacctgatcgtcgccatcgcgttttctaagggtaaaccgtttaggcagccctgctacaagaactattttttcgtcttttcagtgatcttcctgtacatatttatattgttcattatgctctatcctgtcgcctctgtggaccaggtgcttcagatcgtttgcgtgccttatcagtggagagtaacaatgctgattatagttcttgtgaacgccttcgtgtccataacggtggaggaatccgtcgaccgctggggcaagtgttgtctgccatgggccctcgggtgtagaaagaagactcccaaagctaaatatatgtacctggctcaagaactgctcgtggaccctgagtggcctccaaagccacagacgaccaccgaagccaaagctcttgtaaaggaaaacggttcctgtcagatcatcacgatcacttag

SEQ ID NO: 215541 - DNA, 3681 bp, Artificial Sequence
  derived and/or modified sequence
atggaccgggaggagaggaagaccatcaaccagggccaggaggatgagatggagatctacggctacaacctgagccgctggaagctggccatcgtgtccctgggcgtcatctgcagcggcggcttcctgctgctgctgctgtactggatgcctgagtggagggtgaaggccacctgtgtgcgggccgccatcaaggactgtgaggtggtgctgctgcggaccacagatgagttcaagatgtggttctgtgccaagatccgggtgctgagcctggagacctaccctgtgagcagccccaagtccatgagcaacaagctgagcaatggacatgctgtgtgcctgattgagaaccccacagaagaaaatagacaccgcatcagcaagtacagccagacagagagccagcagatccgctacttcacccaccacagcgtgaagtacttctggaatgacaccatccacaactttgacttcctgaagggcctggatgaaggagtgtcctgcaccagcatctatgagaagcacagcgctggcctgaccaagggcatgcacgcctacaggaagctgctgtatggagtgaatgaaattgctgtgaaggtgcccagcgtcttcaagctgctgatcaaggaggtgctgaaccccttctacatcttccagctgttcagcgtcatcctgtggagcacagatgagtactactactatgccctggccatcgtggtgatgagcatcgtgtccatcgtgagcagcctgtacagcatcaggaagcagtatgtgatgctgcatgacatggtggccacccacagcacagtgcgggtgtctgtgtgccgggtgaatgaggagattgaggagatcttcagcacagacctggtgcctggagatgtgatggtgatccccctgaatggcaccatcatgccctgtgatgctgtgctgatcaatggcacctgcatcgtgaatgaatccatgctgactggagagagcgtgcctgtgaccaagaccaacctgcccaaccccagcgtggatgtgaagggcattggagatgagctgtacaaccctgagacccacaagaggcacaccctcttctgtggcaccaccgtcatccagacccgcttctacaccggggagctggtgaaggccatcgtggtgaggacaggcttcagcaccagcaagggccagctggtgcgcagcatcctgtaccccaagcccacagacttcaagctgtacagagatgcctacctgttcctgctgtgcctggtggccgtggccggcatcggcttcatctacaccatcatcaacagcatcctgaatgaggtgcaggtgggcgtcatcatcatcgagagcctggacatcatcaccatcaccgtgcccccagccctgcctgctgccatgacagctggcatcgtgtatgcccagaggcggctgaagaagattggcatcttctgcatcagcccccagaggatcaacatctgtggccagctgaacctggtgtgctttgacaagacaggcaccctgacagaagatggcctggacctgtggggcatccagagggtggagaatgcccgcttcctgagccctgaggagaatgtgtgcaatgagatgctggtgaagagccagtttgtggcctgcatggccacctgccacagcctgaccaagattgaaggagtgctgagcggggaccccctggacctgaagatgtttgaggccatcggctggatcctggaggaggccacagaggaggagacagccctgcacaaccgcatcatgcccaccgtggtgcggccccccaagcagctgctgcctgagagcaccccagctggcaaccaggagatggagctgtttgagctgcctgccacctatgagatcggcatcgtgcggcagttccccttcagcagcgccctgcagaggatgtctgtggtggcccgggtgctgggggacaggaagatggatgcctacatgaagggggcccctgaggccatcgccggcctgtgcaagccagagaccgtgcctgtggacttccagaatgtgctggaggacttcaccaagcagggcttccgggtcatcgccctggcccacaggaagctggagagcaagctgacctggcacaaggtgcagaacatcagcagagatgccatcgagaacaacatggacttcatgggcctcatcatcatgcagaacaagctgaagcaggagaccccagctgtgctggaggacctgcacaaggccaacatcagaacagtgatggtgactggagacagcatgctgacagctgtgtctgtggcccgggactgtggcatgatcctgccccaggacaaggtgatcatcgccgaggccctgccccccaaggatggcaaggtggccaagatcaactggcactacgccgacagcctgacccagtgcagccaccccagcgccatcgaccctgaggccatccctgtgaagctggtgcatgacagcctggaggacctgcagatgacccgctaccactttgccatgaatggcaagagcttcagcgtcatcctggagcacttccaggacctggtgcccaagctgatgctgcacggcaccgtgtttgccaggatggccccagaccagaagacccagctgattgaggccctgcagaatgtggactactttgtgggcatgtgtggagatggagccaatgactgtggggccctgaagagggcccatggaggcatcagcctgtctgagctggaggcctctgtggccagccccttcaccagcaagacccccagcatcagctgtgtgcccaacctgatccgggagggccgggccgccctgatcaccagcttctgtgtgttcaagttcatggccctgtacagcatcatccagtacttctctgtgaccctgctgtacagcatcctgagcaacctgggggacttccagttcctgttcatcgacctggccatcatcctggtggtggtgttcaccatgagcctgaacccagcctggaaggagctggtggcccagaggcctccttctggcctcatcagcggggccctgctcttctctgtgctgagccagatcatcatctgcatcggcttccagagcctgggcttcttctgggtgaagcagcagccctggtatgaggtgtggcaccccaagagtgatgcctgcaacaccactggaagtggcttctggaacagcagccacgtggacaatgaaacagagctggatgagcacaacatccagaactatgagaacaccaccgtcttcttcatcagcagcttccagtacctgattgtggccatcgccttcagcaagggcaagcccttccggcagccctgctacaagaactacttctttgtgttcagcgtcatcttcctgtacatcttcatcctcttcatcatgctgtaccctgtggcctctgtggaccaggtgctgcagatcgtgtgtgtgccctaccagtggagggtgaccatgctgatcatcgtgctggtgaatgcctttgtgtccatcaccgtggaggagagcgtggaccgctggggcaagtgctgcctgccctgggccctgggctgcaggaagaagacccccaaggccaagtacatgtacctggcccaggagctgctggtggaccctgagtggccacccaagccccagaccaccacagaggccaaggccctggtgaaggaaaatggcagctgccagatcatcaccatcacctag

SEQ ID NO: 215542 - DNA, 2151 bp, Artificial Sequence
  derived and/or modified sequence
atggtggccacccacagcacagtgcgggtgtctgtgtgccgggtgaatgaggagattgaggagatcttcagcacagacctggtgcctggagatgtgatggtgatccccctgaatggcaccatcatgccctgtgatgctgtgctgatcaatggcacctgcatcgtgaatgaatccatgctgactggagagagcgtgcctgtgaccaagaccaacctgcccaaccccagcgtggatgtgaagggcattggagatgagctgtacaaccctgagacccacaagaggcacaccctcttctgtggcaccaccgtcatccagacccgcttctacaccggggagctggtgaaggccatcgtggtgaggacaggcttcagcaccagcaagggccagctggtgcgcagcatcctgtaccccaagcccacagacttcaagctgtacagagatgcctacctgttcctgctgtgcctggtggccgtggccggcatcggcttcatctacaccatcatcaacagcatcctgaatgaggtgcaggtgggcgtcatcatcatcgagagcctggacatcatcaccatcaccgtgcccccagccctgcctgctgccatgacagctggcatcgtgtatgcccagaggcggctgaagaagattggcatcttctgcatcagcccccagaggatcaacatctgtggccagctgaacctggtgtgctttgacaagacaggcaccctgacagaagatggcctggacctgtggggcatccagagggtggagaatgcccgcttcctgagccctgaggagaatgtgtgcaatgagatgctggtgaagagccagtttgtggcctgcatggccacctgccacagcctgaccaagattgaaggagtgctgagcggggaccccctggacctgaagatgtttgaggccatcggctggatcctggaggaggccacagaggaggagacagccctgcacaaccgcatcatgcccaccgtggtgcggccccccaagcagctgctgcctgagagcaccccagctggcaaccaggagatggagctgtttgagctgcctgccacctatgagatcggcatcgtgcggcagttccccttcagcagcgccctgcagaggatgtctgtggtggcccgggtgctgggggacaggaagatggatgcctacatgaagggggcccctgaggccatcgccggcctgtgcaagccagagaccgtgcctgtggacttccagaatgtgctggaggacttcaccaagcagggcttccgggtcatcgccctggcccacaggaagctggagagcaagctgacctggcacaaggtgcagaacatcagcagagatgccatcgagaacaacatggacttcatgggcctcatcatcatgcagaacaagctgaagcaggagaccccagctgtgctggaggacctgcacaaggccaacatcagaacagtgatggtgactggagacagcatgctgacagctgtgtctgtggcccgggactgtggcatgatcctgccccaggacaaggtgatcatcgccgaggccctgccccccaaggatggcaaggtggccaagatcaactggcactacgccgacagcctgacccagtgcagccaccccagcgccatcgaccctgaggccatccctgtgaagctggtgcatgacagcctggaggacctgcagatgacccgctaccactttgccatgaatggcaagagcttcagcgtcatcctggagcacttccaggacctggtgcccaagctgatgctgcacggcaccgtgtttgccaggatggccccagaccagaagacccagctgattgaggccctgcagaatgtggactactttgtgggcatgtgtggagatggagccaatgactgtggggccctgaagagggcccatggaggcatcagcctgtctgagctggaggcctctgtggccagccccttcaccagcaagacccccagcatcagctgtgtgcccaacctgatccgggagggccgggccgccctgatcaccagcttctgtgagctggccctcttcagcatcgtgacctacagcctggaccacttcatcatcagcatcctgatcagcaacatgctggtgctcttcttcagtgacttccacaactgtgccttctacagcctggtgtag

SEQ ID NO: 215543 - DNA, 3681 bp, Artificial Sequence
  derived and/or modified sequence
atggaccgggaggagcggaagaccatcaaccagggccaggaggacgaaatggaaatttatggatacaacctaagcaggtggaaattagcaatcgtttccctgggagtgatatgcagcggcgggtttctgctgctcctactgtattggatgcctgagtggcgcgtgaaagcgacatgtgtgcgagcagccattaaggactgtgaagttgtcctgctgcgcaccactgatgagttcaaaatgtggttttgcgccaagattagggtactgtctctggagacttaccctgtgtcctctcccaaatccatgtctaacaagctgtccaatggccatgcagtgtgcctgattgaaaacccaacagaagagaataggcatcgcatttcaaagtactctcagacagagagccagcagattagatatttcacccaccacagcgtcaaatacttctggaatgacaccattcataattttgactttttgaaaggtctggacgagggcgtcagctgtacttcaatctatgaaaaacactcagcggggctgacaaaaggcatgcatgcatatcgcaagctactgtatggagtaaacgagattgccgtgaaagttcccagtgtgttcaagcttctgatcaaagaggttttaaaccctttctacatctttcagctcttctctgtgatcttatggagcactgacgagtattactattatgccctggctatcgttgtgatgtctatcgtcagcatcgtaagcagcttgtattcgattcgcaagcaatacgttatgttgcatgatatggttgcgacacactccaccgttagagtctccgtgtgcagagtcaatgaggagatcgaagagatcttttctacagatctggtcccaggcgacgtcatggtgatccctcttaatggcaccatcatgccctgtgacgctgtcttgattaacggaacttgcattgtgaacgagtctatgctgactggagagtccgttcctgtcacgaagacaaacctgccgaacccaagcgtcgacgttaaagggattggcgatgagctgtacaacccagaaacacataagaggcatacgttattttgtggaacaaccgtaattcagacgcggttttatacaggagagctggttaaggcaattgtagtgaggacaggtttcagcaccagcaagggacagctggtgcgatccattctgtatcctaaacctacagactttaaactgtaccgggatgcatatcttttcctactttgtctcgtcgcagtggctggcatcggcttcatctacacaattattaacagcattcttaacgaggtgcaagtcggtgtgatcatcatagaaagcctcgatattataactataaccgtgcctccagccctgccagctgccatgacagcggggattgtgtatgctcagcggcggcttaaaaagattggaatattttgcatctcaccccaaaggatcaatatctgtggacagctgaatctggtgtgctttgacaagaccggaactttgactgaggatggtctggacctttgggggatacagcgcgttgagaatgctcgctttctgagtccagaggaaaacgtctgcaacgagatgctggtgaaatcccagtttgtcgcctgcatggctacctgtcacagtctgactaagattgaaggagtgttatccggtgaccccctagatttgaaaatgttcgaagcgattggatggattttggaggaagccactgaagaggagactgccctccacaaccggataatgcctaccgtggtccgaccgcctaagcagctcctgccagagtccaccccagccggcaaccaagagatggagctgtttgaattgccggccacgtacgaaattggaattgtgaggcaatttccgttctcctctgcccttcagcgtatgtctgtcgtggcccgcgtgctcggagatcgaaaaatggatgcctacatgaaaggcgctccagaggcaatcgcaggcctctgtaagccggaaacagtgccagtggattttcagaacgtgcttgaagatttcactaagcagggttttcgggtaattgcccttgctcaccggaaattggagtccaagcttacttggcacaaggtccagaatatcagtcgggacgctattgaaaataacatggattttatgggactcataattatgcagaataagctgaagcaggagacacccgccgtgcttgaggacctccataaagccaatattcggactgtgatggttacgggtgactctatgctcactgccgtttccgtcgcgagggattgcggcatgattttaccacaggacaaggtgatcatcgcagaagctctcccacctaaggatgggaaagtggctaaaatcaattggcactatgccgatagtctgacacaatgttcccacccttctgctatcgaccccgaggcaattcccgttaaacttgtccacgactctctggaggatttgcagatgacgcgctaccattttgccatgaatggaaaatccttcagtgtcattttggagcacttccaggacctggtgcccaagttaatgttacatggtacagtcttcgcgagaatggcaccggatcagaaaacacagctgatagaggcactgcagaacgtagactattttgtgggcatgtgcggtgacggggcaaacgattgtggggcactgaagagagcacatggaggaatcagtctgtctgaactggaggcatccgtggcctcgccgtttactagcaagaccccttccatttcgtgcgttccgaacttgattcgagagggaagagcagcccttatcacttcattttgcgtttttaaatttatggcactatatagtataatccagtatttcagtgtgacacttttgtattcgatcctaagcaacttgggagatttccaattcctgtttatcgatctggctatcattcttgtggtcgtctttaccatgtctcttaacccagcttggaaggaactcgtggcccagcgcccacctagcggcctgatatccggagcgctcctattttccgtgctgtcacagataattatctgcataggctttcagtccctgggcttcttttgggtgaagcagcagccttggtacgaggtgtggcatcctaagtcagatgcatgcaatacgaccggaagcggtttttggaactcatcgcacgtggacaatgagacagaactggacgagcataatatccagaattacgagaacaccacggtcttctttatctctagtttccaatatctaattgttgccatcgccttctccaagggaaaaccctttcggcaaccttgttataaaaactacttttttgtgttcagtgtcatcttcctgtacatctttatcttgtttattatgctgtacccagtcgcatccgttgaccaggtacttcagattgtttgtgtgccatatcagtggcgagtgacaatgctgatcattgtcctggtcaacgccttcgtgtccataacagtggaagaatcggtggaccgttggggaaagtgctgcttaccctgggccctgggatgtagaaagaagacacctaaggcaaaatacatgtatttagctcaggaacttctagtggatcctgagtggcctccaaaaccacagactacgactgaagccaaggcgcttgtgaaggagaacggctcttgccagattattactataacctag

SEQ ID NO: 215544 - DNA, 2151 bp, Artificial Sequence
  derived and/or modified sequence
atggtggccacccacagcaccgtgcgggtgagcgtgtgccgggtgaacgaggaaatcgaggagatcttttctaccgacctggtcccgggggacgtgatggtcattcccctcaatggcactatcatgccttgtgatgctgtacttattaacggcacttgcatagtcaatgagtccatgctcaccggagagagcgtgccagtgactaagaccaatctgccaaacccgagcgtcgatgtaaagggcatcggagatgagctatacaaccccgaaactcataaacgccatacgcttttctgcgggaccacggtgatccagaccagattctatacgggagagctggtgaaggctatagttgtgcgcaccggatttagcacatctaagggtcaattggtgcggagcatcctttatccaaagcctacagatttcaagttatacagagatgcttacctgttcctcctgtgcctggtagcagttgcaggcataggcttcatatacacaatcatcaactcaattctcaacgaggtccaagtaggggtcataattattgaatctctcgatatcataaccattacagtcccacccgcccttccagccgctatgaccgccggaatcgtctatgcccagagaagactaaagaaaatcggcatcttttgtatttccccccagaggattaatatttgcggacagctgaatctggtgtgctttgacaagactgggaccctaacagaggatgggttggacctttggggaatccagagagtcgaaaatgcaaggtttttgtcccctgaggaaaacgtctgcaatgaaatgctggtgaaatcacaatttgtggcttgcatggctacttgccacagcctaacaaaaatagaaggggttctgtccggcgatcctctcgacctgaagatgttcgaggccataggttggattctggaggaggccacagaggaagagacagctttacacaatcgtatcatgccaacggttgttagacccccaaagcaactcttacctgaaagcacccctgccggcaaccaggaaatggaactgttcgaattgccagcgacctacgaaatcggaatagtgcgtcaattccctttttcttcagctctgcagaggatgtccgtggtggctagggtgctgggagataggaaaatggacgcctacatgaagggcgcccccgaggctattgccggattatgtaagcctgaaactgtacctgtggactttcagaacgtgctcgaagacttcaccaagcagggattccgcgtaattgctctggcccacagaaagctggaatctaagctgacatggcataaggtgcagaatatttcacgtgacgctatcgaaaacaatatggattttatgggccttatcattatgcagaacaagctcaaacaggagaccccagcagtgctggaagatctgcacaaggctaacattcgaaccgtgatggtgacgggagactccatgcttaccgccgtgagcgtagctagggactgtggcatgatcctaccacaggacaaagtgatcatagcggaggctctccctcctaaggatggaaaggtggctaagataaactggcactatgccgactccctgacccagtgctcacacccctctgcaattgatccagaagccatccctgtgaagctggtgcacgattcactggaagatttgcagatgacccggtatcactttgctatgaatgggaagtcctttagtgtgatcctggagcacttccaggacttggtgcctaaattgatgctccacggcactgtcttcgccagaatggctcctgatcagaagactcagctgatcgaagcactgcagaatgtcgattactttgtgggcatgtgcggagacggtgcgaatgattgtggggccctgaagagagcccacggagggatatccctgtccgagctggaggcgtcggtcgcgagcccatttacgagtaagactcctagcataagctgcgtgccaaatctcattcgtgagggacgggcagcgcttatcacctcgttctgcgagctagccttattttcaatcgtaacctattcgttagatcactttataataagcatcctgatctccaatatgctggtcctgttcttctcggatttccataattgtgcattctattcactggtgtag

SEQ ID NO: 215545 - DNA, 3681 bp, Artificial Sequence
  derived and/or modified sequence
atggaccgggaggagcggaagaccatcaaccagggccaggaggacgaaatggagatctatggctacaatctgtctcggtggaaactggccatcgtgtcccttggcgtcatctgctccggcggtttcctcttgcttctgttgtattggatgcctgagtggagggtgaaggccacgtgcgtcagggccgctatcaaggattgtgaggtggtgttactgagaaccacagacgagtttaagatgtggttttgcgccaaaattagagtcctctccctggagacctatcccgtatcgtcccctaagtccatgtctaataaacttagcaatggtcatgccgtgtgcctgattgagaatcctactgaagaaaatcggcaccggatcagtaaatattctcaaacggagtcccagcagattcggtactttacccatcatagcgtcaaatacttttggaacgatacgatccacaattttgacttcctgaagggcttggatgaaggcgtgtcttgtacttctatatatgagaagcactccgcaggactaacgaaaggcatgcacgcttacaggaaactcctttacggggtgaatgaaatcgccgtgaaggtgcccagtgtgttcaagctgttgattaaggaagtcctgaatccattctatatattccagctgtttagcgtgatcctgtggtccaccgacgagtattactattacgccctggcgatcgtcgtgatgtcaatcgttagcatcgtatcctccctgtattccatcagaaagcagtatgtcatgcttcacgatatggtggctacccattctacagtgagagtctcggtctgtcgtgtgaatgaagaaatcgaagaaatcttcagcactgatctggtgcctggtgacgtgatggtgatccccctgaacggcaccatcatgccttgtgatgcagtgctcataaacgggacctgtatcgtgaatgagagcatgttaaccggcgaatcagttcccgtcaccaaaacaaatctccccaatccttctgttgacgtaaagggcattggtgatgaactttacaacccagagacccataaacgccataccctgttctgtggcacaaccgttattcagactcgattttacactggcgaactagtgaaggccatcgttgtgcgtacagggttctccacctccaaaggccagctggtacggtccatcctgtaccctaaaccaacggatttcaaactctatagagatgcttacctgtttctactctgcctagtcgctgtggccggtatcgggtttatctatacaatcattaactccattctgaacgaggtgcaagtcggggtgattattatagagagcctcgacattatcacaataactgtgcctccagccctccctgccgccatgacagctggcattgtctacgcccaacggcgcctcaagaagataggaatcttctgtattagcccacaacggatcaacatctgcgggcaactgaacttggtctgcttcgacaagaccggcaccctgactgaggatgggcttgacctgtggggcatccagagggtcgagaatgccagattcctgagcccagaggagaacgtgtgtaacgagatgctggtgaagtctcagtttgttgcatgcatggccacgtgtcacagcctgacaaagatcgaaggcgtgctgtcaggagatcctttagatttgaaaatgttcgaagccataggctggattctggaggaggcaaccgaggaggaaaccgccttgcataatcgtatcatgccaactgtggtcaggcccccaaaacagctgctcccggagagcactcccgcaggcaaccaggaaatggagctgtttgagctacctgcaacctacgagattggcatagtacgtcagttcccattcagctctgctctgcagaggatgtccgtcgtcgccagggtcttgggggacagaaaaatggacgcatacatgaaaggcgccccagaggctatagctgggttatgtaagcccgagacagttcctgtggacttccaaaatgtgttggaggacttcacaaaacaggggtttcgggtgattgcccttgcccatcgtaagttggaaagcaagttgacatggcataaagtgcagaatatttctcgggatgcaatcgagaataatatggattttatgggactgataatcatgcaaaataagcttaagcaggaaacccctgccgttctggaagacctgcataaagccaacattcgaacggtgatggtgaccggggacagtatgctgactgccgtttctgtggcccgcgactgtggcatgattctcccccaggacaaggttatcatcgccgaggcccttcctcctaaagatggaaaggtcgctaagatcaactggcactacgcggattccctcacccagtgctcgcatccatccgcaatagatcccgaagcgattcctgtgaagctggtacacgactctttggaggacttgcagatgactcgctatcacttcgcaatgaatggtaaatctttcagcgtcattttggaacactttcaggatctcgtgccaaagttaatgcttcatggtactgtttttgccagaatggcccctgaccagaaaacgcagctaatcgaggccctgcagaacgtcgactattttgtcggaatgtgcggcgatggcgccaacgattgcggcgcactgaagagggcacatgggggcatatccctgagcgaactggaggcctccgtcgcatccccattcacctccaagacgccctccattagctgcgtgcctaatctgatccgcgaggggagggcagctctgatcacctctttttgtgtctttaaatttatggcactctattccattattcagtatttcagcgtcacgctgctgtattcgattctgtcaaacctcggtgattttcagttcttgtttatcgatctcgccatcattttggtggtggtgtttacaatgtctctgaatcctgcctggaaagagcttgtagctcagagacctcctagcggcctaataagtggagcccttcttttctccgtgctcagccagattatcatatgcatcggctttcagtccctcggctttttttgggttaaacagcagccgtggtacgaagtatggcatcccaagagcgatgcttgtaacactacaggcagcgggttttggaattcctcccatgtggacaacgagactgaactggacgaacacaatatccagaactacgagaataccaccgtcttcttcatctcaagcttccagtatcttattgtcgctatcgcattcagcaaaggcaagcctttccgtcagccctgctacaagaactatttttttgttttttcggttatttttctgtacatcttcatactgtttattatgctttaccccgttgcatccgtagatcaggttctccaaattgtatgcgttccgtatcagtggagagtgacgatgttgattatagtcctggtcaatgcattcgtgagcataaccgtggaggaaagcgtggatcgctggggcaaatgctgtcttccctgggccctgggatgtcgcaaaaaaacacccaaggcaaagtacatgtatcttgcacaggaattgctcgtagacccagagtggccccccaagcctcagaccacaacggaagctaaggctctagtgaaggaaaatggcagctgtcagataatcactataacatag

SEQ ID NO: 215546 - DNA, 3681 bp, Artificial Sequence
  derived and/or modified sequence
atggaccgcgaggaaagaaagacaataaaccagggccaggaagatgagatggaaatttacggatataacttgagcaggtggaaactggcaatcgtgagcttgggcgtcatttgttccggaggattcctgttgttactgttatactggatgcctgagtggcgggtcaaagctacatgtgtccgcgcagctattaaagactgtgaagtcgttttgctgcgcactaccgacgaattcaagatgtggttctgtgctaaaatccgggttctctctcttgagacctaccctgttagctcccccaaatccatgtcaaacaaactgtcgaacggacatgcagtgtgccttatcgagaaccccacggaggagaacaggcaccggatatctaaatatagccagacggagagccagcagatccgttattttacacaccattccgtaaaatatttttggaacgatactattcacaatttcgacttcctcaaggggctggacgaaggagtatcttgtacttctatctacgagaaacatagcgcaggactcacgaagggtatgcacgcctacaggaaattgctatacggtgtaaacgagattgccgtgaaggtaccatccgttttcaaactcctgattaaagaggtgctgaatcccttctacatttttcaattgttctctgttatcctgtggtccacagacgaatactactactacgctctcgccatcgtcgtcatgtcgatcgtttctattgtatctagcctgtattcaatcaggaaacagtacgtcatgctccacgatatggtagctactcatagcaccgtgagagtcagcgtgtgcagggttaacgaggagatagaggaaattttttctaccgaccttgttcccggagatgttatggtgattcccttaaacggcacaattatgccatgcgatgccgtcctgataaatggcacatgtattgtgaatgaaagcatgctcaccggagaatctgtgcccgtcactaagacaaaccttcccaatccgagcgtggacgtgaagggaatcggagacgagctgtacaaccccgaaactcacaaaaggcacacactgttttgcggtaccaccgtcattcagactaggttctacaccggcgagctggtgaaagccatagtggtgaggaccgggttcagcacaagcaagggccagcttgtgcgatccattctttatcctaaaccgacagacttcaaactctacagagatgcgtatttgttcctgctgtgtctggtggctgtcgccggaattgggtttatttacactattatcaattccatcttaaatgaggttcaggttggcgtcataatcatcgagtctctggacatcataactataacggtacctcctgcactacctgccgctatgaccgctggtattgtgtacgcccagcgaaggctgaaaaagatcggaattttttgcatttctcctcagcgaattaacatctgcggtcagcttaatctggtatgtttcgacaagaccggcaccctgaccgaggatggcctcgacctctggggaatccagagagtggaaaatgcgcgatttctgtccccagaagagaacgtttgcaacgagatgttagtcaaatctcagtttgtggcttgcatggccacctgccacagtctaactaagatcgagggagtcctaagcggcgatccactggatctgaaaatgtttgaggccattggttggattctcgaagaggctacagaggaggaaactgcactccataacaggataatgccaactgtggtacgcccacctaaacagttactgcccgagtctacacctgctgggaaccaggaaatggagttatttgaactgcccgcaacttatgaaattggaatcgtgagacagttccctttctccagtgccctccaacggatgagcgtagtcgcccgagtccttggcgacaggaaaatggacgcatatatgaagggggcaccagaggcaatcgctgggttgtgtaagccagagactgtgcccgtggatttccagaatgtgcttgaagactttacgaaacaaggatttcgcgtgattgcactggctcaccgcaagctggagtctaaattaacctggcacaaggtacagaatatatcccgagacgccattgaaaataatatggattttatggggctaattataatgcagaataaactgaagcaggagacacccgctgtgctggaggatctgcacaaagctaatattagaaccgtcatggtaacgggggatagcatgctgactgcggtgtccgtcgctcgtgattgtgggatgatcttgccccaggacaaggtcatcatcgcagaagcccttccgccaaaagacgggaaagttgcaaaaatcaactggcattacgccgacagccttacacagtgcagtcacccttctgccatcgatcctgaagctataccagtgaaactggtgcatgattcactggaggacctgcagatgactaggtaccactttgccatgaatggaaaatcattttctgtaatactcgaacactttcaggatttagttcccaagttgatgctgcacggcactgtttttgcgagaatggcccctgatcagaaaactcagctcatcgaggctctgcagaatgtggactacttcgttggaatgtgcggtgacggagcaaacgattgtggagctcttaagagggctcatggaggcatttccctttcagagctggaagcaagtgtagcttccccctttacgagcaaaacaccgtctatctcgtgtgtacctaatttgattcgggaggggcgagctgccctcattacatctttctgcgtgtttaagtttatggccctgtactctatcattcagtactttagcgttaccctgctgtattccatcctcagcaacctcggagactttcagtttctgttcattgatctcgccatcattctggttgtggtgtttacaatgtctctgaatccggcatggaaggagcttgtcgcgcagagacccccttccgggctcattagcggcgctctgcttttctcagtgctctcccagatcatcatttgcataggatttcagagcctgggtttcttttgggtaaagcagcagccatggtatgaggtgtggcacccaaagagcgatgcatgtaatacaacaggctctggcttctggaatagtagtcacgtcgataatgagaccgagctggacgaacataatatccaaaactacgagaacaccacagtgtttttcatttcctcctttcagtatctgattgtagccattgctttcagcaagggaaagcctttcaggcagccatgctacaaaaattactttttcgtattcagcgtgatctttctatatattttcatcctgtttatcatgctgtatcccgtggccagtgtagaccaagtcctgcaaattgtatgcgtcccctatcaatggagggttactatgttgatcatcgttctcgtgaacgcattcgtaagtattacagttgaggagtcagtggatagatgggggaagtgttgcctgccctgggcattggggtgccggaagaaaacccctaaagctaagtacatgtacctggctcaggagctcctggtggatcccgaatggccacccaaaccacagacaacaacagaagccaaggctttggtgaaagagaatgggtcttgccagatcatcactattacatag

SEQ ID NO: 215547 - DNA, 2151 bp, Artificial Sequence
  derived and/or modified sequence
atggttgcgacccattctaccgtccgggtgagcgtttgccgggtgaatgaggaaatcgaagagatatttagtaccgacttggtgccaggcgatgtcatggtcattcctctcaacggaacaattatgccctgtgatgcggtcctgatcaacggaacctgcatcgtgaatgagagcatgttaacaggagaaagcgttccagtgactaaaaccaatcttcctaaccctagcgtcgacgttaaaggaattggagatgagctgtataatcccgagacgcataagcgccatacattattttgtggaacgacggtgattcagactcggttctacacaggagaactggtgaaagcgatcgtcgttagaacgggattttcaacaagtaagggccagttggtgcgcagcattctgtatcccaagccaacagatttcaagttatatagggatgcttacctcttccttctgtgcctggtcgccgtggctgggattgggtttatttacactatcatcaatagtatcctgaatgaagtgcaagtgggcgtcatcattattgaatccctcgacatcattactatcaccgtccctccagcactgcctgctgcgatgacggctggaatcgtgtatgcgcagcggcgtttgaaaaagatcggtatattttgtatcagtccccagagaatcaatatctgcggacagttgaaccttgtgtgtttcgataagactggcaccctgacagaagatggcttagacctgtggggcatccagagggtagagaatgctaggttcctgagccccgaggaaaacgtatgtaatgaaatgttggtcaagagccaattcgtcgcatgcatggctacctgtcatagtctaactaagattgaaggggtgctgagcggagatcctttagacctgaagatgtttgaggctattggatggattctcgaggaggccacagaagaggagacagccttgcacaacagaatcatgccaacagtggtccgtccgccaaagcagctgctgccggagtctacccctgcgggtaaccaggagatggagctttttgaactcccagcaacttatgagatcgggatcgtccgacagtttccattctcgtcagcccttcagagaatgtctgtggtggcgagagtcttgggggatcgcaaaatggatgcatacatgaaaggagcacctgaagcgatagccggtttgtgtaaaccagagacagtccccgttgacttccagaatgtgctggaggactttaccaaacaagggttccgcgttatcgctctagcacaccgcaagttggagagtaaactcacttggcacaaagtccagaacatctcaagagacgccatcgagaataatatggattttatgggactgatcattatgcaaaacaagctgaaacaggaaacaccagccgtcctcgaagacttgcacaaggctaatatacgcactgttatggtgacaggcgattctatgctgacagctgtttcagtcgctagagactgtggcatgatcctcccacaggacaaagttattattgcagaggccctgccacctaaagacgggaaggtcgccaaaattaactggcactacgccgacagcctgactcaatgttcccacccatcagcgatcgaccccgaagctatacccgtgaagcttgtgcacgattcccttgaagatttgcaaatgacacggtaccactttgctatgaatgggaagtccttcagcgtaattctcgagcactttcaggatctggttccgaagctgatgctgcacggtaccgtttttgccaggatggccccagaccaaaagacacagctgatcgaagcactgcaaaacgtggactatttcgtggggatgtgcggagatggagcaaacgactgcggggctcttaaacgcgctcatggcggtataagcctcagcgagctggaagccagcgtggcatctccttttacttcgaaaactccatccatctcatgcgtgcctaacctaatccgggaagggagagcggctttgatcactagcttttgtgagctggctctgttctccatcgttacatactcccttgaccattttattatttccatcttgatctctaacatgctggtacttttcttctcagattttcacaactgcgcgttttacagcctggtttag

SEQ ID NO: 215548 - DNA, 3681 bp, Artificial Sequence
  derived and/or modified sequence
atggaccgagaagaaagaaagaccattaaccagggacaagaggacgagatggagatttatggctataatctcagcagatggaaactcgccattgtgtccttaggcgtgatctgttcaggcggatttttgttactccttttgtattggatgcctgaatggcgggtaaaggctacctgtgtacgagcagctatcaaagattgcgaggtggtgctgcttcgcacaactgatgagtttaagatgtggttttgtgcaaaaatcagggtgctgtcattagagacctacccagtatcatcccccaagtcaatgtcaaataagctgagcaatggccacgctgtttgcttgatagagaaccctacagaggagaatcggcacaggatctccaaatactctcagaccgagagtcagcagatcagatattttacgcatcatagcgtgaagtacttctggaatgacacaatccacaatttcgatttcctgaaggggcttgatgagggggtgagctgcaccagcatttacgagaaacactcagctgggttgactaaaggcatgcacgcttatagaaagttactgtatggtgttaacgaaatcgccgtcaaggtgccctctgtgtttaagttgttaatcaaggaagtcctgaaccccttttacatattccagctgtttagtgtgattttgtggtctacagatgagtattattattacgccctggccattgtggtgatgtctattgtaagtatcgtctcatcgctttactctatcagaaaacagtacgtgatgctgcacgatatggtggcaacccactctactgtccgggtctcggtttgtcgcgtaaacgaggaaattgaggaaatattttccactgatctcgtgcccggtgacgttatggtcattcctcttaacggaacaataatgccttgcgacgcagtgctaatcaatggcacctgcatcgtaaacgagagtatgctaacaggcgagtcggttcctgtgacgaagaccaatctccccaacccttcagtggacgtaaaaggtattggggatgaactgtataatccagaaactcacaagcggcacacactgttttgcggcaccacagtaattcaaacacggttttacacaggggaactggtgaaggcaatcgtggttcggacaggattctctacctctaaggggcagttggttagaagcattctctacccaaagccaacggacttcaagctttatcgagacgcatacctatttctgctgtgtcttgtggccgtggccggaatcgggtttatatatacgatcattaactccattctgaacgaagtccaggtgggggtgatcatcattgagtccctagacatcattactattacagtgcctccagcactccctgctgcaatgacagcaggaattgtgtatgcccaacgcagactgaagaagatcggcatcttttgtatctctccccagaggattaatatttgcgggcagctaaaccttgtgtgctttgacaagaccggcacgttgacagaagacggactagacctgtgggggatccaaagggtggaaaatgcacgctttctctcgccggaagagaatgtatgcaacgaaatgctggtgaaatcccaattcgtggcctgtatggccacatgtcacagcctaactaagatagagggtgtcctgtctggagatccactcgatttgaaaatgttcgaagcaatcggctggattctagaggaagccaccgaggaagagaccgccctgcacaataggatcatgcccacagtggttagaccccctaaacaactgctgcctgagtccactccagccggaaatcaggaaatggagctgttcgagctgcctgccacttatgagattgggattgtgagacaattccctttctctagcgccctgcagcgtatgagcgtggtcgctcgagtgctgggggatcgcaaaatggacgcctacatgaagggcgcacccgaggctatcgctggcctttgtaaacctgagacagttccggtggactttcagaacgtgcttgaggactttactaagcagggcttccgcgtgatcgctctagcacaccggaaattggagtcaaagttgacatggcataaagtgcagaatatcagtcgcgacgccatcgagaataacatggatttcatgggcctgattatcatgcagaataaactaaaacaagagacgcccgcagtgctggaggatctgcataaggccaacatccgcacagtgatggtgaccggggactcgatgcttaccgctgtgtctgtggctcgggattgtgggatgatcctacctcaggataaagtgatcattgccgaagccttacccccaaaggatgggaaagttgccaaaattaactggcactatgccgattcccttacccagtgttcccatccatcagcaattgatccggaagcaattccagtgaaactggtgcacgactcgttggaagatctccagatgacaaggtaccactttgctatgaacggcaagtcctttagcgttattctcgagcacttccaggacctggtccctaagcttatgctccacgggacagtgttcgctaggatggccccagatcagaaaacgcaactcattgaggcattgcaaaacgtcgactattttgtgggcatgtgtggggatggggcaaacgattgcggcgctttgaagagagcccacggcggaatttccctttctgaactggaagcctcggtagcaagtccattcacctcaaaaaccccctctatttcatgcgtgccaaatctgattagggaaggcagagctgccttaattacgagcttttgcgtcttcaagttcatggccctgtacagcattatccagtatttttccgtgaccctcctttattcaattctctccaatctgggcgatttccaattcctgttcatcgacctcgctatcattctcgtcgtcgtatttaccatgtccctgaaccccgcatggaaggaactcgttgcacaaaggcctccatctggtctgatctcaggtgcgctgctgttttctgtgttatcacagattatcatatgcataggcttccagagtctggggttcttttgggtgaagcaacaaccatggtacgaagtttggcaccccaaaagtgacgcatgtaacacgacaggcagcggtttctggaactcttcacacgtagacaatgaaacagagctggacgagcataacatccagaactacgagaacactactgttttttttatctcctcctttcagtacctgatcgttgccatcgcgttctcgaagggaaaaccattccgccagccttgctacaagaactacttcttcgtattttccgtgatctttctgtatattttcatactcttcatcatgctgtaccctgttgcctcagtggatcaggtactgcagattgtttgcgttccataccaatggcgagtgaccatgctgatcatcgtccttgtgaacgcctttgttagcattacggtcgaggaatccgtggatcgttggggtaagtgctgtttgccctgggccctcggctgtcggaagaagactcctaaggcaaagtacatgtatctggcacaagagttactggtcgatcctgagtggccccctaaaccacaaaccacaacagaagccaaagccttggttaaggagaacggctcttgccagattattactatcacttag

SEQ ID NO: 215549 - DNA, 7322 bp, Artificial Sequence
  derived and/or modified sequence
tttattcaaataataggagctctacgagtgacagatggcagaagggcacatcttctgaaaacttactaaaaattggtgaattacaaaattctaaattttaataccttaatcattttgaaagcagttcagacagaaccgaaacagaaatatttggcataaaattccaaatttttatgcttagttttatttttattattaaaagccagcttttgaaagctgtgcaaatatcaggaattgggaagaatgatgatatagtgctactggtaagaaaaatttcttcaatttgttttctctgatatcgaatttgacttggttaaaaaacgtgtgctccagcagtccagaaaagttatatttcttgatcttccattgtttgaagcactggacctttaatccactgtaggtatggacagggaagaaaggaagaccatcaatcagggtcaagaagatgaaatggagatttatggttacaatttgagtcgctggaagcttgccatagtttctttaggagtgatttgctctggtgggtttctcctcctcctcctctattggatgcctgagtggcgggtgaaagcgacctgtgtcagagctgcaattaaagactgtgaagtagtgctgctgaggactactgatgaattcaaaatgtggttttgtgcaaaaattcgcgttctttctttggaaacttacccagtttcaagtccaaaatctatgtctaataagctttcaaatggccatgcagtttgtttaattgagaatcccactgaagaaaataggcacaggatcagtaaatattcacagactgaatcacaacagattcgttatttcacccaccatagtgtaaaatatttctggaatgataccattcacaattttgatttcttaaagggactggatgaaggtgtttcttgtacgtcaatttatgaaaagcatagtgcaggactgacaaaggggatgcatgcctacagaaaactgctttatggagtaaatgaaattgctgtaaaagtgccttctgtttttaagcttctaattaaagaggttctcaacccattttacattttccagctgttcagtgttatactgtggagcactgatgaatactattactatgctctagctattgtggttatgtccatagtatcaatcgtaagctcactatattccattagaaagcaatatgttatgttgcatgacatggtggcaactcatagtaccgtaagagtttcagtttgtagagtaaatgaagaaatagaagaaatcttttctaccgaccttgtgccaggagatgtcatggtcattccattaaatgggacaataatgccttgtgatgctgtgcttattaatggtacctgcattgtaaacgaaagcatgttaacaggagaaagtgttccagtgacaaagactaatttgccaaatccttcagtggatgtgaaaggaataggagatgaattatataatccagaaacacataaacgacatactttgttttgtgggacaactgttattcagactcgtttctacactggagaactcgtcaaagccatagttgttagaacaggatttagtacttccaaaggacagcttgttcgttccatattgtatcccaaaccaactgattttaaactctacagagatgcctacttgtttctactatgtcttgtggcagttgctggcattgggtttatctacactattattaatagcattttaaatgaggtacaagttggggtcataattatcgagtctcttgatattatcacaattactgtgccccctgcacttcctgctgcaatgactgctggtattgtgtatgctcagagaagactgaaaaaaatcggtattttctgtatcagtcctcaaagaataaatatttgtggacagctcaatcttgtttgctttgacaagactggaactctaactgaagatggtttagatctttgggggattcaacgagtggaaaatgcacgatttctttcaccagaagaaaatgtgtgcaatgagatgttggtaaaatcccagtttgttgcttgtatggctacttgtcattcacttacaaaaattgaaggagtgctctctggtgatccacttgatctgaaaatgtttgaggctattggatggattctggaagaagcaactgaagaagaaacagcacttcataatcgaattatgcccacagtggttcgtcctcccaaacaactgcttcctgaatctacccctgcaggaaaccaagaaatggagctgtttgaacttccagctacttatgagataggaattgttcgccagttcccattttcttctgctttgcaacgtatgagtgtggttgccagggtgctgggggataggaaaatggacgcctacatgaaaggagcgcccgaggccattgccggtctctgtaaacctgaaacagttcctgtcgattttcaaaacgttttggaagacttcactaaacagggcttccgtgtgattgctcttgcacacagaaaattggagtcaaaactgacatggcataaagtacagaatattagcagagatgcaattgagaacaacatggattttatgggattaattataatgcagaacaaattaaagcaagaaacccctgcagtacttgaagatttgcataaagccaacattcgcaccgtcatggtcacaggtgacagtatgttgactgctgtctctgtggccagagattgtggaatgattctacctcaggataaagtgattattgctgaagcattacctccaaaggatgggaaagttgccaaaataaattggcattatgcagactccctcacgcagtgcagtcatccatcagcaattgacccagaggctattccggttaaattggtccatgatagcttagaggatcttcaaatgactcgttatcattttgcaatgaatggaaaatcattctcagtgatactggagcattttcaagaccttgttcctaagttgatgttgcatggcaccgtgtttgcccgtatggcacctgatcagaagacacagttgatagaagcattgcaaaatgttgattattttgttgggatgtgtggtgatggcgcaaatgattgtggtgctttgaagagggcacacggaggcatttccttatcggagctcgaagcttcagtggcatctccctttacctctaagactcctagtatttcctgtgtgccaaaccttatcagggaaggccgtgctgctttaataacttccttctgtgtgtttaaattcatggcattgtacagcattatccagtacttcagtgttactctgctgtattctatcttaagtaacctaggagacttccagtttctcttcattgatctggcaatcattttggtagtggtatttacaatgagtttaaatcctgcctggaaagaacttgtggcacaaagaccaccttcgggtcttatatctggggcccttctcttctccgttttgtctcagattatcatctgcattggatttcaatctttgggttttttttgggtcaaacagcaaccttggtatgaagtgtggcatccaaaatcagatgcttgtaatacaacaggaagcgggttttggaattcttcacacgtagacaatgaaaccgaacttgatgaacataatatacaaaattatgaaaataccacagtgttttttatttccagttttcagtacctcatagtggcaattgccttttcaaaaggaaaacccttcaggcaaccttgctacaaaaattatttttttgttttttctgtgatttttttatatatttttatattattcatcatgttgtatccagttgcctctgttgaccaggttcttcagatagtgtgtgtaccatatcagtggcgtgtaactatgctcatcattgttcttgtcaatgcctttgtgtctatcacagtggaggagtcagtggatcggtggggaaaatgctgcttaccctgggccctgggctgtagaaagaagacaccaaaggcaaagtacatgtatctggcgcaggagctcttggttgatccagaatggccaccaaaacctcagacaaccacagaagctaaagctttagttaaggagaatggatcatgtcaaatcatcaccataacatagcagtgaatcagtctcagtggtattgctgatagcagtattcaggaatatgtgattttaggagtttctgatcctgtgtgtcagaatggcactagttcagtttatgtcccttctgatatagtagcttatttgacagctttgctcttccttaaaataaaaacagaaaaatatatcgtcctaacagttaaattaacaatcaatccataaagtcctatatcttcattcagcaacccaaatattacatacatttccagaattttcttgattgttactttcagtgatattctttatattgggtacaggagaagtttggtgtttggtaggtttttcaacattagtttttgagactagtttacctcttcacatttatgctcacaaccctcttgttagaaaagtctgtgtttatatacaggctgtaagtttgtgattgataaaaagaagatgagtgttaattagcctccagtgaaaatatactgaaagcctgttttcatttgattccaatgtttcttccaaagaattctgtataaacatatgccaattccctatgatggtctagagttaggaatgagtgtttatggtgttgcttatagaacaactcaggtaatctccatttctggttttatattttctgtacaaactgcctgggttttatttttctaatcagcaaggtgcttcactgccttcttgagacgcctctcaaagctcttaaatggctcctgtgctatgtgtggtgttggcagtctaatttgcttctgttaaatgttgtagaacctttttcactaggaaataagattcatttctttcggcagtagatgtagattcatcttttaacgtttcttcaaatttgtttctgtcaggctttgtgttattttaaatggttttttaaaattttcttctatgttttcaattacctaaagacataggataatagttttttttaagttagaattttacctcataaaattttttgaggtttgatgtatgtctctgtcttatcaataatgaggcttaaaaaatactggatttgaatggctgccgttttttcaaagcaatatgaatttgatgagtttgttttatgccattaggtggcgccagaggtcagaacatgtctattttgaattggatcgttacaaatgagcatatttgatgcggaaatttctgggagaaaaaaaattgaggaaataaagttaaaaaattgacattcattgagccaaaagagatgtggagaaacatttttcacctttctgtttggcctgattaacatttaaattcttgccaaaattaaggtaacttttaaaaaacaccttttataggtggatccagcagtctggcaacgcccacagttaccacaacacagaaaactgatcgtgctataaaatggacgctaaactatgaaaacagtgtgacattgttctctgttcttccagagccagtaacatgcttgctcgtgctttctacttctagctgatcattcttttcccaacatatatttacaaatttaccaaattttacctagaattttaggaccaaatggttctcactctttatgctgcaaagacctggatgatgtttggtaactatagaaaaatagaaattacactcaggatcactgttactgctattgccactgatgattcctgcaaaaatataatcgaagttttccatcaaatgtataatatgctattaatacacattagatgataacagttgttccatgaatgattctatgaagctatgcatcttagacctcttgagctgtgaattagcactattttctatagttacttattctctggatcattttataatttccatattaatttcaaatatgctcgtgttattcttcagtgatttccacaattgtgcattttattctttggtttaagtactgaagcatataatgaaagtaattgctaagtagcagcttaaaaattcaattatccgattgtatttaacatctttaagagcatgatcataaagagctatttttgacaccccccccccacttttttaacatttagagttagtaagggttttatatctcttctgtccatattgttttcaaaggaatgaggtgtttaggtggctggaaaagcatttgtaggaagttagatttgaatatagacaaggtgggttattcacgttgagaatgttatttgaagaatgcctgtgaagccaggtgtgggttctactcagtgccatagatagactgagtcttctctcgtaggttaccattacatagtaattttgattctgaatttcacattaaattatttgagtttatacagacctaaattttaaaatctgtacatatattattttgatgtattaagatgaatattgctgatttaaattttatttatgcacatacttaaaggacagaaatgtctgggaaagtaattgttaaataatgatatgtaactttttaactttttaaataaataacaagatttttaatgtgtgtctccctcagggttgtttaaagttttttttctccctcaagtataaatagtggtaactatatgttttgtatcttctagcaccaactgctgtaaagcaatgctgcaaataatgcttgaatacaagtggctaagccaacaacagaataaatacttttatagtagttttataatcctgaaattcgaaagctttcccaattgcacttgcatctaaacaaaactgttgcagtttttactctatttattttgttccccatgtttatgaaagtcctgcacagtttcaaaggcatggtaaataatatatcaatgtttatgtagtctgttacagaaacagctatagataacattatccagtgaagagcaaaattcaagctttagaaaatattcatgcatgcaattttgacatatctaaaaataggtttttgtatatttatggtgggaggtggttgggaacttttaacaaaatggggtgttaatttttgtacagtctgtgggcatttacacatttttaatgtattaaaatttggtaattatgtgtacattaaattaataaaagttacttctagttatgatttgtgaattccctaagaccttggatttttttaagtaactttatatcagaaatgatactgcatctttatatttttaaaattgtattgctgctcaagaatggtaccctcttgtcaaaaaggcatacattcataattgtacattcagcattgtaaataatcttatgaaaccttttttgattgaagctattcaaaataaaaattttaatgaatg

SEQ ID NO: 215550 - DNA, 3339 bp, Artificial Sequence
  derived and/or modified sequence
tttattcaaataataggagctctacgagtgacagatggcagaagggcacatcttctgaaaacttactaaaaattggtgaattacaaaattctaaattttaataccttaatcattttgaaagcagttcagacagaaccgaaacagaaatatttggcataaaattccaaatttttatgcttagttttatttttattattaaaagccagcttttgaaagctgtgcaaatatcaggaattgggaagaatgatgatatagtgctactggtaagaaaaatttcttcaatttgttttctctgatatcgaatttgacttggttaaaaaacgtgtgctccagcagtccagaaaagttatatttcttgatcttccattgtttgaagcactggacctttaatccactgtaggtatggacagggaagaaaggaagaccatcaatcagggtcaagaagatgaaatggagatttatggttacaatttgagtcgctggaagcttgccatagtttctttaggagtgatttgctctggtgggtttctcctcctcctcctctattggatgcctgagtggcgggtgaaagcgacctgtgtcagagctgcaattaaagactgtgaagtagtgctgctgaggactactgatgaattcaaaatgtggttttgtgcaaaaattcgcgttctttctttggaaacttacccagtttcaagtccaaaatctatgtctaataagctttcaaatggccatgcagtttgtttaattgagaatcccactgaagaaaataggcacaggatcagtaaatattcacagactgaatcacaacagattcgttatttcacccaccatagtgtaaaatatttctggaatgataccattcacaattttgatttcttaaagggactggatgaaggtgtttcttgtacgtcaatttatgaaaagcatagtgcaggactgacaaaggggatgcatgcctacagaaaactgctttatggagtaaatgaaattgctgtaaaagtgccttctgtttttaagcttctaattaaagaggttctcaacccattttacattttccagctgttcagtgttatactgtggagcactgatgaatactattactatgctctagctattgtggttatgtccatagtatcaatcgtaagctcactatattccattagaaagcaatatgttatgttgcatgacatggtggcaactcatagtaccgtaagagtttcagtttgtagagtaaatgaagaaatagaagaaatcttttctaccgaccttgtgccaggagatgtcatggtcattccattaaatgggacaataatgccttgtgatgctgtgcttattaatggtacctgcattgtaaacgaaagcatgttaacaggagaaagtgttccagtgacaaagactaatttgccaaatccttcagtggatgtgaaaggaataggagatgaattatataatccagaaacacataaacgacatactttgttttgtgggacaactgttattcagactcgtttctacactggagaactcgtcaaagccatagttgttagaacaggatttagtacttccaaaggacagcttgttcgttccatattgtatcccaaaccaactgattttaaactctacagagatgcctacttgtttctactatgtcttgtggcagttgctggcattgggtttatctacactattattaatagcattttaaatgaggtacaagttggggtcataattatcgagtctcttgatattatcacaattactgtgccccctgcacttcctgctgcaatgactgctggtattgtgtatgctcagagaagactgaaaaaaatcggtattttctgtatcagtcctcaaagaataaatatttgtggacagctcaatcttgtttgctttgacaagactggaactctaactgaagatggtttagatctttgggggattcaacgagtggaaaatgcacgatttctttcaccagaagaaaatgtgtgcaatgagatgttggtaaaatcccagtttgttgcttgtatggctacttgtcattcacttacaaaaattgaaggagtgctctctggtgatccacttgatctgaaaatgtttgaggctattggatggattctggaagaagcaactgaagaagaaacagcacttcataatcgaattatgcccacagtggttcgtcctcccaaacaactgcttcctgaatctacccctgcaggaaaccaagaaatggagctgtttgaacttccagctacttatgagataggaattgttcgccagttcccattttcttctgctttgcaacgtatgagtgtggttgccagggtgctgggggataggaaaatggacgcctacatgaaaggagcgcccgaggccattgccggtctctgtaaacctgaaacagttcctgtcgattttcaaaacgttttggaagacttcactaaacagggcttccgtgtgattgctcttgcacacagaaaattggagtcaaaactgacatggcataaagtacagaatattagcagagatgcaattgagaacaacatggattttatgggattaattataatgcagaacaaattaaagcaagaaacccctgcagtacttgaagatttgcataaagccaacattcgcaccgtcatggtcacaggtgacagtatgttgactgctgtctctgtggccagagattgtggaatgattctacctcaggataaagtgattattgctgaagcattacctccaaaggatgggaaagttgccaaaataaattggcattatgcagactccctcacgcagtgcagtcatccatcagcaattgacccagaggctattccggttaaattggtccatgatagcttagaggatcttcaaatgactcgttatcattttgcaatgaatggaaaatcattctcagtgatactggagcattttcaagaccttgttcctaagttgatgttgcatggcaccgtgtttgcccgtatggcacctgatcagaagacacagttgatagaagcattgcaaaatgttgattattttgttgggatgtgtggtgatggcgcaaatgattgtggtgctttgaagagggcacacggaggcatttccttatcggagctcgaagcttcagtggcatctccctttacctctaagactcctagtatttcctgtgtgccaaaccttatcagggaaggccgtgctgctttaataacttccttctgtgaattagcactattttctatagttacttattctctggatcattttataatttccatattaatttcaaatatgctcgtgttattcttcagtgatttccacaattgtgcattttattctttggtttaa

SEQ ID NO: 215551 - DNA, 7720 bp, Artificial Sequence
  derived and/or modified sequence
cttctgcctcagcctgagtagctgggatgggactacagatgcacgccaccacacatggctaatttttttattttttagagacgaggtcccatgtgagccacggtgccccaccttttaaagcaattaccgtaaggaagcaactgtctttagcaaatagaagatcataaacatccttctggagatcttgagatgttgactgtggtttatagggcaatgaaaatctacatacctgagtggggcagtgagacatgagtgccacctatgatccttccagtgagcaattctttctggtgccaggagcccaaaggaaactcagtcaaccagctgtagatgggcttgttccgagtttgttctagaagtcagaactgccagctctgaaagtaggtcacaagtgactggccatccctgggctgctcacaggaagtagctgcaaaggtcagggaaagtttttaatgactatacaggccagtgaatgacaggctttgaggagcttctcttcttggcatctgaaacagcatactttctgactaccgctgtgtgctgtgaggggctgaggatccagatgtggctgaggaaggtcctggctcatgaggaggtggaagtctgggtgcttaaacagataatccagagttttgatgcgagatgaactcattctggtgaatcactctggcttcatttggttatagtggtcaagagtttggccctggagcaaagtgtctgggtttgaatcctggctgtgctttcggtgatcttccattgtttgaagcactggacctttaatccactgtaggtatggacagggaagaaaggaagaccatcaatcagggtcaagaagatgaaatggagatttatggttacaatttgagtcgctggaagcttgccatagtttctttaggagtgatttgctctggtgggtttctcctcctcctcctctattggatgcctgagtggcgggtgaaagcgacctgtgtcagagctgcaattaaagactgtgaagtagtgctgctgaggactactgatgaattcaaaatgtggttttgtgcaaaaattcgcgttctttctttggaaacttacccagtttcaagtccaaaatctatgtctaataagctttcaaatggccatgcagtttgtttaattgagaatcccactgaagaaaataggcacaggatcagtaaatattcacagactgaatcacaacagattcgttatttcacccaccatagtgtaaaatatttctggaatgataccattcacaattttgatttcttaaagggactggatgaaggtgtttcttgtacgtcaatttatgaaaagcatagtgcaggactgacaaaggggatgcatgcctacagaaaactgctttatggagtaaatgaaattgctgtaaaagtgccttctgtttttaagcttctaattaaagaggttctcaacccattttacattttccagctgttcagtgttatactgtggagcactgatgaatactattactatgctctagctattgtggttatgtccatagtatcaatcgtaagctcactatattccattagaaagcaatatgttatgttgcatgacatggtggcaactcatagtaccgtaagagtttcagtttgtagagtaaatgaagaaatagaagaaatcttttctaccgaccttgtgccaggagatgtcatggtcattccattaaatgggacaataatgccttgtgatgctgtgcttattaatggtacctgcattgtaaacgaaagcatgttaacaggagaaagtgttccagtgacaaagactaatttgccaaatccttcagtggatgtgaaaggaataggagatgaattatataatccagaaacacataaacgacatactttgttttgtgggacaactgttattcagactcgtttctacactggagaactcgtcaaagccatagttgttagaacaggatttagtacttccaaaggacagcttgttcgttccatattgtatcccaaaccaactgattttaaactctacagagatgcctacttgtttctactatgtcttgtggcagttgctggcattgggtttatctacactattattaatagcattttaaatgaggtacaagttggggtcataattatcgagtctcttgatattatcacaattactgtgccccctgcacttcctgctgcaatgactgctggtattgtgtatgctcagagaagactgaaaaaaatcggtattttctgtatcagtcctcaaagaataaatatttgtggacagctcaatcttgtttgctttgacaagactggaactctaactgaagatggtttagatctttgggggattcaacgagtggaaaatgcacgatttctttcaccagaagaaaatgtgtgcaatgagatgttggtaaaatcccagtttgttgcttgtatggctacttgtcattcacttacaaaaattgaaggagtgctctctggtgatccacttgatctgaaaatgtttgaggctattggatggattctggaagaagcaactgaagaagaaacagcacttcataatcgaattatgcccacagtggttcgtcctcccaaacaactgcttcctgaatctacccctgcaggaaaccaagaaatggagctgtttgaacttccagctacttatgagataggaattgttcgccagttcccattttcttctgctttgcaacgtatgagtgtggttgccagggtgctgggggataggaaaatggacgcctacatgaaaggagcgcccgaggccattgccggtctctgtaaacctgaaacagttcctgtcgattttcaaaacgttttggaagacttcactaaacagggcttccgtgtgattgctcttgcacacagaaaattggagtcaaaactgacatggcataaagtacagaatattagcagagatgcaattgagaacaacatggattttatgggattaattataatgcagaacaaattaaagcaagaaacccctgcagtacttgaagatttgcataaagccaacattcgcaccgtcatggtcacaggtgacagtatgttgactgctgtctctgtggccagagattgtggaatgattctacctcaggataaagtgattattgctgaagcattacctccaaaggatgggaaagttgccaaaataaattggcattatgcagactccctcacgcagtgcagtcatccatcagcaattgacccagaggctattccggttaaattggtccatgatagcttagaggatcttcaaatgactcgttatcattttgcaatgaatggaaaatcattctcagtgatactggagcattttcaagaccttgttcctaagttgatgttgcatggcaccgtgtttgcccgtatggcacctgatcagaagacacagttgatagaagcattgcaaaatgttgattattttgttgggatgtgtggtgatggcgcaaatgattgtggtgctttgaagagggcacacggaggcatttccttatcggagctcgaagcttcagtggcatctccctttacctctaagactcctagtatttcctgtgtgccaaaccttatcagggaaggccgtgctgctttaataacttccttctgtgtgtttaaattcatggcattgtacagcattatccagtacttcagtgttactctgctgtattctatcttaagtaacctaggagacttccagtttctcttcattgatctggcaatcattttggtagtggtatttacaatgagtttaaatcctgcctggaaagaacttgtggcacaaagaccaccttcgggtcttatatctggggcccttctcttctccgttttgtctcagattatcatctgcattggatttcaatctttgggttttttttgggtcaaacagcaaccttggtatgaagtgtggcatccaaaatcagatgcttgtaatacaacaggaagcgggttttggaattcttcacacgtagacaatgaaaccgaacttgatgaacataatatacaaaattatgaaaataccacagtgttttttatttccagttttcagtacctcatagtggcaattgccttttcaaaaggaaaacccttcaggcaaccttgctacaaaaattatttttttgttttttctgtgatttttttatatatttttatattattcatcatgttgtatccagttgcctctgttgaccaggttcttcagatagtgtgtgtaccatatcagtggcgtgtaactatgctcatcattgttcttgtcaatgcctttgtgtctatcacagtggaggagtcagtggatcggtggggaaaatgctgcttaccctgggccctgggctgtagaaagaagacaccaaaggcaaagtacatgtatctggcgcaggagctcttggttgatccagaatggccaccaaaacctcagacaaccacagaagctaaagctttagttaaggagaatggatcatgtcaaatcatcaccataacatagcagtgaatcagtctcagtggtattgctgatagcagtattcaggaatatgtgattttaggagtttctgatcctgtgtgtcagaatggcactagttcagtttatgtcccttctgatatagtagcttatttgacagctttgctcttccttaaaataaaaacagaaaaatatatcgtcctaacagttaaattaacaatcaatccataaagtcctatatcttcattcagcaacccaaatattacatacatttccagaattttcttgattgttactttcagtgatattctttatattgggtacaggagaagtttggtgtttggtaggtttttcaacattagtttttgagactagtttacctcttcacatttatgctcacaaccctcttgttagaaaagtctgtgtttatatacaggctgtaagtttgtgattgataaaaagaagatgagtgttaattagcctccagtgaaaatatactgaaagcctgttttcatttgattccaatgtttcttccaaagaattctgtataaacatatgccaattccctatgatggtctagagttaggaatgagtgtttatggtgttgcttatagaacaactcaggtaatctccatttctggttttatattttctgtacaaactgcctgggttttatttttctaatcagcaaggtgcttcactgccttcttgagacgcctctcaaagctcttaaatggctcctgtgctatgtgtggtgttggcagtctaatttgcttctgttaaatgttgtagaacctttttcactaggaaataagattcatttctttcggcagtagatgtagattcatcttttaacgtttcttcaaatttgtttctgtcaggctttgtgttattttaaatggttttttaaaattttcttctatgttttcaattacctaaagacataggataatagttttttttaagttagaattttacctcataaaattttttgaggtttgatgtatgtctctgtcttatcaataatgaggcttaaaaaatactggatttgaatggctgccgttttttcaaagcaatatgaatttgatgagtttgttttatgccattaggtggcgccagaggtcagaacatgtctattttgaattggatcgttacaaatgagcatatttgatgcggaaatttctgggagaaaaaaaattgaggaaataaagttaaaaaattgacattcattgagccaaaagagatgtggagaaacatttttcacctttctgtttggcctgattaacatttaaattcttgccaaaattaaggtaacttttaaaaaacaccttttataggtggatccagcagtctggcaacgcccacagttaccacaacacagaaaactgatcgtgctataaaatggacgctaaactatgaaaacagtgtgacattgttctctgttcttccagagccagtaacatgcttgctcgtgctttctacttctagctgatcattcttttcccaacatatatttacaaatttaccaaattttacctagaattttaggaccaaatggttctcactctttatgctgcaaagacctggatgatgtttggtaactatagaaaaatagaaattacactcaggatcactgttactgctattgccactgatgattcctgcaaaaatataatcgaagttttccatcaaatgtataatatgctattaatacacattagatgataacagttgttccatgaatgattctatgaagctatgcatcttagacctcttgagctgtgaattagcactattttctatagttacttattctctggatcattttataatttccatattaatttcaaatatgctcgtgttattcttcagtgatttccacaattgtgcattttattctttggtttaagtactgaagcatataatgaaagtaattgctaagtagcagcttaaaaattcaattatccgattgtatttaacatctttaagagcatgatcataaagagctatttttgacaccccccccccacttttttaacatttagagttagtaagggttttatatctcttctgtccatattgttttcaaaggaatgaggtgtttaggtggctggaaaagcatttgtaggaagttagatttgaatatagacaaggtgggttattcacgttgagaatgttatttgaagaatgcctgtgaagccaggtgtgggttctactcagtgccatagatagactgagtcttctctcgtaggttaccattacatagtaattttgattctgaatttcacattaaattatttgagtttatacagacctaaattttaaaatctgtacatatattattttgatgtattaagatgaatattgctgatttaaattttatttatgcacatacttaaaggacagaaatgtctgggaaagtaattgttaaataatgatatgtaactttttaactttttaaataaataacaagatttttaatgtgtgtctccctcagggttgtttaaagttttttttctccctcaagtataaatagtggtaactatatgttttgtatcttctagcaccaactgctgtaaagcaatgctgcaaataatgcttgaatacaagtggctaagccaacaacagaataaatacttttatagtagttttataatcctgaaattcgaaagctttcccaattgcacttgcatctaaacaaaactgttgcagtttttactctatttattttgttccccatgtttatgaaagtcctgcacagtttcaaaggcatggtaaataatatatcaatgtttatgtagtctgttacagaaacagctatagataacattatccagtgaagagcaaaattcaagctttagaaaatattcatgcatgcaattttgacatatctaaaaataggtttttgtatatttatggtgggaggtggttgggaacttttaacaaaatggggtgttaatttttgtacagtctgtgggcatttacacatttttaatgtattaaaatttggtaattatgtgtacattaaattaataaaagttacttctagttatgatttgtgaattccctaagaccttggatttttttaagtaactttatatcagaaatgatactgcatctttatatttttaaaattgtattgctgctcaagaatggtaccctcttgtcaaaaaggcatacattcataattgtacattcagcattgtaaataatcttatgaaaccttttttgattgaagctattcaaaataaaaattttaatgaatgaaataaca

SEQ ID NO: 215552 - protein, 415 aa, Artificial Sequence
  derived and/or modified sequence
MAPVSGSRSPDREASGSGGRRRSSSKSPKPSKSARSPRGRRSRSHSCSRSGDRNGLTHQLGGLSQGSRNQSYRSRSRSRSRERPSAPRGIPFASASSSVYYGSYSRPYGSDKPWPSLLDKEREESLRQKRLSERERIGELGAPEVWGLSPKNPEPDSDEHTPVEDEEPKKSTTSASTSEEEKKKKSSRSKERSKKRRKKKSSKRKHKKYSEDSDSDSDSETDSSDEDNKRRAKKAKKKEKKKKHRSKKYKKKRSKKSRKESSDSSSKESQEEFLENPWKDRTKAEEPSDLIGPEAPKTLTSQDDKPLNYGHALLPGEGAAMAEYVKAGKRIPRRGEIGLTSEEIASFECSGYVMSGSRHRRMEAVRLRKENQIYSADEKRALASFNQEERRKRENKILASFREMVYRKTKGKDDK

SEQ ID NO: 215553 - DNA, 240 bp, Artificial Sequence
  derived and/or modified sequence
atgatcttcacccccttcctgcccccagctgacctgtctgtgttccagaatgtgaagggcctgcagaatgaccctgaggagtgggtggccgtgtctgatgccacagaggaccccagcggcggcaccggcctgccccgggagcccgccctgctgcggggctcctggaggagccgcttccagagggccctggcctgcttcaccaagtgcttccggggcggctaccgggccctgggcatctag

SEQ ID NO: 215554 - DNA, 1248 bp, Artificial Sequence
  derived and/or modified sequence
atggccccggtgagtgggtcacggtcccctgacagagaggcctccggttctggggggcggagaaggtccagcagtaaatcacccaaaccctcaaagagtgctcgctccccccgggggcgtagatctcggagccacagctgttctaggtctggtgacaggaacggtctaactcaccagctcggggggctgagccagggttctcgcaatcagtcctaccggagtcgaagtcggagtcggagcagggaaagaccctcagctccccggggcatcccattcgcctcggctagtagcagcgtgtattacggatcttattcacggccgtacggtagcgacaaaccctggccctccctattggacaaagagagagaggagagcctgagacagaaacggctgtcagaaagagagcgcatcggcgagctcggtgcgcctgaggtttgggggctgagtcccaagaatcccgagcctgacagcgacgaacacactcccgtagaggacgaggaacctaaaaaatctaccacaagcgccagtactagcgaggaagaaaagaaaaagaaatcgtctagaagtaaagaaaggtctaaaaaaagacgaaaaaaaaaaagtagcaagcggaagcataaaaaatattccgaagatagcgacagcgactctgactctgagacggactcctcagatgaagacaataagagacgggccaaaaaggccaaaaagaaggagaaaaaaaagaagcaccgctccaagaaatacaaaaagaagagaagtaagaaatcgcgtaaagaatcctctgacagcagctcgaaggaaagtcaggaggagttcctggagaatccctggaaggaccgaaccaaggctgaggagccatctgacctgatcggtcctgaagcccctaagaccctcacctctcaggatgataagcccctgaattacggtcacgcactgctcccaggcgaaggcgcagctatggccgagtacgtcaaagccgggaagcgcatcccaagacgaggtgagattggcctgaccagtgaggagatcgcttcctttgaatgctccggctacgtgatgagcggtagcagacaccgaagaatggaggcggtgagactgcgcaaagaaaatcagatctattccgcagatgagaagagggccctggcctcgtttaaccaggaggagaggcggaaaagggaaaacaagatcctagccagttttagggagatggtgtataggaaaactaaagggaaggacgataaatag

SEQ ID NO: 215555 - DNA, 1248 bp, Artificial Sequence
  derived and/or modified sequence
atggcccctgtgtctggcagccgcagcccagaccgggaggccagcggcagcggcggcagaagaagaagcagcagcaagagccccaagcccagcaagagcgcccggagcccccggggccgccgcagccgcagccacagctgcagccgcagcggggacagaaatggcctgacccaccagctgggcggcctgagccagggcagcaggaaccagagctaccgcagccgcagccgcagccgcagccgggagcggcccagcgccccccggggcatcccctttgccagcgccagcagctctgtgtactacggcagctacagccggccctacggcagtgacaagccctggcccagcctgctggacaaggagcgggaggagagcctgcggcagaagaggctgtctgagcgggagagaattggagagctgggcgcccctgaggtgtggggcctgagccccaagaaccctgagccagacagtgatgagcacacccctgtggaggatgaggagcccaagaagagcaccaccagcgccagcaccagcgaggaggagaagaagaagaagagcagccgcagcaaggagaggagcaagaagaggaggaagaagaagagcagcaagaggaagcacaagaagtacagtgaagattctgacagcgacagcgacagcgagacagacagcagtgatgaggacaacaagaggcgggccaagaaggccaagaagaaggagaagaagaagaagcacaggagcaagaagtacaagaagaagaggagcaagaagagcaggaaggagagcagtgacagcagcagcaaggagagccaggaggagttcctggagaacccctggaaggacaggaccaaggccgaggagcccagcgacctgattggccctgaggcccccaagaccctgaccagccaggatgacaagcccctgaactacggccacgccctgctgcctggagagggcgccgccatggccgagtatgtgaaggccggcaagaggatccccaggagaggagaaattggcctgaccagcgaggagatcgccagctttgagtgcagcggctacgtgatgagcggcagccgccacaggaggatggaggccgtgcggctgaggaaggagaaccagatctacagcgcagatgagaagagggccctggccagcttcaaccaggaggagaggaggaagcgggagaacaagatcctggccagcttccgggagatggtgtacaggaagaccaagggcaaggatgacaagtag

SEQ ID NO: 215556 - DNA, 1248 bp, Artificial Sequence
  derived and/or modified sequence
atggcccccgtgagcggcagccggagccccgaccgggaggccagcggatcgggaggccgaagacggtcaagctccaaatcaccaaaaccctccaagtccgctagaagccctcgagggaggagatcacggtcccatagctgctcccgcagcggcgacagaaacggcctgacccatcaattaggcggactatctcaagggtcccgaaaccagagttaccgttctcgttcacgtagccgatctcgtgagaggccttccgcacccaggggcatccccttcgcttctgcctcaagtagcgtgtactacggctcctatagccgcccctatggttctgacaagccgtggcctagcctgctagataaggagcgcgaggagagtcttcggcaaaagcggctgagtgaacgggagcgaataggtgagttgggcgcccctgaagtgtggggtttaagcccaaaaaaccctgagcccgattccgatgagcatacccccgtggaggatgaagagccaaaaaagtccacgaccagcgccagtactagcgaggaagagaagaagaagaagtcttcccgcagcaaggagagatccaaaaagaggcggaagaagaagtcatcaaaacgcaagcacaaaaaatatagcgaagacagtgacagtgactccgacagcgaaactgatagctccgatgaggataacaagaggagggctaagaaagcaaaaaagaaagagaagaagaaaaaacatcgcagcaagaaatataagaagaagcgatccaagaaaagccgtaaggagtcttcagattccagttcaaaagaaagccaggaggagtttctcgaaaatccctggaaagatcgaactaaagcagaagagccaagcgacctaatcggtcctgaggctccgaagactctcacctcccaagatgataagcccctgaattatggacatgctttacttcctggggagggagcagcaatggcagagtatgtcaaggctggaaaaaggataccccgccgcggtgagattggccttactagcgaggagatcgcatcttttgagtgctcagggtatgtgatgtcagggagtcggcaccgacgcatggaagctgtacggttgcgcaaggaaaaccagatttactcagctgatgagaaacgcgctctggccagttttaaccaggaggaaaggcggaagcgggaaaacaagatcctagcatcattcagagagatggtgtacagaaagacaaaaggaaaggatgacaagtag

SEQ ID NO: 215557 - DNA, 1580 bp, Artificial Sequence
  derived and/or modified sequence
ctagatccggggaagggttttgcagaagtacccagaactgtgtccaaggtttcctcagatttgggctgttccgcagcggcaggtcccgggaaccaaggcaacagacatcttcctaggctcgcgagagcgcccccttgtcccacggctgctggggccccccagtagccatggctccggtgtccggctcacgcagcccggatagggaggcctcgggctcggggggaagacgtcgcagttcgtcgaagagtccgaagcccagcaaatctgcccgctccccgcggggccgccgctctcgctcgcactcttgctctcggtccggggaccggaatggactcacccatcagctgggtggcctcagccaaggctcccgaaaccagtcctaccgctcacgctcgcggtcgcgttctagagagcggccctctgcgccccggggcatccccttcgcttctgcctcctcgtcagtctattacggcagctactcgcgcccctacgggagcgacaagccttggcctagcctcctcgacaaggagagggaggagagcctgcggcagaagagattaagtgagagagagagaattggagaattgggagctcctgaagtatggggactttctccaaagaatcctgaaccagattctgatgaacatacaccagtggaggatgaagagccaaagaaaagcactacttcagcttctacttcagaagaagaaaaaaagaagaagtctagccgttcaaaagaaaggtccaagaaaaggagaaagaaaaaatcatcgaaaagaaaacataagaagtattctgaagatagcgacagtgactctgattctgaaacagactccagtgatgaagataacaaaaggagagcaaagaaagccaagaaaaaggaaaagaagaagaaacacagatcgaagaaatataagaaaaagaggtctaagaagagcagaaaagagtccagtgattcaagctctaaagaatcccaagaagagtttctggaaaatccctggaaggatcgaacaaaggctgaagaaccatcagatttaattggcccagaggctccaaaaacacttacctctcaagatgataaacctttgaactatggccatgctctgttacctggtgaaggtgcagctatggctgaatatgtaaaagctggaaaacgtatcccacgaagaggtgaaattggcttgacaagtgaagaaattgcatcatttgaatgctcaggttatgtaatgagtggtagcaggcatcgccgaatggaggctgtgcgactgcgaaaagagaaccagatctacagtgctgatgagaagagagcccttgcatcctttaaccaagaagagagacgaaagagagagaacaagattctggccagttttcgagaaatggtttacagaaagaccaaagggaaggatgacaaataaagattttctgattgtccagaagacatttttaacaacaaaaaagaaagtctgggttccacacatacatagaaaaagattattatgttctgagaaagctttacagtgctactgtgccttctatttaattctttcagtccttcaataaaaagctgcttattgatataa

SEQ ID NO: 215558 - DNA, 1248 bp, Artificial Sequence
  derived and/or modified sequence
atggcccctgtttccggctcccgatctccagatagggaagcttctggtagtggaggaagacgacggtcctcctctaaatccccaaaaccctcaaagtcagctagatctcctagggggcgtagatcaaggtcacattcttgttctagaagcggggaccgcaacggtctcacccatcagctgggtgggctttctcagggaagccggaaccagagctaccggtcccgctcccgctccaggagtcgagaaagacctagcgcaccaagagggatccccttcgcctctgctagcagttcggtctattatggcagctacagccggccttacggctccgataaaccctggccctcgctcttggacaaagagagagaggagtccctgagacaaaaaaggctgagcgagcgtgagaggatcggtgagctcggggcacccgaggtttggggccttagccctaagaaccctgagccagatagcgatgagcacacccctgtggaagacgaagagccgaagaagagcacaacatccgcatctacgtccgaagaagaaaaaaaaaaaaagtctagtcggtccaaagagcggagcaagaaacggagaaaaaagaaaagtagtaagcgaaagcataagaaatactcggaggacagcgacagcgactcggacagcgaaaccgactcctccgatgaggacaataaacggagggctaaaaaggcaaagaagaaggagaaaaagaaaaaacataggagcaaaaagtataagaagaagcggtcaaagaaatcccgcaaggaatcctctgatagctcttcaaaggagagccaggaggagtttctggaaaatccttggaaagatcgtaccaaggcagaggagccatctgatctgattggccctgaggctccaaaaaccctgaccagtcaggatgacaagccactaaattatgggcacgcactcttgcctggcgaaggggctgccatggctgaatatgttaaggccggtaagagaatccccagacgaggagagatcggactgacgtccgaagaaattgcgtcttttgaatgtagtggttatgtgatgagcgggagcaggcacaggcgtatggaagccgtgcgcctcaggaaggagaatcaaatctattccgccgacgagaagcgcgctctcgccagtttcaaccaagaagaaagaagaaagagagaaaacaagatccttgcatccttccgcgaaatggtgtacaggaagacgaagggcaaagatgataaatag

SEQ ID NO: 215559 - DNA, 1248 bp, Artificial Sequence
  derived and/or modified sequence
atggcccccgtgagcggcagcagaagccccgacagagaggccagcggcagcggcggcagaagaagaagcagcagcaagagccccaagcccagcaagagcgccagaagccccagaggcagaagaagcagaagccacagctgcagcagaagcggcgacagaaacggcctgacccaccagctgggcggcctgagccagggcagcagaaaccagagctacagaagcagaagcagaagcagaagcagagagagacccagcgcccccagaggcatccccttcgccagcgccagcagcagcgtgtactacggcagctacagcagaccctacggcagcgacaagccctggcccagcctgctggacaaggagagagaggagagcctgagacagaagagactgagcgagagagagagaatcggcgagctgggcgcccccgaggtgtggggcctgagccccaagaaccccgagcccgacagcgacgagcacacccccgtggaggacgaggagcccaagaagagcaccaccagcgccagcaccagcgaggaggagaagaagaagaagagcagcagaagcaaggagagaagcaagaagagaagaaagaagaagagcagcaagagaaagcacaagaagtacagcgaggacagcgacagcgacagcgacagcgagaccgacagcagcgacgaggacaacaagagaagagccaagaaggccaagaagaaggagaagaagaagaagcacagaagcaagaagtacaagaagaagagaagcaagaagagcagaaaggagagcagcgacagcagcagcaaggagagccaggaggagttcctggagaacccctggaaggacagaaccaaggccgaggagcccagcgacctgatcggccccgaggcccccaagaccctgaccagccaggacgacaagcccctgaactacggccacgccctgctgcccggcgagggcgccgccatggccgagtacgtgaaggccggcaagagaatccccagaagaggcgagatcggcctgaccagcgaggagatcgccagcttcgagtgcagcggctacgtgatgagcggcagcagacacagaagaatggaggccgtgagactgagaaaggagaaccagatctacagcgccgacgagaagagagccctggccagcttcaaccaggaggagagaagaaagagagagaacaagatcctggccagcttcagagagatggtgtacagaaagaccaagggcaaggacgacaagtag

SEQ ID NO: 215560 - protein, 531 aa, Artificial Sequence
  derived and/or modified sequence
MADVLSVLRQYNIQKKEIVVKGDEVIFGEFSWPKNVKTNYVVWGTGKEGQPREYYTLDSILFLLNNVHLSHPVYVRRAATENIPVVRRPDRKDLLGYLNGEASTSASIDRSAPLEIGLQRSTQVKRAADEVLAEAKKPRIEDEECVRLDKERLAARLEGHKEGIVQTEQIRSLSEAMSVEKIAAIKAKIMAKKRSTIKTDLDDDITALKQRSFVDAEVDVTRDIVSRERVWRTRTTILQSTGKNFSKNIFAILQSVKAREEGRAPEQRPAPNAAPVDPTLRTKQPIPAAYNRYDQERFKGKEETEGFKIDTMGTYHGMTLKSVTEGASARKTQTPAAQPVPRPVSQARPPPNQKKGSRTPIIIIPAATTSLITMLNAKDLLQDLKFVPSDEKKKQGCQRENETLIQRRKDQMQPGGTAISVTVPYRVVDQPLKLMPQDWDRVVAVFVQGPAWQFKGWPWLLPDGSPVDIFAKIKAFHLKYDEVRLDPNVQKWDVTVLELSYHKRHLDRPVFLRFWETLDRYMVKHKSHLRF

SEQ ID NO: 215561 - DNA, 1596 bp, Artificial Sequence
  derived and/or modified sequence
atggccgacgtgctgagcgtgctgagacagtacaacatccagaagaaggagatcgtggtgaagggcgacgaggtgatcttcggcgagttcagctggcccaagaacgtgaagaccaactacgtggtgtggggcaccggcaaggagggccagcccagagagtactacaccctggacagcatcctgttcctgctgaacaacgtgcacctgagccaccccgtgtacgtgagaagagccgccaccgagaacatccccgtggtgagaagacccgacagaaaggacctgctgggctacctgaacggcgaggccagcaccagcgccagcatcgacagaagcgcccccctggagatcggcctgcagagaagcacccaggtgaagagagccgccgacgaggtgctggccgaggccaagaagcccagaatcgaggacgaggagtgcgtgagactggacaaggagagactggccgccagactggagggccacaaggagggcatcgtgcagaccgagcagatcagaagcctgagcgaggccatgagcgtggagaagatcgccgccatcaaggccaagatcatggccaagaagagaagcaccatcaagaccgacctggacgacgacatcaccgccctgaagcagagaagcttcgtggacgccgaggtggacgtgaccagagacatcgtgagcagagagagagtgtggagaaccagaaccaccatcctgcagagcaccggcaagaacttcagcaagaacatcttcgccatcctgcagagcgtgaaggccagagaggagggcagagcccccgagcagagacccgcccccaacgccgcccccgtggaccccaccctgagaaccaagcagcccatccccgccgcctacaacagatacgaccaggagagattcaagggcaaggaggagaccgagggcttcaagatcgacaccatgggcacctaccacggcatgaccctgaagagcgtgaccgagggcgccagcgccagaaagacccagacccccgccgcccagcccgtgcccagacccgtgagccaggccagacccccccccaaccagaagaagggcagcagaacccccatcatcatcatccccgccgccaccaccagcctgatcaccatgctgaacgccaaggacctgctgcaggacctgaagttcgtgcccagcgacgagaagaagaagcagggctgccagagagagaacgagaccctgatccagagaagaaaggaccagatgcagcccggcggcaccgccatcagcgtgaccgtgccctacagagtggtggaccagcccctgaagctgatgccccaggactgggacagagtggtggccgtgttcgtgcagggccccgcctggcagttcaagggctggccctggctgctgcccgacggcagccccgtggacatcttcgccaagatcaaggccttccacctgaagtacgacgaggtgagactggaccccaacgtgcagaagtgggacgtgaccgtgctggagctgagctaccacaagagacacctggacagacccgtgttcctgagattctgggagaccctggacagatacatggtgaagcacaagagccacctgagattctag

SEQ ID NO: 215562 - DNA, 1596 bp, Artificial Sequence
  derived and/or modified sequence
atggcagacgtcctcagtgtcctgaggcagtataacatccagaaaaaggaaattgtggttaagggagacgaggtcatatttggcgagttctcctggcctaagaatgtgaaaactaactatgtggtatgggggacgggcaaagagggccagcctagagagtattataccctggatagtatcctcttccttcttaacaatgtgcaccttagccaccccgtttacgtgcggagagcggccacagaaaatattccagtggtgcgccgcccagaccggaaggacttactgggttatcttaacggggaggcatccaccagcgcttcaatagatcggtccgcacccctcgaaatcgggttgcagcgcagcacccaagttaagcgcgccgctgacgaagtgttagcagaggccaaaaaacctcgcatcgaggacgaggagtgtgtgcgtctcgataaagagcgtctagccgctagattggagggtcataaggagggaatcgtgcagacggagcagattaggtccctgtctgaagcaatgagtgtagaaaagatcgccgctattaaggccaagatcatggccaagaaacggtcaaccataaaaactgatctcgacgacgatattactgcactgaaacagaggagctttgtcgatgccgaggtcgatgtgactcgggacattgtgtctcgggagagagtgtggcggacgagaacaactatcttgcagtcgactggcaagaacttctcgaagaacattttcgcaatactgcaaagcgtaaaagccagggaagaaggaagggcccctgagcaacgaccagcacccaatgccgcccccgtcgatcctacactccggacgaaacaacccattcccgctgcctataacaggtatgatcaggagagatttaaaggtaaagaagagaccgagggctttaaaatagatactatgggtacctatcatggaatgacactcaagagcgttactgagggcgcttccgccaggaaaacccagacccccgcggctcaacccgttcctcgcccagtcagccaggccagaccccctccaaaccaaaaaaaaggctcacgaacgccgatcattatcatacccgcggccaccacctccctgatcaccatgctcaacgccaaggatctgctccaggacctcaagtttgttccctccgacgaaaagaaaaaacaaggctgtcagcgggaaaatgaaactttaattcaacgccggaaagatcagatgcagccgggcgggaccgccatcagcgtgaccgtcccatacagagtggtcgatcagccactcaaacttatgccccaggattgggatcgcgttgtcgccgtattcgtgcagggaccagcctggcagtttaagggctggccttggctgctgccggatggttcccccgtggatatatttgccaaaatcaaggcttttcacctcaagtacgatgaagttagattggatccgaatgtccagaagtgggacgtaacagtgcttgagttgagttaccataagcgtcatttagaccgacccgtttttctgaggttctgggagacgctggacaggtatatggtcaagcacaagtcccatctccggttctag

SEQ ID NO: 215563 - DNA, 1596 bp, Artificial Sequence
  derived and/or modified sequence
atggctgatgtgctgtctgtgctgcggcagtacaacatccagaagaaggagatcgtggtgaagggagatgaagtcatctttggagagttctcctggcccaagaatgtgaagaccaactacgtggtgtggggcaccgggaaggagggccagccccgggagtactacaccctggacagcatcctcttcctgctgaacaacgtgcacctgagccaccctgtgtatgtgcggcgggccgccacagagaacatccctgtggtgagaagaccagacaggaaggacctgctgggctacctgaatggagaggccagcaccagcgccagcattgacagaagtgcccccctggagatcggcctgcagaggagcacccaggtgaagagagctgctgatgaggtgctggccgaggccaagaagcccagaattgaagatgaggagtgtgtgcggctggacaaggagcggctggccgcccggctggagggccacaaggagggcatcgtgcagacagagcagatccgcagcctgtctgaggccatgtctgtggagaagattgctgccatcaaggccaagatcatggccaagaagaggagcaccatcaagacagacctggatgatgacatcacagccctgaagcagaggagctttgtggatgctgaggtggatgtgacccgggacatcgtgtcccgggagcgggtgtggaggaccaggaccaccatcctgcagagcacaggcaagaacttcagcaagaacatctttgccatcctgcagagcgtgaaggcccgggaggagggccgggcccctgagcagaggcctgccccaaatgctgcccctgtggaccccaccctgcggaccaagcagcccatcccagctgcctacaacagatatgaccaggagcgcttcaagggcaaggaggagacagagggcttcaagattgacaccatgggcacctaccacggcatgaccctgaagtctgtgacagagggcgccagcgccaggaagacccagaccccagctgcccagcctgtgcccaggcctgtgtcccaggcccggcccccacccaaccagaagaagggcagcaggacccccatcatcatcatcccagctgccaccaccagcctcatcaccatgctgaatgccaaggacctgctgcaggacctgaagtttgtgcccagtgatgagaagaagaagcagggctgccagcgggagaatgagaccctcatccagaggaggaaggaccagatgcagcccggcggcacagccatctctgtgacagtgccctacagagtggtggaccagcccctgaagctgatgccccaggactgggacagagtggtggccgtgtttgtgcagggccctgcctggcagttcaagggctggccctggctgctgcctgatggcagccctgtggacatctttgccaagatcaaggccttccacctgaagtatgatgaggtgcggctggaccccaacgtgcagaagtgggatgtgacagtgctggagctgagctaccacaagaggcacctggacaggcctgtgttcctgcgcttctgggagaccctggaccgctacatggtgaagcacaagagccacctgcgcttctag

SEQ ID NO: 215564 - DNA, 1596 bp, Artificial Sequence
  derived and/or modified sequence
atggccgacgtgctgagcgtgctgcggcagtacaacatccagaagaaagagatcgtggttaagggtgatgaagtgatctttggagaattttcatggcctaagaacgtcaaaacaaactatgtagtgtgggggaccggaaaggagggacagccacgggaatactatacccttgatagcatcttatttttgcttaacaacgtccacctctcgcatccggtgtatgttagacgggccgccactgagaacattcctgtggttcgccggcctgaccgcaaagatttactaggctacctcaacggggaggccagcacttctgcgtctattgataggtctgcccctctcgagataggtctgcaacgaagcacacaggtcaagagggccgctgacgaagtcctggccgaagccaagaagccgagaatagaggacgaagaatgcgtgaggttagacaaggagcgccttgctgcaaggcttgaggggcataaggaaggtatcgtgcagacggaacaaattaggtccttgagcgaagccatgagcgtagagaagattgctgcaataaaagctaaaatcatggccaagaaacggagcacaattaagacagatcttgacgatgacatcactgctctcaagcagaggagtttcgtggatgctgaagtggatgtgaccagagacattgtctcccgagaacgggtatggcggacccgcactaccattctgcagtccacaggcaagaatttctccaagaacatcttcgcgatcctgcagtccgtaaaagctcgtgaggaaggcagagccccggagcagcgccctgcccctaatgccgcccccgttgaccccacgctgcggaccaaacaacctataccagcagcctacaatcggtacgaccaggagcgctttaagggcaaggaggagaccgaaggctttaagattgataccatgggtacctaccacggaatgacgttgaaaagcgtgaccgagggggcgtccgcccgcaaaacccagacacctgccgctcagcccgttcccaggccagtatctcaggctcggcctcctcctaatcagaaaaagggcagcaggacacctattattattattcccgcagccacgactagcctgatcactatgctgaacgccaaggatcttctccaggacctgaaatttgttccatcggacgaaaagaaaaagcaaggatgccagagagaaaatgaaaccttaatacagcgccgcaaggaccagatgcagcctgggggcaccgctatctctgttaccgtcccatacagggtcgtggaccagcctctcaaattgatgcctcaggactgggaccgggtggtcgctgtcttcgtacagggccccgcatggcagtttaaaggctggccatggttattacccgatggttctccagtcgacatatttgccaaaatcaaggcctttcatttgaagtacgatgaggtgagactggacccaaacgtgcagaaatgggacgtcaccgtacttgagttgtcctaccacaagcgacatctcgaccgcccagtgttcctgcgattctgggaaacgctagatcgctacatggtgaagcacaaatcacatctgcgtttttag

SEQ ID NO: 215565 - DNA, 1596 bp, Artificial Sequence
  derived and/or modified sequence
atggctgacgtcttgtccgtgctgcgacagtacaacatacaaaaaaaggagatcgtggttaagggagacgaggtaatttttggggagtttagctggccaaagaatgtgaaaacaaactatgtcgtatggggaactgggaaggagggacagccccgtgaatattataccttggattctattctgttcctcctgaacaatgtccacttatcccatcccgtgtatgttcgccgagcagccaccgagaacatccctgttgttcgcagaccagataggaaggatctcctcgggtatctgaacggcgaggcctctacttccgcatcgatcgatcgaagcgctccactagaaattggcctgcagcgtagcacacaagtgaagcgggctgcagatgaggtcctggccgaggccaagaaaccccgaatcgaggacgaggaatgcgtcagattggataaggaaaggctcgccgcacgcctcgaagggcacaaggaagggattgtgcagacagaacagatcaggtctctgagcgaggctatgtcggtggagaagatcgcagctataaaggcgaagatcatggccaaaaagcggtccactatcaaaacagatttggacgacgacatcacagccctgaagcagcgatccttcgttgatgccgaggtggatgtaacaagggatatcgtctcaagagagcgggtgtggcgtacccggaccaccatccttcagtctacgggaaagaactttagcaagaacatcttcgctatcttgcaaagtgtcaaggcacgggaggagggacgagcaccagaacagcggcctgccccaaacgcagctcctgtggaccccactctgcgcactaaacagccaatacccgcagcctacaacaggtacgaccaggagagattcaagggtaaggaggaaacagagggcttcaagattgatactatggggacttatcatggcatgacactaaaatcagtgacagagggggcttcagccaggaagacccagactccagccgctcagccggtgccaaggcccgtttctcaggcgagaccaccccctaaccaaaaaaaagggtcaagaactcccatcatcatcatccctgctgccactaccagcctaattacaatgctgaacgcaaaagaccttctccaggatctcaaatttgttccttccgatgagaagaaaaagcaggggtgccagcgcgaaaacgagaccctcatccagcgcaggaaagatcagatgcagccagggggaactgctattagtgtgactgtgccatatcgcgtggtcgaccagcccctcaaactgatgcctcaggactgggatcgcgtggtcgccgtgttcgttcagggcccagcctggcagttcaaaggttggccatggctactcccagatggcagcccggttgacatatttgcaaaaattaaagcgtttcatctgaagtatgatgaagtcagactggatccgaatgtgcaaaagtgggatgtgaccgtcttagagctatcttaccacaagcgacacctcgatagacccgtcttcttgcgattctgggaaacccttgataggtatatggtcaaacataaatcccacctgcgtttttag

SEQ ID NO: 215566 - DNA, 4969 bp, Artificial Sequence
  derived and/or modified sequence
cggcggcctgggtggctactgcccctgctgctgtcgtaggcgaggacggctgttagtgctgctgctgttggttcgtcgcggcggcgaaggaggaggaggaagagggcgaggcgacaagagaagaaggaggcaggcgcggcggcagcggcggcgccccgagccggcggaggcgaggggggggaagatggcggacgtgcttagcgtcctgcgacagtacaacatccagaagaaggagattgtggtgaagggagacgaagtgatcttcggggagttctcctggcccaagaatgtgaagaccaactatgttgtttgggggactggaaaggaaggccaacccagagagtactacacattggattccattttatttctacttaataacgtgcacctttctcatcctgtttatgtccgacgtgcagctactgaaaatattcctgtggttagaagacctgatcgaaaagatctacttggatatctcaatggtgaagcgtcaacatcggcaagtatagacagaagcgctcccttagaaataggtcttcagcgatctactcaagtcaaacgagctgcagatgaagttttagcagaagcaaagaaaccacgaattgaggatgaagagtgtgtgcgccttgataaagagagattggctgcccgtttggagggtcacaaagaagggattgtacagactgaacagattaggtctttgtctgaagctatgtcagtggaaaaaattgctgcaatcaaagccaaaattatggctaagaaaagatctactatcaagactgatctagatgatgacataactgcccttaaacagaggagttttgtggatgctgaggtagatgtgacccgagatattgtcagcagagagagagtatggaggacacgaacaactatcttacaaagcacaggaaagaatttttccaagaacatttttgcaattcttcaatctgtaaaagccagagaagaagggcgtgcacctgaacagcgacctgccccaaatgcagcacctgtggatcccactttgcgcaccaaacagcctatcccagctgcctataacagatacgatcaggaaagattcaaaggaaaagaagaaacggaaggcttcaaaattgacactatgggaacctaccatggtatgacactgaaatctgtaacggagggtgcatctgcccggaagactcagactcctgcagcccagccagtaccaagaccagtttctcaagcaagacctcccccaaatcagaagaaaggatctcgaacacccattatcataattcctgcagctaccacctctttaataaccatgcttaatgcaaaagaccttctacaggacctgaaatttgtcccatcagatgaaaagaagaaacaaggttgtcaacgagaaaatgaaactctaatacaaagaagaaaagaccagatgcaaccagggggcactgcaattagtgttacagtaccttatagagtagtagaccagccccttaaacttatgcctcaagactgggaccgcgttgtagccgtttttgtgcagggtcctgcatggcagttcaaaggttggccatggcttttgcctgatggatcaccagttgatatatttgctaaaattaaagccttccatctgaagtatgatgaagttcgtctggatccaaatgttcagaaatgggatgtaacagtattagaactcagctatcacaaacgtcatttggatagaccagtgttcttacggttttgggaaacattggacaggtacatggtaaagcataaatcgcacttgagattctgaattatttggctcctccatttctggaaattgagactcaagctttatgaatttatcaagaacttaaaaatgaagaaggtcacagattgatcttttataagaccttatttgatgctttgtgcttcaaggagatgatacctgtcatccatataagcaaactttttggcttacaactatttttttaatattagccttctagtctgtaatggaaattgtatattttgatagaagttttttctccattggttaaattagcattacttaaaatttgtttctttagaaaataaatgcaggttataaatgtgtgtatatttagagattataaggctctctgagccatcttctgatttttcattgctctataattctttttactgaaaatactatgttatgaatggtattaaattttagtctctggaacatccaaaaccaagcaaagggatgtgactattttgaatgaatcagaatgtcaacttgtatgtacactatatctacacttactcattatttaaaaagaataatgaaaaatctagatcaattcttcaatttgattgaactgttcagccttttcaagatttctttatttacaaatgattacatttaaatgaatgtacattcttctcactgactttggtgattttgaaacctagaatgatgtgtttctatctgtaatatctttccatttgaaaaaaatctcaaaacacagattaaaaccacaataggctgtagtattttttattttgggagccagagtatgatttgggggaagaatatgtatcagccctattgcagtataactttaagctccttttctctttagtccacttttgattgtaatttttatggtataggattttgaatcttctattttaggcttgtcagtcttggagttcttatcttccattatccctaaatattgataaactcccaggcaccaaagaaaacatttgcttaattgtctgaaaagaaacaagagaaaaacactggtatttttatgtctgtattcaatatggtataaaatataaaaactatattttaacttagtgaaatattttactatttctctacttcagacaaaatgttgcatccaaggtacatcaagtgaccatttgccttgaaccttgatttcactttgttttttttttttccttaaaggcaactaggaagctttactttcctaaagtgtttttgccattggaatttttgctgatcacagtcttatgtcatttttttctctgtttttattcccagcaattttctcctaggttaacatatttttggtgaacgtttaggcctttcataggtattaagctgacattatctagcttcttaatgaaatttaacactgtcacaaaaatgagaagttattattttttaagtgatcacatagttcataccactagtaactagaaaagatatttattcacatgatatttacaaggctcttcagaagggaacagtcagcattttaaattactagattttagcatacttaacaaggtttgaacagattctacccctattttcctccctttttagcgtcttctttccttaaagataaaagaaaactcaaatttgtttacattaggctttcttagcatataaatatatttccaaaataaattacatgttgtgtaaactttctccatgatgaaatagtcaaggaccagaatctgtaatatttttatgtaagattacttgtcaagactactacaagtcagtatgaactaccttcccataaagatttttggtatttgtacttatttatgaactttacttgagacagaatatggttaaaattaggaacatctactttgaatgaggtttatttttctattttgaatttgccttatgtatattcaaaggcttatggaaatactgtaaaggaacattaggaaaaggacaaataggctataaccatctatcttaaaatcagacccttagtataagcacctctttttcttttcctctttgacaatttagtctcttatttaggtccatgtaattaatttcattccattattttttagctgtttattctaaaaaacaaaaattttcagccactcccatttattctcccatgacatggtcctatatagcagtacttaacacagtgccttgcacatagtaggcattcagtaaatacttacatgcatgaatgaataatgtattttcagtgtaacaaatttattataaaagtgtagttcgactcttcttggtcttggagtttgagagtacagaattacagggaatgaagagaggtataagtagatattttaatggaaatgaagtataaattaataacttgacttacccctccataagttactgctaactggagatacccttgtatgcccaacctgtaaaggaaaaagttctatttctatatttataggacattcttctcagtcaaggaacagtaagaaatatgtaggtttcaatcagttgctctcaaccctgactgcattttagaatcatttggagagtttttaaaaatatccatgcctgaatcttgattcccattttcatgtaatttgagacaagacctggtcatcagtattttttttaaagttctccaggtaatttgaatgtgcaggaaggattcagaatcactggtttaatttgttattgaaaacagtaccagtattaaatgtgtttcctcttccttcttttctgtatgtatgtgtggtttttgattttttgttgttgttgttgttttgtggccaccctttgcactagaccatcccttttattggtggtattggcctatattcccattgacaaatgcaatttttaattatttatttaatataggagtattttactgtttaatatttaaacaatgtttaatgtatttcattattaactagtattatagtttgtttttttcccatgtctccataacttttactaacatttgtttttagcagcacaacagtaatccatataaaaacaactaattcataatgaggaaaatctcataatttttaaggcagaaagaagtattaatttttgatctgccatgtagaatgagacaaatacagtttgcttatgaaaggaaagtggcatacttttaaattggtctacacagaaaagtaaaagtaaactattcatttaaataagattcattatctaataaatattgagggaatatttttcctaaataaaaatttttctgactgctaacaaaaa

SEQ ID NO: 215567 - protein, 631 aa, Artificial Sequence
  derived and/or modified sequence
MAAQRGMPSSAVRVLEEALGMGLTAAGDARDTADAVAAEGAYYLEQVTITEASEDDYEYEEIPDDNFSIPEGEEDLAKAIQMAQEQATDTEILERKTVLPSKHAVPEVIEDFLCNFLIKMGMTRTLDCFQSEWYELIQKGVTELRTVGNVPDVYTQIMLLENENKNLKKDLKHYKQAADKAREDLLKIQKERDFHRMHHKRIVQEKNKLINDLKGLKLHYASYEPTIRVLHEKHHTLLKEKMLTSLERDKVVGQISGLQETLKKLQRGHSYHGPQIKVDHSREKENAPEGPTQKGLREAREQNKCKTKMKGNTKDSEFPIDMQPNPNLNVSKESLSPAKFDYKLKNIFRLHELPVSCVSMQPHKDILVSCGEDRLWKVLGLPKCNVLLTGFGHTDWLSDCCFHPSGDKLATSSGDTTVKLWDLCKGDCILTFEGHSRAVWSCTWHSCGNFVASSSLDKTSKIWDVNSERCRCTLYGHTDSVNSIEFFPFSNTLLTSSADKTLSIWDARTGICEQSLYGHMHSINDAIFDPRGHMIASCDACGVTKLWDFRKLLPIVSIDIGPSPGNEVNFDSSGRVLAQASGNGVIHLLDLKSGEIHKLMGHENEAHTVVFSHDGEILFSGGSDGTVRTWS

SEQ ID NO: 215568 - DNA, 1896 bp, Artificial Sequence
  derived and/or modified sequence
atggccgcccagagaggcatgcccagcagcgccgtgagagtgctggaggaggccctgggcatgggcctgaccgccgccggcgacgccagagacaccgccgacgccgtggccgccgagggcgcctactacctggagcaggtgaccatcaccgaggccagcgaggacgactacgagtacgaggagatccccgacgacaacttcagcatccccgagggcgaggaggacctggccaaggccatccagatggcccaggagcaggccaccgacaccgagatcctggagagaaagaccgtgctgcccagcaagcacgccgtgcccgaggtgatcgaggacttcctgtgcaacttcctgatcaagatgggcatgaccagaaccctggactgcttccagagcgagtggtacgagctgatccagaagggcgtgaccgagctgagaaccgtgggcaacgtgcccgacgtgtacacccagatcatgctgctggagaacgagaacaagaacctgaagaaggacctgaagcactacaagcaggccgccgacaaggccagagaggacctgctgaagatccagaaggagagagacttccacagaatgcaccacaagagaatcgtgcaggagaagaacaagctgatcaacgacctgaagggcctgaagctgcactacgccagctacgagcccaccatcagagtgctgcacgagaagcaccacaccctgctgaaggagaagatgctgaccagcctggagagagacaaggtggtgggccagatcagcggcctgcaggagaccctgaagaagctgcagagaggccacagctaccacggcccccagatcaaggtggaccacagcagagagaaggagaacgcccccgagggccccacccagaagggcctgagagaggccagagagcagaacaagtgcaagaccaagatgaagggcaacaccaaggacagcgagttccccatcgacatgcagcccaaccccaacctgaacgtgagcaaggagagcctgagccccgccaagttcgactacaagctgaagaacatcttcagactgcacgagctgcccgtgagctgcgtgagcatgcagccccacaaggacatcctggtgagctgcggcgaggacagactgtggaaggtgctgggcctgcccaagtgcaacgtgctgctgaccggcttcggccacaccgactggctgagcgactgctgcttccaccccagcggcgacaagctggccaccagcagcggcgacaccaccgtgaagctgtgggacctgtgcaagggcgactgcatcctgaccttcgagggccacagcagagccgtgtggagctgcacctggcacagctgcggcaacttcgtggccagcagcagcctggacaagaccagcaagatctgggacgtgaacagcgagagatgcagatgcaccctgtacggccacaccgacagcgtgaacagcatcgagttcttccccttcagcaacaccctgctgaccagcagcgccgacaagaccctgagcatctgggacgccagaaccggcatctgcgagcagagcctgtacggccacatgcacagcatcaacgacgccatcttcgaccccagaggccacatgatcgccagctgcgacgcctgcggcgtgaccaagctgtgggacttcagaaagctgctgcccatcgtgagcatcgacatcggccccagccccggcaacgaggtgaacttcgacagcagcggcagagtgctggcccaggccagcggcaacggcgtgatccacctgctggacctgaagagcggcgagatccacaagctgatgggccacgagaacgaggcccacaccgtggtgttcagccacgacggcgagatcctgttcagcggcggcagcgacggcaccgtgagaacctggagctag

SEQ ID NO: 215569 - DNA, 1896 bp, Artificial Sequence
  derived and/or modified sequence
atggccgcgcagcggggaatgccttcgagcgccgtgagggtgctagaggaagccctgggaatgggcctgaccgccgccggagacgctcgcgatacggcagatgctgtcgccgcagaaggagcgtattacctggagcaggtaactatcacagaggcctccgaagatgattatgaatacgaagaaatcccggatgacaatttcagtatcccagagggcgaggaggacctggctaaagccatccaaatggcgcaggagcaggccacggataccgaaatcctggaaaggaagactgtgctacccagcaagcatgctgtccctgaggttatagaagactttttgtgcaactttctcattaagatgggtatgactcggaccttagactgtttccagtcagaatggtacgagctgattcagaaaggggttactgagctgaggacagtgggtaatgtccctgacgtgtatacccagattatgctgctggaaaatgaaaacaaaaatctgaagaaagacctgaaacactacaaacaggctgccgacaaagctcgcgaggatctactgaaaatccagaaagagagggatttccaccggatgcatcacaagcgtatcgtgcaggagaagaataagttaataaatgatcttaaggggttgaaactacactacgcctcctatgaaccaaccatccgggttctgcatgagaagcatcataccctgcttaaagagaagatgcttacctctttggagagagacaaggtagtcggtcagatatccggactgcaggaaacgctgaaaaagctccagcgcgggcactcttatcatgggccccagatcaaggtcgaccattcaagggagaaggagaacgccccagaaggtcccacacagaagggactgcgggaggcacgagagcagaataagtgcaagactaaaatgaaggggaataccaaagatagcgaatttcccattgatatgcagcctaacccgaacctgaacgtcagtaaggagagcctgtctcccgccaagtttgattataagctcaaaaacatcttccggcttcacgaattgcctgtgagttgtgtttcgatgcaaccacacaaagacatcctggtttcctgcggagaggaccgcctgtggaaggtactgggacttcctaaatgcaatgtgttgctgacagggtttggccataccgactggctgtctgactgttgttttcatccatccggagataagcttgccacctcctcaggcgataccactgttaaactgtgggacctctgtaaaggcgactgtatcctgaccttcgagggacacagcagggccgtgtggagttgcacctggcattcatgtgggaacttcgtggcttcaagctcactggacaaaactagtaagatctgggacgtgaacagcgaacgctgccggtgtacgctctacggacacaccgactcagtaaattccattgaattcttccctttctcaaataccttgctgaccagctccgccgataaaaccctgtcgatctgggacgctcggaccggaatttgtgaacagtctctttacgggcacatgcatagcataaacgacgccatcttcgatcctagagggcatatgatcgcaagttgcgatgcatgcggggtaactaaactgtgggatttccggaagctgcttccaatagtctccatagatatcggaccctcacccggtaatgaagtcaactttgatagctcaggaagggtcctggcacaagcttccggtaatggcgtcatacaccttctggatctaaagagtggcgagattcacaaacttatgggccacgaaaatgaggctcacacagttgtgttctctcatgatggggagatcctattcagcggcggctcagatggtaccgtgcgcacatggtcttag

SEQ ID NO: 215570 - DNA, 1896 bp, Artificial Sequence
  derived and/or modified sequence
atggccgcccagaggggcatgcccagcagcgctgtgcgggtgctggaggaggccctgggcatgggcctgacagctgctggagatgcccgggacacagcagatgctgtggccgctgagggcgcctactacctggagcaggtgaccatcacagaggcctctgaagatgattatgaatatgaggagatcccagatgacaacttcagcatccctgagggggaggaggacctggccaaggccatccagatggcccaggagcaggccacagacacagagatcctggagaggaagacagtgctgcccagcaagcatgctgtgcctgaggtgattgaggacttcctgtgcaacttcctgatcaagatgggcatgaccaggaccctggactgcttccagagcgagtggtatgagctgatccagaagggcgtgacagagctgaggacagtgggcaatgtgcctgatgtgtacacccagatcatgctgctggagaatgaaaacaagaacctgaagaaggacctgaagcactacaagcaggccgctgacaaggcccgggaggacctgctgaagatccagaaggagcgggacttccacaggatgcaccacaagagaattgtgcaggagaagaacaagctgatcaatgacctgaagggcctgaagctgcactacgccagctatgagcccaccatccgggtgctgcacgagaagcaccacaccctgctgaaggagaagatgctgaccagcctggagcgggacaaggtggtgggccagatcagcggcctgcaggagaccctgaagaagctgcagaggggccacagctaccacggcccccagatcaaggtggaccacagccgggagaaggaaaatgcccctgagggccccacccagaagggcctgcgggaggcccgggagcagaacaagtgcaagaccaagatgaagggcaacaccaaggacagcgagttccccatcgacatgcagcccaaccccaacctgaatgtgtccaaggagagcctgagccctgccaagtttgactacaagctgaagaacatcttccggctgcacgagctgcctgtgtcctgtgtgtccatgcagccccacaaggacatcctggtgtcctgtggggaggaccggctgtggaaggtgctgggcctgcccaagtgcaatgtgctgctgactggatttggccacacagactggctgagtgactgctgcttccaccccagcggggacaagctggccaccagcagcggggacaccaccgtgaagctgtgggacctgtgcaagggggactgcatcctgacctttgagggccacagcagagctgtgtggagctgcacctggcacagctgtggcaactttgtggccagcagcagcctggacaagaccagcaagatctgggatgtgaacagcgagcgctgccgctgcaccctgtatggccacacagacagcgtgaacagcattgagttcttccccttcagcaacaccctgctgaccagcagcgctgacaagaccctgagcatctgggatgccaggacaggcatctgtgagcagagcctgtatggccacatgcacagcatcaatgatgccatctttgacccccggggccacatgattgccagctgtgatgcctgtggggtgaccaagctgtgggacttcaggaagctgctgcccatcgtgtccattgacatcggccccagccctggaaatgaggtgaactttgacagcagcggccgggtgctggcccaggccagcggaaatggagtcatccacctgctggacctgaagtctggagagatccacaagctgatgggccatgaaaatgaggcccacacagtggtgttcagccatgatggagagatcctcttcagcggcggcagtgatggcaccgtgaggacctggagctag

SEQ ID NO: 215571 - DNA, 1896 bp, Artificial Sequence
  derived and/or modified sequence
atggccgcccagcggggcatgcccagcagcgccgtgcgggtgctggaagaggccctggggatggggctgaccgccgcaggagatgctcgcgataccgctgacgcagttgcagccgaaggcgcctactatttggagcaagttacaattacggaagctagtgaggatgactatgagtatgaggagatccctgatgacaacttttctatccctgagggggaagaggatctcgctaaagcaatccagatggcacaggaacaggccaccgatacagagatcctcgagaggaagactgttctcccttccaaacacgccgtgccagaggtgatcgaagactttctgtgcaattttttgataaaaatgggcatgactcgtactttggactgttttcagagcgaatggtacgagctgatccagaagggggtcacagagcttcgaacggtgggaaacgtgcccgacgtttacacacagatcatgttgctggaaaatgaaaataaaaatctgaagaaagatcttaagcattataagcaggccgctgacaaggcacgggaagacttgttgaagattcagaaggagcgggatttccatagaatgcaccacaaaaggatagtacaggagaagaacaaactgattaacgacttgaaaggattgaagctgcattacgcaagttacgagcctacgattcgggtgctgcacgagaaacaccacactttgctgaaagaaaaaatgctgactagtctggaacgcgacaaggtggtgggtcagatcagcggattgcaggaaacacttaagaaactgcagcgcggccactcttaccatggcccacaaatcaaggtcgaccactccagggaaaaggagaatgcaccggagggtccgactcagaagggtctgcgggaagctcgcgaacaaaacaagtgcaaaaccaagatgaaaggtaatactaaagattctgagtttcccatcgatatgcagcctaatcctaacctcaatgtgagtaaagagtccctgagtccggcaaagttcgattacaagctgaaaaatattttcagactgcacgagttgccagtcagttgtgtcagcatgcagccacacaaggatattctagtatcctgcggagaggacagactgtggaaggtgctcgggcttcccaaatgcaacgtcctgttaaccggtttcggccacactgattggcttagcgactgctgtttccacccatccggagataaacttgctacgtccagtggagataccaccgtgaagctttgggatctttgcaaaggagattgcattctgacgttcgaaggacacagccgggcagtatggtcctgcacttggcactcatgcgggaactttgtagccagcagctctttggacaagacgagcaaaatatgggatgtgaacagtgaaaggtgtagatgtacgctgtacggtcacacagactcagtaaattctatagaattcttcccatttagcaacactctgctgaccagcagcgcagacaagacccttagcatttgggacgcccgcacaggcatctgcgagcagtccctgtacggccacatgcacagtataaacgatgctattttcgatcctagggggcacatgattgcctcctgcgatgcttgcggggtgactaaattgtgggatttcagaaaattactccccatcgtcagtattgacatcggtccctcccctggtaatgaggtgaactttgattcgtccggccgggtgctcgctcaggcatcaggcaatggggtgatacatttactcgatctcaagtctggcgaaatccataaacttatggggcatgagaatgaggcccacactgtggtcttctctcatgatggagagattcttttctctggggggtctgatggcaccgttcgcacctggtcctag

SEQ ID NO: 215572 - DNA, 1896 bp, Artificial Sequence
  derived and/or modified sequence
atggctgcccagcgtggaatgccttcgtccgccgtcagggtcttggaggaggccctgggcatggggctgacagctgcaggagatgcccgtgatacagccgacgcagtggctgctgaaggcgcttactacctggagcaggtcaccataactgaggcgtccgaggacgactacgagtacgaggagattcccgacgataatttctctatccctgaaggtgaggaggatctggcaaaggccattcaaatggcacaggagcaggctaccgacactgaaatactcgaaagaaagaccgtcttgcccagcaagcatgccgtgcccgaggtaattgaggactttctgtgcaatttcctgatcaaaatgggaatgactagaaccctggactgttttcagagcgaatggtacgagctgattcaaaagggagtcactgagcttcggaccgttggaaatgtgcccgacgtgtatacccagatcatgctgctggagaacgaaaacaagaatttaaagaaggacttgaaacactacaagcaggcggctgataaagcgcgtgaagacttactgaaaattcagaaggagagggattttcacaggatgcatcataaaaggattgtgcaggagaaaaataagctgatcaatgacttgaaaggactgaaacttcattatgcatcctacgaaccaacaattagggtcctgcatgaaaaacaccatactctactcaaagagaaaatgctgacttcccttgagcgagataaggtggttggacagatttctgggctacaggaaacccttaagaaactacagagaggccacagctatcatgggccacagatcaaggttgaccacagccgcgagaaggagaacgcacctgaaggccctactcagaaaggcctaagggaggcacgcgagcagaataagtgcaaaaccaagatgaagggcaatacaaaggattccgaattccctattgatatgcagcctaatcccaatttgaatgtctcaaaagaatccttgagtcccgcaaagttcgactacaaattaaagaatattttcaggctgcatgaattgcctgtgtcatgtgtgtcaatgcagccccacaaggacattttagtgtcatgtggggaagatcgtttatggaaagtgcttgggctccctaagtgtaacgttttgctgaccggcttcggacacactgattggctgtctgactgttgctttcacccctcaggcgacaagcttgccaccagcagcggagatactaccgttaagttgtgggacctgtgtaagggagactgcatactgaccttcgagggtcacagcagggctgtgtggagttgcacatggcactcctgcggcaattttgttgccagttcctcacttgataagacatcaaagatttgggatgttaattcagagcggtgtaggtgcaccttgtacggccacaccgattcggtgaacagtattgagtttttccctttttctaataccctgctgacaagtagtgcagacaaaacactcagcatttgggatgcccgaaccggtatctgcgaacaaagcctctacggccacatgcactctattaatgacgcaattttcgatccaagagggcatatgatcgctagctgtgatgcatgtggcgtcactaagctctgggattttcggaagctcctgccaatcgtgtccatcgacatagggccatcaccgggaaacgaggtcaattttgattctagtggccgtgtcttggcccaagcttcaggcaacggtgtcattcacttgttagacctgaaaagcggggaaatccacaaactgatgggacacgaaaacgaggctcacactgtagtgttctcccatgatggagagatattattcagcggcggttcagatggcacggtacgaacgtggtcctag

SEQ ID NO: 215573 - DNA, 2177 bp, Artificial Sequence
  derived and/or modified sequence
cgcgagagctcccgggggccgttgggtagcgtcttcgctgttgcccttagggacggctgtgggcctgctgggggtgggggcccgaagcgccagagatggctgctcagcgagggatgcccagctccgccgtgagggtcctggaagaggcgttgggcatgggtttgacggcagccggggacgcgagggacacggcggacgcggtggcggctgagggcgcctactacctggaacaggtcaccataactgaagcatctgaagatgactatgaatatgaagagataccagatgacaattttagcatcccagaaggtgaagaagatctggcaaaagcaattcagatggcccaagaacaggctacagatactgaaattttggaacggaaaacagttcttccttcaaagcatgcagtacctgaagtaatagaagactttctctgcaatttcttgatcaaaatgggaatgaccagaactcttgattgctttcagtctgaatggtatgagttaatacagaaaggagtgactgaacttagaactgttgggaatgttccagatgtctacacccagattatgcttttggaaaatgagaacaaaaatttaaagaaagatttgaagcactacaaacaagcagctgacaaagctagagaagatttgctgaaaattcagaaagaacgtgattttcatcgaatgcatcataagcgaatagtccaggaaaaaaacaaattaattaatgacctcaaagggttgaagttacattatgcatcttatgaaccgactataagggtgttacatgagaaacaccacactttactgaaggagaaaatgctgacctccttggaaagagacaaagtagttgggcagatttctggacttcaagaaacattgaagaaactgcaaagaggacatagttaccatggtcctcaaattaaagttgatcatagtcgtgaaaaagaaaatgcaccagaaggtcctactcagaaaggtcttcgtgaagccagggaacaaaacaaatgtaaaacaaagatgaaaggcaatacaaaggattcagaatttcccatagatatgcaaccaaatccaaacctgaatgtttctaaagaaagtctttctccagcaaaatttgactacaagctgaaaaacatttttagactccatgaacttccagtgagctgtgtctccatgcaaccccacaaagacatcctagtctcctgtggcgaggaccgactctggaaggtgttgggccttccaaaatgcaatgtgcttctcacgggatttggccacactgactggctttcagactgctgcttccatcccagtggcgacaaattggctacttcaagtggtgacactacagttaaattatgggatctatgtaaaggcgattgcattttgacctttgaaggacacagccgcgcagtgtggtcctgcacatggcactcctgcggcaattttgtggcttcctcctcactggataaaactagcaaaatttgggatgttaatagtgaaagatgcagatgtactttgtatggacatacagattctgtgaacagcattgagttttttcctttctccaatactcttctcacaagctctgcagacaagaccctgtctatatgggatgcaagaacaggtatatgtgagcagtcactttatggtcacatgcattctatcaatgatgccatttttgatcccaggggtcacatgatagcatcctgtgatgcctgtggggttacaaagctgtgggactttcggaagctgttaccaattgtgtccatcgatataggtccaagtcctggcaatgaggtgaattttgattcatcaggtcgagttttagctcaggcaagtggcaatggtgttatccatttgctagatcttaaatctggggagattcacaaattgatgggccacgaaaacgaggcacacacggttgtgttttctcacgacggggagattctcttttctggaggctctgacggcacagttcgaacgtggtcttgaccgtcagcacatcccgctgcagagggcattccctttaaggcttgaaaatgcctcctgtagtcccaaaccagcaaagaactggttaaatgtgccagcaggtaacatttacagtctgctttaaaacatgctttggacatatattttagtgctcatactgttactaataaaaaaataactttatgctca

SEQ ID NO: 215574 - protein, 411 aa, Artificial Sequence
  derived and/or modified sequence
MGMRARVPKVAHSTRRPPAARMWLPRFSSKTVTVLLLAQTTCLLLFIISRPGPSSPAGGEDRVHVLVLSSWRSGSSFLGQLFSQHPDVFYLMEPAWHVWTTLSQGSAATLHMAVRDLMRSIFLCDMDVFDAYMPQSRNLSAFFNWATSRALCSPPACSAFPRGTISKQDVCKTLCTRQPFSLAREACRSYSHVVLKEVRFFNLQVLYPLLSDPALNLRIVHLVRDPRAVLRSREAAGPILARDNGIVLGTNGKWVEADPHLRLIREVCRSHVRIAEAATLKPPPFLRGRYRLVRFEDLAREPLAEIRALYAFTGLTLTPQLEAWIHNITHGSGIGKPIEAFHTSSRNARNVSQAWRHALPFTKILRVQEVCAGALQLLGYRPVYSADQQRDLTLDLVLPRGPDHFSWASPD

SEQ ID NO: 215575 - protein, 417 aa, Artificial Sequence
  derived and/or modified sequence
MSRHLPWICDQRCSSPSSPGRWPPAARMWLPRFSSKTVTVLLLAQTTCLLLFIISRPGPSSPAGGEDRVHVLVLSSWRSGSSFLGQLFSQHPDVFYLMEPAWHVWTTLSQGSAATLHMAVRDLMRSIFLCDMDVFDAYMPQSRNLSAFFNWATSRALCSPPACSAFPRGTISKQDVCKTLCTRQPFSLAREACRSYSHVVLKEVRFFNLQVLYPLLSDPALNLRIVHLVRDPRAVLRSREAAGPILARDNGIVLGTNGKWVEADPHLRLIREVCRSHVRIAEAATLKPPPFLRGRYRLVRFEDLAREPLAEIRALYAFTGLTLTPQLEAWIHNITHGSGIGKPIEAFHTSSRNARNVSQAWRHALPFTKILRVQEVCAGALQLLGYRPVYSADQQRDLTLDLVLPRGPDHFSWASPD

SEQ ID NO: 215576 - DNA, 1236 bp, Artificial Sequence
  derived and/or modified sequence
atgggaatgagagcaagagtgccaaaggtggcacattcgactcgacgcccgccagcagccagaatgtggttgccgcgcttctcctctaaaacggttaccgtgctgcttcttgctcaaacaacttgcctgcttctcttcattatctctaggccagggccatcaagccctgctggcggggaagatagagtacacgtactggtgttaagctcttggagaagcggctcatccttcctaggccagttattctctcagcatcccgatgtgttctatctgatggagccggcatggcacgtatggactaccctatctcagggctctgcggcaacgctccacatggctgtccgagatctgatgaggtctatattcctgtgcgacatggacgtctttgatgcctacatgcctcagtctcgcaacctctccgcgttttttaactgggccacttccagggccctgtgttcaccaccggcttgcagcgcctttccaaggggcacaataagtaaacaggatgtctgcaagacactctgtactcggcagccattctcgcttgccagggaagcgtgccggagctatagccacgttgtcttgaaggaggtccggttttttaacctgcaggtgttgtacccactcctttcagatcctgcgctcaatttaagaatcgtacatctggtccgagaccctagagcagtccttagaagcagagaggctgcaggacccatactggctcgtgacaacggcatagtcctagggacgaacggaaaatgggttgaggctgaccctcacttacggttgattcgcgaagtctgtcgcagccatgttcgcatcgctgaggccgcaaccctgaagcccccaccatttcttcgggggaggtatagactcgtgcgcttcgaggacctggcaagggagccactagccgagataagggctttgtatgcttttactggcttgactctgactccacagctagaggcgtggattcataacatcactcatggctctgggattgggaaacctatcgaggcatttcacacttccagccgaaacgccaggaatgtgagccaagcgtggagacatgctctgccgtttaccaaaattcttagggtgcaagaggtgtgtgctggagccttacaattactggggtatcggcctgtgtattctgctgaccaacagcgagacctgacactcgacctggttcttcctcgtggacccgaccacttttcatgggcctctccagattag

SEQ ID NO: 215577 - DNA, 1254 bp, Artificial Sequence
  derived and/or modified sequence
atgtcccggcacttgccgtggatctgcgatcagcggtgttcatccccaagttctccaggtagatggcctccggcagctaggatgtggctgcctcgattctctagtaaaaccgtcactgtcctgctgctggcgcagacgacatgcctcctgctcttcatcatctccaggccgggaccgtcttcacctgccgggggcgaggatcgcgtgcacgtgctggtccttagttcttggaggagcggctctagttttctgggtcagttattttcacagcaccccgacgtgttctacttgatggagccagcttggcatgtgtggacgacgctgtcacagggatctgcggccacactgcacatggctgtgcgcgatttgatgaggtccatattcctctgtgacatggacgtgttcgatgcgtacatgcctcagagtcgaaatttgtccgcttttttcaactgggccacctctcgcgccctctgcagtccgccggcttgctcagccttcccaaggggcactatctcaaaacaggacgtgtgtaagactctatgcactagacagccattctcactggctcgcgaagcttgccgttcatactctcacgtcgtcttgaaggaggtgcgtttttttaatctccaggtcctctaccctctgctgagtgaccccgcactgaatctccgaatcgtccatctagttagagacccccgtgcagttctgcgctcacgcgaggccgctggccccattctggcccgagataatggcattgttttaggaactaatgggaagtgggtcgaggccgacccgcatctgcggctcatcagggaagtgtgtagaagccatgtgagaattgcagaggctgccaccctaaagccgccaccgtttctaagggggagatatcgcctcgttcgcttcgaggatctggccagggaacccctggccgaaatacgggcactctacgcgttcacagggcttactctgaccccgcagttggaagcctggatccataatatcacacatgggtccggcatcgggaaacccattgaagccttccacacctcttctaggaacgcacgaaacgtttcccaagcctggagacacgctttaccattcacaaagatactgcgggtgcaggaagtttgtgcaggcgctctccagctcctgggatacagaccagtgtacagtgctgaccagcagagggatttaacactagacttggttcttccgagaggcccggaccatttttcttgggcgagtcccgactag

SEQ ID NO: 215578 - DNA, 1236 bp, Artificial Sequence
  derived and/or modified sequence
atgggcatgagggcccgggtgcccaaggtggcccacagcaccaggaggcctcctgctgccaggatgtggctgccccgcttcagcagcaagacagtgacagtgctgctgctggcccagaccacctgcctgctgctcttcatcatcagcaggcctggccccagcagccctgctggaggagaggacagagtgcacgtgctggtgctgagctcctggaggagcggcagcagcttcctgggccagctgttcagccagcacccagatgtgttctacctgatggagcccgcctggcacgtgtggaccaccctgagccagggcagcgctgccaccctgcacatggctgtgcgggacctgatgaggagcatcttcctgtgtgacatggatgtgtttgatgcctacatgccccagagcaggaacctgagcgccttcttcaactgggccaccagccgggccctgtgcagccccccagcctgcagcgccttcccccggggcaccatcagcaagcaggatgtgtgcaagaccctgtgcacccggcagcccttcagcctggcccgggaggcctgccgcagctacagccacgtggtgctgaaggaggtgcgcttcttcaacctgcaggtgctgtaccccctgctgagtgaccctgccctgaacctgagaattgtgcacctggtgcgggaccccagggctgtgctgcggagccgggaggccgccggccccatcctggcccgggacaatggcatcgtgctgggcaccaacgggaagtgggtggaggccgacccccacctgcggctcatccgggaggtgtgccgcagccacgtgagaattgctgaggccgccaccctgaagcccccacccttcctgcggggccgctaccgcctggtgcgctttgaggacctggcccgggagcccctggccgagatccgggccctgtatgccttcaccggcctgaccctgaccccccagctggaggcctggatccacaacatcacccacggcagcggcatcggcaagcccatcgaggccttccacaccagcagcagaaatgccagaaatgtgtcccaggcctggaggcatgccctgcccttcaccaagatcctgcgggtgcaggaggtgtgtgccggggccctgcagctgctgggctacagacctgtgtacagcgctgaccagcagagggacctgaccctggacctggtgctgccccggggccctgaccacttctcctgggccagcccagactag

SEQ ID NO: 215579 - DNA, 1254 bp, Artificial Sequence
  derived and/or modified sequence
atgagccgccacctgccctggatctgtgaccagcgctgcagcagccccagcagccctggccgctggcccccagctgccaggatgtggctgccccgcttcagcagcaagacagtgacagtgctgctgctggcccagaccacctgcctgctgctcttcatcatcagcaggcctggccccagcagccctgctggaggagaggacagagtgcacgtgctggtgctgagctcctggaggagcggcagcagcttcctgggccagctgttcagccagcacccagatgtgttctacctgatggagcccgcctggcacgtgtggaccaccctgagccagggcagcgctgccaccctgcacatggctgtgcgggacctgatgaggagcatcttcctgtgtgacatggatgtgtttgatgcctacatgccccagagcaggaacctgagcgccttcttcaactgggccaccagccgggccctgtgcagccccccagcctgcagcgccttcccccggggcaccatcagcaagcaggatgtgtgcaagaccctgtgcacccggcagcccttcagcctggcccgggaggcctgccgcagctacagccacgtggtgctgaaggaggtgcgcttcttcaacctgcaggtgctgtaccccctgctgagtgaccctgccctgaacctgagaattgtgcacctggtgcgggaccccagggctgtgctgcggagccgggaggccgccggccccatcctggcccgggacaatggcatcgtgctgggcaccaacgggaagtgggtggaggccgacccccacctgcggctcatccgggaggtgtgccgcagccacgtgagaattgctgaggccgccaccctgaagcccccacccttcctgcggggccgctaccgcctggtgcgctttgaggacctggcccgggagcccctggccgagatccgggccctgtatgccttcaccggcctgaccctgaccccccagctggaggcctggatccacaacatcacccacggcagcggcatcggcaagcccatcgaggccttccacaccagcagcagaaatgccagaaatgtgtcccaggcctggaggcatgccctgcccttcaccaagatcctgcgggtgcaggaggtgtgtgccggggccctgcagctgctgggctacagacctgtgtacagcgctgaccagcagagggacctgaccctggacctggtgctgccccggggccctgaccacttctcctgggccagcccagactag

SEQ ID NO: 215580 - DNA, 1236 bp, Artificial Sequence
  derived and/or modified sequence
atgggcatgcgggcccgggtgcccaaggtggcccacagcacccggcggccccctgctgcacgcatgtggcttccaagattttctagtaagactgtgacggttctcctcctggcccagaccacctgtctccttctcttcatcatttcgaggcccggtccatcctcaccggccggcggggaggatagagtgcatgtgttagtgttgtcctcctggcggtccggatccagcttcctgggccagctgttttcccaacatccggatgttttttacctgatggagcctgcttggcatgtatggactaccttgagccagggaagcgccgctacactgcatatggcagtgcgcgacctgatgcgcagtatcttcctgtgcgacatggacgtgtttgacgcctatatgccacaatctagaaacctgagtgcctttttcaactgggctacgtcccgcgccttgtgttcccccccggcctgtagcgcgtttccccgggggaccatctcgaagcaggacgtgtgtaaaactctgtgtactcgccagccattttccctggcacgtgaggcctgccgcagctattctcacgtcgtgcttaaggaagttcggtttttcaacctgcaagtactttatcctttgctctccgaccccgccctgaacttgaggatagtccatctggtgcgtgaccccagagcagtccttaggagcagggaggccgcaggacctattcttgctcgtgacaacggcatagtcctggggactaacggcaaatgggtcgaagccgatcctcaccttaggttaatcagagaggtctgccgcagccacgtccgtatcgcagaagcagccactctgaaacccccaccattccttcggggacggtatcgcctggttagattcgaagacctggcccgtgaacctcttgcagagatccgcgcactttacgcattcactggtttaacacttacccctcagctggaagcctggattcataatattactcacgggagcgggatcggaaagccaatcgaagccttccatacttcttcaaggaatgcgaggaatgttagccaggcatggaggcatgccctgcctttcactaagatactgcgggtgcaggaggtgtgcgcaggcgcactgcagttactgggttacaggcccgtgtatagcgcagatcagcagagagatctgaccctggatctcgtgttgccacggggtcctgatcacttcagctgggcaagccccgactag

SEQ ID NO: 215581 - DNA, 1254 bp, Artificial Sequence
  derived and/or modified sequence
atgagccggcacctgccctggatctgcgaccagcggtgcagcagcccctccagcccaggccgctggcctccagctgcccggatgtggctgccccgcttctcttcgaagaccgtgacagtgcttttgctcgcgcaaacgacatgtctgctgttgttcattatatctcgcccagggcccagttcccccgctgggggcgaggatcgcgtacacgtgctcgttctgagttcatggcgctcaggttcttcttttctcggccagctattctctcagcaccccgacgtgttttacctcatggagcccgcatggcatgtttggactacccttagtcaaggaagtgctgcaacactccatatggcggttagggatctgatgagatccatttttctgtgtgatatggatgtgttcgatgcctacatgccccaatccagaaatctgtctgcctttttcaactgggcaaccagcagggcactgtgttcccctcccgcatgttctgcatttccccggggcacaatcagcaagcaggacgtttgcaagactctctgtactcggcagcccttttccctcgcccgcgaagcctgccgttcatacagtcacgtcgtgctgaaagaagttaggttttttaacctgcaggtcctgtaccctctgctatctgatcctgccctgaacctccgaattgtgcatcttgtgagggatcccagggcggtacttcgtagcagagaagctgccggacccattttggctagagacaacggtatcgtgctggggacgaatggaaaatgggtagaagctgatcctcaccttcggctgattcgcgaagtctgtcgtagccacgtacgaattgccgaggctgcaaccctcaaaccgccaccgtttttacggggccggtataggttggtccgattcgaggatttagcccgagaacccctcgctgagatcagagccctttacgccttcacgggcctaacgttaactccacaactggaggcctggatccacaacataacccacgggtccgggatcggcaagcccatcgaggctttccacacgtcatcccgcaacgccagaaatgtgtcgcaggcctggagacacgctctcccttttaccaaaattctgagggtccaggaagtctgcgcgggcgccctgcaactcctcggttatcggcccgtgtactctgccgatcagcagagggatctgaccctggatcttgtgctgccgaggggccccgatcatttttcctgggccagtcccgactag

SEQ ID NO: 215582 - DNA, 1236 bp, Artificial Sequence
  derived and/or modified sequence
atgggtatgcgggcaagggtgcctaaagtcgcccactcaactaggcggcctcccgcagcacgtatgtggttaccacggttcagttcgaagaccgtgactgtgttgcttctggcccagactacatgcttgctgctgttcattatctccaggccaggaccttccagcccagccggtggagaggaccgagtccatgtattagttctgtctagctggcgcagcgggtcatcctttctcggacagctgttcagccaacaccctgacgtgttttacctcatggagcctgcttggcacgtctggacgaccctgtctcaaggatcggctgccaccctgcatatggccgttcgggacttaatgagatctatctttctctgcgacatggatgtgttcgacgcgtacatgcctcagtctcgcaacctgagcgccttttttaattgggcaacaagcagggcattgtgttctccacctgcatgttccgcctttccaaggggcaccattagcaaacaggatgtgtgcaaaaccttatgtactcgccagccattctcacttgctcgcgaagcgtgcagatcttatagccacgtggtcctcaaagaggtacggttcttcaatctacaagtgctgtatcctttgctctccgatccagctcttaatttacgcattgtgcatctggtgcgtgatcccagagctgtcctgcggtcacgggaggccgcaggacccatattggcccgagataatggcatcgttctgggcaccaatggcaaatgggtcgaggccgacccccatctccgcctgataagagaggtttgcaggtctcatgtgcgcattgcagaggccgctacgttgaagcctccccctttccttaggggaaggtatcggctggtgagatttgaggatctcgccagggagcccctggcagagatccgagccctctacgcttttaccggcctaacactgacaccccagctggaggcatggatacacaacataacgcacggttccggtatcgggaaaccaatagaagcctttcataccagtagtagaaacgcccgaaacgtgagccaggcttggaggcacgctttgccctttaccaaaatcctaagagtccaggaagtgtgtgctggcgctctgcagctgcttgggtatcgcccagtgtactcagccgaccaacagcgagacctgactctcgatctcgtgctgcctcgagggcctgaccacttctcatgggcaagcccagactag

SEQ ID NO: 215583 - DNA, 1254 bp, Artificial Sequence
  derived and/or modified sequence
atgagcaggcacttaccctggatctgtgaccagcggtgctcatctccttcatccccaggcagatggcctcctgccgctagaatgtggcttcccaggttctctagtaaaactgtgaccgtcctgctgctcgcccagaccacatgtcttctgcttttcataatctctcggcctggtcccagtagtccagccggaggtgaagacagggtccacgtccttgtgctgtcttcctggcgctctggttcttcctttctggggcagctgttttcgcagcatcctgatgttttttacttgatggagccagcttggcatgtgtggaccaccttgtctcagggcagcgctgccaccttgcatatggctgtgagagacttaatgaggagtatctttctctgcgatatggacgtcttcgacgcctatatgccccagagccgtaatttatccgccttttttaattgggctacctcaagggcactgtgtagccccccagcctgcagcgccttccctagaggcacgattagcaaacaagacgtctgcaagacgctttgcactcgtcagccttttagcttagctagggaagcgtgtaggtcgtacagccacgttgtccttaaggaggtgcggttttttaatctccaggtactgtatcccctgctatccgaccccgctctaaacctgaggattgttcacctggtccgcgatccccgagccgttctacgttcgcgagaggctgctggacccatactcgcccgtgacaatggtatcgtgctgggcactaacgggaaatgggtcgaggcggacccccaccttcggctcattcgtgaagtgtgccggtctcacgtgcgcattgcggaggccgcaacactgaaaccccctccttttcttcggggtagatataggctcgtccggttcgaagacctggcaagagaaccactggcggagatcagagctctctacgcctttaccggactcaccctcactcctcagcttgaagcctggatccataatataacccacgggagtggaatcgggaaacccatcgaagccttccacacaagctcccgtaatgctcggaatgtgagccaggcctggcggcatgccttacctttcactaagatccttcgggtccaagaggtttgtgccggtgccctgcaacttctagggtacaggccagtgtactcagccgaccagcagcgtgatctcactcttgacctggtgcttcctagaggcccagaccacttcagttgggcctctcccgattag

SEQ ID NO: 215584 - DNA, 3248 bp, Artificial Sequence
  derived and/or modified sequence
ctctggctgctgctccagctctggcagacacgccaagctttgagaaagctcccagtgaggaactggtcttctggagactctgtgtggcatagagtgattcaaccaccttaagaagacctctggctttcctggaacacagatgtcgagacatctcccatggatttgtgatcagcgttgcagctctcccagcagccctggacggtggtgagtcccctcagctggccaggacagtactctgctctcacctctctgcttcttgggctccatcccagctccccatcaactgatcttcttgcaaacccacagggctccaggacaccctccttctggagcccatgctgcctacagcacttcactccccaccagtgatgacaacagttgctgttctttgtccactttatttacttgtttatctttaatgacaaaagttttttttttgttgtttttttttttttttttgaaacggagtctcactcttcactcaggctgcagtgcagtggcgcaatctcagctcactgccacctctgcctcccaggttcacgccattctcctgcctcagcctcccgagtagctgggactacaggcgcccaccatcacgcctggctaattttttgtatttttagtagagatggggtctcactgtgttagccaggatggtctcgatctcctgacctcgtgatccgcccgcctcggcctcccataatgctgggattacaggcgtgagccaccgcgcctggctgacaaaagttttatacctgcctgttaaaaaaattatataatacagaagcacaccttgtaaaaggtgcaatcctcagttatgggcatgactgcgtgttcccttcccccatcttcattataataaccccccaatccccccagatcctgtgagccaggtaccggaattatccctctttcacacacgggtaaagtgatccgtcacagagagatttaagtgatcttcataagcaagatcataggctaggaagtggcagagccaggattcaacctcggcgagcctggtggtgctctgacatccaccgaagcccccatcaagcccttttagctccacaacctaaaagggtctctctaagaggtatcctgaagcaaaagacaggagttctctttgaaacatagtatttctctctacagatagatagcctgtaggtatgtaagtaggtgggtgggtgggtaggtagacagtttgatgatatcccacattattctgcaactggacttctgctgtgagcacagactatattctggcctatgtcttgactccgtattcctgggaaagtgctcgactgagaccttgggagtcttgggaagtccaatgggtagggtagccgaatctgagggctgatccctgagggcactgggcagtaattggggcatgggatgggcatgagggcccgggtccctaaagttgcccactccacccgaaggcccccagccgcccgcatgtggctgccacggttctccagcaagacagtgacagtgctcctcctggcacagaccacctgcctcctgctcttcatcatctcccggccagggccctcatccccagccggcggcgaggatcgtgtgcacgtgctggtgctgtcctcgtggcgctcgggctcatccttcttgggccagctcttcagccagcaccccgacgtcttctacctgatggagcccgcgtggcatgtgtggaccaccctgtcgcagggcagcgcggcaacgctgcacatggccgtgcgcgacctgatgcgctctatctttttgtgcgacatggacgtgtttgatgcctacatgccacagagccgaaacctgtccgcctttttcaactgggcaacgagccgcgcgctgtgctcgccgcccgcctgcagcgcctttccccgaggcaccatcagcaagcaggacgtatgcaagacactgtgcacgcggcagccattcagcctggcccgggaggcctgccgctcctacagccacgtggtgctcaaggaggtgcgcttcttcaacctgcaggtgctctacccgctgctcagcgaccccgcgctcaacctgcgcatcgtgcacctggtgcgcgacccgcgggccgtgctgcgctcccgggaggcggcgggcccgatactggcacgcgacaacggcatcgtgctgggcaccaacggcaagtgggtggaggccgaccctcacctgcgcctgattcgcgaggtgtgccgcagccacgtgcgcatcgccgaggccgccacactcaagccgccacccttcctgcgcggccgctaccgcctggtgcgcttcgaggacctggcgcgggagccgctggcagagatccgcgcactctacgccttcaccggcctgaccctcacgccacagctcgaggcctggatccacaacatcacccacgggtcggggatcggcaagccaatcgaggccttccatacttcgtctaggaatgcgcgcaacgtctcccaggcctggcgccacgcgttgcccttcactaagatcctgcgcgtgcaggaggtgtgcgccggcgcgctgcagctgctgggctaccggcctgtgtactctgcggaccagcagcgtgacctcaccctggatctggtgctgccacgaggcccagaccacttcagctgggcatcgcctgactgagaactctgggccttagagcaggccccgaactgtggtcgccaggcccaggaggcgactgcatggtggagagggagctggggcgcatggggaagcaggtccctactatcaaccgggagtttggggtcctcccctgaagtaggcaaggactgcacgtttctttctctcctgattctcggttttcctttgagtcttctggagctgccttctcatcaggtgcactcttcatggaaagcaactcttgcccctacctcttctgggcgcagggagtaagttactgctaaattaaattaaatgtgtgccaggccgggtgcggtggctcatgcctgtaatcccagcattttgagaggctgaggcgggtggatcacctgaggtcaggagttcgaaaccagcctggccaacatagtgaaaccccctctctactaaaaatgcaaaaattagtccggcgtggtggcacactcctgtaatcccagctacttaggaggctgaggtgggagaatcacttggactccagaggtggaggttgcagtaagctgagatcatgccactgcaccctagcttgggtggcagagcaagactctatcaaaaaaataagtaataaatttgttcaaaagtcctgc

SEQ ID NO: 215585 - DNA, 1254 bp, Artificial Sequence
  derived and/or modified sequence
atgtcgagacatctcccatggatttgtgatcagcgttgcagctctcccagcagccctggacggtggcccccagccgcccgcatgtggctgccacggttctccagcaagacagtgacagtgctcctcctggcacagaccacctgcctcctgctcttcatcatctcccggccagggccctcatccccagccggcggcgaggatcgtgtgcacgtgctggtgctgtcctcgtggcgctcgggctcatccttcttgggccagctcttcagccagcaccccgacgtcttctacctgatggagcccgcgtggcatgtgtggaccaccctgtcgcagggcagcgcggcaacgctgcacatggccgtgcgcgacctgatgcgctctatctttttgtgcgacatggacgtgtttgatgcctacatgccacagagccgaaacctgtccgcctttttcaactgggcaacgagccgcgcgctgtgctcgccgcccgcctgcagcgcctttccccgaggcaccatcagcaagcaggacgtatgcaagacactgtgcacgcggcagccattcagcctggcccgggaggcctgccgctcctacagccacgtggtgctcaaggaggtgcgcttcttcaacctgcaggtgctctacccgctgctcagcgaccccgcgctcaacctgcgcatcgtgcacctggtgcgcgacccgcgggccgtgctgcgctcccgggaggcggcgggcccgatactggcacgcgacaacggcatcgtgctgggcaccaacggcaagtgggtggaggccgaccctcacctgcgcctgattcgcgaggtgtgccgcagccacgtgcgcatcgccgaggccgccacactcaagccgccacccttcctgcgcggccgctaccgcctggtgcgcttcgaggacctggcgcgggagccgctggcagagatccgcgcactctacgccttcaccggcctgaccctcacgccacagctcgaggcctggatccacaacatcacccacgggtcggggatcggcaagccaatcgaggccttccatacttcgtctaggaatgcgcgcaacgtctcccaggcctggcgccacgcgttgcccttcactaagatcctgcgcgtgcaggaggtgtgcgccggcgcgctgcagctgctgggctaccggcctgtgtactctgcggaccagcagcgtgacctcaccctggatctggtgctgccacgaggcccagaccacttcagctgggcatcgcctgactga

SEQ ID NO: 215586 - DNA, 1236 bp, Artificial Sequence
  derived and/or modified sequence
atgggcatgagagccagagtgcccaaggtggcccacagcaccagaagaccccccgccgccagaatgtggctgcccagattcagcagcaagaccgtgaccgtgctgctgctggcccagaccacctgcctgctgctgttcatcatcagcagacccggccccagcagccccgccggcggcgaggacagagtgcacgtgctggtgctgagcagctggagaagcggcagcagcttcctgggccagctgttcagccagcaccccgacgtgttctacctgatggagcccgcctggcacgtgtggaccaccctgagccagggcagcgccgccaccctgcacatggccgtgagagacctgatgagaagcatcttcctgtgcgacatggacgtgttcgacgcctacatgccccagagcagaaacctgagcgccttcttcaactgggccaccagcagagccctgtgcagcccccccgcctgcagcgccttccccagaggcaccatcagcaagcaggacgtgtgcaagaccctgtgcaccagacagcccttcagcctggccagagaggcctgcagaagctacagccacgtggtgctgaaggaggtgagattcttcaacctgcaggtgctgtaccccctgctgagcgaccccgccctgaacctgagaatcgtgcacctggtgagagaccccagagccgtgctgagaagcagagaggccgccggccccatcctggccagagacaacggcatcgtgctgggcaccaacggcaagtgggtggaggccgacccccacctgagactgatcagagaggtgtgcagaagccacgtgagaatcgccgaggccgccaccctgaagcccccccccttcctgagaggcagatacagactggtgagattcgaggacctggccagagagcccctggccgagatcagagccctgtacgccttcaccggcctgaccctgaccccccagctggaggcctggatccacaacatcacccacggcagcggcatcggcaagcccatcgaggccttccacaccagcagcagaaacgccagaaacgtgagccaggcctggagacacgccctgcccttcaccaagatcctgagagtgcaggaggtgtgcgccggcgccctgcagctgctgggctacagacccgtgtacagcgccgaccagcagagagacctgaccctggacctggtgctgcccagaggccccgaccacttcagctgggccagccccgactag

SEQ ID NO: 215587 - DNA, 1254 bp, Artificial Sequence
  derived and/or modified sequence
atgagcagacacctgccctggatctgcgaccagagatgcagcagccccagcagccccggcagatggccccccgccgccagaatgtggctgcccagattcagcagcaagaccgtgaccgtgctgctgctggcccagaccacctgcctgctgctgttcatcatcagcagacccggccccagcagccccgccggcggcgaggacagagtgcacgtgctggtgctgagcagctggagaagcggcagcagcttcctgggccagctgttcagccagcaccccgacgtgttctacctgatggagcccgcctggcacgtgtggaccaccctgagccagggcagcgccgccaccctgcacatggccgtgagagacctgatgagaagcatcttcctgtgcgacatggacgtgttcgacgcctacatgccccagagcagaaacctgagcgccttcttcaactgggccaccagcagagccctgtgcagcccccccgcctgcagcgccttccccagaggcaccatcagcaagcaggacgtgtgcaagaccctgtgcaccagacagcccttcagcctggccagagaggcctgcagaagctacagccacgtggtgctgaaggaggtgagattcttcaacctgcaggtgctgtaccccctgctgagcgaccccgccctgaacctgagaatcgtgcacctggtgagagaccccagagccgtgctgagaagcagagaggccgccggccccatcctggccagagacaacggcatcgtgctgggcaccaacggcaagtgggtggaggccgacccccacctgagactgatcagagaggtgtgcagaagccacgtgagaatcgccgaggccgccaccctgaagcccccccccttcctgagaggcagatacagactggtgagattcgaggacctggccagagagcccctggccgagatcagagccctgtacgccttcaccggcctgaccctgaccccccagctggaggcctggatccacaacatcacccacggcagcggcatcggcaagcccatcgaggccttccacaccagcagcagaaacgccagaaacgtgagccaggcctggagacacgccctgcccttcaccaagatcctgagagtgcaggaggtgtgcgccggcgccctgcagctgctgggctacagacccgtgtacagcgccgaccagcagagagacctgaccctggacctggtgctgcccagaggccccgaccacttcagctgggccagccccgactag

SEQ ID NO: 215588 - DNA, 2778 bp, Artificial Sequence
  derived and/or modified sequence
atgaatagattccgtgtgtcgaaatttcgccacaccgaagctagacctcctcgacgagagtcttggatcagcgacattagggcagggaccgctccatcctgccggaatcatatcaagagctcctgttctctgatagcgtttaattccgaccggccaggagtgctaggaattgtccccctgcaggggcaaggcgaagacaagcggagggtcgcacatctgggctgccactcggacctggtcaccgacctggatttctccccgtttgatgattttctgctggctacaggctccgccgatagaaccgtgaagttgtggcggcttcccggccctggccaagcactcccaagtgcccctggggtggttttaggccccgaggatttaccggtcgaggtgctgcagtttcaccccacctctgacggaattctagtcagtgctgccggtaccacagtgaaggtttgggatgccgctaagcagcaacccctcaccgaactggccgcgcatggagacttggtgcagtctgcagtgtggtcaagagacggggccctggtgggcacagcttgtaaggacaaacagctccgcatcttcgatccaagaacaaaaccgagggctagccagtccacccaggcacacgagaattcacgcgactcacggctggcgtggatgggtacttgggagcatctcgtcagcactggattcaaccagatgcgggagcgagaagtgaagctgtgggatactcgttttttttcctccgctctcgcaagtcttactctggatacctccctggggtgtctcgtgccccttctcgacccagactccggcctgctggtgctcgccggaaagggggaaaggcagctgtactgttatgaagtagtaccccagcaacctgccttgagccctgtgacccagtgcgtgctggagagtgtcctgaggggagccgccctggtgccaagacaggccctggctgtgatgtcatgtgaagtgctaagagtactgcagctctccgacaccgctattgtgcccataggctatcatgtccccagaaaggccgtggagttccacgaggatttatttccagacactgctggttgcgtccccgcgactgatccgcattcatggtgggctggggacaaccaacaggtccagaaagtctctttgaaccccgcgtgcaggccacaccccagctttacatcctgcctagttcctccagcagaaccacttcccgacacggcccagccagccgtgatggagacaccggtgggagatgcagatgctagtgaggggttctcttcccccccctcctccttaacctcacccagcactcccagcagcctcggccccagcctttcctccacctctggtatcggaacaagccctagcctccggtccctgcagtccctgctggggccctcttccaaattcagacacgcacagggtacagtgctgcatcgagactcacacatcaccaacttaaaggggctgaatctaaccacccccggagagtctgatggattttgcgcaaataagctcagagtggccgtccctttgttatccagcggggggcaggtggcggtgcttgaactgagaaagcctggacggctgcccgacactgcgttaccaacattacagaacggagcagcagtgactgatctcgcttgggaccccttcgacccacatcgcctcgcggtggcgggtgaggacgccagaatcaggttgtggagagtccctgccgagggactggaggaggttctcaccacaccagagacagtacttaccggacacaccgagaaaatttgcagtctgagattccaccctctcgccgcgaatgtccttgccagttcctcttacgatttgactgtgcgcatttgggacctgcaggccggggcggatagactgaagctgcaggggcaccaggaccagatcttctccctcgcttggtcccccgacgggcagcaattggccactgtatgtaaggacggaagggtcagagtctatagaccccggtccggccctgaacctctccaggaaggacctgggccaaagggtggccgtggagccaggatcgtatgggtgtgcgacggtcggtgtctactggttagtggctttgattcccagtctgaaagacagctgctgctgtacgaggctgaggcactggctggcgggcctctcgcagtcctgggtctggatgtggctcccagcacgttactgccttcctatgatccggatacaggattggtgctactgaccggtaaaggcgacacacgagtgttcctctatgagctgctgccagaatccccttttttcctcgagtgtaatagcttcactagtcctgatccccataaggggctggtgctcttgcccaagaccgaatgtgatgtacgggaggtggagctcatgcgatgtctgcgactccgacagtcgtctctggagcccgtggctttcagactgccacgcgtgcgcaaggaattctttcaggacgatgtatttcctgacaccgccgttatatgggaacctgttctgtctgctgaagcctggttacaaggcgcgaacggccagccctggttgctgtcgctccagccgccagacatgagccccgtctcccaggctcccagggaagctccagcgagaagagcccccagcagcgctcagtatctagaggagaaatccgaccaacaaaagaaggaagaactgctcaatgccatggtggccaaactgggcaaccgggaggaccccttgccgcaggattcctttgagggtgttgacgaagacgaatgggactag

SEQ ID NO: 215589 - DNA, 2778 bp, Artificial Sequence
  derived and/or modified sequence
atgaaccgcttccgggtgtccaagttccgccacacagaggcccggcccccccggcgggagagctggatcagtgacatccgggccggcacagcccccagctgcaggaaccacatcaagagcagctgcagcctgattgccttcaacagcgacaggcctggggtgctgggcatcgtgcccctgcagggccagggcgaggacaagagaagagtggcccacctgggctgccacagcgacctggtgacagacctggacttcagcccctttgatgacttcctgctggccactggatctgctgacagaacagtgaagctgtggaggctgcccggccctggccaggccctgcccagcgcccctggggtggtgctgggccctgaggacctgcctgtggaggtgctgcagttccaccccaccagtgatggcatcctggtgtctgctgctggcaccaccgtgaaggtgtgggatgctgccaagcagcagcccctgacagagctggccgcccatggagacctggtgcagagcgctgtgtggagcagagatggagccctggtgggcacagcctgcaaggacaagcagctgcgcatctttgaccccaggaccaagccccgggccagccagagcacccaggcccacgagaacagccgggacagccggctggcctggatgggcacctgggagcacctggtgtccacaggcttcaaccagatgagggagcgggaggtgaagctgtgggacacccgcttcttcagcagcgccctggccagcctgaccctggacaccagcctgggctgcctggtgcccctgctggaccctgacagcggcctgctggtgctggccggcaagggggagcggcagctgtactgctatgaggtggtgccccagcagcctgccctgagccctgtgacccagtgtgtgctggagagcgtgctgcggggggccgccctggtgccccggcaggccctggccgtgatgagctgtgaggtgctgcgggtgctgcagctgagtgacacagccatcgtgcccatcggctaccacgtgcccaggaaggctgtggagttccacgaggacctcttcccagacacagctggctgtgtgcctgccacagacccccacagctggtgggccggggacaaccagcaggtgcagaaggtgtccctgaacccagcctgccggccccaccccagcttcaccagctgcctggtgcccccagctgagcccctgcctgacacagcccagcctgctgtgatggagacccctgtgggagatgctgatgccagcgagggcttcagcagcccccccagcagcctgaccagccccagcacccccagcagcctgggccccagcctgagcagcaccagcggcatcggcaccagccccagcctgcggagcctgcagagcctgctgggccccagcagcaagttcagacatgcccagggcaccgtgctgcaccgggacagccacatcaccaacctgaagggcctgaacctgaccaccccaggagagagtgatggcttctgtgccaacaagctgcgggtggccgtgcccctgctgagcagcggcggccaggtggccgtgctggagctgaggaagccaggccgcctgcctgacacagccctgcccaccctgcagaatggagctgctgtgacagacctggcctgggacccctttgacccccaccggctggccgtggccggagaagatgcccgcatccggctgtggagggtgcctgctgagggcctggaggaggtgctgaccaccccagagaccgtgctgaccggccacacagagaagatctgcagcctgcgcttccaccccctggccgccaacgtgctggccagcagcagctatgacctgactgtgcgcatctgggacctgcaggccggggctgaccggctgaagctgcagggccaccaggaccagatcttcagcctggcctggagcccagatggccagcagctggccaccgtgtgcaaggatggccgggtgcgggtgtaccggcccaggagcggccctgagcccctgcaggagggccctggccccaagggcggccgcggggccagaattgtgtgggtgtgtgatggccgctgcctgctggtgtctggctttgacagccagagcgagcggcagctgctgctgtatgaggccgaggccctggccggcggccccctggccgtgctgggcctggatgtggcccccagcaccctgctgcccagctatgaccctgacaccggcctggtgctgctgaccgggaagggggacaccagggtcttcctgtatgagctgctgcctgagagccccttcttcctggagtgcaacagcttcaccagcccagacccccacaagggcctggtgctgctgcccaagacagaatgtgatgtgcgggaggtggagctgatgcgctgcctgcggctgcggcagagcagcctggagcctgtggccttccggctgccccgggtgaggaaggagttcttccaggatgatgtgtttcctgacacagctgtgatctgggagcctgtgctgtctgctgaggcctggctgcagggcgccaacggccagccctggctgctgagcctgcagcccccagacatgagccctgtgtcccaggccccccgggaggccccagcccggcgggcccccagcagcgcccagtacctggaggagaagagtgaccagcagaagaaggaggagctgctgaatgccatggtggccaagctgggcaaccgggaggaccccctgccccaggacagctttgagggcgtggatgaagatgagtgggactag

SEQ ID NO: 215590 - DNA, 2778 bp, Artificial Sequence
  derived and/or modified sequence
atgaaccggttccgggtgagcaagttccggcacaccgaggcccggcctccccgcagagagtcctggatatcagatatacgcgccggcaccgctccgtcttgccgtaatcacataaagagttcctgctccctaattgcctttaactccgataggcctggcgtgcttgggattgtcccactgcagggccagggagaagataagagaagagtggctcacctgggttgtcatagcgaccttgtgaccgatctggatttttcccccttcgatgactttcttctggctacgggctccgccgacagaacggtgaaattgtggagactgccaggacccggccaagccctaccctccgcccccggggtagtattaggcccagaggatctgccagtggaggtccttcagtttcaccctacttccgacggtatacttgtttcggcagcaggtaccactgttaaggtctgggatgcagcaaagcaacagccattaaccgaactcgcagctcacggtgaccttgttcagagcgcagtctggagcagggatggtgccctggttggcacagcttgtaaggataaacaactgcggatcttcgaccctcgcacaaaaccaagagccagccagtccacccaggcccatgagaacagcagagactcaaggctggcctggatgggcacatgggagcacctggtctccacggggttcaaccaaatgagggaacgggaagtcaaactgtgggacacacgtttcttctctagcgcactggcttcgctcacactggacacatcactaggatgtctcgttccacttttggatccagactctggactcctggtgctcgcagggaagggcgagaggcaattgtattgttacgaagtagtccctcagcaacctgcccttagccctgtgactcagtgcgtcctggagagtgtgcttcgcggcgcggccctggtccctaggcaagcgttggctgtcatgagctgtgaggtacttcgcgttctacagctgtccgacactgctatcgtccccatcggctaccacgtgccacgaaaggccgtggagtttcacgaggatttgttcccagatactgccgggtgtgtgccagcgacggatccgcactcctggtgggcaggagacaatcaacaggttcaaaaagtgagtctcaaccctgcctgcaggccccatccctcgttcacaagttgcctcgtgccccctgctgagcccctgcccgacaccgctcagccagccgtgatggaaactcccgtcggcgacgctgatgcgagtgaaggcttttcctcgccaccatccagccttacatcacctagtaccccttcaagtttaggaccttctctcagtagtactagtgggataggcacctccccttcccttcgctcacttcagagtctgctgggaccctcctccaaatttcgccacgctcagggcactgtgttacatagagattcccatatcactaatctcaagggacttaacctgacaacccccggggagtccgatggtttctgcgcaaataagctaagagtcgctgtgcccctcctaagcagtggaggtcaagtggcagtcctggagcttcgaaagcctggcaggctgcccgacactgctctgcctactctgcagaatggagctgcggtaaccgatctggcctgggacccctttgatccccaccgcttggctgtcgctggagaagacgccagaataaggctttggcgcgtgcccgccgaaggcctcgaggaggtgctgactactccggagaccgtactcacaggacacaccgagaaaatctgcagcctcagatttcatcccttggctgccaacgtattagcttccagcagctatgatctcacagtgcgcatttgggatctgcaagccggggcggaccggctgaagctgcaaggacaccaagaccagatttttagcctggcttggagtccagacggtcagcagctcgccacggtctgcaaggacgggcgtgtgcgggtgtatcgccctcggtcaggccccgagccccttcaagaggggccaggacccaagggcggcaggggtgctaggattgtctgggtgtgtgatggaaggtgccttctcgtgtccggctttgactctcagagcgagaggcagctcctcctgtatgaagcagaggcactcgccggtggacctctggccgttttaggtttggatgtcgccccttctactctgctgccctcatatgaccctgatactggtctggtactcttgacaggtaagggcgacacccgtgtgttcctgtatgagctgctccctgagagtcccttctttctcgagtgcaatagcttcacctcgcctgaccctcacaagggactcgtgctgcttccgaagaccgagtgtgacgtgagagaggttgagctcatgcggtgcctgcgcctgcggcaatcctccctggaacctgttgcgttccgcctaccccgggtgcgtaaggaattcttccaggacgacgtgttcccagacacggccgtgatctgggaacccgtcctcagcgccgaagcatggctgcagggggccaatgggcagccctggcttctcagcctgcagccacctgatatgtcccctgtgtcacaagctcccagagaagccccagcccgtcgggccccctcatcggctcaatacctggaggagaaaagcgatcagcaaaagaaggaggaactgctaaacgccatggtggctaaattggggaatagagaagaccccttgcctcaggacagctttgaaggagttgacgaagacgagtgggactag

SEQ ID NO: 215591 - DNA, 2778 bp, Artificial Sequence
  derived and/or modified sequence
atgaaccgttttagggtgtcgaagttccggcatacagaggccagaccgccacgccgagagtcgtggatctctgacattcgagcagggactgctcccagttgccggaaccatatcaagagctcatgttctttaatcgcatttaactccgacagacctggagtcctgggcattgtgcctctccaagggcagggcgaggacaaacgccgtgtagcccacctggggtgtcactctgacctggtaacggacttggacttttccccctttgatgactttcttttggccacaggcagcgccgatcgaaccgtcaagctttggcgactgcccggaccgggtcaggctttgccgtcagctcccggtgtggtcttgggcccagaagatctcccagtggaggtcctgcaatttcaccctaccagtgatggcatcctggtgtcggcagctggcactactgtgaaagtgtgggatgccgctaaacagcaacccctgactgagctggccgctcatggggacctggtccagtccgcagtttggagtcgcgatggcgcacttgtcggcaccgcctgtaaagacaagcagctcaggatattcgacccacgcacaaaacctcgcgcttcccaaagcacacaggcccacgagaatagtcgggatagcagacttgcatggatgggtacctgggagcatctggtgtccactggtttcaaccaaatgcgcgaacgcgaagtgaaactttgggatacgagattcttttcttccgccctggcttctttgacccttgacacgtccctcggctgcctcgtcccgttgctcgatcctgacagtgggctcctggtgctggccggaaagggagagcgccaactttactgttatgaagtcgtgcctcagcagccagctctgtcgcctgtgactcagtgcgtgctggagtctgttctgaggggggctgctttggttccacggcaggcacttgccgtcatgtcctgtgaggtgctgagagttctgcagctatctgataccgcaatcgtccctatcgggtatcacgtgccacggaaggccgtggaattccatgaggatctatttccagatactgctggatgtgtgcctgctactgatccccatagctggtgggccggagataaccagcaagtgcagaaagtctccctgaaccccgcatgccgaccccacccgagcttcaccagctgcctggtgccccctgccgagccacttccagacacagctcaacccgctgtcatggagaccccggtaggggatgccgatgcaagcgaggggttctcttccccaccctcctccctgacgagtcccagcaccccctcatccctgggaccaagcctgtcttcaacttctggtatcgggacatccccctccctgaggtccctccagtccctgctggggccaagctccaaattcagacacgctcaagggaccgtgctgcatagagactcccacatcaccaacctgaagggactgaatctgaccaccccaggtgaaagcgatggcttttgtgccaacaagctgcgggttgcagtccccctgctgagcagtggcggacaggttgctgtgttggagctccggaagccaggccgtttgcctgacaccgctctgcctacacttcagaatggggctgccgtcacagaccttgcttgggatccattcgacccccatcggctggctgtcgcgggtgaagatgcgagaattaggctgtggcgtgtccctgctgaagggttagaagaggtgctaaccacacccgaaaccgtgctcacggggcacacggagaaaatttgttccctcagattccacccactggcagccaatgtgctagcttcaagttcttatgacctgactgtgaggatttgggatctgcaggccggtgcagataggcttaagttgcagggacaccaggaccaaatttttagcctggcatggagtccggacgggcagcagctggccaccgtctgcaaggacggtcgggtcagggtgtatcgcccacgctccggccctgagcctctccaggagggtccaggccctaaagggggaagaggagccaggatcgtgtgggtgtgtgacggcagatgtctgctggtctcagggtttgactctcagtccgagaggcaactgctgttgtacgaagccgaagcactggcgggagggcctctggctgtgttggggcttgatgtagcgccatcgactttactacctagttatgacccggacaccgggctggtcctgctgaccgggaagggagatacgcgggtgtttctgtacgaactactgccagagtctccctttttcctggagtgcaatagcttcacttcacccgatccccataaagggctagtactgttgccaaagacggagtgcgacgtacgggaagtggaattgatgaggtgccttaggctaaggcagagttccctggagccagtcgctttccgtctacccagggttagaaaagaattctttcaggacgatgtgttccctgacacggctgttatatgggaacctgtgttgtctgccgaggcgtggctgcagggcgctaacggccagccctggctgctgagtttgcagcctcccgatatgagtcccgtgagtcaggccccacgcgaggccccagccaggcgggctccctcttctgcccagtacctggaagagaaaagcgaccagcaaaagaaggaggagctgttaaacgccatggttgccaagctaggcaatcgcgaggacccgctgccccaggactccttcgaaggcgttgacgaggacgagtgggattag

SEQ ID NO: 215592 - DNA, 3496 bp, Artificial Sequence
  derived and/or modified sequence
cccgggtggggccgaggcagcgggagtcgcggttgctcagcgtgcacctgagacccgacgcccggggtcctcgaagacgcgtccgccgccgtgcccgtcgccatgaaccgcttcagggtgtccaagttccggcacaccgaggctcggccgccccgccgcgagtcctggatcagtgacattcgagcaggaaccgccccttcatgcaggaaccacatcaaatcaagctgcagcttgatcgccttcaactccgaccgtcctggtgtactgggcattgtgcctctgcaaggccaaggagaggacaagcgacgcgtggcccacctgggctgccattcagacctagtcaccgacttggacttctcgccctttgatgacttcctcctggccacaggctcggctgacaggacggtaaaactctggcgactgccagggcctggccaggccctgccctcagcacccggggtggtgctgggccccgaggacctcccagtggaggtactgcagttccaccccacctctgacggcattctggtgagcgcagcaggcaccactgtgaaggtctgggacgcagccaagcagcagcccctgacagagctggcagcccatggggacctggtgcagagcgccgtctggagccgagatggagccctggtgggcacggcgtgcaaggacaagcagctgcggatctttgaccccagaacaaagccgcgggcctctcagagcacgcaggcccatgagaacagcagggatagccggctggcatggatgggcacctgggagcaccttgtgtctactggattcaaccagatgcgtgagcgcgaagtgaagctgtgggacacgcggttcttctccagcgccctggcctccctcaccttggacacctcgcttgggtgtctcgtgcctctgctggaccctgactctgggctcctggtcctggcaggaaagggcgagaggcagctgtactgttacgaggtggtcccgcagcagccggcgctgagcccagtgacccagtgtgtcctggagagcgtgctgcgtggggctgcccttgtgccccggcaggcgctggccgtcatgagctgcgaggtactccgcgtcctacagctgagcgacacagccatcgtgcccatcggctaccatgtgccccgcaaggctgtggagttccacgaggacctgttcccggacactgccggctgtgtgcctgccaccgacccccatagctggtgggctggggacaaccagcaggtgcagaaggtcagcctcaaccccgcctgccggccccacccgagcttcacttcctgtctggtgccccctgcggagcccctccctgacacagcccagcctgcggtgatggagacacccgtgggtgatgcagacgcaagcgagggtttctcttcccctcccagttcgctgacctcgccctccacgccctccagcctggggccctcactctccagcaccagtggcatcgggaccagccccagtttgaggtcgctgcagagcctgctgggccccagttccaagttccgccatgctcagggcactgtcctgcaccgagacagccacatcaccaacctcaaggggctcaacctcaccacacctggtgagagtgacggcttctgtgccaacaagctgcgtgtggccgtgccgctgctcagcagcgggggacaggtggctgtgcttgagctacggaagcctggccgcctgcccgacacggcactgcccacgctgcagaatggggcagctgtgactgatctggcctgggacccctttgacccccatcgcctcgctgtggctggtgaggacgccaggatccgactgtggcgggtacccgcagagggcctggaagaggtgctcaccacgccagagactgtgctcacaggccacacggagaagatctgctccctgcgcttccacccactggcagccaatgtgctggcctcgtcctcctatgacctcactgttcgcatctgggaccttcaggctggagctgatcggctgaagctgcagggccaccaagaccagatcttcagcctggcctggagtcctgatgggcagcagctggccactgtctgcaaggatgggcgtgtgcgggtctacaggccccggagtggccctgagcccctgcaggaaggcccagggcccaagggaggacgcggagctcgcattgtctgggtatgtgatggtcgctgtctgctggtgtctggctttgacagccaaagtgagcgccagctgctcctatatgaagctgaggccctggccggcggacccttggcagtgttgggcctggacgtggctccctcaaccctgctgcccagctacgacccagacactggcctggtgctcctgaccggcaagggcgacacccgtgtattcctgtacgagctgctccccgagtcccctttcttcctggagtgcaacagcttcacgtcgcctgacccccacaagggcctcgtcctcctgcctaagacggagtgcgacgtgcgggaagtggagctgatgcggtgcctgcggctgcgtcagtcctccctggagcctgtggccttccggctgccccgagtccggaaagagttcttccaggatgacgtgttcccagacacggctgtgatctgggagcctgtgctcagtgccgaggcctggctgcaaggcgctaatgggcagccctggcttctcagcctgcagcctcctgacatgagcccagtgagccaagccccccgagaggcccctgctcgtcgggccccatcctcagcgcagtacctggaagaaaagtctgaccagcaaaagaaggaggagctgctgaatgccatggtggcaaaactggggaaccgggaggacccactcccccaggactcctttgaaggcgtggacgaggacgagtgggactagcctgcgcccccgtcacctccacctcacctgtgctgccacttcctagtgcacacctcacggctcatcctcaagctggaagatacctctctggccccggcacatgtcacccctgcactcctgccttcccgtgggcacttccacatcctctgggcctctggcagttcccagggactgttttcacctctgctgtctctggggtcagctgctgctcatcagctgcccgctagcatgtggccaggggtgcagggtggcggggggtcagcagcatgtccctgggcaggccctgggcaccctgtctcccctggtctcactgctgacctgggctggtcccagcctggattggcctcatccaggatctttggtcaccccacgctgccccatcttgcctgctgttccagttctggtcaagggccttgggggctggccccccaccaggccttctagagcagcaccagtctcagggccctgggaccagctgccctacttcccaggtttgtagccaggagaagggggcatcacagagctgatggtccaataaggggggtgtgagccccgcagggactggcccgcacctgccttggatgttttcagcaattaaacttttttaagctggcca

SEQ ID NO: 215593 - DNA, 2778 bp, Artificial Sequence
  derived and/or modified sequence
atgaacagattcagagtgagcaagttcagacacaccgaggccagaccccccagaagagagagctggatcagcgacatcagagccggcaccgcccccagctgcagaaaccacatcaagagcagctgcagcctgatcgccttcaacagcgacagacccggcgtgctgggcatcgtgcccctgcagggccagggcgaggacaagagaagagtggcccacctgggctgccacagcgacctggtgaccgacctggacttcagccccttcgacgacttcctgctggccaccggcagcgccgacagaaccgtgaagctgtggagactgcccggccccggccaggccctgcccagcgcccccggcgtggtgctgggccccgaggacctgcccgtggaggtgctgcagttccaccccaccagcgacggcatcctggtgagcgccgccggcaccaccgtgaaggtgtgggacgccgccaagcagcagcccctgaccgagctggccgcccacggcgacctggtgcagagcgccgtgtggagcagagacggcgccctggtgggcaccgcctgcaaggacaagcagctgagaatcttcgaccccagaaccaagcccagagccagccagagcacccaggcccacgagaacagcagagacagcagactggcctggatgggcacctgggagcacctggtgagcaccggcttcaaccagatgagagagagagaggtgaagctgtgggacaccagattcttcagcagcgccctggccagcctgaccctggacaccagcctgggctgcctggtgcccctgctggaccccgacagcggcctgctggtgctggccggcaagggcgagagacagctgtactgctacgaggtggtgccccagcagcccgccctgagccccgtgacccagtgcgtgctggagagcgtgctgagaggcgccgccctggtgcccagacaggccctggccgtgatgagctgcgaggtgctgagagtgctgcagctgagcgacaccgccatcgtgcccatcggctaccacgtgcccagaaaggccgtggagttccacgaggacctgttccccgacaccgccggctgcgtgcccgccaccgacccccacagctggtgggccggcgacaaccagcaggtgcagaaggtgagcctgaaccccgcctgcagaccccaccccagcttcaccagctgcctggtgccccccgccgagcccctgcccgacaccgcccagcccgccgtgatggagacccccgtgggcgacgccgacgccagcgagggcttcagcagcccccccagcagcctgaccagccccagcacccccagcagcctgggccccagcctgagcagcaccagcggcatcggcaccagccccagcctgagaagcctgcagagcctgctgggccccagcagcaagttcagacacgcccagggcaccgtgctgcacagagacagccacatcaccaacctgaagggcctgaacctgaccacccccggcgagagcgacggcttctgcgccaacaagctgagagtggccgtgcccctgctgagcagcggcggccaggtggccgtgctggagctgagaaagcccggcagactgcccgacaccgccctgcccaccctgcagaacggcgccgccgtgaccgacctggcctgggaccccttcgacccccacagactggccgtggccggcgaggacgccagaatcagactgtggagagtgcccgccgagggcctggaggaggtgctgaccacccccgagaccgtgctgaccggccacaccgagaagatctgcagcctgagattccaccccctggccgccaacgtgctggccagcagcagctacgacctgaccgtgagaatctgggacctgcaggccggcgccgacagactgaagctgcagggccaccaggaccagatcttcagcctggcctggagccccgacggccagcagctggccaccgtgtgcaaggacggcagagtgagagtgtacagacccagaagcggccccgagcccctgcaggagggccccggccccaagggcggcagaggcgccagaatcgtgtgggtgtgcgacggcagatgcctgctggtgagcggcttcgacagccagagcgagagacagctgctgctgtacgaggccgaggccctggccggcggccccctggccgtgctgggcctggacgtggcccccagcaccctgctgcccagctacgaccccgacaccggcctggtgctgctgaccggcaagggcgacaccagagtgttcctgtacgagctgctgcccgagagccccttcttcctggagtgcaacagcttcaccagccccgacccccacaagggcctggtgctgctgcccaagaccgagtgcgacgtgagagaggtggagctgatgagatgcctgagactgagacagagcagcctggagcccgtggccttcagactgcccagagtgagaaaggagttcttccaggacgacgtgttccccgacaccgccgtgatctgggagcccgtgctgagcgccgaggcctggctgcagggcgccaacggccagccctggctgctgagcctgcagccccccgacatgagccccgtgagccaggcccccagagaggcccccgccagaagagcccccagcagcgcccagtacctggaggagaagagcgaccagcagaagaaggaggagctgctgaacgccatggtggccaagctgggcaacagagaggaccccctgccccaggacagcttcgagggcgtggacgaggacgagtgggactag

SEQ ID NO: 215594 - protein, 775 aa, Artificial Sequence
  derived and/or modified sequence
MRASLLLSVLRPAGPVAVGISLGFTLSLLSVTWVEEPCGPGPPQPGDSELPPRGNTNAARRPNSVQPGAEREKPGAGEGAGENWEPRVLPYHPAQPGQAAKKAVRTRYISTELGIRQRLLVAVLTSQTTLPTLGVAVNRTLGHRLERVVFLTGARGRRAPPGMAVVTLGEERPIGHLHLALRHLLEQHGDDFDWFFLVPDTTYTEAHGLARLTGHLSLASAAHLYLGRPQDFIGGEPTPGRYCHGGFGVLLSRMLLQQLRPHLEGCRNDIVSARPDEWLGRCILDATGVGCTGDHEGVHYSHLELSPGEPVQEGDPHFRSALTAHPVRDPVHMYQLHKAFARAELERTYQEIQELQWEIQNTSHLAVDGDQAAAWPVGIPAPSRPASRFEVLRWDYFTEQHAFSCADGSPRCPLRGADRADVADVLGTALEELNRRYHPALRLQKQQLVNGYRRFDPARGMEYTLDLQLEALTPQGGRRPLTRRVQLLRPLSRVEILPVPYVTEASRLTVLLPLAAAERDLAPGFLEAFATAALEPGDAAAALTLLLLYEPRQAQRVAHADVFAPVKAHVAELERRFPGARVPWLSVQTAAPSPLRLMDLLSKKHPLDTLFLLAGPDTVLTPDFLNRCRMHAISGWQAFFPMHFQAFHPAVAPPQGPGPPELGRDTGRFDRQAASEACFYNSDYVAARGRLAAASEQEEELLESLDVYELFLHFSSLHVLRAVEPALLQRYRAQTCSARLSEDLYHRCLQSVLEGLGSRTQLAMLLFEQEQGNST

SEQ ID NO: 215595 - protein, 613 aa, Artificial Sequence
  derived and/or modified sequence
MAVVTLGEERPIGHLHLALRHLLEQHGDDFDWFFLVPDTTYTEAHGLARLTGHLSLASAAHLYLGRPQDFIGGEPTPGRYCHGGFGVLLSRMLLQQLRPHLEGCRNDIVSARPDEWLGRCILDATGVGCTGDHEGVHYSHLELSPGEPVQEGDPHFRSALTAHPVRDPVHMYQLHKAFARAELERTYQEIQELQWEIQNTSHLAVDGDQAAAWPVGIPAPSRPASRFEVLRWDYFTEQHAFSCADGSPRCPLRGADRADVADVLGTALEELNRRYHPALRLQKQQLVNGYRRFDPARGMEYTLDLQLEALTPQGGRRPLTRRVQLLRPLSRVEILPVPYVTEASRLTVLLPLAAAERDLAPGFLEAFATAALEPGDAAAALTLLLLYEPRQAQRVAHADVFAPVKAHVAELERRFPGARVPWLSVQTAAPSPLRLMDLLSKKHPLDTLFLLAGPDTVLTPDFLNRCRMHAISGWQAFFPMHFQAFHPAVAPPQGPGPPELGRDTGRFDRQAASEACFYNSDYVAARGRLAAASEQEEELLESLDVYELFLHFSSLHVLRAVEPALLQRYRAQTCSARLSEDLYHRCLQSVLEGLGSRTQLAMLLFEQEQGNST

SEQ ID NO: 215596 - DNA, 2328 bp, Artificial Sequence
  derived and/or modified sequence
atgcgcgcatccctcctgctgtccgttctgagacccgccggcccagtggccgttggaataagtctcggattcacactaagtcttctgtctgtgacctgggtggaggaaccctgtggaccaggtcccccccaacctggcgacagcgagctaccgccgcgtggcaatacaaatgccgcccgcaggcccaactctgttcagcctggagctgaaagggaaaagcctggcgccggagaaggggcaggcgagaattgggaaccccgtgtgcttccctatcatcctgctcagccagggcaggcagccaagaaggccgtgaggacccgctacatcagcactgagctaggcattaggcagcgcttactcgtggccgtgctcacgtcccagactacccttcctacgctgggtgtggctgtcaatagaaccttgggacatcgactagaacgcgttgtgttcctgacaggcgcgcgggggagacgcgctccaccggggatggcagtggtcaccctgggtgaggaaaggcccattggacacttacatctagccctcagacacttgctggaacagcacggagacgactttgattggttttttctggtccctgatacaacctacactgaggcccacggcctggcacggctgactggacacttgtcactggcctcagcggcacatctctacctgggaagaccacaggactttatcggcggcgagcccactcccggccgatactgtcacggggggtttggagtgctgctatcacgaatgctgctgcagcaattgcggccgcacctggaggggtgtcggaacgacatcgtttcagcccggcctgatgagtggttaggccgctgtatacttgacgccacaggcgtgggatgcaccggagaccatgagggtgtgcactatagccatctcgaactgagcccaggtgagccagttcaagagggcgacccccattttcgttccgcactgactgctcaccccgtgagggaccccgtgcacatgtatcagctgcacaaagcatttgcacgggccgagcttgagcgtacataccaagagatccaggagctgcagtgggaaatccagaacactagccatctcgcagtcgatggtgatcaggccgctgcctggcctgtgggtattcccgctccttctagaccggccagccgattcgaggtgctccggtgggactactttaccgagcaacacgccttttcttgcgcagacgggtcaccaaggtgcccgctgcggggagcagaccgcgcagacgtcgccgatgtcctaggaaccgctcttgaagaacttaaccgccggtaccaccccgcattgaggttacaaaaacagcaactcgtgaatgggtaccgacgctttgatccggcccgcgggatggagtatactttggatttgcagttggaagccctcactccccaaggggggcgtaggcccctcacacgaagagttcaacttcttaggcccttgtcccgggtcgaaatccttccagttccttacgtgacggaggcgagtagactcacagtactgctacctttggccgcagctgaaagagacctagcaccagggtttctggaggcattcgcaacggcggcattggaacccggcgacgctgcagcggcacttacattacttctcctatacgagcccagacaggcccagcgtgtagctcatgcagatgtatttgcccccgtgaaagcccatgtcgccgagctggaaaggaggttcccaggggccagggtgccttggctttccgtccaaaccgcagcaccatcccccttacggctgatggaccttttgagcaagaagcaccctctggacacactgtttctgctggcaggaccagatacagtgttgacacctgattttctgaataggtgtcgtatgcacgcgatttccggttggcaggccttctttccgatgcacttccaggcattccatccagccgttgcccccccacagggaccagggccccctgagctgggacgtgacacgggtcgctttgatcgccaggccgctagtgaagcttgtttctacaattctgactacgtggctgcccgcggcaggcttgccgccgcttcagagcaggaagaagaactgctggagtcgctcgacgtctatgaactcttcctgcacttttcatctctgcatgtgctgcgggcagtcgaacccgcactgctgcagcggtatcgggctcagacctgctcggctcgtctgtctgaggacctttaccaccgctgcctgcagagtgtcctggaggggctggggagcagaacacagctcgccatgctcctcttcgaacaggaacaggggaacagcacatag

SEQ ID NO: 215597 - DNA, 1842 bp, Artificial Sequence
  derived and/or modified sequence
atggcagtagtgacacttggggaagaacgtcccattggccatctgcacctggccttgcggcacctattagagcagcacggcgatgatttcgactggtttttcttggttcctgataccacttacaccgaagcccatggcctcgcccggctcaccggccacctctccctggcttctgccgcccacctgtatttgggccggccgcaggatttcatcgggggcgagcctactcctgggcgatactgccacggtggattcggcgtcctgctcagtaggatgttactgcagcagctccgtcctcacttggagggatgcagaaatgacatcgtgtccgctcgcccagacgaatggctagggaggtgtatcctggatgcaacaggcgtgggctgcacgggcgaccacgaaggtgtccactactctcacctggagctgagccctggggaaccagtgcaagagggcgatccacactttcgctcagctcttaccgctcaccctgtcagagatccggttcacatgtatcagctgcacaaggccttcgcacgcgctgagctggaaagaacctatcaggagatccaggaactccagtgggagattcagaacacatcacatctagccgtagatggcgaccaagccgccgcgtggcccgttggaatcccagccccgtcccgccccgcttccaggttcgaggtgttgcgatgggattacttcacagagcaacacgccttcagttgtgccgacggatcaccaagatgcccactgcgtggcgccgatcgcgcagatgtggctgacgtgctcggaaccgcgctcgaagagctaaaccgcaggtatcatcctgcgctaaggctccagaaacagcaattagtgaacgggtacaggaggtttgatccagcgcggggaatggagtacacgctggacctgcagctggaggccttaaccccacagggggggcgtcgcccactgactagacgggtacaattgctcagacccctgagccgggtcgaaatactgccagtcccatatgtgactgaggcctccaggctcacagtcctgctgcctttagccgctgctgaacgggacctagcccctgggtttctggaagcatttgctacagctgctctagagcccggtgatgctgcggcagcactcacattgctattactgtacgagccacgccaggcacaaagggtggcacatgccgacgtatttgcccctgtcaaggctcacgtggctgaattggaacgcaggttccccggggcaagagtcccttggctctccgtccaaactgctgccccaagccccctgcgattaatggatctcttaagtaaaaagcatcccctggacaccctgtttctcctggccggtccagatacagtgcttacacccgatttcctgaaccgctgccgaatgcatgcgatcagcgggtggcaggcattcttcccaatgcactttcaagcattccatccagccgtggctcccccacaaggtccaggtccgcccgagttgggacgcgacacggggcggtttgatcggcaagccgcttcagaagcctgtttctacaacagtgactatgtggcagcccgaggtcgcctcgccgctgcatccgaacaggaagaggagttgctggagtctttggatgtgtatgagctgttcctacacttcagcagcttgcacgtactgagggccgtggagcccgccttgttacagcgatacagagctcagacgtgctctgccagattatcagaggacctctatcatcggtgtctacagagcgtgctcgagggcttaggcagcaggacacagctagctatgctgctgttcgaacaggaacaagggaacagtacgtag

SEQ ID NO: 215598 - DNA, 2328 bp, Artificial Sequence
  derived and/or modified sequence
atgagggccagcctgctgctgtctgtgctgcggcctgctggccctgtggccgtgggcatcagcctgggcttcaccctgagcctgctgtctgtgacctgggtggaggagccctgtggccctggccccccccagcccggggacagcgagctgcccccccggggcaacaccaatgctgcccggcggcccaacagcgtgcagcctggagctgagcgggagaagccaggggccggggagggcgctggggagaactgggagccccgggtgctgccctaccacccagcccagcccggccaggccgccaagaaggctgtgaggacccgctacatcagcacagagctgggcatccggcagaggctgctggtggccgtgctgaccagccagaccaccctgcccaccctgggcgtggccgtgaacagaaccctgggccaccggctggagcgggtggtgttcctgaccggggcccggggcagaagagcccctcctggcatggctgtggtgaccctgggggaggagcggcccatcggccacctgcacctggccctgcggcacctgctggagcagcacggagatgactttgactggttcttcctggtgcctgacaccacctacacagaggcccacggcctggcccggctgaccggccacctgagcctggccagcgctgcccacctgtacctgggccggccccaggacttcatcggcggggagcccaccccaggccgctactgccacggcggctttggagtgctgctgagcaggatgctgctgcagcagctgcggccccacctggagggctgcagaaatgacatcgtgtctgcccggccagatgagtggctgggccgctgcatcctggatgccactggagtgggctgcaccggggaccatgaaggagtgcactacagccacctggagctgagccctggagagcctgtgcaggagggggacccccacttccgcagcgccctgacagcccaccctgtgcgggaccctgtgcacatgtaccagctgcacaaggcctttgcccgggcagagctggagaggacctaccaggagatccaggagctgcagtgggagatccagaacaccagccacctggccgtggatggagaccaggccgccgcctggcctgtgggcatcccagcccccagcaggcctgccagcagatttgaggtgctgcgctgggactacttcacagagcagcacgccttcagctgtgctgatggcagcccccgctgccccctgcggggagctgacagagcagatgtggctgatgtgctgggcacagccctggaggagctgaacagacgctaccacccagccctgcggctgcagaagcagcagctggtgaatggctacagaagatttgatcctgcccggggcatggagtacaccctggacctgcagctggaggccctgaccccccagggcggccggcggcccctgaccaggagagtgcagctgctgcggcccctgagccgggtggagatcctgcctgtgccctacgtgacagaggccagccggctgactgtgctgctgcccctggccgctgctgagcgggacctggcccctggcttcctggaggcctttgccacagctgccctggagcctggagatgctgctgctgccctgaccctgctgctgctgtatgagccccggcaggcccagagggtggcccacgcagatgtgtttgcccctgtgaaggcccacgtggccgagctggagcggcgcttccctggggcccgggtgccctggctgtctgtgcagacagctgcccccagccccctgcggctgatggacctgctgagcaagaagcaccccctggacaccctcttcctgctggccggccctgacacagtgctgaccccagacttcctgaaccgctgcaggatgcacgccatcagcggctggcaggccttcttccccatgcacttccaggccttccaccctgctgtggccccaccccagggccctggccccccagagctgggccgggacaccggccgctttgaccggcaggccgccagcgaggcctgcttctacaacagcgactatgtggccgcccggggccgcctggccgccgccagcgagcaggaggaggagctgctggagagcctggatgtgtatgagctgttcctgcacttcagcagcctgcacgtgctgcgggctgtggagcccgccctgctgcagcgctaccgggcccagacctgcagcgcccggctgtctgaggacctgtaccaccgctgcctgcagagcgtgctggagggcctgggcagcaggacccagctggccatgctgctgtttgagcaggagcagggcaacagcacctag

SEQ ID NO: 215599 - DNA, 1842 bp, Artificial Sequence
  derived and/or modified sequence
atggctgtggtgaccctgggggaggagcggcccatcggccacctgcacctggccctgcggcacctgctggagcagcacggagatgactttgactggttcttcctggtgcctgacaccacctacacagaggcccacggcctggcccggctgaccggccacctgagcctggccagcgctgcccacctgtacctgggccggccccaggacttcatcggcggggagcccaccccaggccgctactgccacggcggctttggagtgctgctgagcaggatgctgctgcagcagctgcggccccacctggagggctgcagaaatgacatcgtgtctgcccggccagatgagtggctgggccgctgcatcctggatgccactggagtgggctgcaccggggaccatgaaggagtgcactacagccacctggagctgagccctggagagcctgtgcaggagggggacccccacttccgcagcgccctgacagcccaccctgtgcgggaccctgtgcacatgtaccagctgcacaaggcctttgcccgggcagagctggagaggacctaccaggagatccaggagctgcagtgggagatccagaacaccagccacctggccgtggatggagaccaggccgccgcctggcctgtgggcatcccagcccccagcaggcctgccagcagatttgaggtgctgcgctgggactacttcacagagcagcacgccttcagctgtgctgatggcagcccccgctgccccctgcggggagctgacagagcagatgtggctgatgtgctgggcacagccctggaggagctgaacagacgctaccacccagccctgcggctgcagaagcagcagctggtgaatggctacagaagatttgatcctgcccggggcatggagtacaccctggacctgcagctggaggccctgaccccccagggcggccggcggcccctgaccaggagagtgcagctgctgcggcccctgagccgggtggagatcctgcctgtgccctacgtgacagaggccagccggctgactgtgctgctgcccctggccgctgctgagcgggacctggcccctggcttcctggaggcctttgccacagctgccctggagcctggagatgctgctgctgccctgaccctgctgctgctgtatgagccccggcaggcccagagggtggcccacgcagatgtgtttgcccctgtgaaggcccacgtggccgagctggagcggcgcttccctggggcccgggtgccctggctgtctgtgcagacagctgcccccagccccctgcggctgatggacctgctgagcaagaagcaccccctggacaccctcttcctgctggccggccctgacacagtgctgaccccagacttcctgaaccgctgcaggatgcacgccatcagcggctggcaggccttcttccccatgcacttccaggccttccaccctgctgtggccccaccccagggccctggccccccagagctgggccgggacaccggccgctttgaccggcaggccgccagcgaggcctgcttctacaacagcgactatgtggccgcccggggccgcctggccgccgccagcgagcaggaggaggagctgctggagagcctggatgtgtatgagctgttcctgcacttcagcagcctgcacgtgctgcgggctgtggagcccgccctgctgcagcgctaccgggcccagacctgcagcgcccggctgtctgaggacctgtaccaccgctgcctgcagagcgtgctggagggcctgggcagcaggacccagctggccatgctgctgtttgagcaggagcagggcaacagcacctag

SEQ ID NO: 215600 - DNA, 2328 bp, Artificial Sequence
  derived and/or modified sequence
atgcgggccagcctgctgctgagcgtgctgcggcccgccggccccgtggcagtgggcatttccctgggattcaccctctcactcttgtctgtgacatgggtcgaagaaccatgtggtcccggacctccccagccgggggatagcgaattaccccccaggggaaacaccaacgcggcgcggcgccctaacagcgtgcagccaggcgccgaaagagaaaagcctggggctggggagggcgcaggcgagaattgggaaccaagggtgctcccctaccatccagcccagcctggccaggccgcaaagaaggcagtacgcacacgatacatttcaactgagcttggtattcggcagcgactgctcgtggccgtgctcaccagtcaaactacactgccaacacttggagtagcggtaaacaggacactggggcaccggctggagcgagtggtcttccttacgggggcccgcggaaggagggctccgcctggcatggccgtggtcacgctaggagaggagaggccaatcggacacttgcaccttgccttaaggcaccttcttgaacaacatggggatgactttgattggtttttcttggtcccagacacaacctatacagaggcccacggccttgctcggctcacaggacacctgtccttggcctccgctgcacatctgtatctgggacggcctcaagactttatcggcggggaaccgacacctggacgttactgtcacggagggttcggcgtgctactttctcggatgttactccagcagctgcgaccacatctggaaggttgccggaatgatatcgtaagcgcacgtccagacgagtggctgggaagatgtatacttgacgctactggagtgggttgcactggggaccatgagggtgtgcattatagccaccttgagctcagtcctggcgagccagtgcaggagggtgacccacacttccgatccgcccttacggcccaccctgtgagggacccagtgcatatgtaccaactgcataaagccttcgcaagagcagagctggaacgcacataccaggagatacaagaactgcagtgggaaattcagaatacatctcaccttgcagtagatggggaccaggcagctgcgtggcctgtagggattcctgcacctagtaggcccgctagcagatttgaagttcttcgctgggattactttactgaacagcatgctttttcctgcgctgacggctccccacgttgcccactaagaggagccgatcgggccgatgttgcggacgtgctgggaaccgctctggaagagttaaacagacgctatcatcctgccctacggttgcaaaaacagcagctggtcaatggttacagacggttcgatcccgcaaggggcatggagtacactctggatttgcagctggaggccttgacaccgcaggggggccgaaggccactgacaaggagggtccagctcctgagacccctatcgagggtagagattcttcccgtcccgtacgtgacagaggcctctcggctcacggtccttttgcctctggcagccgctgagagggacctggctcccggatttctcgaggcatttgctaccgctgcgttggagccgggagatgcagccgccgctctgaccctcttgctgttgtatgagccacgtcaggcacagcgcgtggctcacgccgacgtttttgctcccgtgaaagctcacgtggctgaactggagagacgattccccggcgccagagtgccttggctctctgttcagaccgctgcacctagtccgctcaggttgatggacctcctctctaaaaagcaccccctcgatacgctgtttctgttagccggtcctgataccgtcctcaccccggatttcttaaatcgttgtcgcatgcacgctatttcgggctggcaggccttttttcccatgcacttccaagcattccatccggctgtcgccccaccccagggcccaggacctccagaacttgggcgagacacaggcaggttcgacaggcaagcagcctccgaggcttgcttttacaatagcgattacgtggctgcacgaggcagactcgccgccgccagcgagcaggaggaggagctcttagaatctctggacgtatacgagttattccttcacttttcatctcttcacgtgctccgcgcagtcgagccagcactactgcagcgatatcgcgctcaaacgtgcagcgccagattgagcgaggacctctatcaccggtgcctgcaaagcgtgttggaaggcctgggaagtcgcacccaactcgcgatgctgctttttgagcaggagcagggcaactccacatag

SEQ ID NO: 215601 - DNA, 1842 bp, Artificial Sequence
  derived and/or modified sequence
atggccgtggtgaccctgggcgaggagcggcccatcggccacctgcacctcgcgctcaggcatctactggagcagcacggagatgatttcgattggttctttcttgtgccggacacaacttatacggaagcacatggactcgctcggctgaccgggcacttgagcctcgcatcagccgcccacctgtacctaggacgaccacaagattttattgggggcgagcccactccagggagatactgccacggcgggtttggcgtgcttctctctcgcatgttactccagcagctccgcccgcatcttgagggatgccggaatgacattgtctcagccagaccggacgagtggctcgggcgatgtatcctggacgccacaggcgttgggtgcactggcgatcatgagggagttcattactcccacttagaactgagccccggcgagccagttcaggagggggaccctcactttaggagcgcactcactgcgcaccctgttcgggaccccgtgcacatgtaccagctccacaaagcctttgcaagggccgagttagaaagaacttaccaggagattcaagagctgcagtgggagattcagaataccagccatctcgccgttgacggggatcaagccgctgcatggcctgtgggcatccctgccccctctcgccccgcttctagatttgaagtgctacgctgggactactttacagagcagcatgcgttcagctgtgctgatgggtcccctagatgtccgctgaggggagcagatcgagctgacgtggctgatgttctgggcacagccttggaagaactgaaccgtaggtaccaccccgctcttagactgcaaaagcagcaattagtgaacggttacagacggtttgatcccgccaggggaatggagtataccctcgatttgcagttagaggccctaactccccaggggggccgacggcctttgaccagacgcgtgcagctcctgcgacccctgtcaagggtcgagatcctccccgtgccctatgtgacggaggcgagcagactgaccgttctcctcccattggcagccgcggagcgagatctcgctccagggtttcttgaagcattcgccacagccgccctagaacctggcgacgctgctgctgcactgactcttctgctgttatacgaacctcgccaagcccagagggtggcccacgctgacgtgttcgctccagtcaaggcccacgtggccgagctcgagcgccggtttcccggtgcccgggtcccctggctgtctgttcagaccgccgctccctcccccttgcggttgatggaccttctgagcaaaaagcaccccttggacaccttgtttctgctggccggaccagatacagtccttacgcccgatttcttaaataggtgtcgaatgcacgcgattagtgggtggcaggcattcttcccgatgcactttcaggcctttcaccccgccgtggcccccccgcagggcccgggcccaccagagctgggtagggacacaggccggttcgaccgccaggcagcgtcggaggcatgcttctataactcggactacgtcgctgccaggggaaggctggcagccgccagcgaacaggaggaagagcttttagaatctctggacgtctatgagctgtttctgcatttctccagtctgcatgtcctgagagccgtggaaccggctctccttcagcgctatcgggctcagacctgttccgcccgtctgagcgaagacctttatcacaggtgtctacagtcagttctggaggggttgggcagtcggactcagctggccatgctcttgtttgagcaggaacagggcaacagcacctag

SEQ ID NO: 215602 - DNA, 2328 bp, Artificial Sequence
  derived and/or modified sequence
atgcgagccagtctgctcctgtctgttttgagacccgcagggccagtcgcagtcggaatcagtctggggttcaccctgtctctcttatctgttacctgggtcgaagagccgtgcggccctggcccacctcagcctggagatagcgaactgccacccagagggaacacgaacgcagccagacgccctaattcagttcaacccggtgccgaacgggagaaacctggggctggggaaggcgctggagaaaactgggagcccagagtgctgccttaccatccagcacagccaggacaagccgctaagaaagccgtgagaacacgctatattagtacagagctaggtataaggcaacgtctgctggtagcggtcctgacctcgcaaaccacacttcccactctgggggtcgccgtcaatagaaccctcggccatcgcctggagagagtagttttcctgaccggagcccgaggcaggagggcaccccctgggatggcagtggtgactctgggcgaagagaggcccatcggccacctgcatctcgccttaaggcatctgctcgaacagcacggtgatgacttcgattggtttttcctggtgcctgacactacatacacggaggcacacgggctggccaggctcactgggcatctttcattagcgtctgcagctcacctgtacctggggcgaccccaggatttcataggaggcgaaccaactcccggacgatactgccacgggggatttggggtactcctgtcgaggatgctgctacagcagttgcgaccccacttggagggatgcagaaacgacatagtctctgccagacctgatgagtggctgggtcggtgtatactggacgccactggggttggctgtactggtgatcatgaaggggtgcattatagccatctggagctgtcccccggagagcctgtgcaggaaggcgatcctcactttagatctgccctgacggcacaccccgtgagggacccggtgcacatgtatcagctgcacaaggcattcgcacgcgcagagctggaaagaacgtatcaagagattcaggagctgcagtgggagattcagaacacaagccatctggccgtggacggggaccaagctgcggcatggccggtagggatccctgcgccatctcgccctgcctctcggtttgaggttctgaggtgggactacttcacagaacaacacgcatttagctgcgccgacggtagccccagatgccccctgaggggtgctgaccgcgctgacgtggctgatgtcctcggcactgcactggaggagcttaaccggagatatcaccccgctctgaggctgcagaaacagcagctggtcaacgggtatcgtagatttgaccccgcacggggaatggaatacactttggatttacagctcgaggcgctcacgccccagggcggtcgacgcccactaacccgccgtgtacagctcctacgaccattgagtcgtgtagagattctgcctgtaccatacgttaccgaggcatcgaggctcacagtcctgctaccactggcagcagcggagcgggaccttgcaccagggttcctggaagcatttgccaccgcagcgttggagcccggagatgcagctgcggctctcacactgctacttctgtatgagccacgccaagcccagcgagtggcccacgccgacgtgttcgccccagtcaaggcacacgtcgcagaactagagaggcgcttccccggagcgagagtgccttggctgagtgtgcaaacagctgcaccatcaccactgcgactcatggatctgctgagtaaaaaacacccgctcgacactttgttcctgttagctggccctgacacagtgttgacacccgatttcctgaatcgctgccgtatgcacgcaataagcggctggcaagctttctttcccatgcacttccaagcctttcacccggcagttgctcctccgcagggtccaggccctcccgaactgggcagggacacagggagattcgacagacaggctgccagcgaagcatgcttctataattcagactatgtcgcagcccgaggaaggcttgccgctgcgagcgaacaggaagaagagcttctggagagcctcgacgtctatgaactgtttctgcacttctcatctcttcatgtcctgcgagccgtcgagcctgcccttctgcagcgctatcgggcacagacctgttctgctaggctgtcagaagatttataccaccgctgtttacagtcagttctggaggggctaggatctaggactcaacttgccatgcttctcttcgaacaggagcaaggcaactcaacctag

SEQ ID NO: 215603 - DNA, 1842 bp, Artificial Sequence
  derived and/or modified sequence
atggctgtggtgacactgggagaggaaaggcctatcggccatttgcacttagctttacggcatctgctggaacagcacggtgacgacttcgactggttttttctcgtgccggataccacctatactgaggctcatggtctggccaggctcacaggtcacttatcccttgcctctgcggctcacctatacctaggcaggcctcaggacttcatcgggggagaacccaccccgggaagatactgtcacggtggatttggggtcttgctgagccgaatgctcctccaacagctacgcccacacctggagggctgccggaatgacattgtgtcagcaagacccgacgagtggttgggaagatgcatattggatgcgactggtgtcggctgcactggcgaccacgagggggtacattactctcacctggagctttctcctggcgagcctgtccaggagggagacccccactttcggtctgccctcacagctcacccagtgcgcgatcccgtccacatgtaccagctgcacaaagcctttgcacgggctgaactcgaaagaacttaccaggaaattcaagagcttcaatgggaaattcagaacacctcccatctggctgtggatggcgaccaggcagccgcttggccggtgggaattccagccccttctagaccagccagccggtttgaggtgctgcggtgggactatttcacagagcaacacgctttctcttgcgccgatggtagccctcggtgcccattgagaggagcagatagggctgatgtggccgatgtcctgggtaccgcactggaggagcttaataggcggtaccatcctgctctgaggcttcagaaacagcaacttgttaatgggtatcggcgatttgacccagccaggggaatggagtatactctggatctacagcttgaagcactgacaccacaagggggtcgaagaccactcacgaggcgtgtgcaattgcttcgtcctctctccagggttgaaatcctgcctgttccctatgtgaccgaggcctcacgtctgaccgtgttgcttccactcgctgctgctgagagggacctggccccaggatttctcgaagccttcgctaccgctgcgttggaaccaggagacgccgctgccgcactgacactactgttactttatgagcctagacaggctcagagggttgcccacgcggacgtctttgcacctgttaaggcacatgtagccgagctagaacgtcgcttcccgggtgcaagggtgccctggctctctgtgcagaccgccgctccctcgcccctgcgcttaatggacctcctcagtaagaaacacccactggatacattatttttgctggcgggtcccgatacagtgctgaccccagatttcctcaacaggtgcaggatgcacgcaattagcgggtggcaggcctttttccccatgcattttcaggccttccatccggctgttgcccctccgcaaggacccggacctccggaactcgggcgagacactggaaggtttgatcgtcaggcggcttctgaggcctgtttttataacagcgactatgtcgctgctcggggacgtctggccgcagcatccgagcaagaggaggaactgttagagtctctagacgtctacgaactctttctgcatttcagtagcttgcacgtcctcagggcagttgagccggctcttctgcaacgctaccgcgctcaaacatgttccgctaggctgtccgaggacttgtatcatcgctgtctgcagagcgttttagaagggctgggcagcagaacccaattagcaatgctgctgtttgagcaagaacaggggaactcaacctag

SEQ ID NO: 215604 - DNA, 3013 bp, Artificial Sequence
  derived and/or modified sequence
cggccgcggctgaggctccagtgccgagcgcaagaaccctgcgcagcccagagcagctgctggaggggaatcgaggcgcggctccggggattcggctcgggccgctggctctgctctgcggggagggagcgggcccgcccgcggggcccgagccctccggatccgccccctccccggtcccgccccctcggagactcctctggctgctctgggggttcgccggggccggggacccgcggtccgggcgccatgcgggcatcgctgctgctgtcggtgctgcggcccgcagggcccgtggccgtgggcatctccctgggcttcaccctgagcctgctcagcgtcacctgggtggaggagccgtgcggcccaggcccgccccaacctggagactctgagctgccgccgcgcggcaacaccaacgcggcgcgccggcccaactcggtgcagcccggagcggagcgcgagaagcccggggccggcgaaggcgccggggagaattgggagccgcgcgtcttgccctaccaccctgcacagcccggccaggccgccaaaaaggccgtcaggacccgctacatcagcacggagctgggcatcaggcagaggctgctggtggcggtgctgacctctcagaccacgctgcccacgctgggcgtggccgtgaaccgcacgctggggcaccggctggagcgtgtggtgttcctgacgggcgcacggggccgccgggccccacctggcatggcagtggtgacgctaggcgaggagcgacccattggacacctgcacctggcgctgcgccacctgctggagcagcacggcgacgactttgactggttcttcctggtgcctgacaccacctacaccgaggcgcacggcctggcacgcctaactggccacctcagcctggcctccgccgcccacctgtacctgggccggccccaggacttcatcggcggagagcccacccccggccgctactgccacggaggctttggggtgctgctgtcgcgcatgctgctgcaacaactgcgcccccacctggaaggctgccgcaacgacatcgtcagtgcgcgccctgacgagtggctgggtcgctgcattctcgatgccaccggggtgggctgcactggtgaccacgagggggtgcactatagccatctggagctgagccctggggagccagtgcaggagggggaccctcatttccgaagtgccctgacagcccaccctgtgcgtgaccctgtgcacatgtaccagctgcacaaagctttcgcccgagctgaactggaacgcacgtaccaggagatccaggagttacagtgggagatccagaataccagccatctggccgttgatggggaccaggcagctgcttggcccgtgggtattccagcaccatcccgcccggcctcccgctttgaggtgctgcgctgggactacttcacggagcagcacgctttctcctgcgccgatggctcaccccgctgcccactgcgtggggctgaccgggctgatgtggccgatgttctggggacagctctagaggagctgaaccgccgctaccacccggccttgcggctccagaagcagcagctggtgaatggctaccgacgctttgatccggcccggggtatggaatacacgctggacttgcagctggaggcactgaccccccagggaggccgccggcccctcactcgccgagtgcagctgctccggccgctgagccgcgtggagatcttgcctgtgccctatgtcactgaggcctcacgtctcactgtgctgctgcctctagctgcggctgagcgtgacctggcccctggcttcttggaggcctttgccactgcagcactggagcctggtgatgctgcggcagccctgaccctgctgctactgtatgagccgcgccaggcccagcgcgtggcccatgcagatgtcttcgcacctgtcaaggcccacgtggcagagctggagcggcgtttccccggtgcccgggtgccatggctcagtgtgcagacagccgcaccctcaccactgcgcctcatggatctactctccaagaagcacccgctggacacactgttcctgctggccgggccagacacggtgctcacgcctgacttcctgaaccgctgccgcatgcatgccatctccggctggcaggccttctttcccatgcatttccaagccttccacccagctgtggccccaccacaagggcctgggcccccagagctgggccgtgacactggccgctttgatcgccaggcagccagcgaggcctgcttctacaactccgactatgtggcagcccgtgggcgcctggcggcagcctcagaacaagaagaggagctgctggagagcctggatgtgtacgagctgttcctccacttctccagtctgcatgtgctgcgggcggtggagccggcgctgctgcagcgctaccgggcccagacgtgcagcgcgaggctcagtgaggacctgtaccaccgctgcctccagagcgtgcttgagggcctcggctcccgaacccagctggccatgctactctttgaacaggagcagggcaacagcacctgaccccaccctgtccccgtgggccgtggcatggccacaccccaccccacttctcccccaaaaccagagccacctgccagcctcgctgggcagggctggccgtagccagaccccaagctggcccactggtcccctctctggctctgtgggtccctgggctctggacaagcactgggggacgtgcccccagagccacccacttctcatcccaaacccagtttccctgccccctgacgctgctgattcgggctgtggcctccacgtatttatgcagtacagtctgcctgacgccagccctgcctctgggccctgggggctgggctgtagaagagttgttggggaaggagggagctgaggagggggcatctcccaacttctcccttttggaccctgccgaagctccctgcctttaataaactggccaagtgtggacttgtga

SEQ ID NO: 215605 - DNA, 2210 bp, Artificial Sequence
  derived and/or modified sequence
aacttccgatggccctgccttcccgagagccgtggggccagtccgagactttctctgggccctatcccggcctgggctgaacttactggactgtgtcctaaaccggctcgacccgatggcgccccagagatcctactagctccctggctgggctgctggtgttagagaaatgacttatatatagggacccgctacatcagcacggagctgggcatcaggcagaggctgctggtggcggtgctgacctctcagaccacgctgcccacgctgggcgtggccgtgaaccgcacgctggggcaccggctggagcgtgtggtgttcctgacgggcgcacggggccgccgggccccacctggcatggcagtggtgacgctaggcgaggagcgacccattggacacctgcacctggcgctgcgccacctgctggagcagcacggcgacgactttgactggttcttcctggtgcctgacaccacctacaccgaggcgcacggcctggcacgcctaactggccacctcagcctggcctccgccgcccacctgtacctgggccggccccaggacttcatcggcggagagcccacccccggccgctactgccacggaggctttggggtgctgctgtcgcgcatgctgctgcaacaactgcgcccccacctggaaggctgccgcaacgacatcgtcagtgcgcgccctgacgagtggctgggtcgctgcattctcgatgccaccggggtgggctgcactggtgaccacgagggggtgcactatagccatctggagctgagccctggggagccagtgcaggagggggaccctcatttccgaagtgccctgacagcccaccctgtgcgtgaccctgtgcacatgtaccagctgcacaaagctttcgcccgagctgaactggaacgcacgtaccaggagatccaggagttacagtgggagatccagaataccagccatctggccgttgatggggaccaggcagctgcttggcccgtgggtattccagcaccatcccgcccggcctcccgctttgaggtgctgcgctgggactacttcacggagcagcacgctttctcctgcgccgatggctcaccccgctgcccactgcgtggggctgaccgggctgatgtggccgatgttctggggacagctctagaggagctgaaccgccgctaccacccggccttgcggctccagaagcagcagctggtgaatggctaccgacgctttgatccggcccggggtatggaatacacgctggacttgcagctggaggcactgaccccccagggaggccgccggcccctcactcgccgagtgcagctgctccggccgctgagccgcgtggagatcttgcctgtgccctatgtcactgaggcctcacgtctcactgtgctgctgcctctagctgcggctgagcgtgacctggcccctggcttcttggaggcctttgccactgcagcactggagcctggtgatgctgcggcagccctgaccctgctgctactgtatgagccgcgccaggcccagcgcgtggcccatgcagatgtcttcgcacctgtcaaggcccacgtggcagagctggagcggcgtttccccggtgcccgggtgccatggctcagtgtgcagacagccgcaccctcaccactgcgcctcatggatctactctccaagaagcacccgctggacacactgttcctgctggccgggccagacacggtgctcacgcctgacttcctgaaccgctgccgcatgcatgccatctccggctggcaggccttctttcccatgcatttccaagccttccacccagctgtggccccaccacaagggcctgggcccccagagctgggccgtgacactggccgctttgatcgccaggcagccagcgaggcctgcttctacaactccgactatgtggcagcccgtgggcgcctggcggcagcctcagaacaagaagaggagctgctggagagcctggatgtgtacgagctgttcctccacttctccagtctgcatgtgctgcgggcggtggagccggcgctgctgcagcgctaccgggcccagacgtgcagcgcgaggctcagtgaggacctgtaccaccgctgcctccagagcgtgcttgagggcctcggctcccgaacccagctggccatgctactctttgaacaggagcagggcaacagcacctgaccccaccctgt

SEQ ID NO: 215606 - DNA, 2328 bp, Artificial Sequence
  derived and/or modified sequence
atgagagccagcctgctgctgagcgtgctgagacccgccggccccgtggccgtgggcatcagcctgggcttcaccctgagcctgctgagcgtgacctgggtggaggagccctgcggccccggccccccccagcccggcgacagcgagctgccccccagaggcaacaccaacgccgccagaagacccaacagcgtgcagcccggcgccgagagagagaagcccggcgccggcgagggcgccggcgagaactgggagcccagagtgctgccctaccaccccgcccagcccggccaggccgccaagaaggccgtgagaaccagatacatcagcaccgagctgggcatcagacagagactgctggtggccgtgctgaccagccagaccaccctgcccaccctgggcgtggccgtgaacagaaccctgggccacagactggagagagtggtgttcctgaccggcgccagaggcagaagagccccccccggcatggccgtggtgaccctgggcgaggagagacccatcggccacctgcacctggccctgagacacctgctggagcagcacggcgacgacttcgactggttcttcctggtgcccgacaccacctacaccgaggcccacggcctggccagactgaccggccacctgagcctggccagcgccgcccacctgtacctgggcagaccccaggacttcatcggcggcgagcccacccccggcagatactgccacggcggcttcggcgtgctgctgagcagaatgctgctgcagcagctgagaccccacctggagggctgcagaaacgacatcgtgagcgccagacccgacgagtggctgggcagatgcatcctggacgccaccggcgtgggctgcaccggcgaccacgagggcgtgcactacagccacctggagctgagccccggcgagcccgtgcaggagggcgacccccacttcagaagcgccctgaccgcccaccccgtgagagaccccgtgcacatgtaccagctgcacaaggccttcgccagagccgagctggagagaacctaccaggagatccaggagctgcagtgggagatccagaacaccagccacctggccgtggacggcgaccaggccgccgcctggcccgtgggcatccccgcccccagcagacccgccagcagattcgaggtgctgagatgggactacttcaccgagcagcacgccttcagctgcgccgacggcagccccagatgccccctgagaggcgccgacagagccgacgtggccgacgtgctgggcaccgccctggaggagctgaacagaagataccaccccgccctgagactgcagaagcagcagctggtgaacggctacagaagattcgaccccgccagaggcatggagtacaccctggacctgcagctggaggccctgaccccccagggcggcagaagacccctgaccagaagagtgcagctgctgagacccctgagcagagtggagatcctgcccgtgccctacgtgaccgaggccagcagactgaccgtgctgctgcccctggccgccgccgagagagacctggcccccggcttcctggaggccttcgccaccgccgccctggagcccggcgacgccgccgccgccctgaccctgctgctgctgtacgagcccagacaggcccagagagtggcccacgccgacgtgttcgcccccgtgaaggcccacgtggccgagctggagagaagattccccggcgccagagtgccctggctgagcgtgcagaccgccgcccccagccccctgagactgatggacctgctgagcaagaagcaccccctggacaccctgttcctgctggccggccccgacaccgtgctgacccccgacttcctgaacagatgcagaatgcacgccatcagcggctggcaggccttcttccccatgcacttccaggccttccaccccgccgtggcccccccccagggccccggcccccccgagctgggcagagacaccggcagattcgacagacaggccgccagcgaggcctgcttctacaacagcgactacgtggccgccagaggcagactggccgccgccagcgagcaggaggaggagctgctggagagcctggacgtgtacgagctgttcctgcacttcagcagcctgcacgtgctgagagccgtggagcccgccctgctgcagagatacagagcccagacctgcagcgccagactgagcgaggacctgtaccacagatgcctgcagagcgtgctggagggcctgggcagcagaacccagctggccatgctgctgttcgagcaggagcagggcaacagcacctag

SEQ ID NO: 215607 - DNA, 1842 bp, Artificial Sequence
  derived and/or modified sequence
atggccgtggtgaccctgggcgaggagagacccatcggccacctgcacctggccctgagacacctgctggagcagcacggcgacgacttcgactggttcttcctggtgcccgacaccacctacaccgaggcccacggcctggccagactgaccggccacctgagcctggccagcgccgcccacctgtacctgggcagaccccaggacttcatcggcggcgagcccacccccggcagatactgccacggcggcttcggcgtgctgctgagcagaatgctgctgcagcagctgagaccccacctggagggctgcagaaacgacatcgtgagcgccagacccgacgagtggctgggcagatgcatcctggacgccaccggcgtgggctgcaccggcgaccacgagggcgtgcactacagccacctggagctgagccccggcgagcccgtgcaggagggcgacccccacttcagaagcgccctgaccgcccaccccgtgagagaccccgtgcacatgtaccagctgcacaaggccttcgccagagccgagctggagagaacctaccaggagatccaggagctgcagtgggagatccagaacaccagccacctggccgtggacggcgaccaggccgccgcctggcccgtgggcatccccgcccccagcagacccgccagcagattcgaggtgctgagatgggactacttcaccgagcagcacgccttcagctgcgccgacggcagccccagatgccccctgagaggcgccgacagagccgacgtggccgacgtgctgggcaccgccctggaggagctgaacagaagataccaccccgccctgagactgcagaagcagcagctggtgaacggctacagaagattcgaccccgccagaggcatggagtacaccctggacctgcagctggaggccctgaccccccagggcggcagaagacccctgaccagaagagtgcagctgctgagacccctgagcagagtggagatcctgcccgtgccctacgtgaccgaggccagcagactgaccgtgctgctgcccctggccgccgccgagagagacctggcccccggcttcctggaggccttcgccaccgccgccctggagcccggcgacgccgccgccgccctgaccctgctgctgctgtacgagcccagacaggcccagagagtggcccacgccgacgtgttcgcccccgtgaaggcccacgtggccgagctggagagaagattccccggcgccagagtgccctggctgagcgtgcagaccgccgcccccagccccctgagactgatggacctgctgagcaagaagcaccccctggacaccctgttcctgctggccggccccgacaccgtgctgacccccgacttcctgaacagatgcagaatgcacgccatcagcggctggcaggccttcttccccatgcacttccaggccttccaccccgccgtggcccccccccagggccccggcccccccgagctgggcagagacaccggcagattcgacagacaggccgccagcgaggcctgcttctacaacagcgactacgtggccgccagaggcagactggccgccgccagcgagcaggaggaggagctgctggagagcctggacgtgtacgagctgttcctgcacttcagcagcctgcacgtgctgagagccgtggagcccgccctgctgcagagatacagagcccagacctgcagcgccagactgagcgaggacctgtaccacagatgcctgcagagcgtgctggagggcctgggcagcagaacccagctggccatgctgctgttcgagcaggagcagggcaacagcacctag

SEQ ID NO: 215608 - protein, 402 aa, Artificial Sequence
  derived and/or modified sequence
MNQENRSSFFWLLVIFTFLLKITASFSMSAYVTVTYYNETSNYTAIETCECGVYGLASPVANAMGVVGIPKNNNYQACDHNTEFSNTKKPWIALIERGNCTFSEKIQTAGRRNADAVVIYNAPETGNQTIQMANFGAVDIVAIMIGNLKGTKILQSIQRGIQVTMVIEVGKKHGPWVNHYSIFFVSVSFFIITAATVGYFIFYSARRLRNARAQSRKQRQLKADAKKAIGRLQLRTLKQGDKEIGPDGDSCAVCIELYKPNDLVRILTCNHIFHKTCVDPWLLEHRTCPMCKCDILKALGIEVDVEDGSVSLQVPVSNEISNSASSHEEDNRSETASSGYASVQGTDEPPLEEHVQSTNESLQLVNHEANSVAVDVIPHVDNPTFEEDETPNQETAVREIKS

SEQ ID NO: 215609 - protein, 249 aa, Artificial Sequence
  derived and/or modified sequence
MSAYVTVTYYNETSNYTAIETCECGVYGLASPVANAMGVVGIPKNNNYQACDHNTEFSNTKKPWIALIERGNCTFSEKIQTAGRRNADAVVIYNAPETGNQTIQMANFGAVDIVAIMIGNLKGTKILQSIQRGIQVTMVIEVGKKHGPWVNHYSIFFVSVSFFIITAATVGYFIFYSARRLRNARAQSRKQRQLKADAKKAIGRLQLRTLKQGDKEIGPDGDSCAVCIELYKPNDLVRILTCNHIFHKT

SEQ ID NO: 215610 - DNA, 1209 bp, Artificial Sequence
  derived and/or modified sequence
atgaaccaggagaatcggtcctcctttttctggcttctggtgatctttacttttctgctgaagatcaccgcaagttttagcatgtccgcttacgtgacggtgacctactacaatgagacctctaattacactgctatcgagacttgcgagtgtggcgtttacggactcgcctcgccagtggccaatgcgatgggcgttgtgggtatccctaagaacaataactaccaagcatgcgaccataataccgaattttctaatactaaaaagccgtggatcgcacttatagaacgcggtaattgtacatttagtgaaaagatccagactgctggacgtcggaacgcggacgcggtggttatctataacgcccctgagaccggtaatcagactatccaaatggcaaatttcggtgccgtggacattgtggccatcatgatcggcaacctgaagggcaccaagatcctgcagtcaatccagcgcgggatacaggtaacaatggtgatcgaagtcggaaagaagcatgggccctgggtgaatcattattcaatcttcttcgtgagtgtgtccttcttcatcattacagccgccacagttggttactttatattctattcagcaaggagactccgcaacgctagggcacagagccgcaagcaacgccaactcaaggcagacgccaaaaaggcaattggacggctgcagcttaggacactgaagcagggggacaaggaaattggtcctgacggtgactcttgcgctgtttgtatagagctgtacaagccgaacgacctagtgaggatcttaacatgtaaccatatttttcacaaaacctgtgtggatccttggctgctcgagcacaggacctgtcccatgtgcaaatgcgacattctcaaggctctgggcattgaggtggacgtagaggacggcagcgtgagtcttcaggtgcctgtttcaaatgaaatctccaattctgcttctagtcacgaagaagataataggagcgaaaccgcgtccagtggttatgcttccgttcaggggacagatgaacctcctttggaggaacatgttcagtccactaacgagtcgctgcagctggtgaatcatgaggcaaattcagtagccgtagacgttattccacacgttgacaaccctacatttgaggaagacgaaacaccaaatcaggagactgccgttagggaaataaagagttag

SEQ ID NO: 215611 - DNA, 750 bp, Artificial Sequence
  derived and/or modified sequence
atgagcgcatatgtgacggtcacgtactacaatgaaacgtccaattataccgctatcgaaacctgcgaatgcggcgtctatggcctcgccagccccgtcgccaacgccatgggagttgttggtattcccaagaataacaattaccaagcttgcgatcataacacggaatttagcaatacaaagaagccttggatcgcactgatagaacgaggcaactgcacttttagtgagaaaattcaaacagctggtcggcgtaatgcagacgcagttgtcatatacaacgcccctgaaaccggcaatcagaccatccagatggccaactttggcgcagtggacatcgttgccattatgatcggtaatctaaaaggtacgaagattctgcagtcaattcagcgcggtatccaggtgactatggtcatcgaggtgggcaaaaagcacgggccctgggtcaaccattactcaattttttttgttagtgtgagcttcttcatcattacagcggctaccgtggggtatttcatcttctatagcgcgcgacggttgcggaatgccagagcccagagccgcaaacaacggcagctgaaagcagatgctaaaaaagccatcggcaggcttcaactccgcaccctgaaacagggcgataaggagatcggacccgacggggacagttgtgctgtttgtatcgaactctataaacctaacgatctggtgaggatactcacctgtaaccatatcttccacaagacatag

SEQ ID NO: 215612 - DNA, 1209 bp, Artificial Sequence
  derived and/or modified sequence
atgaaccaggagaacagaagcagcttcttctggctgctggtgatcttcaccttcctgctgaagatcacagccagcttctccatgtctgcctacgtgacagtgacctactacaatgagaccagcaactacacagccatcgagacctgtgaatgtggggtgtatggcctggccagccctgtggccaatgccatgggcgtggtgggcatccccaagaacaacaactaccaggcctgtgaccacaacacagagttcagcaacaccaagaagccctggatcgccctgattgagcggggcaactgcaccttcagcgagaagatccagacagctggaagaagaaatgctgatgctgtggtgatctacaatgcccctgagactggaaaccagaccatccagatggccaactttggagctgtggacatcgtggccatcatgattggcaacctgaagggcaccaagatcctgcagagcatccagaggggcatccaggtgaccatggtgattgaggtgggcaagaagcacggcccctgggtgaaccactacagcatcttctttgtgtctgtgtccttcttcatcatcacagctgccaccgtgggctacttcatcttctacagcgcccggcggctgagaaatgcccgggcccagagcaggaagcagaggcagctgaaggcagatgccaagaaggccatcggccgcctgcagctgcggaccctgaagcagggcgacaaggagatcggcccagatggagacagctgtgctgtgtgcatcgagctgtacaagcccaatgacctggtgcgcatcctgacctgcaaccacatcttccacaagacctgtgtggacccctggctgctggagcacaggacctgccccatgtgcaagtgtgacatcctgaaggccctgggcatcgaggtggatgtggaggatggctctgtgtccctgcaggtgcctgtgtccaatgagatcagcaacagcgccagcagccatgaggaggacaacagaagtgaaacagccagcagcggctacgcctctgtgcagggcacagatgagccccccctggaggagcacgtgcagagcaccaatgaaagcctgcagctggtgaaccacgaggccaacagcgtggccgtggatgtgatcccccacgtggacaaccccacctttgaagaagatgagacccccaaccaggagacagctgtgcgggagatcaagagctag

SEQ ID NO: 215613 - DNA, 750 bp, Artificial Sequence
  derived and/or modified sequence
atgtctgcctacgtgacagtgacctactacaatgagaccagcaactacacagccatcgagacctgtgaatgtggggtgtatggcctggccagccctgtggccaatgccatgggcgtggtgggcatccccaagaacaacaactaccaggcctgtgaccacaacacagagttcagcaacaccaagaagccctggatcgccctgattgaaagaggcaactgcaccttcagcgagaagatccagacagctggaagaagaaatgctgatgctgtggtgatctacaatgcccctgagaccggcaaccagaccatccagatggccaactttggagctgtggacatcgtggccatcatgattggcaacctgaagggcaccaagatcctgcagagcatccagaggggcatccaggtgaccatggtgattgaggtgggcaagaagcacggcccctgggtgaaccactacagcatcttctttgtgtctgtgtccttcttcatcatcacagctgccaccgtgggctacttcatcttctacagcgcccggcggctgagaaatgcccgggcccagagcaggaagcagaggcagctgaaggcagatgccaagaaggccatcggccgcctgcagctgcggaccctgaagcagggcgacaaggagattggaccagatggagacagctgtgctgtgtgcatcgagctgtacaagcccaatgacctggtgcgcatcctgacctgcaaccacatcttccacaagacctag
